United States Patent Application Publication US 2026/0055430 A1 - sequence listing, part 3

SEQ ID NO: 5091 - protein, 512 aa, Unknown
  Description of Unknown: Integrase B5092 sequence
  PTHR30461:SF3,cd00338,SM00857,G3DSA:1.10.10.2600,IPR036162, PF13408,PS51737,G3DSA:3.40.50.1390,IPR025827,IPR006119, IPR038109,PF07508,IPR011109,SSF53041,PTHR30461, PS51736,Coil,PF00239
MYEEIKTACLYLRYSSSNQTEQSIEGQMHVCQDFCKRHNIRIVEMYIDRATSASKDIEKRVQFLKMIKDSEKGNFDAVIVYKLDRFARSRYDSANYKYRLKRNGVQLISATENISNDPEGIILESVLEGMAEFYSAELSQKINRGMRESAMKHNSIGGAIPLGYKTVDKKLVIDETTAPIVREAFQMYADGESVAEICRTFNNRGYKTSKGTRFGKSSFTKIFRNEKYIGVYKYHDYRAEDVIPPIIDKDLWDRVQVRIGKIKKAPARNKARHTYLLTGKLFCGHCGSAMNADGNSQGYLYYRCYGKKNLDKQCNKRNMEKNLIERLVAQDAMSFLTDEYIEKIATIACDRNKQEIESDSPIPVIRDRIRQVDVSLNNLLKAIETGSAPDMLVKRMGELETEKKDMEVQLKKEMAHQVYIDKEQVIFWLEKFREGDINDEEFCQTVIDLFVNSVTVWDEPDDKFRITIAYNLTSIPQKTYRLSKDGRLSDYASNTPDRESKYYLIIILNVCI

SEQ ID NO: 5092 - protein, 512 aa, Unknown
  Description of Unknown: Integrase B5093 sequence
  PTHR30461:SF3,IPR036162,PS51737,IPR011109,PTHR30461, PF00239,G3DSA:1.10.10.2600,IPR006119,SSF53041,cd00338, SM00857,IPR025827,IPR038109,PS51736,mobidb-lite, PF13408,G3DSA:3.40.50.1390,PF07508,Coil
MNTVIYARYSAGPRQTDQSIEGQLRVCTDFCKQRGLTVIDTYCDRHISGRTDERPEFQRLIADAKRKKFEAVVVYKTDRFARNKYDSAVYKRELKRNGIQIFYAAEAIPDGPEGIILESLMEGLAEYYSAELAQKIKRGMHESALKCQSTGSGRPLGYRVDEQKRFQIDPESAQTVQTIFEQYIKGESNAAICELLNSRGLRTAQGKPFNKNSINRIIKNRKYIGEYRYHDIVVEGGMPAIISKDTFNLAQAEMERRRTRKAPKSPKAEYLLAGRLFCGHCKGPMQGVSGTGKSGNKWYYYYCGNTRGKNKTCDKKQVSRDRLERAVVDFTVRYILQEEVLEELARKVHAAQERQNDTASEIAFYEKKLADNKKSIANVLRAIESGAATQTLPARLQELENEQAVILGELSFLKGKRLAFTEDQILFALMKHLEPYPGESEQDYRRRIISDFVSEVYLYDDRLLIYFNISSEDGKLKSADLSNIEGGEFDEELVSSTTMESNSGSPPTRGRE

SEQ ID NO: 5093 - protein, 512 aa, Unknown
  Description of Unknown: Integrase B5094 sequence
  PTHR30461:SF3,SM00857,G3DSA:1.10.10.2600,IPR036162,PF13408, IPR025827,PS51737,G3DSA:3.40.50.1390,IPR006119,IPR038109, PF07508,IPR011109,SSF53041,PTHR30461,Coil, PS51736,cd00338,PF00239
MRNAVIYARYSSDRQREESIEGQIRVCEDFARRNDMRILKIYTDRALTGRTDKRPEFQLMIKEAASRAFEVVIVYKLNRFARNRYDSASYKHKLKKYGVKVVSAMENIADDPSGILLESVIEGMAEYYSAELSENVIRGQTENILEGKWAGGTVPLGYKLDAEKHLVLDEEKVPIVKLVFSMTLDGIGTTTIARELNRRGYRNARGKPFRMSNIYVILKNKHYLGKFSWRGIESPHAVPAIVSESDFNEVQKIMNARRVNRVKASERYMLSGKLFCGECGERMVGTSGTSRNGEIYYYYACPNHQRKNTRTCEKTQIRADIIDSTVCDATTRILESDAAVEAIARQAVEVQTHTDVNAAIAATKKRMADVKKKIDNCVKAVESGIISDAIAKTLHDNEETLRDLECELAKQEIARKSSELTVDKIRFFFKSICRDAKKADKYRRILLSTLVRMVIVRGDTLEIRYNYANEYPALQNPVKAECSYNNRLVVSCDESTNTIYLTPSYFYILARL

SEQ ID NO: 5094 - protein, 512 aa, Unknown
  Description of Unknown: Integrase B5095 sequence
  PTHR30461:SF3,SM00857,G3DSA:1.10.10.2600,IPR036162,PS51737, G3DSA:3.40.50.1390,IPR006119,IPR038109,PF07508,IPR011109, SSF53041,PTHR30461,Coil,PS51736,cd00338, PF00239
MEIQLKRAGSYVRVSTYQESQEKSITDQVRMLNEIIDKDETLVNVGTYIDQGVTGKYQTKRKQFLALIKDCMEGKIDVVYCKQMSRFGRNALETMQAIEKLRSVGVAVRFVLDDIDTIVDKDCSRLAMLASIAEDERDNLQDTMTWSFHRRLEQGHYIFRPDMLYGYGLDENKNMVVIPEEAVAVQYIFEEYAKGTMVKKICEWLNEHGYKTRKGMPFNKSSISDITTNEKYYGDMIIGKWRTEGPKRVKNNGESEMYLFENHHEPIISRELFEKCAEVRRTRSEHSKPVQNYDRADPFRRKVFCGQCGSLFICQGRTNCTHDFAKLAFVCGKATRSSRRECRNKLQRIGTLEDSFMAVFNYLLENRSVLSDIVTDNEEFNEVTARLDELRESEKKYFELEVKGLMNEQMTKNHTRLVGEMLQLEEKRKAFLTRNYEISTCNQNLKKFQKILKTAKPMTTMDAEMCDLFVKRILVMDRNNLIFELTSGHKVKVEVLDFYKTRDEIRRVYVTE

SEQ ID NO: 5095 - protein, 512 aa, Unknown
  Description of Unknown: Integrase B5096 sequence
  PTHR30461:SF3,cd00338,SM00857,G3DSA:1.10.10.2600,IPR036162, PF13408,PS51737,G3DSA:3.40.50.1390,IPR025827,IPR006119, IPR038109,PF07508,SSF53041,IPR011109,PTHR30461, Coil,PF00239
MYEEIKTACLYLRYSSSNQTEQSIEGQMHVCQDFCKRHNIRIVEMYIDRATSASKDIEKRVEFLKMIKDSEKGNFNAVIVYKLDRFARSRYDSATYKYRLKRNGVQLISATENITQDPEGIILESVLEGMAEFYSAELSQKINRGMRESAMKHNSIGGAIPLGYKTVDKKLVIDETTAPIVREAFQMYADGESVAEICRTFNNRGYKTSKGTRFGKSSFTKIFRNEKYIGVYKYHDYRAEDVIPPIIDKDLWDRVQVRVGKIKKAPARNKARHTYLLTGKLFCGHCGSAMNADGNSQGYLYYRCYGKKNLDKQCNKRNMEKNLIERLVAQDAMSFLTDEYIEKIATIACDRNRQEIESDSPIPVIRDRIRQVDVSLNNLLKAIETGSAPDMLVKRMGELETEKKDMEVQLKKEMAHQVYIDKEQVIFWLEKFREGDINDEEFCQTVIDLFVNSVTVWDEPDDKFKITIAYNLTSIPQKTYRLSKDGRLSDYASNTPDRESKYDLIIILNMCI

SEQ ID NO: 5096 - protein, 512 aa, Unknown
  Description of Unknown: Integrase B5097 sequence
  PTHR30461:SF3,SM00857,G3DSA:1.10.10.2600,IPR036162,PF13408, PS51737,G3DSA:3.40.50.1390,IPR025827,IPR006119,IPR038109, PF07508,IPR011109,SSF53041,PTHR30461,Coil, PS51736,cd00338,PF00239
MERAVIYARYSSDQQREESIDAQVRACREYCQRKGYLVTKIYADEAKSGKSIAKREQYKKMLSDSQKNLFDVVVFHKIDRNSRNELDYYLTKNQLISSGIKYEYAAQNIDTSPAGQMVEGILVAVAANYSRNLAEETKKGLKENALKALFNGGRPPLGFEINQENKYIINDYEAGAIRIIFDLYLKGKGYHYIISQLNSLGYKTREGRKFGKNSLYDILRNPKYCGTYTFNKVNKDPSGKRNSHKISENTIIVEDAIPAIISKEDFRKVQEKMNQNRYRSAAYKSKETYLLTGKVFCGICGAAMNGHRASSNGKKYVYYTCSGRDRLGTSACQNKVVPRDDLEELVLLTIEQELLSENSLKKLKDTIKMEYQAVANEYADEASSLSEQKAIAERKLNNLYTVIEQGTADEYDLERLAAVKQELSQIKEKLAKCAGANSIATINPAHIEKVLKVCRKMLFKNITNESLRMLFDDLVNKITIDAKKITLQLKLECSGTYGAEGRTRTGTWGNHA

SEQ ID NO: 5097 - protein, 512 aa, Unknown
  Description of Unknown: Integrase B5098 sequence
  PTHR30461:SF3,SM00857,G3DSA:1.10.10.2600,IPR036162,PF13408, PS51737,G3DSA:3.40.50.1390,IPR025827,IPR006119,IPR038109, PF07508,IPR011109,SSF53041,PF00239,PTHR30461, PS51736,Coil,cd00338
MPTVTVIQPTITEEQNIKIRCAAYCRVSSDSNDQLNSFMAQTRYYSQVFENSETEELIDIYADEGITGTREDKRDEFQRMLKDCRRGKIDRIYTKSISRFSRNTRDCLKSVRELKSLGITIFFEKENIDTANLTDEMMITIMGGLAQEESTSISQNMRWSIKKRMQNGTYRNSCPPFGYTVQNDTLVVNEEQAKIVKQIFNWYNEGYGLQAIADTLNSMAVPSSQTAERWHASSVKYVLSNERYIGDALFQKKYRTETLPTMQKRNRGEKPKYYVQSVNTPIIDKDIFYSVQELLNKRHREYINNNHFLSKRILCSKCGATYKCVSSKNSVFWTCRTHNNKASDCSNGRIADIKIYAAFVRLCNKLLYNYKTVLIPLQTALQDLKLRKFSGKTQVMDIHKEIAKLREQTHVLARLKTKGFLDEAKYIEQTTELTAKINKLQTDLKKLTRSDDEDETLNQIEMLIDFFEMRDKPITKFEESAFESIVERIVVINQHELEFHLIGGLKFKEKIK

SEQ ID NO: 5098 - protein, 512 aa, Unknown
  Description of Unknown: Integrase B5099 sequence
  PTHR30461:SF3,SM00857,G3DSA:1.10.10.2600,IPR036162,PF13408, PS51737,IPR025827,G3DSA:3.40.50.1390,IPR006119,IPR038109, PF07508,SSF53041,IPR011109,PTHR30461,Coil, PS51736,cd00338,PF00239
MPEALNAVIYARYSSDRQTEQSIEGQLRECYAFAKANDIAVIDTYIDRAISGKTDNRPAFQKMIEDSAKRQFQAVIVYRLDRFTRNRYDSAIYKARLKKNGVKVLSAMENLNGSPESIIMESLLEGMAEYYSVELSQKITRGMRENALKGKALGGQRVLGYKVNSDCYFEIDETTAPVVVDIFKLYSSGKTVKEICDILNARGVKTARGGAFNKNSLHTILTNKKYIGIYKTKYGEIVGGIPAIIDKELFEMVALRMEQNKKAPARAKAEINYLLSTKLFCGKCRSAMVGESGTSKTGKKYYYYACVKKKREKACDKSNVKKDWIEDLVIQRTVTDILKDDVIDKIADRLVELQKAEAAESGTMLYLENSLAEIQVSIKNIMTAIEKGIITESTKTRLTELEDEKRNVEIEIAKESIARRIISREQIIYWISSFKDGNITSEKYRQQLIDTFVHAVFVYDDKIVITYNYSGENNTATISDLDLSSPPNSANPNTLFFVKHCFGFVMNIEEVG

SEQ ID NO: 5099 - protein, 512 aa, Unknown
  Description of Unknown: Integrase B5100 sequence
  cd00338,SM00857,G3DSA:1.10.10.2600,IPR036162,PF13408, PS51737,G3DSA:3.40.50.1390,IPR025827,IPR006119,IPR038109, PF07508,IPR011109,SSF53041,PTHR30461,cd17155, PS51736,Coil,PF00239
MQTEYALYLRKSRADLEAEAHGEGDTLARHEHILMELAKSRALPIGAIYREIVSGERIANRPVMQQLLSEVEDGRWKGVLVTETSRLARGDTIDQGIVAQAFKFSGTLIVTPSKTYDPTQEADEEWMEFGLFMSRQEYRMIRRRMTAGMNAAKREGRFIGNVAPYGYERFKLDGRGWSLRIVPEQAEIVRMIFDLYNSGLGYCRIEKRLNELHIPAPKGEKWTSATIPGIIQNPHYIGMIPAGRRPGRKVVKDGEVKLIRPRQKCELYPGMHEPIISRETWDKAQARIGKNREARVPAGRRQSNPLAGLLVCDCCGKNMQRRPQTGSSQTQILCPTRGCSTVAHNADELEDMVIDSLRVFLAKLEAGKPAKTDVSAEYAALEECTKKLKDLEARQRRTFELVEDGTYTREIFLARQAELTAERVKIEQQKAELEEAITKKKQEAEAQNNLAPAARQVLEAYKKELSAEDRNRLLKKVIDHIDYHKRKRTRWNPESDLSITLHPVVTSSSPHR

SEQ ID NO: 5100 - protein, 511 aa, Unknown
  Description of Unknown: Integrase B5101 sequence
  SM00857,G3DSA:1.10.10.2600,IPR036162,PS51737,G3DSA:3.40.50.1390, IPR006119,IPR038109,PF07508,IPR011109,SSF53041, PTHR30461,Coil,PS51736,cd00338,PF00239
MPYAIHLRKSRADLEAEARGEGESLARHRARLLAFAERAGLPIVAEYSEIISGDRLSDRPEMQRLLADVAAGMYDGVLTVEVSRLTRGDLMDQGRIMNTFKYSGTKIITPEHTYDLSEDWDEDVLQSDLMMARREYKYIKKRMQRGRQASASEGLWQGRVPYGYRKIKVRPGKGYTLEPDPEQAPIVQMIFDMYAREKIGCATIAQRLNALGLRTNTDHLWTNSSVMCISKNPVYAGYVTWGKRTSVTRMNADGTLSTSRVANAASILAPGKHPALIDQATFDVAQNVRASHDLTRCHASVPVRNPLAGLVYCAVCGKAMVRKDNGNARGSRYDMLKCPTPGCLTTATALSLVEKTILSMLDDFVLTAASSPATPAPDHRVAQLSGAQATIDRLQQQRERIYAAYEEGVYDSAAFVARRAEKDREIRAAEEALHALQTATEPTDDEVMLANLPLILNVLEVYDTTADPLERNKLLKSIFSRIEYKKIRRCFRNENPAAALSLRLYPRRHIK

SEQ ID NO: 5101 - protein, 511 aa, Unknown
  Description of Unknown: Integrase B5102 sequence
  cd00338,SM00857,IPR036162,PF13408, IPR025827,G3DSA:3.40.50.1390,IPR006119,SSF53041, PTHR30461,PS51736,Coil,PF00239
MAKRAKRSAPKKGARAAIYARYSSHNQRGESIEIQLDNDYAYCHEHELEVVKVYIDEAKTGRDTNRADFQQMLEDAKRHLMDYVVIYKVPRIMRNRDEMAFARIMLRKCGVEILYAGEQIAEGSSGVLQLGMLEVLAEWESAVDSERITEGIAKNAERCMANGQRLYGWDIVDGFYALNEQQATVMRMMKDMLLSGSMIADIRRACEPYRTQFGNKFTQSAITKMLKRKQNAGIYVYAGYEIPGGMPALWSLEEQQMIWKILEKNARPRKRENTENYALTGKLFCGKCKTPMIGTSGTSKAGARYYYYRCKKCRRNVRKDIIEANVADDVIAALSDEATREKIADMVAEIEQDTGAKPQSEIIRSELHDIELSFDRIWQAIEGGYAPPGGKERVKELTKRKELLEDELRVAVSIESVTVDRNRILFWLEDIAQEEDPETLIEVFVSKVVLVGDDDLHIAFTFEGGDDDIGQIVDDSGGVRVNGPELLHEMDRAGSRFRLYYPRAEQTHLSA

SEQ ID NO: 5102 - protein, 511 aa, Unknown
  Description of Unknown: Integrase B5103 sequence
  PTHR30461:SF3,cd00338,SM00857,G3DSA:1.10.10.2600,IPR036162, PF13408,IPR025827,PS51737,G3DSA:3.40.50.1390,IPR006119, IPR038109,PF07508,IPR011109,SSF53041,PTHR30461, PS51736,Coil,PF00239
MYEDIKTACLYVRFSSHNQTEQSIEGQTRVCRDFCKRHNIRIVEIYADRATSASKDIEKRVQFLKMIKDSEKGLFDAVIVYKLDRFARSRYDSATYKYRLKRNGVQLISATENISNDPEGIILESVLEGMAEFYSAELSQKINRGMRESAYKHNSIGGAIPLGYKIEDKKLVIDPKTAPIVKEAFEKYADGETVAEICRQFNARGYKTSKGTAFGKSSFTKIFRNERYIGVYTFHDYRAEDAIPAIIDKDLWDRVQLRVGKIKNAPARNKAKVVYLLSGKIFCGHCGSKMNGNCNAGNYCYYQCYGKKNGNVDCKKKNIRKEFIERLVAQDALSLLTDEYIEQIATIACEKNQHEIELDSALPTIRDRIHQVDLSLNNLLKAIESGSAPDMLVKRMGELEKEKKDLQAQAKKESEDIIELDKAQAIYWLEQFRGGSIEDEEFCRMLIDLFVNSVTVWDEDDNTYKVTVAYNLTSLPTKTYRLNKGGTLSDFASNAPPKLSVRFRTSYESQG

SEQ ID NO: 5103 - protein, 511 aa, Unknown
  Description of Unknown: Integrase B5104 sequence
  PTHR30461:SF3,SM00857,G3DSA:1.10.10.2600,IPR036162,PF13408, IPR025827,G3DSA:3.40.50.1390,PS51737,IPR006119,IPR038109, PF07508,SSF53041,IPR011109,PF00239,PTHR30461, PS51736,Coil,cd00338
MRAVLYARYSSDNQRYESISGQFHCSEEYCKRKGYNIVHYYYDEAKSGTTIAGREQFNQMIADAARDIFDVIVFYQIDRTARNEMDYYASVNKLLALGIRYEYSAEGIDVSTPNGKLTEGVKVAVAAFFSRDLSIKIKRGKKENTLQKKHNGGIAPLGYDIAADGTYIINDYEAVAVKKIFAMKLDGQGYGKIVDWLKANGYKTKRGGYYSKGSIHDILCNRKYIGVLEMGKTSKHNSKEKVDDYMEIKDAIPKIIDTKDFAAVQDILAARRNGKANAKEVYALSGRIFCQCGAAMTGHRIGAKGNKYSYYVCGTQRYKHGDCDIPMIRKDKIEFITYLTIVDYIKVNKKSIIAEFMCQAESNEDKVRENELRKRINAQKNKAKKLLALYDGSDDLILDAYKDAKRTLDMMEAELASMVQRDTNNINPEVLEVFIDSMLMEAGYSDAFLKDFFTSLNVKVTVNKINAEIQLNLSVFPFVVALKLYIDVGKLYNYRSTASRKLYTKARKCVG

SEQ ID NO: 5104 - protein, 511 aa, Unknown
  Description of Unknown: Integrase B5105 sequence
  PTHR30461:SF3,SM00857,G3DSA:1.10.10.2600,IPR036162,PF13408, IPR025827,G3DSA:3.40.50.1390,PS51737,IPR006119,IPR038109, PF07508,IPR011109,SSF53041,PTHR30461,PS51736, cd00338,PF00239
MNTVIYARYSAGPRQTDQSIDGQLRVCTEFCKQRGLTVIDTYCDRHISGRTDERPEFQRLIADAKAHKFEAVVVYKTDRFARNKYDSAIYKRELRRNGIQIFYAAEAIPEGPEGIILESLMEGLAEYYSAELAQKIKRGLNESALKCQSLGSGRPLGYTVDEQKHFQIDPESSQAVKTIFEMYIKGESNAAICDYLNARGLRTSQGNLFNKNSINRIIKNRKYIGEYRYNDIVVEGGMPAIISKETFCLAQAEMERRRTHRAPVSPKAEYLLAGKLFCGHCKGPMQGVSGTGKSGNKWYYYYCANTRGKERTCDKKQVSRDRLEKAVVDFTVRYILQEDVLEELSKKVYAAQERQNNTASEIAFYEKKLAENKKAIANILRAIESGAMTQALPARLQELENEQTVIQGELSYLKGARLAFTEDQILFALLQHLDPRPGESEQDYHRRIITDFVSEVYLYDDRMLIYFNISSADGKLKHADLSAIESGVFDAGLTSSTNLPHRFVRCGVFYA

SEQ ID NO: 5105 - protein, 511 aa, Unknown
  Description of Unknown: Integrase B5106 sequence
  PTHR30461:SF3,SM00857,G3DSA:1.10.10.2600,IPR036162,PF13408, IPR025827,PS51737,G3DSA:3.40.50.1390,IPR006119,IPR038109, PF07508,IPR011109,SSF53041,PF00239,PTHR30461, PS51736,Coil,cd00338
MQQAVIYARYSPGPNQTEQSIEGQVRECTKYAELHDLRIVGTYIDRKISGKTDNRREFQRMIDDSEKHIFDVIILYHTDRFARNRYDSAIYKHKLKENGVELRYATTDIPKGPEGIILESIMEGWAEYYSAELSRKIKRGMRESALKCHSTGAGRCLGYRTAEDKSLVIEPEGAKAVQTVFDMYIKGKSHADICRYLNDCGFRTAQGKLFNKNSVTHIIRNKRYIGVYTYDDITIEDGIPAIISKDTFHLAQLEAARRKTAKRPKEPKAEYLLSGKAFCGHCQKPLVGVSGTGKSGNKWYYYYCQESRAKRGCTKKPVKRDWLEREVVKRTVAEVLQPEVIQHIAKKCYDLQMEYRQDNSDVLFYELKLKDVRKAIKNTMHAIESGVKTKTLPARLQELENEEEALEAELAIAKASDFVITADQIEFLLTQFAEPWECESEEEYHRRIIKCFVHKVFLFDDKLLIYYNVSRDGKTREQSEAELLEEALGEGFDKRSSGSTIKVSRLVPLLL

SEQ ID NO: 5106 - protein, 511 aa, Unknown
  Description of Unknown: Integrase B5107 sequence
  PTHR30461:SF3,cd00338,SM00857,G3DSA:1.10.10.2600,IPR036162, PF13408,PS51737,G3DSA:3.40.50.1390,IPR025827,IPR006119, IPR038109,PF07508,SSF53041,IPR011109,PTHR30461, PS51736,Coil,PF00239
MHDTMHELRCCAYLRKSREDEEREKMGRGETLARHRRIIESLASENGHEISHWYTEVKSGETIAARTEIKNLLSDLADGKWDVVYAVEASRLGRGGGSDQEKIINAFRYTQTHLITEMKTYDPESRGDMRQLKSELRSSEDELDAISTRLVRGKYQAAKEGVWQSTGRTPYGWKAVRIKGLWQLEPDENHESMLRIYDLLESGENYSSIARILTEDGIPTPRGGDHWRHQTGKSIAENVANCGLVMYGKRHVVREFDRDTFGVVKTKRNNPEPIVSRGLHYGKGGISEERFERLTKKSVNNARLHKDKVLINPLSGLLRCGKCGYAMSMHRMSSGKSAALFYQHPRSKNMLGDCDGCRAARADQVITMLIDALEKIAEDVTIEASKPQSEVDQSRIKSIQAAIKKEKTARRKAMEAFEANIYTIEELRERKSKADAAIESLKKRLKDHEPKRVSADAPVKIRRCIDLLRDEGVSAQDKNDLLKSIIERIDYYNDTPPYVLPNRIRLDVHLR

SEQ ID NO: 5107 - protein, 511 aa, Unknown
  Description of Unknown: Integrase B5108 sequence
  PTHR30461:SF3,cd00338,SM00857,G3DSA:1.10.10.2600,IPR036162, PF13408,PS51737,G3DSA:3.40.50.1390,IPR025827,IPR006119, IPR038109,PF07508,IPR011109,SSF53041,PTHR30461, PS51736,Coil,PF00239
MHDTMLDLTCCAYLRKSREDEEREKMGRGETLARHRRIIESLASENGHEILHWYTEVKSGETIAARTEIKNLLSDLADGKWDVVYAVEASRLGRGGGSDQEKIINAFRYTQTHLITEMKTYDPESRGDMRQLKSELRSSEDELDAISTRLVRGKYQAAKEGVWQSTGRTPYGWKAVRIKGLWQLEPDENHESMLRIYDLLESGENYSSIARILTEDGIPTPRGGDHWRHQTVKSIAENVANCGLVMYGKRHVVREFDRDTFGVVKTKRNNPEPIVSRGLHYGKGGISEERFERLTKKSVNNARLHKDKVLINPLSGLLRCGKCGYAMSMHRMSSGKSAALFYQHPRSKNMLGDCDGCRAARADQVITMLIDALEKIAEDVTIEASKPQSEVDQSRIKSIQAAIKKEETARRKAMEAFEANIYTIEELRERKSKADAAIESLKKRLKDHEPKRVSADAPVKIRRCIDLLRDEGVSVQDKNDLLKSIIERIDYYNDTPPYVLPNRIRLDVHLR

SEQ ID NO: 5108 - protein, 511 aa, Unknown
  Description of Unknown: Integrase B5109 sequence
  PTHR30461:SF3,SM00857,G3DSA:1.10.10.2600,IPR036162,PF13408, IPR025827,G3DSA:3.40.50.1390,PS51737,IPR006119,IPR038109, PF07508,IPR011109,SSF53041,PTHR30461,Coil, PS51736,cd00338,PF00239
MPYAIHLRKSRADLEAEARGEGESLARHRARLLAFAERAGLPIVAEYSEIISGDRLSDRPEMQRLLADVSAGKYDGVLTVEVSRLTRGDLMDQGRIMNTFKYSGTKIITPEHTYDLSEDWDEDVLQSDLMMARREYKYIKRRMQRGRQASASEGLWQGRIPYGYQKVKVRPGKGYTLEPDPQQAPVVRMIFDMYVKDRVGCSTIAKHLNDLGLRTNLGKPWTDSSVMCISKNPVYAGYVTWGKRTSVTHMDDNGTLTTSRVANPAPILSKGKHPALVSQEVFDAAQRARSSNDLTRCHVSEPVRNPLAGLVYCSICGRAMVRKDNGNARGSRYDMLKCPTPGCPTTATALSIVESAVLSSLNQWASLAASAPSASPENHNSEKIAAAQASLERLRQQRERIYAAFEDGVYDSAAFIARRAEKDKEIALAEQSLESLKKDTVPTDEAVIRANLPLIRNVLSLYNLTTDPRDKNRLLKSVFSRIEYNKTRRCFRNENPANALTLSVYPRRYKK

SEQ ID NO: 5109 - protein, 511 aa, Unknown
  Description of Unknown: Integrase B5110 sequence
  SM00857,G3DSA:1.10.10.2600,IPR036162,PS51737,G3DSA:3.40.50.1390, IPR006119,IPR038109,PF07508,IPR011109,SSF53041, PTHR30461,Coil,PS51736,cd00338,PF00239
MPYAIHLRKSRADLEAEARGEGESLARHRARLLAFAERAGLPIVAEYSEIISGDRLSDRPEMQRLLADVAAGMYDGVLTVEVSRLTRGDLMDQGRIMNTFKYSGTKIITPEHTYDLSEDWDEDVLQSDLMMARREYKYIKKRMQRGRQASASEGLWQGRVPYGYRKIKIRPGKGYTLEPDPEQAPIVQMIFDMYAREKIGCATIAQRLNALGLRTNTDHLWTNSSVMCISKNPVYAGFVTWGKRTSVTRMNADGTLSTSRVANAASILAPGKHPALIDQATFDVAQNVRASHDLTRCHASVPVRNPLAGLVYCAVCGKAMVRKDNGNARGSRYDMLKCPTPGCLTTATALSLVEKTILSMLDDFVLTAASSPATPAPDHRVAQLSAAQATIDRLQQQRERIYAAYEEGVYDSAAFVARRAEKDREIRAAEEALHALQTATEPTDDEVMLANLPLILNVLEVYDTTADPLERNKLLKSIFSRIEYKKIRRCFRNENPAAALSLRLYPRRHIK

SEQ ID NO: 5110 - protein, 511 aa, Unknown
  Description of Unknown: Integrase B5111 sequence
  PTHR30461:SF3,SM00857,G3DSA:1.10.10.2600,IPR036162,PF13408, PS51737,IPR025827,G3DSA:3.40.50.1390,IPR006119,IPR038109, PF07508,IPR011109,SSF53041,PTHR30461, PS51736,cd00338,PF00239
MNVIEITAEKETVQETIRLAAYCRVSSDSEDQLHSFAAQIRYYKDYERRNPQYKLVDIYADEGITGTCMDKRDDLHRLIRDCKKGLIDRIIVKSVSRFARNTQELLSTIRFLKDIGVSVYFEEQGIDTDKLNSEMIITFPGMAAQQESEAISGNMRWSYKKRMESGEFNCCAPAYGFNLVDGSLVINEAEAAVVRRIFSMYLQGYGKQTIANKLNEEGVSRRHGVKTWYAFGIDYMLNNERYMGDALLQKKYTTDTLPFRRKENRGECPQYYVENANPTIVSRETYAAVQELQKSRQKNAGGEKAVYPLTGMLRCPDCGRTYRRQLVRGKAYWICSGKASGATTCSSRRMAEPDVYEAFNRMLFKLKEHHPMLLGTLIRDIETMQSKTSENHEKIAEIDKEIADLAARNLVIARLHTSGILNGSDYSAQSSEINNRISALRSERRKKLAEDEGDEQLDKLKELQGILDEYEPTAAFNEDLFNQIVETATVMSRSEIVFQLIGGLKLTESIA

SEQ ID NO: 5111 - protein, 511 aa, Unknown
  Description of Unknown: Integrase B5112 sequence
  PTHR30461:SF3,SM00857,G3DSA:1.10.10.2600,IPR036162,PF13408, PS51737,G3DSA:3.40.50.1390,IPR025827,IPR006119,IPR038109, PF07508,IPR011109,SSF53041,PTHR30461,PS51736, cd00338,PF00239
MNVIEITAEKKPAQDTIRLAAYCRVSSDSEDQLHSFAAQIRYYKDYERRHPQYRLVDIYADEGITGTCMDKRDDLHRLIRDCKKGLIDRIIVKSVSRFARNTQELLATIRFLKDIGVSVYFEEQGIDTDKLNSEMIVTFPGMAAQQESESISGNMRWSYKKRMESGDFNCCAPAYGFDLIDGNLVINETEAVVVRRIFSMYLQGYGKQAIANKLNEESVPRRHGTKLWYAFGIDYMLNNERYMGDALLQKKYTTDTLPFKKVKNRGERPKYYVENANPAIVSRETYTAVQELQKSRQKNMGGKKTSYPLTGMLRCPDCGRSYRRQIVRGRAYWLCSGRASGATICSSQRMAESDVHEAFNKMLFKLKKHHHAILGALIRDIEVMQSKTSENHEKIAEIDKEIADLAARNLVIVRLHTSGILNGSDYSAQSSEINNRISALRSERKKKLAEDEGDEQLDKLKELQSILDEYEPTEAFDEDLFHQIIEKAVVMSKSGIAFYLIGGLKLTEAIA

SEQ ID NO: 5112 - protein, 511 aa, Unknown
  Description of Unknown: Integrase B5113 sequence
  SM00857,G3DSA:1.10.10.2600,IPR036162,PF13408,IPR025827, G3DSA:3.40.50.1390,PS51737,IPR006119,IPR038109,PF07508, IPR011109,SSF53041,PTHR30461,PS51736,cd00338, PF00239
MNVIEITAEKKPAQETIRLAAYCRVSSDSEDQLHSFAAQIRYYKDYERRHPQYKLVDIYADEGITGTCMDKRDDLHRLIRDCKKGLIDRIIVKSVSRFARNTQELLATIRFLKDIGVSIYFEEQGIDTDKLNSEMIVTFPGMAAQQESESISGNMRWSYKKRMESGDFNCCAPAYGFDLVDGDLVINKTEAAVVRRVFSMYLQGYGKQAIANKLNEESVPRRHGTKLWYAFGIDYMLNNERYMGDALLQKKYTTDTLPFKKVKNRGERPKYYVENANPAIVSRETYSAVQELQKSRQKNVGGKKTSYPLTGMLRCPGCGRTYRRQLVRGKAYWMCSGRASGATICSSQRMSESDVYEAFNRMLFKLKEHHHAILGALIRDIEVMQSKTSENHEKIVEIDKEIADLAARNLVIVRLHTSGILNGSDYAAQSSEINNKISALRSERKRKLAEDEGNEQLDKLKELQGILDEYEPTKAFDEDLFHQIIEKAVVMSKSEIAFHLIGGLKLTETIA

SEQ ID NO: 5113 - protein, 511 aa, Unknown
  Description of Unknown: Integrase B5114 sequence
  PTHR30461:SF3,cd00338,SM00857,G3DSA:1.10.10.2600,IPR036162, PF13408,IPR025827,PS51737,G3DSA:3.40.50.1390,IPR006119, IPR038109,PF07508,IPR011109,SSF53041,PTHR30461, PS51736,Coil,PF00239
MSRAVIYARFSSHNQREESIEQQVAECRAFAAANGLTVIDVYADAAISGRSDRRPQFQRLRRDAGKKIFDTIIAYKSSRIARNMLNALNFEVEMTKNEVNVLYAKEEFGNTAAGRFALRTMMSVNQFYSENLGEDIKRTQADNAQSCKSNGPAPFGYQSGADGRFEIDEPRAQIVREIYTRVASGETIASISMDLNARGLKTRTGGKWGRSSYGAILGNERYLGIYIFDGVRTEGGMPPILDRQLYTEAMMAMKRKKISPSADYQLTGKLYCGKCGHAMTGVCGTGRAGTVYHYYACAGRKTGTGCDKEHVGRRQIEDAVAKALAERIMSDKIIDQIADEVMAFQRQHKDQPEIKMLEAEKAENAKAIKNILAAIEAGIFTESTKARLMELEAENTRITEQLAMLTTSQIDVTRDQVVGYLKSFRGGDIEDKKYRAQLFQTFLVKVFVFDDRLKVIFDPLGSGKNEVDVTLDDLGEIESEGDGVRLSSDLPHHIGLRRTPYIIFMVSLATK

SEQ ID NO: 5114 - protein, 511 aa, Unknown
  Description of Unknown: Integrase B5115 sequence
  cd00338,SM00857,G3DSA:1.10.10.2600,IPR036162,PF13408, PS51737,G3DSA:3.40.50.1390,IPR025827,IPR006119,IPR038109, PF07508,IPR011109,SSF53041,PTHR30461,PS51736, Coil,PF00239
MNAVIYARYSSDNQREESIEGQLRECQAFAESNDMIIVDTYIDRALSAKTDNRPDFQRMIKDSASGTFDIVIVWKLDRFARNRYDSAHYKSVLQKNGVKVVSATEKISQTSEGILLESLLEGMAEYYSAELAEKVTRGLTENALKCKYNGGTLPIGYTTDENQFYIIDSLTAPAVLEAFKHYAEGSTMQEITDELNLKGIRTKKNTPITLNTVTRMLHNRKYIGEYRYSSFVTPNGIPAIVPEDLFERVQDMMKANKKAPAKHKAEDEYILTTKLFCGKCKCLMAGESGTSHTGIVHRYYKCVSVKYHRGCDKKTVRKEWIEELVISHIMKIIFDDDLMDRLADVLLEHLNKENTSLPILQKQFAEVQKNIDNMLNAIQQGIFTPSTKERLESLEREKSELSVQIIKEEISKPKLTKEQILFWIYKFRKLNPKRLDHRRRLVNSFVNSIYLYDDKIIIDCNYKEGTETITFEEIENSALGSDLTSLGAPRQSKRYIAYSVFFCKRAQNGEQ

SEQ ID NO: 5115 - protein, 511 aa, Unknown
  Description of Unknown: Integrase B5116 sequence
  PTHR30461:SF3,SM00857,G3DSA:1.10.10.2600,IPR036162,PS51737, G3DSA:3.40.50.1390,IPR006119,IPR038109,PF07508,IPR011109, SSF53041,PTHR30461,Coil,PS51736,cd00338, PF00239
MDKYAMYLRKSRADMEAEKLGEGETLTRHKKILTELAAKKGLYVEKIYQEIISGETIAARPEITQLIQDCYAGMYKGIIIIEVTRLSRGNQADMQTIMDMLKYANNRSGILVITPTKTYDVAHSPDDEEYMEFELFMSRREYKMIRKRMQRGKIQAVIEGNYMGSYRPYGYDVLKTRTGRTLTPNKDEAPIVQKMFQWAANNNMTAGEIARKLTTMGVPTYTGAPEWNLGTIKTILTNPTYIGKVRWNDRMMMKTLVDGKMATSRPRSNHGDQYMECDGKHEAIIDEATFNALKNRFHSDKTKADCKLLNPLAGLLECAVCHYAMPYHVYRDRNALPRFAHRQSQTCKVKSVHASDVMDALVCCLKRYIADFEMKIDNLPSEDENTIQDEMNALEKELLKTERKLPKLFDAWENGIITDNEFAERKALNNEKIESLKKQIADLEDSIPEKEDYEEMIINFHAALNALLDDSLDADIKNEYLKSIIDRIEFSRENNSEFILDVYIKSDGAMV

SEQ ID NO: 5116 - protein, 511 aa, Unknown
  Description of Unknown: Integrase B5117 sequence
  PTHR30461:SF3,SM00857,G3DSA:1.10.10.2600,IPR036162,PF13408, IPR025827,G3DSA:3.40.50.1390,PS51737,IPR006119,IPR038109, PF07508,IPR011109,SSF53041,PF00239,PTHR30461, PS51736,Coil,cd00338
MPKKETAVSQGLVAAIYARYSSHAQNDASIEQQMDECQEYARQHGYKIVGVYADRAMSGRSDRRPEFQKMMRAAEKREFQIVLAYKSNRISRNMLHALSYEDKLAQHGVNVVYCKEEFGNNAAGRFALRTMMNVNQFYSENMAEDIMRGLMDNANQCKVNGSLPLGYKRGTDGRYEIDEQTAPIVQEIFRRIANGELKASIADDLNKRQIRTSTGGTWNKGSFHSLLANERYTGIYIYRDVRVPGGIPVIVDKDLFEAAREREETMKTTIKSRRRRDDMEYLLTGKLFCGYCLEPMVGSSGTGKMGKMYYYYRCKNNAEKHTCQKKPVRKDAIEQLVVSSLKACITKPENIDWMTDLVMKYRSKIIAESDIGYLEDKLKENKTAIKNVMKAIEMGVVTETTKARLQELEAEQREALSSLLAEKRSIPDVTRDHVQFFFESFRNGDVNSMKYQKTLIKHFLRAVYLYDDHIKITFDYDDSDTGVEIPLEDSSAESSEDTSVLIDSLGVYGRV

SEQ ID NO: 5117 - protein, 511 aa, Unknown
  Description of Unknown: Integrase B5118 sequence
  PTHR30461:SF3,SM00857,G3DSA:1.10.10.2600,IPR036162,PF13408, PS51737,G3DSA:3.40.50.1390,IPR025827,IPR006119,IPR038109, PF07508,SSF53041,IPR011109,PTHR30461,Coil, PS51736,cd00338,PF00239
MAKAKAATNDISKLAVIYARYSSHNQTEQSIEGQLAAGHRYADLKGYTVVHEYIDRAMTGRNDNRDDFQKMLSDTSKKQFGVIIVWKVDRFGRNREEITFNKYRCKKNGVRVEYVAENLPDSPEGVILESVLEGMAEYYSLQLSQNVQRGLLESAKKHQVIGGNVPLGLMMDAHKKYAPDPKTAPTVKLIFDMYAEGSTTSEIINHLNSIGMRTKAGKPFTKSSLTTVLKNEKYIGVYKYKDIIRDEDVIPPIVDKEIFYKVQELLKVNRRMPSHKWSYSDYILTDKLFCGKCGTAMVGESGFGKMGVKYSYYMCAKRRKDKTCDKKPVRQEWIEEIILQCVQGILQNEELLEFIAENTWQYYLAQDESMEKLKGLQAELDKVEKSAANLMKAIEAGIFNDMTKARMDELDDQRAVIKKAMAEIEIEKGFKLTKDHILYFLEQFKKLDYKDRDCQRRLIDVFVNSIFVYDDKLRIAFNFGGSDSTITLNEVDKADRGEGFVCCASCPVIKP

SEQ ID NO: 5118 - protein, 511 aa, Unknown
  Description of Unknown: Integrase B5119 sequence
  PTHR30461:SF3,SM00857,G3DSA:1.10.10.2600,IPR036162,PS51737, G3DSA:3.40.50.1390,IPR006119,IPR038109,PF07508,SSF53041, IPR011109,PTHR30461,Coil,PS51736,cd00338, PF00239
MVDNDIFAIYLRKSRKDLENKDYDVLKRHRKILLDFAKSKNIVIHEEDIYEEVVSGETIQDRPVVQILLRKIETGYYKAVLVMEIERLARGNTIDQGIIAQAFQLTNTLIITPNKTYDTRNEYDNEFLEFGLFMSRREYKSISRRIQTGRIQSVKEGNYIGSVTPYGYDKEKLKGEKGFKLVSNDEATNVKLIFDLCLDGVGTSNIAFKLNDLNIKSRTGKPWTPNMVRNILINKVYIGILTWGKRATVKQLDNNLINKTRPVSDNYIESKGKHESIIDEITFYKAQEILKANSSKKVHKDKSLKNPLAGIVVCQKCGTNMIRRPLKNIPDTLLCKNHYCDNVSSYLYLIEDRLLNSLKVVLKEYYYYIENYEKENVKNKKNYDIQIKRIDKDIEKLKNQHNKTCELLETGVYSLQLFKERSLSINQQLEGLNKQKEELTRLNKEDKTEKIIQAIPKLENCLKTYHTLNIEDRNKLLKSIIKKAYYLKTEAGSRWNKDAQDKFTLELELLL

SEQ ID NO: 5119 - protein, 511 aa, Unknown
  Description of Unknown: Integrase B5120 sequence
  SM00857,G3DSA:1.10.10.2600,IPR036162,PF13408,IPR025827, PS51737,G3DSA:3.40.50.1390,IPR006119,IPR038109,PF07508, IPR011109,SSF53041,PTHR30461,PS51736,cd00338, PF00239
MPKKETAVSQGLVAAIYARYSSHAQNDASIEQQIDECQEYARQHGYKIVGVYADRAMSGRSDRRPEFQKMMRAAEKREFQIVLAYKSNRISRNMLHALSYEDKLAQHGVNVVYCKEEFGNNAAGRFALRTMMNVNQFYSENMAEDIMRGLMDNANQCKVNGSLPLGYKRGADGRYEIDEQTAPIVQEIFRRIANGELKASIADDLNKRQIRTGTGGAWNKGSFHSLLANERYTGIYIYRDVRIPGGIPAIIDRELFEAAREREETMKTVVKSRRRRDDMEYLLTGKLFCGYCLEPMVGSSGTGKMGKMYYYYRCKNNAEKHTCQKKPVRKDAIEQLVVSSLKACITKPENIDWMTDLVMKYRSKIIAESDIGYLEDKLKENKTAIKNVMKAIEMGVVTETTKARLEELEAEQREVLSSLLAEKRSIPDVTRDHVQFFFESFRNGDVNSIKYQKTLIKHFLRAVYLYDDHIKITFDYDDSDTGVEIPLEDSSAESSEDTSVLIDSLGVYGRV

SEQ ID NO: 5120 - protein, 511 aa, Unknown
  Description of Unknown: Integrase B5121 sequence
  PTHR30461:SF3,SM00857,G3DSA:1.10.10.2600,IPR036162,PF13408, IPR025827,G3DSA:3.40.50.1390,PS51737,IPR006119,IPR038109, PF07508,SSF53041,IPR011109,PF00239,PTHR30461, PS51736,Coil,cd00338
MNTVIYARYSAGPRQTDQSIEGQLRVCTDFCKQRGLTVIDTYCDRHISGRTDERPEFQRLIADAKRKKFEAVVVYKTDRFARNKYDSAVYKRELKRNGIQIFYAAEAIPDGPEGIILESLMEGLAEYYSAELAQKIKRGMHESALKCQSTGSGRPLGYRVDEQKHFQIDPESAQTVQTIFEQYIKGESNAAICELLNSRGLRTAQGKPFNKNSINRIIKNRKYIGEYRYHDIVVEGGMPAIISKDTFNLAQAEMERRRTRKAPKSPKAEYLLAGRLFCGHCKGPMQGVSGTGKSGNKWYYYYCGNTRGKNKTCDKKQVSRDRLERAVVDFTVRYILQEDVLEELARKVHAAQERQNDTASEIAFYEKKLADNKKSIANVLRAIESGAATQTLPARLQELENEQAVILGELSFLKGKHLAFTEDQILFALMKHLEPYPGESEQDYRRRIISDFVSEVYLYDDRLLIYFNISSEDGKLKSADLSNIEGGEFDEGLVSSTNLPHRFVRCGVFYA

SEQ ID NO: 5121 - protein, 511 aa, Unknown
  Description of Unknown: Integrase B5122 sequence
  PTHR30461:SF3,cd00338,SM00857,G3DSA:1.10.10.2600,IPR036162, PF13408,PS51737,G3DSA:3.40.50.1390,IPR025827,IPR006119, IPR038109,PF07508,IPR011109,SSF53041,PTHR30461, PS51736,Coil,PF00239
MAKAKQKAATNDISKLAVIYARYSSHNQTEQSIEGQLAAGHRYADLKGYTVVHEYIDRAMTGRNDNRDDFQKMLSDTSKKQFGAIIVWKVDRFGRNREEITFNKYRCKKNGVRVEYVAENLPDSPEGVILESVLEGMAEYYSLQLSQNVQRGLLESAKKHQVIGGNVPLGLMMDAHKKYVPDLKTAPTVKLIFDMYAEGSTTSEIINHLNSIGMRTKAGKPFTKSSLTTVLKNEKYIGVYKYKDIIRDEGVIPPIVDKEIFYKVQELLKVNRRMPSHKWSYSDYILTDKLFCGKCGTAMVGESGFGKMGVKYSYYICAKRRKDKTCDKKPVRQEWIEEIVLQRVQGILQNEELLEFIAENTWQYYLAQDESMEKLKGLQTELDKVEKSAANLMKAIEAGIFNDMTKARMDELDDQRAVIKKAMAEIEIEKGFKLTKDHILYFLEQFKKLDYKDRDCQRRLIDVFVNSIFVYDDKLRIAFNFGGSDSTITLNEVDKADRGEGFVCCASCPAI

SEQ ID NO: 5122 - protein, 511 aa, Unknown
  Description of Unknown: Integrase B5123 sequence
  PTHR30461:SF3,cd00338,SM00857,G3DSA:1.10.10.2600,IPR036162, PF13408,IPR025827,PS51737,G3DSA:3.40.50.1390,IPR006119, IPR038109,PF07508,IPR011109,SSF53041,PTHR30461, PS51736,Coil,PF00239
MSRAVIYARFSSHNQREESIEQQVAECRAFAAANGLTVIDVYADAAISGRSDRRPQFQRLRRDAGKKIFDTIIAYKSSRIARNMLNALNFEVEMTKCGVNVLYAKEEFGNTAAGRFALRTMMSVNQFYSENLGEDIKRTQADNAQSCKSNGPAPFGYKSGADGRFEIDEPRAQIIREIYARVAAGETLASISADFNARGLKTRTGGKWGRSSYGAILGNERYLGIYIFDGVRTEGGMPQIIDRQLFVEAMAAMKRKKISPSADYQLTGKLYCGKCGRAMTGICGTGRAGTVYHYYACTGRKSGTGCDKEHVGRDQIEDAVARALAERIMSDKIIDQMADEVMEFQRRHKDNPEIKMLEEQKAENAKAIKNILSAIEAGIFTESTKARLMELEAENTRITEQLAMLTTSQIDVTRDQVIGYLKSFRGGDIEDKKYRAQLFQTFLVKVFVFDDRLKVIFDPLGSGKNEIDVTLDDLGEIESEGDGVRLSSDLPHHIGLRRTPYIIFMVSLVTK

SEQ ID NO: 5123 - protein, 511 aa, Unknown
  Description of Unknown: Integrase B5124 sequence
  SM00857,G3DSA:1.10.10.2600,IPR036162,PF13408,IPR025827, G3DSA:3.40.50.1390,PS51737,IPR006119,IPR038109,PF07508, IPR011109,SSF53041,PTHR30461,Coil,PS51736, cd00338,PF00239
MQMEYAMYLRKSRADLEAEAHGEGDTLARHEHILMELAKSRALPIGAIYREIVSGERIANRPVMQQLLSEVEDGRWKGVLVTETSRLARGDTIDQGIVAQAFKLSGTLIVTPSKTYDPTQEADEEWMEFGLFMSRQEYRMIRRRMTAGMNAAKREGRFIGNVAPYGYERFKLDGRGWSLRIVPEQAEIVRMIFDLYNSGLGYCRIEKRLNELHIPAPKGEKWTSATIPGIIQNPHYIGMIPAGRRPGRKVVKDGEVKLIRPRQKCELYPGMHEPIISCETWDKAQARIGKNREARVPAGRRQSNPLAGLLVCDCCGKNMQRRPQTGSSQTQILCPTRGCPTVAHNADELEDMVIDSLRVFLAKLEAGKPAKTDVSAEYAALEECTKKLKDLEARQRRTFELVEDGTYTREIFLTRQAELTAERVKIEQQKAELEEAITKKKQEAEAQNNLAPAARQVLEAYNKQLTAEDRNRLLKKVIDHIDYHKRKRTRWNPESDLSITLHPVVTYSNPH

SEQ ID NO: 5124 - protein, 511 aa, Unknown
  Description of Unknown: Integrase B5125 sequence
  PTHR30461:SF3,SM00857,G3DSA:1.10.10.2600,IPR036162,PS51737, G3DSA:3.40.50.1390,IPR006119,IPR038109,PF07508,IPR011109, SSF53041,PTHR30461,Coil,cd00338,PF00239
MNVNEIIMYLRKSRKDYEFSDEPIEKTLERHEKTLQSFAVNSYGFKIPEENIFREVVSGDTISDRPEMQKVMSLIEDSKYKAVLVLEIERLARGNTIDQGLIAQTFEYTNTLIITPQKIFNLNDDMDRSFFEDGLYQSRKYLLYTKKILTRGRVTSVREGKYVGSYTPFGYDKEKLKNTKGYKLVINKQEAEIVKTIFNMYIDGTGTQMIANHLNKIGAKPRKNDVWTSAMVRNILDRPAVNGKVTWNRRKTVSIVENGIVKKVRPMGKDAIVVDGLHEAIIDDETWEKAQIRRKNNHRSKPISDIKNPLSGIIKCKICGRNMIRRPYNNGTAETLMCPLSGCKNVSSELTLVEKKLLNELEKIVCNFENNYKGELEQKKKVDYDSIIQNIEHNISIADKQLDKVYNLFENGIYDEEEFSKRRYELKEDIKNKKQYIKELKEKEIEEQKRDYSNKIPIIKNILNVYNDLDLNMKNELLKSVIDRVYYFKEKAGRWEKGNINKFVLEIVLKI

SEQ ID NO: 5125 - protein, 511 aa, Unknown
  Description of Unknown: Integrase B5126 sequence
  PTHR30461:SF3,SM00857,G3DSA:1.10.10.2600,IPR036162,PF13408, PS51737,IPR025827,G3DSA:3.40.50.1390,IPR006119,IPR038109, PF07508,IPR011109,SSF53041,PTHR30461, Coil,PS51736,cd00338,PF00239
MAKAKAATNDISKLAVIYARYSSHNQTEQSIEGQLAAGHRYADLKGYTVVHEYIDRAMTGRNDNRDDFQKMLSDTSKKQFGVIIVWKVDRFGRNREEITFNKYRCKKNGVRVEYVAENLPDSPEGVILESVLEGMAEYYSLQLSQNVQRGLLESAKKHQVIGGNVPLGLMMDEHKKYAPDPKTAPTVKLIFDMYAEGSTTSEIINHLNSIGMRTKAGKPFTKSSLTTVLKNEKYIGVYKYKDIIRDEDVIPPIVDKEIFYKVQELLKVNRRMPSHKWSYSDYILTDKLFCGQCGTAMVGESGFGKMGVKYSYYMCAKRRKDKTCDKKPVRQEWIEEIVLQRVQGILQNDELLEFIAENTWQYYLAQDESMEKLKGLQAELDKVEKSAANLMKAIEAGIFNGMTKARMDELDDQRAVIKKAMAEIEIEKGFKLTKDHILYFLEQFKKLDYKDRDCQRRLIDVFVNSIFVYDDKLRIAFNFGGSDSTITLNEVDKADRGEGFVCCASCSVIKP

SEQ ID NO: 5126 - protein, 511 aa, Unknown
  Description of Unknown: Integrase B5127 sequence
  PTHR30461:SF3,SM00857,G3DSA:1.10.10.2600,IPR036162,PF13408, IPR025827,G3DSA:3.40.50.1390,PS51737,IPR006119,IPR038109, PF07508,SSF53041,IPR011109,PTHR30461,Coil, PS51736,cd00338,PF00239
MAKAKAATNDISKLAVIYARYSSHNQTEQSIEGQLAAGHRYADLKGYTVVHEYIDRAMTGRNDNRDDFQKMLSDTSKKQFGVIIVWKVDRFGRNREEITFNKYRCKKNGVRVEYVAENLPDSPEGVILESVLEGMAEYYSLQLSQNVQRGLLESAKKHQVIGGNVPLGLMMDEHKRYAPDPKTAPTVKLIFDMYAEGSTTSEIINHLNSIGMRTKAGKPFTKSSLTTVLKNEKYIGVYKYKDIIRDENVIPPIVDKEIFYKVQELLKVNRRMPSHKWSYSDYILTDKLFCGKCGTAMVGESGFGKMGVKYSYYMCAKRRKDKTCDKKPVRQEWIEEIVLQRVQGILQNDELLEFIAENTWQYYLAQDESMEKLKGLQAELDKVEKSAANLMKAIEAGIFNDMTKARMDELDDQRAVIKKAMAEIEIEKGFKLTKDHILYFLEQFKKLDYKDRDCQRRLIDVFVNSIFVYDDKLRIAFNFGGSDGTITLNEVDKADHGEGFVCCASCPVLKP

SEQ ID NO: 5127 - protein, 511 aa, Unknown
  Description of Unknown: Integrase B5128 sequence
  SM00857,G3DSA:1.10.10.2600,IPR036162,PF13408,IPR025827, G3DSA:3.40.50.1390,mobidb-lite,PS51737,IPR006119,IPR038109, PF07508,IPR011109,SSF53041,PF00239,PTHR30461, PS51736,Coil,cd00338
MTAVIYARYSSDNQREESIEGQIRECTAYAEKNGITVVKHYIDRALSAKTDNRPDFQQMIKDSEKRLFDIVLVWKLDRFARNRYDSAHYEYQLERNHVKLVSATEPISDSPAGIMVKSMLTGMAEYYSAELSEKVVRGMTENVLKGKYNGGTIPIGFKVDEEKFFQVDPLKAPFVVEAFQRYNDGATMKELMNWLNDSGVTTNRNQKFTYNSVQKLLTNKRYIGENHFKDIVMPDSIPAIVDKDLFEEVQLKIKKNSRAPARHKAEDDYLLTTKLFCGMCGAMMFGECGTGRNKVVHHYYKCATAKRFKTCKKKTVRKEWLEDLVIAETMKLIQDDAVIDAIVAEVMELQDQENTTLPLLEKQMREVENGIENMLNAIQAGVLTNSTKSRLEKLEAQQKELEVRIAEEKIAWPRLSENQVRFWLTRFRKLDPNVKSHRETLINTFVNAVYLYDEKVLITFNYKDGTKTITFDEIAAKDAPEGNGSDLGCFAPPNVNQANPPRSTSWVRSSS

SEQ ID NO: 5128 - protein, 510 aa, Unknown
  Description of Unknown: Integrase B5129 sequence
  SM00857,G3DSA:1.10.10.2600,IPR036162,PF13408,PS51737, G3DSA:3.40.50.1390,IPR025827,IPR006119,IPR038109,PF07508, IPR011109,SSF53041,PTHR30461,Coil,PS51736, cd00338,PF00239
MSYFIYARKSRKDADLEALGIDVLERHITTLLELAKTLSLPIGAIYREVVSGDSIDSRPVMSQVMAEVESCMWDGCLVMDVDRLARGDTIDQGRVQRAFFYSNTKIVTPNKTYDPANEYDNEYFEFSLFMSRREYATIKRRMQRGRERSSSDGYYVGNIPPYGWRRVIAPDGKHFSLAPDPTESPVLDLMYDLCGNKQYGYQKACTHMAEMGILSRSGRPFTPSTLKGIISNPANIGKVRWGHRKTVRTVKDGKISRSRPHSSDYILADAVWPPRISADLFQRANQPKGSCSAPVRDDRPIQNIFAGLVRCSQCGRLMVRKKAHTKTPYDILICQYTECPTVGIRIDELELALLEWLRNYVDKYELTDALPEDAENVAAKEAIVKNFEKEHETLLKQRESLFDFLEQGIYTKEIFIERSNALEQRVKECMEHIISAQNDLHATLALQANRKNFVPRCKNLLGEWGKLTIPEKNSALKVLIEKIMFTKTKRNKKGQDRSDFEIDVFPKVPK

SEQ ID NO: 5129 - protein, 510 aa, Unknown
  Description of Unknown: Integrase B5130 sequence
  SM00857,G3DSA:1.10.10.2600,IPR036162,PF13408,PS51737, IPR025827,G3DSA:3.40.50.1390,IPR006119,IPR038109,PF07508, SSF53041,IPR011109,PTHR30461,Coil,PS51736, cd00338,PF00239
MSYFIYARKSRKDAELEALGIDVLERHITTLLELAKTLSLPIGAIYREVVSGDSIDTRPVMTQVLSEVEACMWDGALVMDVDRLARGDTIDQGRVQRAFFYSNTRIVTPSKTYDPANEYDNEYFEFSLFMSRREYATIKRRMQRGRERSSSDGYYVGNVAPYGWERVIAPDGKHYSLTPSQTEAPVLDLMYDLCGNKQYGYQKACTYMTNMGILARSGKPFSPSTLKGIISNPANIGKVRWGYRKTVRAVKDGRVVKSRPNATDYILADAAWAPRISTDLFKRANQPKGCFSSPVRNDRPIQNLFAGLVRCSQCGRLMVRKKAQTKTPYDVLICQYTECSTVGIRIDELEEALLEWLKDYIVKYEFTDTHEEDAAAIAAKEMIVTNFETEHQTLLKQRESLFDFLEQGIYTKEIFLERSNALEQRIRDCMNNITAAQEDLHTTIARQANRKNFVPKCKNLLSEWNSLTIPEKNSALRKLIDRIVLTKTKRNKKNQKNSEFMIDVYPKVPK

SEQ ID NO: 5130 - protein, 510 aa, Unknown
  Description of Unknown: Integrase B5131 sequence
  PTHR30461:SF3,SM00857,G3DSA:1.10.10.2600,IPR036162,PF13408, IPR025827,G3DSA:3.40.50.1390,PS51737,IPR006119,IPR038109, PF07508,IPR011109,SSF53041,PTHR30461,cd00338, PF00239
MSSVDKIAVVYARYSSHGQTEQSIEGQIAAAQKYAEQHSYTIIHVYADRAMTGRNDDREEFQRMLSDTATHQFGVILLWKIDRFGRNREEIAFNRYRCKKNGVRVERVAEDVPDGPEGVILDSVLEGMAEYYSLQLAQNVRRGQRESAKKSQTVGGCKIIGYNVNPDTKRYEVDPKTAPFVTEVFKRYANGETISEIVAWLNAQGVRATRGGEFTVNSLHRLLKNEKYTGVYIFHDIRNEGGMPALTDRATFDKAQEMLKVNRRAPARVWSKTEYLLTDKLFCGHCGAMMVGESGHGRNGTKHSYYTCWNRKKKKSCDKKPVRQDVIEPMVLRAISKMLGDEATLEYITDQVWAVYERSDTSGDTIKALDKQIADVDRALSNVMKAIEMGIINEMTKTRMDELTDQKQALSVARAEAGLAGGFKLTRDMILFFLHDMAIMDMTDRDCQKRLIKTFVNAIYLYDDHFDIAFNYTSNGKMVVRMQEINDAACGEVFGRCAQSPAKSRLSRLR

SEQ ID NO: 5131 - protein, 510 aa, Unknown
  Description of Unknown: Integrase B5132 sequence
  SM00857,G3DSA:1.10.10.2600,IPR036162,PF13408,PS51737, G3DSA:3.40.50.1390,IPR025827,IPR006119,IPR038109,PF07508, IPR011109,SSF53041,PTHR30461,Coil,PS51736, cd00338,PF00239
MSYFIYARKSRKDAELEALGIDVLERHITTLLELAKTLSLPIGAIYREVVSGDSIDARPVMTQVLSEVEACMWDGALVMDVDRLARGDTIDQGRVQRAFFYSNTRIVTPNKTYDPANEYDNEYFEFSLFMSRREYATIKRRMQRGRERSSSDGYYVGNVAPYGWERIIAPDGKHYSLTPSQTEAPVLDLMYDLCGNKQYGYQKACTYMTNMGILARSGKPFSPSTLKGIISNPANIGKVRWGYRKTVRAVKDGRVVKSRPNATDYILADAAWAPRISTDLFKRANQPKGCFSSPVRNDRPIQNLFAGLVRCSQCGRLMVRKTAQTKTPYDVLICQYTECSTVGIRIDELEEALLEWLKDYIVKYEFTDTHEEDAAAIAAKEMIVTNFETEHQTLLKQRESLFDFLEQGIYTKEIFIERSNALEQRIRDCMNNIATAQEDLHTIIARQTNRKNFVPKCKNLLSEWGSLTVPEKNSALRQLIDRIILTKTKRNKKNQKNSEFTIDVYPKVPK

SEQ ID NO: 5132 - protein, 510 aa, Unknown
  Description of Unknown: Integrase B5133 sequence
  SM00857,G3DSA:1.10.10.2600,IPR036162,PF13408,PS51737, G3DSA:3.40.50.1390,IPR025827,IPR006119,IPR038109,PF07508, SSF53041,IPR011109,PTHR30461,Coil,PS51736, cd00338,PF00239
MSYFIYARKSRKDADLEALGIDVLERHITTLLELAKTLSLPIGAIYREVVSGDSIDSRPVMSQVMAEVESCMWDGCLVMDVDRLARGDTIDQGRVQRAFFYSNTKIVTPNKTYDPANEYDNEYFEFSLFMSRREYATIKRRMQRGRERSSSDGYYVGNIPPYGWRRVIAPDGKHFSLAPDPTESPVLDLMYDLCGNKQYGYQKACTHMAEMGILSRSGRPFTPSTLKGIISNPANIGKVRWGHRKTVRTVKDGKISRSRPHSSDYILADAVWPPRISADLFQRANQPKGSCSAPVRDDRPIQNIFAGLVRCSQCGRLMVRKKAHTKTPYDILICQYTECPTVGIRIDELELALLEWLRNYIDKYELTDALPEDVENVAAKEAIVKNFEKEHETLLKQRESLFDFLEQGIYTKEIFIERSNALERRVKECMEHIISAQNDLHATLALQANRKNFVPRCKNLLGEWGRLTIPEKNSALKVLIEKIMFTKTKRNKKGQDRSDFEIDVFPKVPK

SEQ ID NO: 5133 - protein, 510 aa, Unknown
  Description of Unknown: Integrase B5134 sequence
  PTHR30461:SF3,SM00857,G3DSA:1.10.10.2600,IPR036162,PF13408, IPR025827,PS51737,G3DSA:3.40.50.1390,IPR006119,IPR038109, PF07508,IPR011109,SSF53041,PTHR30461,Coil, PS51736,cd00338,PF00239
MIENYLDKIKQRLNVVVLHAVVYTRYSSDMQRGESIDAQIRLIRKWSDEHSIVIDKIYADEAQSAKSDERKQFQQMIADSKKQKDWQLVLVHKLDRFARNRMDSAAYRVELRKNKKYLISTTEQFDDTPESCMLEGIIESMAEFYSKNLAREVMKGLTENALKGKTCGGTPPLGYDLDERKYYKINEFEAQAVKLIFQLFLEGKTYGEIISKLNTSGYRTKCNRLFSRNSLYEILRNEKYKGILVYNKTQSRDEITGKRSGHRYKSDEEVIRVDGVIPQIVSPEDWDDVQLILNSRKKAFRNNAKETYLLSGKIQCGKCGGSYDGRRSFNSCGTKYIYYACNGKRNPNYKCNNNSIQRDWIESYMINIIDNYIHHLSKAQKQNIYQLCFDSAQSSKKADISILNQRLNSLNKELSRIVDVITITNSTTLIEKLTDLEQQKAEIQLRIKVLSQEKGKILSKQKINLLLTKIKKMLKEKSVPQLKELMDLIVNEIIVNDKDVIVYLNIPIVN

SEQ ID NO: 5134 - protein, 510 aa, Unknown
  Description of Unknown: Integrase B5135 sequence
  SM00857,G3DSA:1.10.10.2600,IPR036162,PF13408,IPR025827, PS51737,G3DSA:3.40.50.1390,IPR006119,IPR038109,PF07508, IPR011109,SSF53041,PTHR30461,Coil,PS51736, cd00338,PF00239
MSYFIYARKSRKDAELEALGIDVLERHITTLLELAKTLSLPIGAIYREVVSGDSIDARPVMTQVLSEVEACMWDGALVMDVDRLARGDTIDQGRVQRAFFYSGTRIVTPNKTYDPANEYDNEYFEFSLFMSRREYATIKRRMQRGRERSSSDGYYVGNVAPYGWERIIAPDGKHYSLTPSQTEAPVLDLMYDLCGNKQYGYQKACTYMSNMGILARSGKPFSPSTLKGIISNPANIGKVRWGYRKTVRAVKDGRVVKSRPNATDYILADAAWEPRISADLFKRANQPKGCFSSPVRNDRPIQNLFAGLVRCSQCGRLMVRKKAQTKTPYDVLICQYTECSTVGIRIDELEEALLGWLKDYIAKYEFSDTHEEDTAAIAAKELIVTNFETEHQTLLKQRESLFDFLEQGIYTKEIFIERSNALEQRIRDCMNNITAAQEDLHTTIARQANRKNFVPKCKNLLSEWNSLTIPEKNSALRKLIDRIVLTKTKRNKKNQKNSEFMIDVYPKVPK

SEQ ID NO: 5135 - protein, 510 aa, Unknown
  Description of Unknown: Integrase B5136 sequence
  SM00857,G3DSA:1.10.10.2600,IPR036162,PF13408,IPR025827, PS51737,G3DSA:3.40.50.1390,IPR006119,IPR038109,PF07508, IPR011109,SSF53041,PTHR30461,PS51736,cd00338, PF00239
MSYFIYARKSRKDAELEALGIDVLERHITTLLELAKTLSLPIGAIYREVVSGDSIDARPVMTQVLSEVEACMWDGALVMDVDRLARGDTIDQGRVQRAFFYSNTRIVTPNKTYDPANEYDNEYFEFSLFMSRREYATIKRRMQRGRERSSSDGYYVGNVAPYGWERVIAPDGKHYSLAPHQTEAPVLDLMYDLCGNKQYGYQKACTYMSNMGILARSGKPFTPSTLKGIISNPANIGKVRWGHRKTVRAVKDGRVVKSRPKATDYILSDAAWAPRISPDLFKRANQPKGCFSAPVRNDRPIQNLFAGLVRCSQCDRLMVRKKAQTKTPYDMLICQYTECSTVGIRIDELEEALLGWLKDYIAKYEFADTHEEDTAAIAAKELIVTNFETEHQTLLKQRESLFDFLEQGIYTKEIFIERSNALEQRIRDCMNNITAAREGLHTTIARQANRKNFVPKCKNLLSEWDSLTVSEKNSALRQLIDRIVLTKTKRNKKNQKNSEFTIDVYPKVPK

SEQ ID NO: 5136 - protein, 510 aa, Unknown
  Description of Unknown: Integrase B5137 sequence
  SM00857,G3DSA:1.10.10.2600,IPR036162,PF13408,PS51737, G3DSA:3.40.50.1390,IPR025827,IPR006119,IPR038109,PF07508, SSF53041,IPR011109,PTHR30461,Coil,PS51736, cd00338,PF00239
MSTNYALYLRKSRADLEAEAHGEGDTLARHEHILMELAKSRALPIGAIYREIVSGERIANRPVMQQLLSEVEDGRWKGVLVTETSRLARGDTIDQGIVAQAFKFSGTLIVTPAKTYDPTQEADEEWMEFGLFMSRQEYRMIRRRMNAGTKSAKKEGRYVGSRAPYGYERCKLSGRGWSIRPIEPESGVVKMIYELFLSGKGAGEIATYLNQINIPSPTQRTWVRQTVGLILQNPHYAGLIPDAVHPYKKVIKDGQLTVKRPLNKQCELYEGVHEAIIPRETWEETQRLLTKNHKPRVPSALQQHNPLAGLLYCDKCGQKMQRHPQTDRNFEKYYCPTVGCPTVSAPLSQVEDLVLQGLKEFLYDLEMQQPEQPDFTTEQNALKNIDSRLAEQRKRLTKTFELVEDGIYTREAFLQRQSEINAEISRLQTAREELQRKLDAHTAELSARENAAPQIRYVLDVYDRKSAPAERSALLKQVIDRIDYHKTTKQRWSAENDLSVTIHPKISARK

SEQ ID NO: 5137 - protein, 510 aa, Unknown
  Description of Unknown: Integrase B5138 sequence
  cd00338,SM00857,G3DSA:1.10.10.2600,IPR036162,PF13408, IPR025827,G3DSA:3.40.50.1390,PS51736,PS51737,IPR006119, IPR038109,PF07508,IPR011109,SSF53041,PTHR30461, mobidb-lite,Coil,PF00239
MEKRAVIYARYSCDKQSEQSIEGQIHVINDFAVRNGYTIVSSYIDRAKSAKTANRPQFLQMISDSAKGIFDFVLVYKLDRFSRNRYDSAFYKHKLKQNGVQVISATECLSDNPESIITEAMLEAMAEFYSAELGQKTKRGMRESALKCMSTGSKPPLGYKWGEDKHLEIDEATADIPRIAFSMYADGKGKQAIAEELNRRGFHTRTGREFKVNSLDNMLTNPKYIGTFTYGTDISIENGCPALISHDIYDKVQGLLKHTKKAPARAKAKVEYYLAGRLKCGICGESMIAVGGTSQNGTQHHYYRCKCRGKGCDKKPERKDFLEWYITEQVLALLNMEEHKERLAEKIIAAYKSGMETNKTEEYKRQIQITETKLNNVLNLLIEKKSDSLMKKLDELELRKSELEEQLRSAELAQSHIPTKREIIEWFDRLSNVDGCENSLQRQVIHTFVKEVFLWDDHAVIVLTLNNTQETVTFEEIREFEQLSDETQEPLPDESESGSCSIEFGSPDWT

SEQ ID NO: 5138 - protein, 510 aa, Unknown
  Description of Unknown: Integrase B5139 sequence
  SM00857,G3DSA:1.10.10.2600,IPR036162,PF13408,IPR025827, PS51737,G3DSA:3.40.50.1390,IPR006119,IPR038109,PF07508, IPR011109,SSF53041,PTHR30461,Coil,PS51736, cd00338,PF00239
MSYFIYARKSRKDAELEALGIDVLERHITTLLELAKTLSLPIGAIYREVVSGDSIDARPVMTQVLSEVEACMWDGALVMDVDRLARGDTIDQGRVQRAFFYSNTRIVTPNKTYDPANEYDNEYFEFSLFMSRREYATIKRRMQRGRERSSSDGYYVGNVAPYGWERVIAPDGKHYSLAPHQTEAPVLDLMYDLCGNKQYGYQKACTYMSNMGILARSGKPFTPSTLKGIISNPANIGKVRWGYRKTVRAVKDGRVVKSRPNATDYILADAAWAPRINIDLFERANQPKGCFSAPIRSDRPIQNLFAGLVRCSQCGRLMVRKKAQTKTPYDFLICQYAECSTVGIRIDELEEALLGWLKDYIAKYEFSDTHEEDTAAIAAKELIVTNFETEHQTLLKQRESLFDFLEQGIYTKEIFIERSNALEQRIRDCMNNITAAREDLYVTIARQANRKNFVPKCKNLLSEWGSLTVPEKNSALRQLIDRIVLTKTKRNKKNQKNSEFTIDVYPKVPK

SEQ ID NO: 5139 - protein, 510 aa, Unknown
  Description of Unknown: Integrase B5140 sequence
  SM00857,G3DSA:1.10.10.2600,IPR036162,PF13408,IPR025827, PS51737,G3DSA:3.40.50.1390,IPR006119,IPR038109,PF07508, IPR011109,SSF53041,PTHR30461,Coil,PS51736, cd00338,PF00239
MSYFIYARKSRKDAELEALGIDVLERHITTLLELAKTLSLPIGAIYREVVSGDSIDARPVMTQVLSEVEACMWDGALVMDVDRLARGDTIDQGRVQRAFFYSNTRIVTPNKTYDPANEYDNEYFEFSLFMSRREYATIKRRMQRGRERSSSDGYYVGNVAPYGWERVIAPDGKHYSLAPHQTEAPVLDLMYDLCGNKQYGYQKACTYMSNMGILARSGKPFTPSTLKGIISNPANIGKVRWGHRKTVRAVKDGRVVKSRPKATDYILSDAAWAPRISPDLFKRANQPKGCFSAPVRNDRPIQNLFAGLVRCSQCDRLMVRKKAQTKTPYDMLICQYAECSTVGIRIDELEEALLGWLKDYIAKYEFTDTHEEDTAAIAAKELIVTNFETEHQTLLKQRESLFDFLEQGIYTKEIFIERSNALEQRIRDCMNNITAAREDLHTTIARQANRKNFVPKCKNLLSEWDSLTVSEKNSALRQLIDRIVLTKTKRNKKNQKNSEFTIDVYPKVPK

SEQ ID NO: 5140 - protein, 510 aa, Unknown
  Description of Unknown: Integrase B5141 sequence
  PTHR30461:SF3,SM00857,G3DSA:1.10.10.2600,IPR036162,PF13408, IPR025827,G3DSA:3.40.50.1390,PS51737,IPR006119,IPR038109, PF07508,IPR011109,SSF53041,PF00239,PTHR30461, PS51736,Coil,cd00338
MSSVDKIAVVYARYSSHGQTEQSIEGQIAAAQKYAEQHGYTIIHIYADRAMTGRNDDREEFQRMLSDTATHQFGVILLWKIDRFGRNREEIAFNRYRCKKNGVRVERVAEDVPDGPEGVILDSVLEGMAEYYSLQLAQNVRRGQRESAKKSQTVGGCKIIGYNVNPDTKRYEVDPKTAPFVTEVFKRYANGETISEIVAWLNAQGVRTTRGGEFTVNSLHRLLKNEKYTGVYIFHDIRNEGGMPALIDRATFDKAQEMLKVNRRTPARVWSKTEYLLTDKLFCGHCGAMMVGESGHGRNGTKHNYYTCWNRKKKKLCDKKPVRQDVIEPLVLRSIGKLLENPATLENIADQVWAAYERSDTSGDTIKALDKQIADVDRALSNVMKAIEMGIINEMTKARMDELTDQKQALSTARAEAGLAGGFKLTRDMVLFFLQEIAALDMADRDSQKRLIKTFVNAIYLYDDHFDIAFNYTDNGKVVVRMQEINDAACGEVFGRCAQSPAKSRLSRLR

SEQ ID NO: 5141 - protein, 510 aa, Unknown
  Description of Unknown: Integrase B5142 sequence
  PTHR30461:SF3,SM00857,G3DSA:1.10.10.2600,IPR036162,PF13408, PS51737,IPR025827,G3DSA:3.40.50.1390,IPR006119,IPR038109, PF07508,IPR011109,SSF53041,PTHR30461,Coil, PS51736,cd00338,PF00239
MIENYLDKIKQRLNVVVLHAVVYTRYSSDMQRGESIDAQIRLIRKWSDEHSIVIDKIYADEAQSAKSDERKQFQQMIADSKKQKDWQLVLVHKLDRFARNRMDSAAYRVELRKNKKYLISTTEQFDDTPESCMLEGIIESMAEFYSKNLAREVMKGLTENALKGKTCGGTPPLGYDLDERKYYKINEFEAQAVKLIFQLFLEGKTYGEIISKLNTSGYRTKCNRLFSRNSLYEILRNEKYKGILVYNKTQSRDEITGKRSGHRYKSDEEVIRVDGVIPQIVSPEDWDDVQLILNSRKKAFRNNAKETYLLSGKIRCGKCGGSYDGRRSFNSCGTKYIYYACNGKRNPNYKCNNNSIQRDWIESYMINIIDNYIHHLSKAQKQNIYQLCFDSVQSSKKADISILNQRLNSLNKELSRIVDVITITNSPTLIEKLTDLEQQKAEIQLRIKALSQEKGKILSKQKINLLLTKIKKMLKEKSVPQLKELMDLIVNEIIVNEEDVIVYLNIPITK

SEQ ID NO: 5142 - protein, 510 aa, Unknown
  Description of Unknown: Integrase B5143 sequence
  SM00857,G3DSA:1.10.10.2600,IPR036162,PF13408,IPR025827, G3DSA:3.40.50.1390,PS51737,IPR006119,IPR038109,PF07508, SSF53041,IPR011109,PTHR30461,Coil,PS51736, cd00338,PF00239
MSYFIYARKSRKDAELEALGIDVLERHITTLLELAKTHSLPIGAIYREVVSGDSIDARPVMTQVLSEVESCMWDGALVMDVDRLARGDTIDQGRVQRAFFYSNTRIVTPNKTYDPANEYDNEYFEFSLFMSRREYATIKRRMQRGRERSSSDGYYVGNVAPYGWERVIAPDGKHYSLAPHQTEAPVLDLMYDLCGNKQYGYQKACTYMSNMGILARSGKPFTPSTLKGIISNPANIGKVRWGHRKTVRAVKDGRVVKSRPKATDYILSDAAWAPRISPDLFKRANQPKGCFSAPVRNDRPIQNLFAGLVRCSQCDRLMVRKKAQTKTPYDMLICQYTECSTVGIRIDELEEALLGWLKDYIAKYEFADTHEEDTAAIAAKELIVTNFETEHQTLLKQRESLFDFLEQGIYTKEIFIERSNALEQRIRDCMNNITAAREDLHTTIARQANRKNFVPKCKNLLSEWDSLTVSEKNSALRQLIDRIVLTKTKRNKKNQKNSEFTIDVYPKVPK

SEQ ID NO: 5143 - protein, 510 aa, Unknown
  Description of Unknown: Integrase B5144 sequence
  SM00857,G3DSA:1.10.10.2600,IPR036162,PF13408,PS51737, G3DSA:3.40.50.1390,IPR025827,IPR006119,IPR038109,PF07508, IPR011109,SSF53041,PTHR30461,Coil,PS51736, cd00338,PF00239
MSYFIYARKSRKDADLEALGIDVLERHITTLLELAKTLSLPIGAIYREVVSGDSIDSRPVMSQVMAEVESCMWDGCLVMDVDRLARGDTIDQGRVQRAFFYSNTKIVTPNKTYDPANEYDNEYFEFSLFMSRREYATIKRRMQRGRERSSSDGYYVGNIPPYGWRRVIAPDGKHFSLAPDPTESPVLDLMYDLCGNKQYGYQKACTHMAEMGILSRSGRPFTPSTLKGIISNPANIGKVRWGHRKTVRTVKDGKISRSRPHSSDYILADAVWPPRISADLFRRANQPKGSCSAPVRDDRPIQNIFAGLVRCSQCGRLMVRKKAHTKTPYDILICQYTECPTVGIRIDELELALLEWLRNYIDKYELTDALPEDAENVAAKEAIVKNFEKEHETLLKQRESLFDFLEQGIYTKEIFIERSNALEQRVKECMEHIISAQNDLHATLALQANRKNFVPRCKNLLGEWGRLTIPEKNSALKVLIEKIMFTKTKRNKKGQDRSDFEIDVFPKVPK

SEQ ID NO: 5144 - protein, 510 aa, Unknown
  Description of Unknown: Integrase B5145 sequence
  SM00857,G3DSA:1.10.10.2600,IPR036162,PF13408,PS51737, G3DSA:3.40.50.1390,IPR025827,IPR006119,IPR038109,PF07508, SSF53041,IPR011109,PTHR30461,Coil,PS51736, cd00338,PF00239
MPTDYALYLRKSRADLEAEAHGEGDTLARHEHILMELAKSRALPIGAIYREIVSGERIANRPVMQQLLSEVEDGRWKGVLVTETSRLARGDTIDQGIVAQAFKFSGTLIVTPAKTYDPTQEADEEWMEFGLFMSRQEYRMIRRRMNAGTKSAKKEGRYVGSRAPYGYERCKLHGRGWSIRPIEPESVVVKMIYELFLSGKGAGEIATYLNQINIPSPTQRTWVRQTVGLILQNPHYAGLIPDAVHPYKKVIKDGQLTVKRPLNKQCELYEGVHEAIIPRETWEETQRLLTKNHKPRVPSALQQHNPLAGLLYCDKCGQKMQRHPQTDRNFEKYYCPTVGCPTVSAPLSQVEALVLQGLKEFLYNLEMQQPEQPDFTTEQNALKNIDSRLVEQRKRLTKTFELVEDGIYTREAFLQRQSEINAEISRLQTASEELQRKLDAHAAELSARENAAPQIQHVLDVYDRKSAPAERSALLKQVIDRIDYHKTTKQRWSAENDLSVTIHPKISARK

SEQ ID NO: 5145 - protein, 510 aa, Unknown
  Description of Unknown: Integrase B5146 sequence
  cd03768,PTHR30461:SF3,SM00857,G3DSA:1.10.10.2600,IPR036162, PF13408,PS51737,G3DSA:3.40.50.1390,IPR025827,IPR006119, IPR038109,PF07508,IPR011109,SSF53041,PTHR30461, PS51736,Coil,PF00239
MLKIAIYSRKSVETDTGESIKNQIAICKQYFQRQNEECKFEIFEDEGFSGGNINRPDFKRMMQLVKIKQFDVVAVYKVDRIARNIVDFVNVFDELDKLNVKLVSVTEGFDPSTPIGKMMMMLLASFAEMERMNIAQRVKDNMRELAKLGRWSGGTAPSGYSVQKVKENGKEVSYLKKEKDADNIKLIFQKYASGYTAFEIHKYFKLKGFTYNPKTIYGLLTNPTYLEATEESIKYLENKGYTVYGEPNGCGFLPYNRRPRYKGIKAWKDKNMMVGVSRHEPAVDLNLWIAVQSQLEKKTVAPHPHESKFTFLTGGIMKCRCGAGMGVSPGRIRSDGTRLYYFTCSGKRYRQNGCSNLSLRVDWAESKVKAFLEKMRDKETLTEYYNSNKNKSNVDKDIKSINKKIVSNKKAVDSLVDKLILLSNDAAKPLAERIENLTQESNTLKEELLKLEREKLFNSNDKLNIDLIHKSIIQFLDTDSLEEKKKFAKDIFDKITWDSASKELLFFLQM

SEQ ID NO: 5146 - protein, 510 aa, Unknown
  Description of Unknown: Integrase B5147 sequence
  PTHR30461:SF3,cd00338,SM00857,G3DSA:1.10.10.2600,IPR036162, PS51737,G3DSA:3.40.50.1390,IPR006119,IPR038109,PF07508, IPR011109,SSF53041,PTHR30461,PS51736,Coil, PF00239
MAEKAVIYARFSSDKQREESIEDQVRVCSQFAASNGFEIVKTYTDEARSGTNAAGRPGFQKMILDAQAQRWTKVIVYKTDRFARSRYDSAVYKAKLRKCGVEIVTAAESVPDGPDGIILESVLEGMAEYYSANLAQNVKRGMEGNALKCKHNGVSIFGYDRGADGYYAVNEHEAAGVRMAFDMCAAGETKAEIMRTLNGIGYKTVTGRPFSNEAVNRLLNCERYIGTYTWGDFRKENGMPSIINRDLWDSAHAHMASRGRKRRGKMNAEYLLSGKIYDADGNQFESDCGYGENGKRYHYYRCRKTKVSMRRDEVEDKVIGACARLLNENPDLDERIVDMVLARQDKDAEQEITARKALSRRITDVEREIDNAIDLACKLGSTDRMAVKINGLQDELTALKAELDEIKHGAPLIDRDMILFALYKMRQSDGPRGMVAAFVDRVTVNEDGSLLVQFILCRPTSENKKPEPSNGEFGKLSCGSPGVNYPELFQVYHSVRILPLKGGFGVLLAA

SEQ ID NO: 5147 - protein, 510 aa, Unknown
  Description of Unknown: Integrase B5148 sequence
  SM00857,G3DSA:1.10.10.2600,IPR036162,PF13408,IPR025827, PS51737,G3DSA:3.40.50.1390,IPR006119,IPR038109,PF07508, IPR011109,SSF53041,PTHR30461,Coil,PS51736, cd00338,PF00239
MSYFIYARKSRKDAELEALGIDVLERHITTLLELAKTLSLPIGAIYREVVSGDSIDARPVMTQVLSEVEACMWDGALVMDVDRLARGDTIDQGRVQRAFFYSNTRIVTPNKTYDPANEYDNEYFEFSLFMSRREYATIKRRMQRGRERSSSDGYYVGNVAPYGWERVIAPDGKHYSLAPHQTEAPVLDLMYDLCGNKQYGYQKACTYMSNMGILARSGKPFAPSTLKGIISNPANIGKVRWGYRKTVRAVKDGRVVKSRPNATDYILADAAWAPRINIDLFERANQPKGCFSAPIRSDRPIQNLFAGLVRCSQCGRLMVRKKAQTKTPYDFLICQYAECSTVGIRIDELEEALLGWLKDYIAKYEFSDTHEEDTAAIAAKELIVTNFETEHQTLLKQRESLFDFLEQGIYTKEIFIERSNALEQRIRDCMNNITAAREDLYVTIARQANRKNFVPKCKNLLSEWGSLTVPEKNSALKQLIDRIVLTKTKRNKKNQKNSEFTIDVYPKVPK

SEQ ID NO: 5148 - protein, 510 aa, Unknown
  Description of Unknown: Integrase B5149 sequence
  PTHR30461:SF3,SM00857,G3DSA:1.10.10.2600,IPR036162,PF13408, IPR025827,PS51737,G3DSA:3.40.50.1390,IPR006119,IPR038109, PF07508,IPR011109,SSF53041,PTHR30461,Coil, PS51736,cd00338,PF00239
MDTLADVVVYARYSSAGQNDQSIEGQVKTCREFAAQRGFRVVQEYADRAISGRHAETRPAFQQMIADARKKTFQYILVWKLDRFARNRYDSAIYKKELRKYGVRVLSVTEGIDEGNESILLEAILEAMAEEYSRQLSQNVRRGMRQNAEKGLSLGGGTPYGYRLQGKRYVIVDREAEVVRFIHEAYAEGRPSREIINECKSRGYHTRKGADFTMNAIARMIANDKYAGAFLFKGELVVGDLYPPIVPQELKERAKKRLALKARAPGHEKAKVEYILHGKLFCGHCGAPMVGESGKSKSGTVYNYYACAEKKKRHGCKKKNERKDFLEWYIAEQITEYVLTDSRIEEIADAVIAEYKKSFDASGIKRLEKKIKDADAELDKLVDALIKTSADAAVKRINARIEEVEQYRAQLEDDLSSLRIASRVEIKKDDVAKWLRSMRRGDLMDDEYRKKIVEIFVNAVYLYDDRVAIFFNVKDCKQVSYIDMIDATGWAACSDLSSNALPLRFSRFWS

SEQ ID NO: 5149 - protein, 510 aa, Unknown
  Description of Unknown: Integrase B5150 sequence
  SM00857,G3DSA:1.10.10.2600,IPR036162,PF13408,PS51737, G3DSA:3.40.50.1390,IPR025827,IPR006119,IPR038109,PF07508, IPR011109,SSF53041,PTHR30461,Coil,PS51736, cd00338,PF00239
MSYFIYARKSRKDAELEALGIDVLERHITTLLELAKTLSLPIGAIYREVVSGDSIDARPVMTQVLSEVEACMWDGALVMDVDRLARGDTIDQGRVQRAFFYSNTRIVTPSKTYDPANEYDNEYFEFSLFMSRREYATIKRRMQRGRERSSSDGYYVGNVAPYGWERVIAPDGKHYSLAPHQTEAPVLDLMYDLCGNKQYGYQKACTYMTNMGILARSGKPFSPSTLKGIISNPANIGKVRWGYRKTVRAVKDGRVVKSRPNATDYILADAEWAPRISADLFKRANQPKGCFSSPVRNDRPIQNLFAGLVRCSQCGRLMVRKKAQTKTPYDVLICQYTECSTVGIRIDELEEALLEWLKDYIVKYEFTDTHEEDAAAIAAKEMIVTNFETEHQTLLKQRESLFDFLEQGIYTKEIFIERSNALEQRIRDCMNNIATAQEDLHTTIARQANRKNFVPKCKNLLSEWDSLTISEKNSALRQLIDRIVLTKTKRNKKNQKNSEFTIDVYPKVPK

SEQ ID NO: 5150 - protein, 510 aa, Unknown
  Description of Unknown: Integrase B5151 sequence
  SM00857,G3DSA:1.10.10.2600,IPR036162,PF13408,PS51737, G3DSA:3.40.50.1390,IPR025827,IPR006119,IPR038109,PF07508, IPR011109,SSF53041,PTHR30461,Coil,PS51736, cd00338,PF00239
MKRAVFYGRYSSDRQTEQSIEGQRRVCEEFAKAEGIRIVAEYIDRATSGTSTDHRDQFQQMISDSKNGCWEYVLVYKLDRFARNRYDSAVYKQKLKRCGVKVLSATERITDSPEGILIEGLLESMDEYFSRELSRKCKRGIRETIIKGNTFTRAPYGYHKTEKRLVVDEVEANNVRQIFTQYVSGATLQSIADKLNAAGHRTRQGNLFRRYSVSDILHNPKYTGTYYVTDIAEPETCPQIVPQSLYDAAQERLKHSAHNARTNRTGHVFALTGLLQCGICGRKVVGTSVQRKYFYYTCIAKSCETLPHDHNLTISSEKVESTVIAALADYFTPEHVTDFAECLYRMYLAEDSPKPDRSKQIQALEKQIQGAVSALIACPQSEALQARLTDLEQQKQQLEQAPPEPPKLTQQDFIKFFCWITKALDRADDRKKFFNAVIHSVTLYRDHVVIAINLTNDDVDPPERVILEKSFSDTVVKSSLYPTISKIKLAPPLLLLYVPLPAGIFRHRGA

SEQ ID NO: 5151 - protein, 510 aa, Unknown
  Description of Unknown: Integrase B5152 sequence
  PTHR30461:SF3,IPR036162,PS51737,IPR011109,PTHR30461, PS00397,PF00239,G3DSA:1.10.10.2600,IPR006119,SSF53041, SM00857,IPR025827,IPR038109,PS51736,cd03768, IPR006118,PF13408,G3DSA:3.40.50.1390,PF07508,Coil
MRDMDSARLWVVCYVRVSTREQAEKGYSVSEQQERLKAYCLAKDWVVAQVITDPGFSGAKLERPGIQQLISLVQAKKCDAVLVWKLDRLSRSQKDTLYLIEDVFLKNGCAFVSMNENFDTSTAFGRAMIGILSVFAQLEREQIRERMAVGRVGRAKAGLFHGGGFAPIGYDYKTIAEGGAGLVVNEYEAMQVREVFSLYLQGWPVNRIRKYMAAHYTTKDGDWGSDTTVRDVLKNPLYAGKINWAKKVYDGQHEPLISQETFDAAAARLATSSWKRTSSDGMERDSPFKSTHLLGGIIWCARCGARYFASGNYSGRGENKRYWPYYVCYSRAKSAKHMIRDPNCRNDRWAVAKLDAIIEGEIRKLAFDPAALELAVSGPQQDEDIAQRRAALQQRLNDLRAQMGRVLDLYQMGGSLPASMVGDRVAKLQAEIDGVEAALEEAVEEPPTRRLDAARVALVGAEDVLDNGTLDERRELVHSLIRRIDLDGENIDIHWSFSPEAAEVIPGRSA

SEQ ID NO: 5152 - protein, 510 aa, Unknown
  Description of Unknown: Integrase B5153 sequence
  SM00857,G3DSA:1.10.10.2600,IPR036162,PF13408,PS51737, G3DSA:3.40.50.1390,IPR025827,IPR006119,IPR038109,PF07508, IPR011109,SSF53041,PTHR30461,Coil,PS51736, cd00338,PF00239
MSYFIYARKSRKDADLEALGIDVLERHITTLLELAKTLLPPIGAIYREVVSGDSIDSRPVMSQVMAEVESCMWDGCLVMDVDRLARGDTIDQGRVQRAFFYSNTKIVTPNKTYDPANEYDNEYFEFSLFMSRREYATIKRRMQRGRERSSSDGYYVGNIPPYGWRRVIAPDGKHFSLAPDPTESPVLDLMYDLCGNKQYGYQKACTHMAEMGILSRSGRPFTPSTLKGIISNPANIGKVRWGHRKTVRTVKDGKISRSRPHSSDYILADAVWPPRISADLFQRANQPKGSCSAPVRDDRPIQNIFAGLVRCSQCGRLMVRKKAHTKTPYDILICQYTECPTVGIRIDELELALLEWLRNYIDKYELTDALPEDVENVAAKEAIVKNFEKEHETLLKQRESLFDFLEQGIYTKEIFIERSNALERRVKECMEHIISAQNDLHATLALQANRKNFVPRCKNLLGEWGRLTIPEKNSALKVLIEKIMFTKTKRNKKGQDRSDFEIDVFPKVPK

SEQ ID NO: 5153 - protein, 510 aa, Unknown
  Description of Unknown: Integrase B5154 sequence
  PTHR30461:SF3,cd00338,SM00857,G3DSA:1.10.10.2600,IPR036162, PF13408,IPR025827,PS51737,G3DSA:3.40.50.1390,IPR006119, IPR038109,PF07508,IPR011109,SSF53041,PTHR30461, PS51736,Coil,PF00239
MQKRRTKYANSQGDNAVIYARYSSHNQKDTSIEQQIEVCTKYARDNGYRITNIYADRAISGKTDARPQFRLMMQDAREHKFDVVISWKSSRLGRDMLDAMTNDIILRNLGIKCFYTEENFDDTAAGRFALRNMMNVNQFYIENMAEDILRGMRDNAKKCRVNNGSPPLGYRRGADGKYEIVPEEAETVREIFTKVLAGMAFVDIANELNARGIKTKKGAPWGRSSFSRLLSNERYIGTYKWSDIVIENGMPAIIDREVFEMAQKKIKGERPLRRRHNENGDYLLTGKLFCGKCDSPMTGMSGTSKSGAKHHYYACYSARKDGSCDKKAVKRDWVEKTVALFIKEHVLRDEVIEWMVDQYMVYQKATFESQRIMEMRNQLKDVQSQLDNLVDAIARGMYTDSTKDKLLKLEADKKEIEQDIRLATYNLKEYDREHVRCYFLSFKEGSVESKDYLKRLFDQFVTKIYLYDDEIRIAFSGTKDDSPVSFKIIDEAEELAVSSVRLSSASSHQA

SEQ ID NO: 5154 - protein, 510 aa, Unknown
  Description of Unknown: Integrase B5155 sequence
  SM00857,G3DSA:1.10.10.2600,IPR036162,PF13408,PS51737, G3DSA:3.40.50.1390,IPR025827,IPR006119,IPR038109,PF07508, IPR011109,SSF53041,PTHR30461,Coil,PS51736, cd00338,PF00239
MSYFIYARKSRKDADLEALGIDVLERHITTLLELAKTLSLPIGAIYREVVSGDSIDSRPVMSQVMAEVESCMWDGCLVMDVDRLARGDTIDQGRVQRAFFYSNTKIVTPNKTYDPANEYDNEYFEFSLFMSRREYATIKRRMQRGRERSSSDGYYVGNIPPYGWRRVIAPDGKHFSLAPDPTESPVLDLMYDLCGNKQYGYQKACTHMAEMGILSRSGRPFTPSTLKGIISNPANIGKVRWGHRKTVRTVKDGKISRSRPHSSDYILADAVWPPRISADLFQRANQPKGSCSAPVRDDRPIQNIFAGLVRCSQCGRLMVRKKAHTKTPYDILICQYTECPTVGIRIDELELALLEWLRNYIDKYELTDALPEDAENIAAKEAIVKNFEKEHETLLKQRESLFDFLEQGIYTKEVFIERSNALEQRVKECMEHIITAQNDLHATLALQANRKNFVPRCKNLLGEWGRLTIPEKNSALKVLIEKIMFTKTKRNKKGQDRSDFEIDVFPKVPK

SEQ ID NO: 5155 - protein, 510 aa, Unknown
  Description of Unknown: Integrase B5156 sequence
  PTHR30461:SF3,SM00857,G3DSA:1.10.10.2600,IPR036162,PF13408, PS51737,G3DSA:3.40.50.1390,IPR025827,IPR006119,IPR038109, PF07508,IPR011109,SSF53041,PTHR30461,Coil, PS51736,cd00338,PF00239
MKIKTPEYRDGVIYARYSPGPNQTEQSIEGQLRDCERFCADNNIRIIATYIDRKQSGRSDNRTDFQRMLRDSKRRAFSTVVVWKIDRFGRNREEIAKNKAVLRLNGVKVLSAKEHIPDGPEGIILESVLEGLAEYYSANLSQNIVRGMRESALKCQYNGSGLSLGYSVDKDHKFHIDSHGAAIVKMIYEKYDNGEKIADILRYIQASGIKTMKGKEYTHYGISRILRNRAYIGEYKWQDIVIPDGMPRIISDELFERVQRRMEKNKKAPSAGRGVDFLLTAKLFCGHCKSTMIGDSGTGKTGGKWYYYSCRGRKTKKTDCKKRSVPKDWLEREVVALTASYILQDDIISNIADRVVEIQRKEHEDNSMLRYYEDRLKEAETSIRNIMRAIESGVFTDSTRDRLVELEAEKADMETEIAKEKITRPIVTREQVIYFLNRFKNGDVDDKEYQRQIIDALVNKVILYDDKITITYNYSGEGKEITADIIEEAADEALSDAEDRCSTFQRYPQS

SEQ ID NO: 5156 - protein, 510 aa, Unknown
  Description of Unknown: Integrase B5157 sequence
  SM00857,G3DSA:1.10.10.2600,IPR036162,PF13408,IPR025827, PS51737,G3DSA:3.40.50.1390,IPR006119,IPR038109,PF07508, IPR011109,SSF53041,PTHR30461,Coil,PS51736, cd00338,PF00239
MSYFIYARKSRKDAELEALGIDVLERHITTLLELAKTLSLPIGAIYREVVSGDSIDARPVMTQVLSEVEACMWDGALVMDVDRLARGDTIDQGRVQRAFFYSNTRIVTPNKTYDPANEYDNEYFEFSLFMSRREYATIKRRMQRGRERSSSDGYYVGNVAPYGWERVIAPDGKHYSLAPHQTEAPVLDLMYDLCGNKQYGYQKACTYMSNMGILARSGKPFTPSTLKGIISNPANIGKVRWGHRKTVRAVKDGRVVKSRPKATDYILSDAAWAPRISPDLFKRANQPKGCFSAPVRNDRPIQNLFAGLVRCSQCDRLMVRKKAQTKTPYDMLICQYTECSTVGIRIDELEEALLGWLKDYIAKYEFADTHEEDTAAIAAKELIVTNFETEHQTLLKQRESLFDFLEQGIYTKEIFIERSNALEQRIRDCMNNITAAREDLHTTIARQANRKNFVPKCKNLLSEWDSLTVSEKNSALRQLIDRIVLTKTKRNKKNQKNSEFTIDVYPKVPK

SEQ ID NO: 5157 - protein, 510 aa, Unknown
  Description of Unknown: Integrase B5158 sequence
  SM00857,G3DSA:1.10.10.2600,IPR036162,PF13408,PS51737, IPR025827,G3DSA:3.40.50.1390,IPR006119,IPR038109,PF07508, IPR011109,SSF53041,PTHR30461,Coil,PS51736, cd00338,PF00239
MSYFIYARKSRKDADLEALGIDVLERHITTLLELAKTLLLPIGAIYREVVSGDSIDSRPVMSQVMAEVESCMWDGCLVMDVDRLARGDTIDQGRVQRAFFYSNTKIVTPNKTYDPANEYDNEYFEFSLFMSRREYATIKRRMQRGRERSSSDGYYVGNIPPYGWRRVIAPDGKHFSLAPDPTESPVLDLMYDLCGNKQYGYQKACTHMAEMGILSRSGRPFTPSTLKGIISNPANIGKVRWGHRKTVRTVKDGKISRSRPHSSDYILADAVWPPRISADLFQRANQPKGSCSAPVRDDRPIQNIFAGLVRCSQCGRLMVRKKAHTKTPYDILICQYTECPTVGIRIDELELALLEWLRNYIDKYELTDALPEDVENVAAKEAIVKNFEKEHETLLKQRESLFDFLEQGIYTKEIFIERSNALERRVKECMEHIISAQNDLHATLALQANRKNFVPRCKNLLGEWGRLTIPEKNSALKVLIEKIMFTKTKRNKKEQDRSDFEIDVFPKVPK

SEQ ID NO: 5158 - protein, 510 aa, Unknown
  Description of Unknown: Integrase B5159 sequence
  PTHR30461:SF3,IPR036162,PS51737,IPR011109,PTHR30461, PS00397,PF00239,G3DSA:1.10.10.2600,IPR006119,SSF53041, cd00338,SM00857,IPR025827,IPR038109,PS51736, IPR006118,PF13408,G3DSA:3.40.50.1390,PF07508,Coil
MQVVLFLYPKIAYIDRKDDNNMAKDIINMRNACAYIRVSTDKQEELSPDAQKRLLIDFAKKNNMSLLESDIFLDNGISGKKADKRPEFMKMIGLAKSKEHPFDVILVWKFSRFARNQEESIVYKSLLKKNKVEVVSISEPLVDGPFGTLIERIIEWMDEYYSIRLSGEVLRGMTEKALRGGYQSTLPLGYRMNKETGIPYIYDTEAVIVKKIYKEYIAGHSYLEIARQLNTIGYKTKKGATYEGRTVEYILSNPFYYGAIRWNRQKHDDHTIKPVNEWIIATGKHEALIDKATWDEVQHLIALRSKPYKARAAGHMRHWLGGIVKCSSCGASLMSTNHGSSYQCGNYNKGKCSHSHYIKTVELEQSLFAAFGQILDGSMELHYELKKRVYEDNTNDKNMITKQLDKLTDKELRIKEAYQAGIDTIDEYKENKQLIIAEREALQQQLTTLTEQSNATTNAAMLKNISSVLGIIKDDSKDTLTRANAIRSVVDHCVYDKVNDNLEIYFFLQR

SEQ ID NO: 5159 - protein, 510 aa, Unknown
  Description of Unknown: Integrase B5160 sequence
  SM00857,G3DSA:1.10.10.2600,IPR036162,PF13408,IPR025827, PS51737,G3DSA:3.40.50.1390,IPR006119,IPR038109,PF07508, IPR011109,SSF53041,PTHR30461,Coil,PS51736, cd00338,PF00239
MSYFIYARKSRKDAELEALGIDVLERHITTLLELAKTLSLPIGAIYREVVSGDSIDARPVMTQVLSEVEACMWDGALVMDVDRLARGDTIDQGRVQRAFFYSGTRIVTPNKTYDPANEYDNEYFEFSLFMSRREYATIKRRMQRGRERSSSDGYYVGNVAPYGWERIIAPDGKHYSLTPSQTEAPVLDLMYDLCGNKQYGYQKACTYMSNMGILARSGKPFSPSTLKGIISNPANIGKVRWGYRKTVRAVKDGRVVKSRPNATDYILADAAWEPRISADLFKRANQPKGCFSSPVRNDRPIQNLFAGLVRCSQCGRLMVRKKAQTKTPYDVLICQYTECSTVGIRIDELEEALLGWLKDYIAKYEFSDTHEEDTAAIAAKELIVTNFETEHQTLLKQRESLFDFLEQGIYTKEIFIERSNALEQRIRDCMNNITAAQEDLHTTIARQANRKNFVPKCKNLLSEWNSLTIPEKNSSLRKLIDRIVLTKTKRNKKNQKNSEFMIDVYPKVPK

SEQ ID NO: 5160 - protein, 510 aa, Unknown
  Description of Unknown: Integrase B5161 sequence
  SM00857,G3DSA:1.10.10.2600,IPR036162,PF13408,PS51737, G3DSA:3.40.50.1390,IPR025827,IPR006119,IPR038109,PF07508, IPR011109,SSF53041,PTHR30461,Coil,PS51736, cd00338,PF00239
MSYFIYARKSRKDADLEALGIDVLERHITTLLELAKALSLPIGAIYREVVSGDSIDSRPVMSQVMAEVESCMWDGCLVMDVDRLARGDTIDQGRVQRAFFYSNTKIVTPNKTYDPANEYDNEYFEFSLFMSRREYATIKRRMQRGRERSSSDGYYVGNIPPYGWRRVIAPDGKHFSLAPDPVEAPVLDLMYDLCGNKQYGYQKVCTHMAEMGILSRSGRPFTPSTLKGIISNPANIGKVRWGHRKTVRTVKDGKISRSRPHSSDYILADAVWPPRISADLFQRANQPKGSCSAPVRDDRPIQNIFAGLVRCSQCGRLMVRKKAHTKTPYDILICQYTECPTVGIRIDELELALLEWLRNYVDKYELTDALPEDAENVAAKEAIVKNFEKEHETLLKQRESLFDFLEQGIYTKEIFIERSNALEQRVKECMEHIISAQNDLHATLALQANRKNFVPRCKNLLGEWGKLTIPEKNSALKVLIEKIMFTKTKRNKKGQDRSDFEIDVFPKVPK

SEQ ID NO: 5161 - protein, 510 aa, Unknown
  Description of Unknown: Integrase B5162 sequence
  PTHR30461:SF3,cd00338,SM00857,G3DSA:1.10.10.2600,IPR036162, PF13408,IPR025827,G3DSA:3.40.50.1390,PS51737,IPR006119, IPR038109,PF07508,SSF53041,IPR011109,PTHR30461, PS51736,Coil,PF00239
MSSVDKIAVVYARYSSHGQTEQSIEGQIAAAQKYAEQHGYTIIHIYADRAMTGRNDDREEFQRMLSDTATHQFGVILLWKIDRFGRNREEIAFNRYRCKKNGVRVERVAEDVPDGPEGVILDSVLEGMAEYYSLQLAQNVRRGQRESAKKSQTVGGCKIIGYNVNPDTKRYEVDPKTAPFVTEVFKRYANGETISEIVAWLNAQGVRTTRGGEFTVNSLHRLLKNEKYTGVYIFHDIRNEGGMPALIDHATFDKVQEMLKVNRRAPARVWSKTEYLLTDKLFCGHCGAMMVGESGHGRNGTKHNYYTCWNRKKKKSCDKKPVRQDVIESLVLRSIGKLLENPATLENIADQVWAAYERSDTSGDTIKALDKQIADVNKALSNVMKAIEMGIINEMTKTRMDELTDQKQALSAARAEAGLAGGFKLTRDMILFFLQEIAALDMADRDSQKRLIKTFVNAIYLYDDHFDIAFNYTDNGKVVVRMQEINDAACGEVFGRCAQSPAKSRLSRLR

SEQ ID NO: 5162 - protein, 510 aa, Unknown
  Description of Unknown: Integrase B5163 sequence
  SM00857,G3DSA:1.10.10.2600,IPR036162,PF13408,PS51737, IPR025827,G3DSA:3.40.50.1390,IPR006119,IPR038109,PF07508, IPR011109,SSF53041,PTHR30461,Coil,PS51736, cd00338,PF00239
MSYFIYARKSRKDADLEALGIDVLERHITTLLELAKTLLLPIGAIYREVVSGDSIDSRPVMSQVMAEVESCMWDGCLVMDVDRLARGDTIDQGRVQRAFFYSNTKIVTPNKTYDPANEYDNEYFEFSLFMSRREYATIKRRMQRGRERSSSDGYYVGNIPPYGWRRVIAPDGKHFSLAPDPTESPVLDLMYDLCGNKQYGYQKACTHMAEMGILSRSGRPFTPSTLKGIISNPANIGKVRWGHRKTVRTVKDGKISRSRPHSSDYILADAVWPPRISADLFQRANQPKGSCSAPVRDDRPIQNIFAGLVRCSQCGRLMVRKKAHTKTPYDILICQYTECPTVGIRIDELELALLEWLRNYIDKYELTDALPEDVENVAAKEAIVKNFEKEHETLLKQRESLFDFLEQGIYTKEIFIERSNALERRVKECMEHIISAQNDLHATLALQANRKNFVPRCKNLLGEWGRLTIPEKNSALKVLIEKIMFTKTKRNKKGQDRSDFEIDVFPKVPK

SEQ ID NO: 5163 - protein, 510 aa, Unknown
  Description of Unknown: Integrase B5164 sequence
  PTHR30461:SF3,SM00857,G3DSA:1.10.10.2600,IPR036162,PF13408, IPR025827,PS51737,G3DSA:3.40.50.1390,IPR006119,IPR038109, PF07508,IPR011109,SSF53041,PTHR30461,PS51736, cd00338,PF00239
MIPAVGYCRFSSENQADGFSIEAQKNAINEFASRMGFEILRFYVDEAKSGTTTEGRTAFLDMLSDSKNHEFQVVIVHKLDRFARSRIDSAVSKKVLKDNGVRLISVLEQLDDSPESIILESVLEGMNEYYSKNLSRETKKGMKVAGAKGRILGTIPYGYIADKDNKFQIVNKEAENVRFIYDCFNKGMTFKALREELKKNNIQTRAGNWFNDSNLRQMLTNPTYMGDYHFGTAVYSGVVPPIVSRDLFDSVQVIIQKHKRVVPKDKGTAYLLTGLIFHSCGEAMVGYKSIKKGKAYYYYRCRKKEPKGYVYKQAIEDAVLAAVQNFFNDEKVITAYTKECNKALKNIKKSSDIASLRKRDSELKDQSSKLLDLYLTSVINQQLYLEKKERIDIESRLVESQIATCVQAFDLSPDIIRCAFADYADKIKNSLDNPKDTQAVLSTLIKSIKLYEDRFEITFKFGDRQVAYNFSNAPALAQLVATYSFNEKLAKNVAFLSISLISPNLSSQSA

SEQ ID NO: 5164 - protein, 510 aa, Unknown
  Description of Unknown: Integrase B5165 sequence
  PTHR30461:SF3,SM00857,G3DSA:1.10.10.2600,IPR036162,PS51737, G3DSA:3.40.50.1390,IPR006119,IPR038109,PF07508,IPR011109, SSF53041,PTHR30461,Coil,PS51736,cd00338, PF00239
MDTDIFAIYLRKSRKDLENKDYDVLKRHRKILLDFASSKNIVIHEKDIYEEVVSGETIQDRPVIQSLLKKIEVGYYKAVLVMEIERLARGNTIDQGIIAQAFQLTNTLIITPQKTYDTRNEFDNEFLEFGLFMSRREYKAISRRIQTGRIQSCKEGNYVGSVTPYGYDKEKLKGEKGYKLTPNDEAENVKLIFDLFLDGLGTSTLAFKLNDLNIKSRTGKPWTPAMVRNILTNKIYIGILTWGKRANVKKLDNNLISKTRPVNHNCIESKGKHDPIIDELTFYKAQTLLKSNSSKKVPKDKALKNPLAGIIICKKCGTNMIRRPLKNIPDTILCKNHYCDNISSYLYLIEKRLLDSLHTTLLEYYYYLDNYEKEDLKSKKNYDIQIKKIDKDINTLKKQHVRTCELLELGVYSLELFKERSTSINEQVDALIKQKDELIRLNKDNKTEKIIQAIPKIENCLNTYHTLSIEDKNKLLKSIIKKAYYLKDATGGRWNKEAQDNFSIELELNL

SEQ ID NO: 5165 - protein, 510 aa, Unknown
  Description of Unknown: Integrase B5166 sequence
  PTHR30461:SF3,cd00338,SM00857,G3DSA:1.10.10.2600,IPR036162, PF13408,PS51737,G3DSA:3.40.50.1390,IPR025827,IPR006119, IPR038109,PF07508,IPR011109,SSF53041,PTHR30461, PS51736,Coil,PF00239
MPKAVIYARFSSHNQREESIEQQVAECQAFAKANDLTVVDVYADAAVSGRSDRRPQFQRLRRDAAKKAFEVVIAYKSSRIARNMLNALTFEVEMNKSGVTVLYAKEEFGNTAAGRFALRTMMSVNQFYSENLGEDIKRTQADNARQCKANGPAPYGYRSGVDGRFEIDETAAAIVREIYTRTAAGESNVSIMRDLNARHLKTRLGHEWGKNSFQGILGNERYLGIYIFDGVRVPSGMPRIIDDKLFKEAMIAMSAKKKKNPEADYQLTGKLYCGECGEMMIGMSGTGKSGTVYNYYACSGRRTGSGCKKASVGRDQTEIAVASALLAKIMDDAVVDQIADEIIDFQQKHKNNPEIKALEAAKADNKKAIDNIMNAIEAGIFTDTTKDRLLALEAESKEITERLEELTASQLNVSRDQVVGYLKSYRGGEVRDRKYRMKLFQTFLVRAYVYDDRLKIVFDPIGEQTGEVNMTLDEVDGESGDGVRLMEDKGHHISATRTLYLVYSVPFTAK

SEQ ID NO: 5166 - protein, 510 aa, Unknown
  Description of Unknown: Integrase B5167 sequence
  PTHR30461:SF3,SM00857,G3DSA:1.10.10.2600,IPR036162,PF13408, IPR025827,G3DSA:3.40.50.1390,PS51737,IPR006119,IPR038109, PF07508,IPR011109,SSF53041,PF00239,PTHR30461, PS51736,Coil,cd00338
MSSVDKIAVVYARYSSHGQTEQSIEGQIAAAQKYAEQHGYTIIHVYADRAMTGRNDDREQFQKMLSDTATHQFGVILLWKIDRFGRNREEIAFNRYRCKKNGVRVERVAEDVPDGPEGVILDSVLEGMAEYYSLQLAQNVRRGQRESAKKSQTVGGCKIIGYNVNPDTKRYEVDPKTAPFVTEVFKRYANGETISEIVTWLNAHGVRTTRGGEFTVNSLHRLLKNEKYTGVYIFHDIRNEGGMPALIDRATFDKAQEMLKVNRRAPARVWSKTEYLLTDKLFCGHCGSMMVGESGHGRNGTKHNYYTCWNRKKKKTCDKKPIRQDVIEPLVLRAIGKLLENPATLENIADQVWAAYERSDTSGDTIKALDKQIADVDRALSNVMKAIEMGIINEMTKARMDELTDQKQALSAARAEAGLAGGFKLTRDMILFFLQDMAALDRSNRDSQKRLIKTFVNAIYLYDDHFNIAFNYTDNGKMTVRMQEIDDAASGDVFGRCAQSPAKSRLSRLR

SEQ ID NO: 5167 - protein, 510 aa, Unknown
  Description of Unknown: Integrase B5168 sequence
  SM00857,G3DSA:1.10.10.2600,IPR036162,PF13408,IPR025827, G3DSA:3.40.50.1390,PS51737,IPR006119,IPR038109,PF07508, SSF53041,IPR011109,PTHR30461,Coil,PS51736, cd00338,PF00239
MPTDYALYLRKSRADLEAEAHGEGDTLARHEHILMELAKSRALPIGAIYREIVSGERIANRPVMQQLLSEVEDGRWKGVLVTETSRLARGDTIDQGIVAQAFKFSGTLIVTPSKTYDPTQEADEEWMEFGLFMSRQEYRMIRRRMTAGTRTAKKEGRYLASRAPYGYERCKLPGRGWSIRPIEPEAGVVRKIYEQFLSGKGAGEIAAYLNLLGIPSPTERAWVRQTVGLILRNPHYAGYIPSAVHPHKKLLKDGQLTVKRPLNKQCELYEGIHEAIIPRETWEETQRLLVQNHKPRVPSALQQHNPLAGLLCCDKCGKKMQRHPQTDRNFEKYYCPTVGCPTVSAPLEQVEDLVLQGLKDFLYNLDLQEQQLPDMSAEQEALKNIDSRLAEQRKRLTKTFELVEDGIYTREAFLQRQSEINAEMARLQTAREELQRKIDTHAAELSARENAAPQIRHVLDVYDRKSAPAERNALLKQVIDRIDYHKTTKQRWSAENDLSVTIHPKISARK

SEQ ID NO: 5168 - protein, 510 aa, Unknown
  Description of Unknown: Integrase B5169 sequence
  SM00857,G3DSA:1.10.10.2600,IPR036162,PF13408,IPR025827, PS51737,G3DSA:3.40.50.1390,IPR006119,IPR038109,PF07508, SSF53041,IPR011109,PTHR30461,Coil,PS51736, cd00338,PF00239
MSYFIYARKSRKDAELEALGIDVLERHITTLLELAKTLSLPIGAIYREVVSGDSIDARPVMMQVLSEVEACMWDGALVMDVDRLARGDTIDQGRVQRAFFYSGTRIVTPNKTYDPANEYDNEYFEFSLFMSRREYATIKRRMQRGRERSSSDGYYVGNVAPYGWERVIAPDGKHYSLAPHQTEAPVLDLMYDLCGNKQYGYQKACTYMSNMGILARSGKPFAPSTLKGIISNPANIGKVRWGYRKTVRAVKDGRVVKSRPNATDYILADAAWAPRINIDLFERANQPKGCFSAPIRSDRPIQNLFAGLVRCSQCGRLMVRKKAQTKTPYDFLICQYAECSTVGIRIDELEEALLGWLKDYIAKYEFSDTHEEDTAAIAAKELIVTNFETEHQTLLKQRESLFDFLEQGIYTKEIFIERSNALEQRIRDCMNNITAAREDLYVTIARQANRKNFVPKCKNLLSEWGSLTVPEKNSALKQLIDRIVLTKTKRNKKNQKNSEFTIDVYPKVPK

SEQ ID NO: 5169 - protein, 510 aa, Unknown
  Description of Unknown: Integrase B5170 sequence
  SM00857,G3DSA:1.10.10.2600,IPR036162,PF13408,PS51737, G3DSA:3.40.50.1390,IPR025827,IPR006119,IPR038109,PF07508, SSF53041,IPR011109,PTHR30461,Coil,PS51736, cd00338,PF00239
MSYFIYARKSRKDADLEALGIDVLERHITTLLELAKTLSLPIGAIYREVVSGDSIDSRPVMSQVMAEVESCMWDGCLVMDVDRLARGDTIDQGRVQRAFFYSNTKIVTPNKTYDPANEYDNEYFEFSLFMSRREYATIKRRMQRGRERSSSDGYYVGNIPPYGWRRVIAPDGKHFSLAPDPTESPVLDLMYDLCGNKQYGYQKACTHMAEMGILSRSGRPFTPSTLKGIISNPANIGKVRWGHRKTVRTVKDGKISRSRPHSSDYILADAVWPPRISADLFQRANQPKGSCSTPVRDDRPIQNIFAGLVRCSQCGRLMVRKKAHTKTPYDILICQYTECPTVGIRIDELELALLEWLRNYIDKYELTDALPEDVENVAAKEAIVKNFEKEHETLLKQRESLFDFLEQGIYTKEIFIERSNALERRVKECMEHIISAQNDLHATLALQANRKNFVPRCKNLLGEWGRLTIPEKNSALKVLIEKIMFTKTKRNKKGQDRSDFEIDVFPKVPK

SEQ ID NO: 5170 - protein, 510 aa, Unknown
  Description of Unknown: Integrase B5171 sequence
  PTHR30461:SF3,cd00338,SM00857,G3DSA:1.10.10.2600,IPR036162, PF13408,IPR025827,G3DSA:3.40.50.1390,PS51737,IPR006119, IPR038109,PF07508,IPR011109,SSF53041,PTHR30461, PS51736,Coil,PF00239
MQKRRTKYANSQGDNAVIYARYSSHNQKDTSIEQQIEVCTKYARDNGYRITNIYADRAISGKTDARPQFRLMMQDAREHKFDVVISWKSSRLGRDMLDAMTNDIILRNLGIKCFYTEENFDDTAAGRFALRNMMNVNQFYIENMAEDILRGMRDNAKKCRVNNGSPPLGYRRGADGKYEIVPDEAETVREIFTKVLAGMAFVDIANELNARGIKTKKGAPWGRSSFSRLLSNERYIGTYKWSDIVIENGMPAIIDREVFEMAQKKIKGERPLRRRHNENGDYLLTGKLFCGKCDSPMTGMSGTSKSGAKHHYYACYSARKDGSCDKKAVKRDWVEKTVALFIKEHVLRDEVIEWMVDQYMVYQKATFESQRIMEMRNQLKDVQSQLDNLVDAIARGIYTDSTKDKLLKLEADKKEIEQDIRLATYNLKEYDREHVRCYFLSFKEGSVESKDYLKRLFDQFVTKIYLYDDEIRIAFSGTKDDSPVSFKIIDEAEELAVSSVRLSSASSHQA

SEQ ID NO: 5171 - protein, 510 aa, Unknown
  Description of Unknown: Integrase B5172 sequence
  SM00857,G3DSA:1.10.10.2600,IPR036162,PF13408,PS51737, G3DSA:3.40.50.1390,IPR025827,IPR006119,IPR038109,PF07508, IPR011109,SSF53041,PTHR30461,Coil,PS51736, cd00338,PF00239
MSYFIYARKSRKDAELEALGIDVLERHITTLLELAKALSLPIGAIYREVVSGDSIDARPVMTQVLSEVEACMWDGALVMDVDRLARGDTIDQGRVQRAFFYSNTRIVTPNKTYDPANEYDNEYFEFSLFMSRREYATIKRRMQRGRERSSSDGYYVGNVAPYGWERVIAPDGKHYSLAPHQTEAPVLDLMYDLCGNKQYGYQKACTYMTNMGILARSGKPFTPSTLKGIISNPANIGKVRWGHRKTVRAVKDGRVVKSRPKATDYILSDAAWAPRISADLFKRANQPKGCFSAPVRSDRPIQNLFAGLVRCSQCGRLMVRKKAQTKTPYDMLICQYAECSTVGIRIDELEEALLGWLKDYIAKYEFADTHEEDTAAIAAKELIVTNFETEHQTLLKQRESLFDFLEQGIYTKEIFIERSNALEQRIRDCMNNITAAREDLHTTIARQANRKNFVPKCKNLLSEWDSLTVSEKNSALRQLIDRIVLTKTKRNKKNQKNSEFTIDVYPKVPK

SEQ ID NO: 5172 - protein, 510 aa, Unknown
  Description of Unknown: Integrase B5173 sequence
  SM00857,G3DSA:1.10.10.2600,IPR036162,PS51737,G3DSA:3.40.50.1390, IPR006119,IPR038109,PF07508,IPR011109,SSF53041, PTHR30461,Coil,PS51736,cd00338,PF00239
MNITDEYAIYLRKSRADLEAEALGEMETLARHEKILTELAKRQGLNVVKIYKEIVSGESIADRPQMKQLLEDVYLKKYKGVLVVEVERLARGDTRDQGTVAEAFKYSNTLIITPIKTYDPNNEYDEEYFEFGLFMSRREYKTITRRMQRGILQSVKEGNYVGSLPPYGYDIYRINKKERTLKPNEQSQYVVMMFEWFVNDRMSSGEIAKKLTTMGIPTRTGKKEWNRATVKDILKNNLYTGKIRWNRRKVGKELIEGTLKKTKRRRLSEEYLIVEGKHPALISQEMFDKAQTLFVGQVPVKANMTVVNPLARLMVCKHCGKKIGYNRNLNRPTTKPRYVHGESMSCKVKSSYYDDVIDALVQGLKMYVDDFEFKMNDEGQKHERQRHRQIIENMEKELKKLNVQRSKLFDYLEDGTYTKEEFTERKGILVEKIDSLSKALEDEKQNVPQEIDYTDKIIKFSEVIDSLKDENIDAEHKNVLLKEIVERIEYDCIDLGRNKGGKPILDIFLK

SEQ ID NO: 5173 - protein, 510 aa, Unknown
  Description of Unknown: Integrase B5174 sequence
  SM00857,G3DSA:1.10.10.2600,IPR036162,PS51737, G3DSA:3.40.50.1390,IPR006119,IPR038109,PF07508, IPR011109,SSF53041,PTHR30461,Coil, PS51736,cd00338,PF00239
MDTDIFAIYLRKSRKDLENKDYDVLKRHRKILLDFAKSKNIVIHEEDIYEEVVSGETIQDRPVIQNLLKKIEVGYYKAVLVMEIERLARGNTIDQGIIAQAFQLTNTLIITPQKTYDTRNEFDNEFLEFGLFMSRREYKAISRRIQTGRIQSCKEGNYVGSVTPYGYGKEKLKGEKGYKLTPNDEAENVKLIFDLFLDGLGTSTLAFKLNDLNIKSRTGKPWTPAMVRNILTNKVYIGILTWGKRANVKKLDNNLISKTRPVNHNCIESKGKHDPIIDELTFYKAQTLLKSNSSKKVPKDKALKNPLAGIIVCKKCGTNMIRRPLKNIPDTILCKNHYCDNISSYLYLIEKRLLDSLHTTLLEYYYYLDNYEKEDLKSKKNYDIQIKKIDKDINTLKKQHVRTCELLELGVYSLELFKERSTSINEQVDALIKQKDELIRLNKDNKTEKIIQAIPKIENCLNTYHTLSIEDKNKLLKSIIKKAYYLKNATGGRWNKEAQDNFSIELELNL

SEQ ID NO: 5174 - protein, 510 aa, Unknown
  Description of Unknown: Integrase B5175 sequence
  PTHR30461:SF3,cd00338,SM00857,G3DSA:1.10.10.2600,IPR036162, PS51737,G3DSA:3.40.50.1390,IPR006119,IPR038109,PF07508, IPR011109,SSF53041,PTHR30461,PS51736,Coil, PF00239
MGGRAAIYARFSSHNQRGESIEIQVEKSRAYCAENDLRVVATYCDFAQTGTNTDRAEFQRMMADAKRGLFDFVVIYKVTRIMRNRDEMAMARIMLRRCRVEILYAGEDISDGSAGVLQLGMLEVLAEYESALDGERIRDGIQKNAERCMANGCVRYGWDIVDGRYVVNEEEAAAIRLGVRMVLSGKSVADVVRAWEPYRTKRGGKWRFQTVRRILMRRENGGEYRYAGVVVPGGMPAIVPMDDEERVIRMLEDSHRPRAKTEAWDFPLTGKLYDGRDGGLMTGTSGTGKSGRPYHYYRCRSCGRTVRRDVVEKRVADAVREALGSADSRERIARMLADAEEERADEKPLSETIKGELAKIETAFSNIWAAIESGIAPPGGKERIDALKQRQALLKDELRTAEALEAARLDYDRALFWLEGMAAAEVDDAQLLRTFVARVVLGGPDDDDGLRVVFTFDDSAGLGDNPSLPGAIGPGGEVFDRMNASSTIGLLGEPFSGFAFFCLGWKSSPQ

SEQ ID NO: 5175 - protein, 510 aa, Unknown
  Description of Unknown: Integrase B5176 sequence
  PTHR30461:SF3,cd00338,SM00857,G3DSA:1.10.10.2600,IPR036162, PF13408,IPR025827,PS51737,G3DSA:3.40.50.1390,IPR006119, IPR038109,PF07508,IPR011109,SSF53041,PTHR30461, PS51736,Coil,PF00239
MSSVDKIAVVYARYSSHGQTEQSIEGQIAAAQKYAEQHGYTIIHVYADRAMTGRNDDREEFQRMLSDTATHQFGVILLWKIDRFGRNREEIAFNRYRCKKNGVRVERVAEDVPDGPEGVILDSVLEGMAEYYSLQLAQNVRRGQRESAKKSQTVGGCKIIGYNVDPDTKRYEVDPKTAPFVTEVFKRYANGETISEIVAWLNAQGVRTTRGGEFTVNSLHRLLKNEKYTGVYIFHDIRNEGGMPALIDRATFDKAQEMLKVNRRTPARVWSKTEYLLTDKLFCGHCGAMMVGESGHGRNGTKHNYYTCWNRKKKKLCDKKPVRQDVIEPLVLRSIGKLLENPATLENIADQVWAAYERSDTSGDTIKALDKQIADVDRALSNVMKAIEMGIINEMTKARMDELTDQKQALSAARAEAGLAGGFKLTRDMILFFLQEIAALDMADRDSQKRLIKTFVNAIYLYDDHFDIAFNYTDKGKVVVQMQEINDAACGEVFGRCAQSPAKSRLSRLR

SEQ ID NO: 5176 - protein, 510 aa, Unknown
  Description of Unknown: Integrase B5177 sequence
  PTHR30461:SF3,SM00857,G3DSA:1.10.10.2600,IPR036162,PF13408, IPR025827,G3DSA:3.40.50.1390,PS51737,IPR006119,IPR038109, PF07508,SSF53041,IPR011109,PF00239,PTHR30461, PS51736,Coil,cd00338
MSSVDKIAVVYARYSSHGQTEQSIEGQIAAAQKYAEQHGYTIIHIYADRAMTGRNDDREEFQRMLSDTATHQFGVILLWKIDRFGRNREEIAFNRYRCKKNGVRVERVAEDVPDGPEGVILDSVLEGMAEYYSLQLAQNVRRGQRESAKKSQTVGGCKIIGYNVNPDTKRYEVDPKTAPFVTEVFKRYANGETISEIVAWLNAQGVRTTRGGEFTVNSLHRLLKNEKYTGVYIFHDIRNEGGMPALIDHATFDKVQEMLKVNRRAPARVWSKTEYLLTDKLFCGHCGAMMVGESGHGRNGTKHNYYTCWNRKKKKSCDKKPVRQDVIESLVLRSIGKLLENPATLENIADQVWAAYERSDTSGDTIKALDKQIADVDRALSNVMKAIEMGIINEMTKARMDELTDQKQALSAARAEAGLAGGFKLTRDMILFFLQEIAALDMADRDSQKRLIKTFVNAIYLYDDHFDIAFNYTDNGKVVVRMQEINDAACGEVFGRCAQSPAKSRLSRLR

SEQ ID NO: 5177 - protein, 510 aa, Unknown
  Description of Unknown: Integrase B5178 sequence
  PTHR30461:SF3,cd00338,SM00857,G3DSA:1.10.10.2600,IPR036162, PF13408,IPR025827,G3DSA:3.40.50.1390,PS51737,IPR006119, IPR038109,PF07508,IPR011109,SSF53041,PTHR30461, PS51736,Coil,PF00239
MQKRRTKYASSQGDNAVIYARYSSHNQKDTSIEQQIEVCTKYARDNGYRITNIYADRAISGKTDARPQFRLMMQDAREHKFDVVISWKSSRLGRDMLDAMTNDIILRNLGIKCFYTEENFDDTAAGRFALRNMMNVNQFYIENMAEDILRGMRDNAKKCRVNNGSPPLGYRRGADGKYEIVPDEAETVREIFTKVLAGMAFVDIANELNARGIKTKKGAPWGRSSFSRLLSNERYIGTYKWSDIVIENGMPAIIDREVFEMAQKKIKGERPLRRRHNENGDYLLTGKLFCGKCDSPMTGMSGTSKSGAKHHYYACYSARKDGSCDKKAVKRDWVEKTVALFIKEHVLRDEVIEWMVDQYMVYQKATFESQRIMEMRNQLKDVQSQLDNLVDAIARGMYTDSTKDKLLKLEADKKEIEQDIRLATYNLKEYDREHVRCYFLSFKEGSVESKDYLKRLFDQFVTKIYLYDDEIRIAFSGTKDDSPVSFKIIDEAEELAVSSVRLSSASSHHT

SEQ ID NO: 5178 - protein, 510 aa, Unknown
  Description of Unknown: Integrase B5179 sequence
  PTHR30461:SF3,SM00857,G3DSA:1.10.10.2600,IPR036162,PF13408, PS51737,G3DSA:3.40.50.1390,IPR025827,IPR006119,IPR038109, PF07508,SSF53041,IPR011109,PF00239,PTHR30461, PS51736,Coil,cd00338
MSSVDKIAVVYARYSSHGQTEQSIEGQIAAAQKYAEQHGYTIIHIYADRAMTGRNDDREEFQRMLSDTATHQFGVILLWKIDRFGRNREEIAFNRYRCKKNGVRVERVAEDVPDGPEGVILDSVLEGMAEYYSLQLAQNVRRGQRESAKKSQTVGGCKIIGYNVNPDTKRYEVDPQTAPFVTEVFKRYANGETISEIVTWLNAHGVRTTRGGEFTVNSLHRLLKNEKYTGVYIFHDIRNEGGMPALIDRATFDKAQEMLKVNRRAPARVWSKTEYLLTDKLFCGHCGSMMVGESGHGRNGTKHNYYTCWNRKKKKLCDKKPVRQDVIEPLVLKSIGKLLENPATLESIADQVWAAYERSDTSGDTIKALDKQIADVNKALSNVMKAIEMGIINEMTKTRMDELTDQKQALSAARAEAGLAGGFKLTRDMILFFLQEIAALDMADRDSQKRLIKTFVNAIYLYDDHFDIAFNYTDNGKVVVRMQEINDAACGEVFGRCAQSPAKSRLSRLR

SEQ ID NO: 5179 - protein, 510 aa, Unknown
  Description of Unknown: Integrase B5180 sequence
  PTHR30461:SF3,IPR036162,PS51737,IPR011109,PTHR30461, PS00397,PF00239,G3DSA:1.10.10.2600,IPR006119,SSF53041, SM00857,IPR025827,IPR038109,PS51736,cd03768, IPR006118,PF13408,G3DSA:3.40.50.1390,PF07508,Coil
MRDMDSARLRVACYVRVSTREQAEKGYSVSEQQERLKAYCLAKDWVVAQVITDPGFSGAKLERPGMQQLISLVQTKKCDAVLVWKLDRLSRSQKDTLYLIEDVFLKNGCAFVSMNENFDTSTAFGRAMIGILSVFAQLEREQIRERMAVGRVGRAKAGLFHGGGFAPIGYDYKTIAEGGAGLVVNEYEAIQVREVFSLYLQGWPVNRIRKYMAAHYTTKDGDWGSDTTVRDVLKNPLYTGKISWAKKVYDGQHEPLISQETFDAAAARLATSSWKRTCSDGMERNSPFKSTHLLGGIIWCARCGARYFASGNYSGRGENKRYWPYYVCYSRAKSAKHMIRDPNCRNDRWAVAKLDAIIEGEIRKLAFDPAALELAVSGPQQDEDVAQRRAALQQRLNDLRAQMGRVLDLYQMGGSLPASMVGDRVAKLQAEIDGVEAALAEAVEEPPTQRLDAARAALVGAEDVLDNGTLDERRELVHSLIRRIDLDGENIDIHWSFVPEAAEVIPGRSA

SEQ ID NO: 5180 - protein, 510 aa, Unknown
  Description of Unknown: Integrase B5181 sequence
  PTHR30461:SF3,SM00857,G3DSA:1.10.10.2600,IPR036162,PS51737, G3DSA:3.40.50.1390,IPR006119,IPR038109,PF07508,IPR011109, SSF53041,PTHR30461,Coil,PS51736,cd00338, PF00239
MICAMYLRKSRADYEAEARGEGETLAKHRETLLAVAKARGLTVTDVFSELVSGDTIAERPEMQRLLRAVERGDYDAVLCMDVDRLGRGDGADQSAILKTLKYSDTIVITPYKDYNTRREMDEEFFEYSQFIARSEYKRIKRRMWAGRVASVKQGRWISPKAPFGYRRVRIDNGRAWTLTPEPSEAEAVRKVFAWYSSGACGKYVIANRLNSMGFRTQSGRPFEASAIGNMLGNPAYVGKIRWSRRRQHAEMQDGKEVFTRPLSDECIIVDGLHPAIVDPALFDAVQSRLTANRATHVTHNRKLVNPLCGLMFCSICGRAMVLVPEYKRQNVESTYKCSSPHCPTSRIDSKCVYDALFFALTQWSDYGDSSTARSHEEIAPHNQSLVSAASAQIAQLRAQLARLQDLLETGVYTPETYIERSKVISDRIATATVELEKLRKAEPVDERAAIIRLRSKIDNVLLSWDIASPEEQNRLLKGVIRRIEYSKTHKCYRNENPSKYLSITVYPILD

SEQ ID NO: 5181 - protein, 510 aa, Unknown
  Description of Unknown: Integrase B5182 sequence
  PTHR30461:SF3,SM00857,G3DSA:1.10.10.2600,IPR036162,PF13408, PS51737,G3DSA:3.40.50.1390,IPR025827,IPR006119,IPR038109, PF07508,SSF53041,IPR011109,PF00239,PTHR30461, PS51736,Coil,cd00338
MSSVDKIAVVYARYSSHGQTEQSIEGQIAAAQKYAEQHGYTIIHIYADRAMTGRNDDREEFQRMLSDTATHQFGVILLWKIDRFGRNREEIAFNRYRCKKNGVRVERVAEDVPDGPEGVILDSVLEGMAEYYSLQLAQNVRRGQRESAKKSQTVGGCKIIGYNVDPDTKRYEVDPKTAPFVTEVFKRYANGETISEIVAWLNAQGVRTTRGGEFTVNSLHRLLKNEKYTGVYIFHDIRNEGGMPALIDRATFDKAQEMLKVNRRAPARVWSKTEYLLTDKLFCGHCGTMMVGESGHGRNGTKHNYYTCWNRKKKKTCDKKPIRQDVIEPLVLRAIGKLLENPATLENIADQVWAAYERSDTSGDTIKALDKQIADVDRALSNVMKAIEMGIINEMTKARMDELTDQKQALSAARAEAGLAGGFKLTRDMILFFLQDMAALDRSNRDSQKRLIKTFVNAIYLYDDQFNIAFNYTDNGKMTVRMQEIDDAASGDVFGRCAQSPAKSRLSRLR

SEQ ID NO: 5182 - protein, 510 aa, Unknown
  Description of Unknown: Integrase B5183 sequence
  PTHR30461:SF3,SM00857,G3DSA:1.10.10.2600,IPR036162,PF13408, IPR025827,G3DSA:3.40.50.1390,PS51737,IPR006119,IPR038109, PF07508,IPR011109,SSF53041,PF00239,PTHR30461, PS51736,Coil,cd00338
MQKRRTKYANSQGDNAVIYARYSSHNQKDTSIEQQIEVCTKYARDNGYRITNIYADRAISGKTDARPQFRLMMQDAREHKFDVVISWKSSRLGRDMLDAMTNDIILRNLGIKCFYTEENFDDTAAGRFALRNMMNVNQFYIENMAEDILRGMRDNAKKCRVNNGSPPLGYRRGADGKYEIVPEEAETVREIFTKVLAGMAFVDIANELNARGIKTKKGAPWGRSSFSRLLSNERYIGTYKWSDIVIENGMPAIIDREVFEMAQKKIKGERPLRRRHNENGDYLLTGKLFCGKCDSPMTGMSGTSKSGAKHHYYACYSARKDGSCDKKAVKRDWVEKTVALFIKEHVLRDEVIEWMVDQYMVYQKATFESQRIMEMRNQLKDVQSQLDNLVDAIARGIYTDSTKDKLLKLEADKKEIEQDIRLATYNLKEYDREHVRCYFLSFKEGSVESKDYLKRLFDQFVTKIYLYDDEIRIAFSGTKDDSPVSFKIIDEAEELAVSSVRLSSASSHQA

SEQ ID NO: 5183 - protein, 510 aa, Unknown
  Description of Unknown: Integrase B5184 sequence
  PTHR30461:SF3,cd00338,SM00857,G3DSA:1.10.10.2600,IPR036162, PF13408,PS51737,G3DSA:3.40.50.1390,IPR025827,IPR006119, IPR038109,PF07508,SSF53041,IPR011109,PTHR30461, PS51736,Coil,PF00239
MSSVDKIAVVYARYSSHGQTEQSIEGQIAAAQKYAEQHGYTIIHIYADRAMTGRNDDREEFQRMLSDTATHQFGVILLWKIDRFGRNREEIAFNRYRCKKNGVRVERVAEDVPDGPEGVILDSVLEGMAEYYSLQLAQNVRRGQRESAKKSQTVGGCKIIGYNVNPDTKRYEVDPKTAPFVTEVFKRYANGETISEIVAWLNARGVRTTRGGEFTVNSLHRLLKNEKYTGVYIFHDIRNEGGMPALIDHATFDKVQEMLKVNRRAPARVWSKTEYLLTDKLFCGHCGSMMVGESGHGRNGTKHNYYTCWNRKKKKLCDKKPVRQDVIEPLVLKSIGKLLENPATLESIANQVWAAYERSDTSGDTIKALDKQIADVNKALSNVMKAIEMGIINEMTKTRMDELTDQKQALSAARAEAGLAGGFKLTRDMILFFLQEIAALDMADRDSQKRLIKTFVNAIYLYDDHFDIAFNYTDNGKVVVRMQEINDAACGEVFGRCAQSPAKSCLSRLR

SEQ ID NO: 5184 - protein, 510 aa, Unknown
  Description of Unknown: Integrase B5185 sequence
  PTHR30461:SF3,SM00857,G3DSA:1.10.10.2600,IPR036162,PS51737, G3DSA:3.40.50.1390,IPR006119,IPR038109,PF07508,IPR011109, SSF53041,PTHR30461,Coil,PS51736,cd00338, PF00239
MICAMYLRKSRADYEAEARGEGETLAKHRETLLAVAKARGLTVTDVFSELVSGDTIAERPEMQRLLRAVERGDYDAVLCMDVDRLGRGDGADQSAILKTLKYSDTIVITPYKDYNTRREMDEEFFEYSQFIARSEYKRIKRRMWAGRVASVKQGRWISPKAPFGYRRVRIDNGRAWTLTPEPSEAEAVRKVFAWYSSGACGKYVIANRLNSMGFRTQSGRPFEASAIGNMLGNPAYVGKIRWSRRRQHAEMQDGKEVFTRPLSDECIIVDGLHPAIVDPALFDAVQSRLTANRATHVTHNRKLVNPLCGLMFCSICGRAMVLVPEYKRQNVESTYKCSSPHCPTSRIDSKCVYDALFFALTQWSDYGDSSTACSHEEIAPHNQSLVSAASAQIAQLRAQLARLQDLLETGVYTPETYIERSKVISDRIATATVELEKLRKAEPVDERAAIIRLRSKIDNVLLSWDIASPEEQNRLLKGVIRRIEYSKTHKCYRNENPSKYLSITVYPILD

SEQ ID NO: 5185 - protein, 510 aa, Unknown
  Description of Unknown: Integrase B5186 sequence
  SM00857,G3DSA:1.10.10.2600,IPR036162,PF13408,IPR025827, G3DSA:3.40.50.1390,PS51737,IPR006119,IPR038109,PF07508, IPR011109,SSF53041,PTHR30461,Coil,PS51736, cd00338,PF00239
MSYFIYARKSRKDAELEALGIDVLERHITTLLELAKTLSLPIGAIYREVVSGDSIDARPVMTQVLSEVEACMWDGALVMDVDRLARGDTIDQGRVQRAFFYSNTRIVTPNKTYDPANEYDNEYFEFSLFMSRREYATIKRRMQRGRERSSSDGYYVGNVAPYGWERVIAPDGKHYSLAPSQTEAPVLDLMYDLCGNKQYGYQKACTYMTNMGILARSGKPFTPSTLKGIISNPANIGKVRWGHRKTVRAVKDGRVVKSRPKATDYILSDAAWAPRISADLFKRANQPKGCFSAPVRSDRPIQNLFAGLVRCSQCGRLMVRKKAQTKTPYDFLICQYAECSTVGIRIDELEEALLGWLKDYIAKYEFADTHEEDTAAIAAKELIVTNFETEHQTLLKQRESLFDFLEQGIYTKEIFIERSNALEQRIRDCMNNITAAREDLHTTIARQANRKNFVPKCKNLLSEWDSLTVPEKNSALRQLIDRIVLTKTKRNKKNQKNSEFTIDVYPKVPK

SEQ ID NO: 5186 - protein, 510 aa, Unknown
  Description of Unknown: Integrase B5187 sequence
  PTHR30461:SF3,SM00857,G3DSA:1.10.10.2600,IPR036162,PF13408, IPR025827,PS51737,G3DSA:3.40.50.1390,IPR006119,IPR038109, PF07508,IPR011109,SSF53041,PF00239,PTHR30461, PS51736,Coil,cd00338
MNAVIYARFSSHNQQEQSIEGQIRYCTEYAKKNDMTIINSYIDRAISGTSDNRPEFLQMIKDSNNHQFNAVLVWKLDRFARNRYDSAIYKNALKKNNVKVVSVTEYLGEGSESVLLEAMLEAMAETYSRQLSENVRRGMRESALKCQVVGGSVPLGFDTVDKKYVINEKEAEIVRFIFDEYVSGTSKKEIVNKLNAKGWRTKNGSTFVFNSLNKILSNRKYIGEYKYEDIVIEHGIPAIIDEQTFELAQKQLAKNKQNRGTKSATHEYLLATKIFCGYCGGSMIGETATGKGGGKFGYYVCRNRKKHINDCKKRREKQKELEAFIVERTLYMYKNKDFVNEVAQKVVDLYNKECGQNHLKTLELNKKELEKKLEELSDGLLKTTNARVLKKFNEQINNLDNQLAELEIEIAREKAIANATMKRSDVIDFISDIMDGNINDKQFQKKIIDTFINAIYVFDDKFIVYYNGSSTSDKVTFDDLIHDLENNGVEGSTFNTLTPPNKLKGTLSII

SEQ ID NO: 5187 - protein, 510 aa, Unknown
  Description of Unknown: Integrase B5188 sequence
  PTHR30461:SF3,SM00857,G3DSA:1.10.10.2600,IPR036162,PF13408, PS51737,G3DSA:3.40.50.1390,IPR025827,IPR006119,IPR038109, PF07508,SSF53041,IPR011109,PF00239,PTHR30461, PS51736,Coil,cd00338
MSSVDKIAVVYARYSSHGQTEQSIEGQIAAAQKYAEQHGYTIIHIYADRAMTGRNDDREEFQRMLSDTATHQFGVILLWKIDRFGRNREEIAFNRYRCKKNGVRVERVAEDVPDGPEGVILDSVLEGMAEYYSLQLAQNVRRGQRESAKKSQTVGGCKIIGYNVNPDTKRYEVDPKTAPFVTEVFKRYANGETISEIVAWLNAQGVRTTRGGEFTVNSLHRLLKNEKYTGVYIFHDIRNEGGMPALIDRATFDKAQEMLKVNRRAPARVWSKTEYLLTDKLFCGHCGTMMVGESGHGRNGTKHNYYTCWNRKKKKTCDKKPIRQDVIEPLVLRTIGKLLENPATLENIADQVWAAYERSDTSGDTIKALDKQIADVDRALSNVMKAIEMGIINEMTKARMDELTDQKQALSAARAEAGLAGGFKLTRDMILFFLQDMAALDRSNRDSQKRLIKTFVNAIYLYDDHFNIAFNYTDNGKMTVPMQEIDDAASGDVFGRCAQSPAKSRLSRLR

SEQ ID NO: 5188 - protein, 510 aa, Unknown
  Description of Unknown: Integrase B5189 sequence
  SM00857,G3DSA:1.10.10.2600,IPR036162,PS51737,G3DSA:3.40.50.1390, IPR006119,IPR038109,PF07508,IPR011109,SSF53041, PF00239,PTHR30461,PS51736,Coil,cd00338
MKIENYALYLRKSRADMEAEKLGEGETLARHKKILTELAARKGLHVGKIYHEIVSGETIAARPQIQQMIQDCYNGLYRGIIIVEVTRLSRGNQGDAQAILDCLRYGNNNNGILVVTPTKTYDIAHNQDDEEYMEFELFMSRREYKMIRKRMERGRIQAVVEGNYMGSYRPYGYDILKSKTGRTLVPNPEEAPVVQNIFTWAIEENLTPGKIAKRLSSYGVPTYSGDPEWSVSTVKTILTNPTYTGKVRWNDRMRIKTMVDGKLVSSRPRSHHGDQYMLYDGKHPALVDDATFLAASKRFHSDKTKSGLKLINPLAGILVCAKCGKAMCYQSYPARPETAARYTHKSSQICKVKSAVASDVMDAVAYSLEKYISDFEVKIDNLPEVSEDTILKQMDDLQKELIRQEKKLTRLFDAWEDGLIADNEFADRKAINNDRIASIKNQMDHLEESIPIKEDYEEKIMSFHDALSSLLDADLDADIKNAYLKGILDRIEFSRECNSEFILDVFLKED

SEQ ID NO: 5189 - protein, 510 aa, Unknown
  Description of Unknown: Integrase B5190 sequence
  SM00857,G3DSA:1.10.10.2600,IPR036162,PF13408, PS51737,G3DSA:3.40.50.1390,IPR025827,IPR006119, IPR038109,PF07508,IPR011109,SSF53041, PTHR30461,Coil,PS51736,cd00338,PF00239
MSYFIYARKSRKDADLEALGIDVLERHITTLLELAKTLLLPIGAIYREVVSGDSIDSRPVMSQVMAEVESCMWDGCLVMDVDRLARGDTIDQGRVQRAFFYSNTKIVTPNKTYDPANEYDNEYFEFSLFMSRREYATIKRRMQRGRERSSSDGYYVGNIPPYGWRRVIAPDGKHFSLAPDPTESPVLDLMYDLCGNKQYGYQKACTHMAEMGILSRSGRPFTPSTLKGIISNPANIGKVRWGHRKTVRTVKDGKISRSRPHSSDYILADAVWPPRISADLFQRANQPKGSCSAPVRDDRPIQNIFAGLVRCSQCGRLMVRKKAHTKTPYDILICQYTECPTVGIRIDELELALLEWLRNYIDKYELTDALPEDVENVAAKEAIVKNFEKEHETLLKQRESLFDFLEQGIYTKEIFIERSNALEQRVKECMEHIISAQNDLHATLALQANRKNFVPRCKNLLGEWGRLTIPEKNSALKVLIEKIMFTKTKRNKKGQDRSDFEIDVFPKVPK

SEQ ID NO: 5190 - protein, 510 aa, Unknown
  Description of Unknown: Integrase B5191 sequence
  PTHR30461:SF3,SM00857,G3DSA:1.10.10.2600,IPR036162,PF13408, IPR025827,PS51737,G3DSA:3.40.50.1390,IPR006119,IPR038109, PF07508,IPR011109,SSF53041,PTHR30461,Coil, cd00338,PF00239
MSSVDKIAVVYARYSSHGQTEQSIEGQIAAAQKYAEQHDYTIIHVYADRAMTGRNDDREEFQRMLSDTATHQFGVILLWKIDRFGRNREEIAFNRYRCKKNGVRVERVAEDVPDGPEGVILDSVLEGMAEYYSLQLAQNVRRGQRESAKKSQTVGGCKIIGYNVDPDTKRYEVDPKTAPFVTEVFKRYANGETISEIVAWLNAQGVRTTRGGEFTVNSLHRLLKNEKYTGVYIFHDIRNEGGMPALIDRATFDKAQEMLKVNRRTPARVWSKTEYLLTDKLFCGHCGAMMVGESGHGRNGTKHNYYTCWNRKKKKLCDKKPVRQDVIEPLVLRSIGKLLENPATLENIADQVWAAYERSDTSGDTIKALDKQIADVDRALSNVMKAIEMGIINEMTKARMDELTDQKQALSAARTEAGLAGGFKLTRDMILFFLQEIAALDMADRDSQKRLIKTFVNAIYLYDDHFDIAFNYTDKGKVVVQMQEINDAACGEVFGRCAQSPAKSRLSRLR

SEQ ID NO: 5191 - protein, 510 aa, Unknown
  Description of Unknown: Integrase B5192 sequence
  SM00857,G3DSA:1.10.10.2600,IPR036162,PF13408,IPR025827, PS51737,G3DSA:3.40.50.1390,IPR006119,IPR038109,PF07508, IPR011109,SSF53041,PTHR30461,Coil,PS51736, cd00338,PF00239
MSYFIYARKSRKDAELEALGIDVLERHITTLLELAKTLSLPIGAIYREVVSGDSIDARPVMTQVLSEVEACMWDGALVMDVDRLARGDTIDQGRVQRAFFYSNTRIVTPNKTYDPANEYDNEYFEFSLFMSRREYATIKRRMQRGRERSSSDGYYVGNVAPYGWERVIAPDGKHYSLTPSQTEAPVLDLMYDLCGNKQYGYQKACTYMTNMGILARSGKPFSPSTLKGIISNPANIGKVRWGHRKTVRAVKDGRVVKSRPKATDYILSDAAWAPRISPDLFKRANQPKGCFSAPVRNDRPIQNLFAGLVRCSQCDRLMVRKKAQTKTPYDMLICQYTECSTVGIRIDELEEALLGWLKDYIAKYEFADTHEEDTAAIAAKELIVTNFETEHQTLLKQRESLFDFLEQGIYTKEIFIERSNALEQRIRDCMNNITAAREDLHTTIARQANRKNFVPKCKNLLSEWDSLTVSEKNSALRQLIDRIVLTKTKRNKKNQKNSEFTIDVYPKVPK

SEQ ID NO: 5192 - protein, 510 aa, Unknown
  Description of Unknown: Integrase B5193 sequence
  cd00338,SM00857,G3DSA:1.10.10.2600,IPR036162,PF13408, IPR025827,PS51737,G3DSA:3.40.50.1390,IPR006119,IPR038109, PF07508,IPR011109,SSF53041,PTHR30461,PS51736, Coil,PF00239
MPTDYALYLRKSRADLEAEAHGEGDTLARHEHILMELAKSRALPIGAIYREIVSGERIANRPVMQQLLSEVEDSRWKGVLVTETSRLARGDTIDQGIIAQAFKFSGTLIVTPAKTYDPTQEADEEWMEFGLFMSRQEYRMIRRRMTAGTKSAKKEGRYVGSRAPYGYERCKLPGRGWSIRPIEPESGVVKMIYELFLSGKGAGEIATYLNQINIPSPTQRTWVRQTVGLILQNPHYAGLIPDAVHPYKKVIKDGQLTVKRPLNKQCELYEGVHEAIIPRETWEETQRLLTKNHKPRVPSALQQHNPLAGLLYCDKCGQKMQRHPQTERNFEKYYCPTVGCPTVSAPLSQVEDLVLQGLKEFLYDLEMQQPEQPDFTTEQNALKNIDSHLAEQRKRLTKTFELVEDGIYTREAFLQRQSEINAEISRLQTAREELQRKLDAHTAELSARENAAPQIRYVLDVYDRKSAPAERSALLKQVIDRIDYHKTTKQRWSDENDLSVTIHPKISARK

SEQ ID NO: 5193 - protein, 510 aa, Unknown
  Description of Unknown: Integrase B5194 sequence
  SM00857,G3DSA:1.10.10.2600,IPR036162,PF13408,IPR025827, G3DSA:3.40.50.1390,PS51737,IPR006119,IPR038109,PF07508, SSF53041,IPR011109,PTHR30461,Coil,PS51736, cd00338,PF00239
MSYFIYARKSRKDADLEALGIDVLERHITTLLELAKTLSLPIGAIYREVVSGDSIDSRPVMSQVMAEVESCMWDGCLVMDVDRLARGDTIDQGRVQRAFFYSNTKIITPNKTYDPANEYDNEYFEFSLFMSRREYATIKRRMQRGRERSSSDGYYVGNIPPYGWRRVIAPDGKHFSLAPDPAEAPVLDLMYDLCGNKQYGYQKACTYMTEMGILSRSGRPFTPSTLKGIISNPANIGKVRWGHRKTVRTVKDGKISRSRPHSSDYILADAVWPPRISADLFRRANQPKGSCSAPVRDDRPIQNIFAGLVRCSQCGRLMVRKKAHTKTPYDILICQYTECPTVGIRIDELELALLEWLRNYIDKYELTDALPEDAENVAAKEAIVKNFEKEHETLLKQRESLFDFLEQGIYTKEIFIERSNALEQRVKECMEHIISAQNDLHATLALQANRKNFVPRCKNLLGEWGRLTIPEKNSALKVLIEKIMFTKTKRNKKGQDRSDFEIDVFPKVPK

SEQ ID NO: 5194 - protein, 510 aa, Unknown
  Description of Unknown: Integrase B5195 sequence
  SM00857,G3DSA:1.10.10.2600,IPR036162,PF13408,PS51737, G3DSA:3.40.50.1390,IPR025827,IPR006119,IPR038109,PF07508, IPR011109,SSF53041,PTHR30461,Coil,PS51736, cd00338,PF00239
MSYFIYARKSRKDAELEALGIDVLERHITTLLELAKTLSLPIGAIYREVVSGDSIDARPVMTQVLSEVEACMWDGALVMDVDRLARGDTIDQGRVQRAFFYSNTRIVTPNKTYDPANEYDNEYFEFSLFMSRREYATIKRRMQRGRERSSSDGYYVGNVAPYGWERVVAQDGKHYSLAPSQTEAPVLDLMYDLCGNKQYGYQKACTYMTNMGILARSGKPFTPSTLKGIISNPANIGKVRWGHRKTVRAVKDGRVVKSRPKATDYILSDAAWAPRISADLFKRANQPKGCFSAPVRSDRPIQNLFAGLVRCSQCGRLMVRKKAQTKTPYDMLICQYAECSTVGIRIDELEEALLGWLKDYIAKYEFADTHEEDTAAIAAKELIVTNFETEHQTLLKQRESLFDFLEQGIYTKEIFIERSNALEQRIRDCMNNITAAREDLHTTIARQANRKNFVPKCKNLLSEWDSLTVSEKNSALRQLIDRIVLTKTKRNKKNQKNSEFTIDVYPKVPK

SEQ ID NO: 5195 - protein, 510 aa, Unknown
  Description of Unknown: Integrase B5196 sequence
  SM00857,G3DSA:1.10.10.2600,IPR036162,PF13408,IPR025827, PS51737,G3DSA:3.40.50.1390,IPR006119,IPR038109,PF07508, IPR011109,SSF53041,PTHR30461,Coil,PS51736, cd00338,PF00239
MSYFIYARKSRKDAELEALGIDVLERHITTLLELAKTLSLPIGAIYREVVSGDSIDARPVMTQVLSEVEACMWDGALVMDVDRLARGDTIDQGRVQRAFFYSNTRIVTPNKTYDPANEYDNEYFEFSLFMSRREYATIKRRMQRGRERSSSDGYYVGNVAPYGWERVIAPDGKHYSLAPHQTEAPVLDLMYDLCGNKQYGYQKACTYMSNMGILARSGKPFTPSTLKGIISNPANIGKVRWGHRKTVRAVKDGRVVKSRPKATDYILSDAAWAPRISPDLFKRANQPKGCFSAPVRNDRPIQNLFAGLVRCSQCDRLMVRKKAQTKTPYDMLICQYTECSTVGIRIDELEEALLGWLKDYIAKYEFADTHEEDTAAIAAKELIVTNFETEHQTLLKQRESLFDFLEQGIYTKEIFIERSNALEQRIRDCMNNITAAREDLHTTIARQANRKNFVPKCKNLLSEWNSLTIPEKNSALRKLIDRIVLTKTKRNKKNQKNSEFMIDVYPKVPK

SEQ ID NO: 5196 - protein, 510 aa, Unknown
  Description of Unknown: Integrase B5197 sequence
  cd00338,SM00857,G3DSA:1.10.10.2600,IPR036162,PS51737, G3DSA:3.40.50.1390,IPR006119,IPR038109,PF07508,IPR011109, SSF53041,PTHR30461,PS51736,Coil,PF00239
MKIENYALYLRKSRADMEAEKLGEGETLARHKKILTELAARKGLHVGKIYHEIVSGETIAARPQIQQMIQDCYNGLYRGIIIVEVTRLSRGNQGDAQAILDCLRYGNNNNGILVVTPTKTYDIAHNQDDEEYMEFELFMSRREYKMIRKRMERGRIQAVVEGNYMGSYRPYGYDILKSKTGRTLVPNPEEAPVVKNIFTWAIEENLTPGKIAKRLSSYGVPTYSGDPEWSVSTVKTILTNPTYTGKVRWNDRMRIKTMVDGKLVSSRPRSHHGDQYMLYDGKHPALVDDATFLAVSKRFHSDKTKSGLKLINPLAGILVCAKCGKAMCYQSYPARPETAARYTHKSSQICKVKSAVASDVMDAVAYSLEKYISDFEVKIDNLPEVSEDTILTQMDDLQKELIRQEKKLTRLFDAWEDGLIADNEFADRKAINNDRIASIKNQMDHLEESIPVKEDYEEKIMSFHDALGSLLDADLDADIKNAYLKGILDRIEFSRECNSEFILDVFLKED

SEQ ID NO: 5197 - protein, 510 aa, Unknown
  Description of Unknown: Integrase B5198 sequence
  SM00857,G3DSA:1.10.10.2600,IPR036162,PF13408, PS51737,G3DSA:3.40.50.1390,IPR025827,IPR006119, IPR038109,PF07508,IPR011109,SSF53041, PTHR30461,Coil,PS51736,cd00338,PF00239
MSYFIYARKSRKDAELEALGIDVLERHITTLLELAKTLSLPIGAIYREVVSGDSIDARPVMTQVLSEVEACMWDGALVMDVDRLARGDTIDQGRVQRAFFYSNTRIVTPNKTYDPANEYDNEYFEFSLFMSRREYATIKRRMQRGRERSSSDGYYVGNVAPYGWERVIAPDGKHYSLAPHQTEAPVLDLMYDLCGNKQYGYQKACTYMTNMGILARSGKPFTPSTLKGIISNPANIGKVRWGHRKTVRAVKDGRVVKSRPKATDYILSDAAWAPRISADLFKRANQPKGCFSAPVRSDRPIQNLFAGLVRCSQCGRLMVRKKAQTKTPYDMLICQYAECSTVGIRIDELEEALLGWLKDYIAKYEFTDTHEEDTAAIAAKELIVTNFETEHQTLLKQRESLFDFLEQGIYTKEIFIERSNALEQRIRDCMNNITAAQEDLHTTIARQANRKNFVPKCKNLLSEWSSLTVPEKNSALRQLIDRIVLTKTKRNKKNQKNSEFTIDVYPKVPK

SEQ ID NO: 5198 - protein, 510 aa, Unknown
  Description of Unknown: Integrase B5199 sequence
  PTHR30461:SF3,cd00338,SM00857,G3DSA:1.10.10.2600,IPR036162, PF13408,PS51737,G3DSA:3.40.50.1390,IPR025827,IPR006119, IPR038109,PF07508,IPR011109,SSF53041,PTHR30461, PS51736,Coil,PF00239
MSSVETTAVVYARYSSHGQTEQSIEGQIAAAQKYAEQHGYTIIHIYADRAMTGRNDDREEFQKMLSDTATRQFGVILLWKIDRFGRNREEIAFNRYRCKKNGVRVERVAEDVPDGPEGVILDSVLEGMAEYYSLQLAQNVRRGQRESAKKSQTVGGCKIIGYNVNPDTKRYEVDPKTAPFVTEVFKRYANGETISEIVAWLNAQGVRTTRGGEFTVNSLHRLLKNEKYTGVYIFHDIRNEGGMPALIDRATFDKAQEMLKVNRRAPARVWSKTEYLLTDKLFCGHCGTMMVGESGHGRNGTKHNYYTCWNRKKKKTCDKKPIRQDVIEPLVLRAIGKLLENPATLEKIADQVWAAYERSDTSGDTIKALDKQIADVDKALSNVMKAIEMGIINEMTKARMDELTDQKQALSAARAEAGLAGGFKLTRDMILFFLQDMAALDRSNRDSQKRLIKTFVNAIYLYDDHFNIAFNYTDNGKMTVRMQEIDDAASGDVFGRCAQSPAKSRLSHLR

SEQ ID NO: 5199 - protein, 510 aa, Unknown
  Description of Unknown: Integrase B5200 sequence
  SM00857,G3DSA:1.10.10.2600,IPR036162,PF13408,IPR025827, PS51737,G3DSA:3.40.50.1390,IPR006119,IPR038109,PF07508, SSF53041,IPR011109,PTHR30461,Coil,PS51736, cd00338,PF00239
MSYFIYARKSRKDAELEALGIDVLERHITTLLELAKTLSLPIGAIYREVVSGDSIDARPVMTQVLSEVEACMWDGALVMDVDRLARGDTIDQGRVQRAFFYSDTRIVTPNKTYDPANEYDNEYFEFSLFMSRREYATIKRRMQRGRERSSSDGYYVGNVAPYGWERVIAPDGKHYSLAPHQTEAPVLDLMYDLCGNKQYGYQKACTYMSNMGILARSGKPFTPSTLKGIISNPANIGKVRWGHRKTVRAVKDGRVVKSRPKATDYILSDAAWAPRISPDLFKRANQPKGCFSAPVRNDRPIQNLFAGLVRCSQCDRLMVRKKAQTKTPYDMLICQYTECSTVGIRIDELEEALLGWLKDYIAKYEFADTHEEDTAAIAAKELIVTNFETEHQTLLKQRESLFDFLEQGIYTKEIFIERSNALEQRIRDCMNNITAAREDLHTTIARQANRKNFVPKCKNLLSEWDSLTISEKNSALRQLIDRIVLTKTKRNKKNQKNSEFTIDVYPKVPK

SEQ ID NO: 5200 - protein, 510 aa, Unknown
  Description of Unknown: Integrase B5201 sequence
  SM00857,G3DSA:1.10.10.2600,IPR036162,PF13408,IPR025827, G3DSA:3.40.50.1390,PS51737,IPR006119,IPR038109,PF07508, SSF53041,IPR011109,PF00239,PTHR30461,PS51736, Coil,cd00338
MLKTVIYARYSSDKQNEQSIEGQIHECEQFAKTHDMVIIKHYIDRALSGKTDDRPSFLQMIKDSSSGLFDAVLVYKTDRFARNRYDSAVYKAKLKKNGIKIFYAKENIPDGPEGIILESMLEGFAEYYSAELSQKVKRGIKENIRKGLSFGGACPFGYKIVNKKYVIDDEQAPYVKKIFEDYAKGRRAIDIFNELNTLPNYAGKGRKWNRSSLNRMLTNKKYIGIYELEDVCVKDAIPPIIDEALFNKVQSRILFNRRHTTRAKVNYLLSGKLFCGLCEHSMTGKTGTSKTKAKYHYYVCSHKHCKQKKYRKELLEDIIIQYTVKDILNPKHFKMIAKKCLEIQQADNKINDILLMLKKQLTAIKTKINNLMNAIEAGIITTSTKDRLEQLEQEKYKLELEISTQQLNSNRLLSEKQIIYMLNVFYNKRVDVSFYNQIIDCFIYKIYIYSDKICIVYNLNNSDKDVTYSDINELYKSSHLNSCGSPYDLTCEHLAFVKNKLVLFFYIPKF

SEQ ID NO: 5201 - protein, 510 aa, Unknown
  Description of Unknown: Integrase B5202 sequence
  PTHR30461:SF3,cd00338,SM00857,G3DSA:1.10.10.2600,IPR036162, PF13408,IPR025827,PS51737,G3DSA:3.40.50.1390,IPR006119, IPR038109,PF07508,IPR011109,SSF53041,PTHR30461, PS51736,Coil,PF00239
MYEDIKTACLYVRFSSHNQTEQSIEGQTRVCRDFCKRHNIRIVEIYADRATSASKDIEKRVQFLKMIKDSEKGLFDAVIVYKLDRFARSRYDSATYKYRLKRNGVQLISATENISNDPEGIILESVLEGMAEFYSAELSQKINRGMRESAYKHNSIGGAVPLGYKIEDKKLVIDPKTAPIVKEAFEKYADGETVAEICRQFNARGYKTSKGTAFGKSSFTKIFRNERYIGVYSFHDYRAEDAIPAIIDKDLWDRVQLRVGKIKNAPARNKAKVVYLLSGKIFCGHCGSKMNGNCNAGNYYYYQCYGKKNGNVDCKKKNIRKEFIERLVAQDALSLLTDEYIEQIATIACEKNQHEIELDSALPTIRDRIHQVDLSLNNLLKAIESGSAPDMLVKRMGELEKEKKDLQVQAKKESEDIVELDKAQVIYWLEQFRGGSIEDEEFCRMLIDLFVNSVTVWDEDDNTYKVTVAYNLTSLPTKTYRLNKGGTLSDFTSNAPALAIRPRSIKTASS

SEQ ID NO: 5202 - protein, 510 aa, Unknown
  Description of Unknown: Integrase B5203 sequence
  cd00338,SM00857,G3DSA:1.10.10.2600,IPR036162,PS51737, G3DSA:3.40.50.1390,IPR006119,IPR038109,PF07508,IPR011109, SSF53041,PTHR30461,PS51736,Coil,PF00239
MKIENYALYLRKSRADMEAEKLGEGETLARHKKILTELAARKGLHVGKIYHEIVSGETIAARPQIQQMIQDCYNGLYRGIIIVEVTRLSRGNQGDAQTILDCLRYGNNNNGILVVTPTKTYDIAHNQDDEEYMEFELFMSRREYKMIRKRMERGRIQAVVEGNYMGSYRPYGYDILKSKTGRTLVPNPEEAPVVQNIFTWAIEENLTPGKIAKRLSSYGVPTYSGDPEWSVSTVKTILTNPTYTGKVRWNDRMRIKTMVDGKLVSSRPRSHHGDQYMLYDGKHPALVDDATFLAASKRFHSDKTKSGLKLINPLAGILVCAKCGKAMCYQSYPARPETAARYTHKSSQICKVKSAVASDVMDAVAYSLEKYISDFEVKIDNLPEVSEDTILKQMDDLQKELIRQEKKLTRLFDAWEDGLIADNEFADRKAINNDRIASIKNQMDHLEESIPVKEDYEEKIMSFHDALSSLLDADLDADIKNAYLKGILDRIEFSRECNSEFILDVFLKED

SEQ ID NO: 5203 - protein, 510 aa, Unknown
  Description of Unknown: Integrase B5204 sequence
  SM00857,G3DSA:1.10.10.2600,IPR036162,PF13408, PS51737,G3DSA:3.40.50.1390,IPR025827,IPR006119, IPR038109,PF07508,IPR011109,SSF53041, PTHR30461,Coil,PS51736,cd00338,PF00239
MSYFIYARKSRKDAELEALGIDVLERHITTLLELAKTLSLPIGAIYREVVSGDSIDARPVMTQVLSEVEACMWDGALVMDVDRLARGDTIDQGRVQRAFFYSNTRIVTPNKTYDPANEYDNEYFEFSLFMSRREYATIKRRMQRGRERSSSDGYYVGNVAPYGWERVIAPDGKHYSLAPHQTEAPVLDLMYDLCGNKQYGYQKACTYMTNMGILARSGKPFTPSTLKGIISNPANIGKVRWGHRKTVRAVKDGRVVKSRPKATDYILSDAAWAPRISADLFKRANQPKGCFSAPVRSDRPIQNLFAGLVRCSQCGRLMVRKKAQTKTPYDMLICQYAECSTVGIRIDELEEALLGWLKDYIAKYEFADTHEEDTAAIAAKELIVTNFETEHQTLLKQRESLFDFLEQGIYTKEIFIERSNALEQRIRDCMNNITAAREDLHTTIARQANRKNFVPKCKNLLSEWDSLTVSEKNSALRQLIDRIVLTKTKRNKKNQKNSEFTIDVYPKVPK

SEQ ID NO: 5204 - protein, 510 aa, Unknown
  Description of Unknown: Integrase B5205 sequence
  PTHR30461:SF3,cd00338,SM00857,G3DSA:1.10.10.2600,IPR036162, PF13408,IPR025827,PS51737,G3DSA:3.40.50.1390,IPR006119, IPR038109,PF07508,IPR011109,SSF53041,PTHR30461, PS51736,Coil,PF00239
MSSVDKIAVVYARYSSHGQTEQSIEGQIAAAQKYAEQHGYTIIHVYADRAMTGRNDDREEFQRMLSDTATHQFGVILLWKIDRFGRNREEIAFNRYRCKKNGVRVERVAEDVPDGPEGVILDSVLEGMAEYYSLQLAQNVRRGQRESAKKSQTVGGCKIIGYNVDPDTKRYEVDPKTAPFVTEVFKRYANGETISEIVAWLNAQGVRTTRGGEFTVNSLHRLLKNEKYTGVYIFHDIRNEGGMPALIDRATFDKAQEMLKVNRRAPARVWSKTEYLLTDKLFCGHCGAMMVGESGHGRNGTKHNYYTCWNRKKKKLCDKKPVRQDVIEPLVLRSIGKLLENPATLENIADQVWAAYERSDTSGDTIKALDKQIADVDRALSNVMKAIEMGIINEMTKARMDELTDQKQALSAARAEAGLAGGFKLTRDMILFFLQEIAALDMADRDSQKRLIKTFVNAIYLYDDHFDIAFNYTDNGKVVVRMQEINDAACGEVFGRCAQSPAKSRLSRLR

SEQ ID NO: 5205 - protein, 510 aa, Unknown
  Description of Unknown: Integrase B5206 sequence
  PTHR30461:SF3,SM00857,G3DSA:1.10.10.2600,IPR036162,PF13408, PS51737,G3DSA:3.40.50.1390,IPR025827,IPR006119,IPR038109, PF07508,SSF53041,IPR011109,PF00239,PTHR30461, PS51736,Coil,cd00338
MSSVDKIAVVYARYSSHGQTEQSIEGQIAAAQKYAEQHGYTIIHIYADRAMTGRNDDREEFQRMLSDTATHQFGVILLWKIDRFGRNREEIAFNRYRCKKNGVRVERVAEDVPDGPEGVILDSVLEGMAEYYSLQLAQNVRRGQRESAKKSQTVGGCKIIGYNVNPDTKRYEVDPKTAPFVTEVFKRYANGETISEIVAWLNAQGVRTTRGGEFTVNSLHRLLKNEKYTGVYIFHDIRNEGGMPALIDHATFDKVQEMLKVNRRAPARVWSKTEYLLTDKLFCGHCGSMMVGESGHGRNGTKHNYYTCWNRKKKKLCDKKPVRQDVIEPLVLKSIGKLLENPATLESIADQVWAAYERSDTSGDTIKALDKQIADVNKALSNVMKAIEMGIINEMTKTRMDELTDQKQALSAARAEAGLAGGFKLTRDMILFFLQEIAALDMADRDSQKRLIKTFVNAIYLYDDHFDIAFNYTDNGKVVVRMQEINDAACGEVFGRCAQSPAKSRLSRLR

SEQ ID NO: 5206 - protein, 510 aa, Unknown
  Description of Unknown: Integrase B5207 sequence
  SM00857,G3DSA:1.10.10.2600,IPR036162,PS51737,G3DSA:3.40.50.1390, IPR006119,IPR038109,PF07508,IPR011109,SSF53041, PTHR30461,Coil,PS51736,cd00338,PF00239
MPRKPKKTETRKGVIYARFSSHAQREESIMDQIRVCSDYAEREGIEIAATYADEARSGTNAAGRPEFLRMVSDAQKSDWDCVIVYKSDRFARNRYDAATYKAKLRKAGVELLSATEGVPDGPEGIILESVLEGMAEYYSANLAQNVLRGMEGNALKCHHNGVQVFGYDCMPDGSYKINEHEAQGVRAVFAMLDSGSTKAAAARHLNKGGWRSKRGGEFGVQSISQMLGNEKYVGVYSWGDVRVEGGMPAIIERGTWDRVRGKLKARGTRKGVKNESYLLSGKMRDADGNLYESCCGTSRNGRRHYYYRVKSTGASMRKEDAEERVRRAVARVLDENPELDETIVDIVMQAQSESESVEREAVEAMRKRLPQIDREMDNLIDLAAKTGAGRTIPEKLRALEREREVLALQIQDMESRAPLIEPDMVRYLLFQLRKCSGPDSVVRGFVDRIEVDAEGGMLVIFNLCTPSDLREQQNGEPQKAWFAKLSFGSPPINLGEHAIYPTPWGFAIAA

SEQ ID NO: 5207 - protein, 510 aa, Unknown
  Description of Unknown: Integrase B5208 sequence
  PTHR30461:SF3,cd00338,SM00857,G3DSA:1.10.10.2600,IPR036162, PF13408,PS51737,G3DSA:3.40.50.1390,IPR025827,IPR006119, IPR038109,PF07508,IPR011109,SSF53041, PTHR30461,PS51736,Coil,PF00239
MSSVETTAVVYARYSSHGQTEQSIEGQIAAAQKYAEQHGYTIIHIYADRAMTGRNDDREEFQKMLSDTATRQFGVILLWKIDRFGRNREEIAFNRYRCKKNGVRVERVAEDVPDGPEGVILDSVLEGMAEYYSLQLAQNVRRGQRESAKKSQTVGGCKIIGYNVNPDTKRYEVDPKTAPFVTEVFKRYANGETISEIVAWLNAQGVRTTRGGEFTVNSLHRLLKNEKYTGVYIFHDIRNEGGMPALIDRATFDKAQEMLKVNRRAPARVWSKTEYLLTDKLFCGHCGTMMVGESGHGRNGTKHNYYTCWNRKKKKTCDKKPIRQDVIEPLVLRAIGKLLENPATLENIADQVWAAYERSDTSGDTIKALDKQIADVDRALSNVMKAIEMGIINEMTKARMDELTDQKQALSAARAEAGLAGGFKLTRDMILFFLQDMAALDRSNRDSQKRLIKTFVNAIYLYDDHFDIAFNYTDNGKVVVRMQEINDAACGEVFGRCAQSPAKSRLSRLR

SEQ ID NO: 5208 - protein, 510 aa, Unknown
  Description of Unknown: Integrase B5209 sequence
  SM00857,G3DSA:1.10.10.2600,IPR036162,PF13408,IPR025827, G3DSA:3.40.50.1390,PS51737,IPR006119,IPR038109,PF07508, IPR011109,SSF53041,PTHR30461,Coil,PS51736, cd00338,PF00239
MSYFIYARKSRKDAELEALGIDVLERHITTLLELAKTLSLPIGAIYREVVSGDSIDARPVMTQVLSEVEACMWDGALVMDVDRLARGDTIDQGRVQRAFFYSNTRIVTPNKTYDPANEYDNEYFEFSLFMSRREYATIKRRMQRGRERSSSDGYYVGNVAPYGWERVIAPDGKHYSLAPHQTEAPVLDLMYDLCGNKQYGYQKACTYMSNMGILARSGKPFTPSTLKGIISNPANIGKVRWGHRKTVRAVKDGRVVKSRPKATDYILSDAAWAPRISPDLFKRANQPKGCFSSPVRNDRPIQNLFAGLVRCSQCGRLMVRKKAQTKTPYDVLICQYTECSTVGIRIDELEEALLEWLKDYIVKYEFTDTHEEDAAAIAAKEMIVTNFETEHQTLLKQRESLFDFLEQGIYTKEIFIERSNALEQRIRDCMNNIATAQEDLHTTIARQANRKNFVPKCKNLLSEWGSLTVPEKNSALRQLIDRIILTKTKRNKKNQKNSEFTIDVYPKVPK

SEQ ID NO: 5209 - protein, 510 aa, Unknown
  Description of Unknown: Integrase B5210 sequence
  cd00338,SM00857,G3DSA:1.10.10.2600,IPR036162,PS51737, G3DSA:3.40.50.1390,IPR006119,IPR038109,PF07508,IPR011109, SSF53041,PTHR30461,PS51736,Coil,PF00239
MKIENYALYLRKSRADMEAEKLGEGETLARHKKILTELAARKGLHVGKIYHEIVSGETIAARPQIQQMIQDCYNGLYRGIIIVEVTRLSRGNQGDAQAILDCLRYGNNNNGILVVTPTKTYDIAHNQDDEEYMEFELFMSRREYKMIRKRMERGRIQAVVEGNYMGSYRPYGYDILKSKTGRTLVPNPEEAPVVQNIFTWAIEENLTPGKIAKRLSSYGVPTYSGDPEWSVSTVKTILTNPTYTGKVRWNDRIRIKTMVDGKLVSSRPRSHHGDQYMLYDGKHPALVDDATFLAASKRFHSDKTKSGLKLINPLAGILVCAKCGKAMCYQSYPARPETAARYTHKSSQICKVKSAVASDVMDAVAYSLEKYISDFEVKIDNLPEVSEDTILKQMDDLQKELIRQEKKLTRLFDAWEDGLIADNEFADRKAINNDRIASIKNQMDHLEESIPIKEDYEEKIMSFHDALGSLLDADLDADIKNAYLKGILDRIEFSRECNSEFILDVFLKED

SEQ ID NO: 5210 - protein, 510 aa, Unknown
  Description of Unknown: Integrase B5211 sequence
  PTHR30461:SF3,cd00338,SM00857,G3DSA:1.10.10.2600,IPR036162, PF13408,PS51737,IPR025827,G3DSA:3.40.50.1390,IPR006119, IPR038109,PF07508,IPR011109,SSF53041, PTHR30461,PS51736,Coil,PF00239
MYEDIKTACLYVRFSSHNQTEQSIEGQTRVCRDFCKRHNIRIVEIYADRATSASKDIEKRVQFLKMIKDSEKGLFDAVIVYKLDRFARSRYDSATYKYRLKRNGVQLISATENISNDPEGIILESVLEGMAEFYSAELSQKINRGMRESAYKHNSIGGAVPLGYKIEDKKLVIDPKTAPIVKEAFEKYADGETVAEICRQFNARGYKTSKGTTFGKSSFTKIFRNERYIGVYSFHDYRAEDAIPAIIDKDLWDRVQLRVGKIKKAPARNKAKVVYLLSGKIFCGHCGSKMNGNCNAGNYYYYQCYGKKNGNVDCKKKNIRKEFIERLVAQDALSLLTDEYIEQIATIACEKNQHEIELDSALPTIRDRIHQVDLSLNNLLKAIESGSAPDMLVKRMGELEKEKKDLQVQAKKESEDIVELDKAQVIYWLEQFRGGSIEDEEFCRMLIDLFVNSVTVWDEDDNTYKVTVAYNLTSLPTKTYRLNKGGTLSDFTSNAPAYGLPTMHLCRRTA

SEQ ID NO: 5211 - protein, 510 aa, Unknown
  Description of Unknown: Integrase B5212 sequence
  SM00857,G3DSA:1.10.10.2600,IPR036162,PF13408,IPR025827, PS51737,G3DSA:3.40.50.1390,IPR006119,IPR038109,PF07508, SSF53041,IPR011109,PTHR30461,PS51736,cd00338, PF00239
MSYFIYARKSRKDADLEALGIDVLERHITTLLELAKTLSLPIGAIYREVVSGDSIDSRPVMSQVMAEVESCMWDGCLVMDVDRLARGDTIDQGRVQRAFFYSNTKIITPNKTYDPANEYDNEYFEFSLFMSRREYATIKRRMQRGRERSSSDGYYVGNIPPYGWRRVIAPDGKHFSLAPDPAEAPVLDLMYDLCGNKQYGYQKACTYMTEMGILSRSGRPFTPSTLKGIISNPANIGKVRWGHRKTVRTVKDGKISRSRPHSSDYILADAVWPPRISADLFQRANQPKGSCSAPVRDDRPIQNIFAGLVRCSQCGRLMVRKKAHTKTPYDILICQYTECPTVGIRIDELELALLEWLQNYIDKYELTDALPEDAENVATKEAIVKNFEKEHEMLLKQRESLFDFLEQGIYTKEIFIERSNALEQRVKECMEHIVSAQNDLHATLALQANRKNFVPRCKNLLGEWGRLTIPEKNSALKVLIEKIMFTKTKRNKKGQDRSDFEIDVFPKVPK

SEQ ID NO: 5212 - protein, 510 aa, Unknown
  Description of Unknown: Integrase B5213 sequence
  SM00857,G3DSA:1.10.10.2600,IPR036162,PF13408,PS51737, IPR025827,G3DSA:3.40.50.1390,IPR006119,IPR038109,PF07508, IPR011109,SSF53041,PTHR30461,Coil,PS51736, cd00338,PF00239
MSYFIYARKSRKDADLEALGIDVLERHITTLLELAKTLSLPIGAIYREVVSGDSIDSRPVMSQVMAEVESCMWDGCLVMDVDRLARGDTIDQGRVQRAFFYSNTKIVTPNKTYDPANEYDNEYFEFSLFMSRREYATIKRRMQRGRERSSSDGYYVGNIPPYGWRRVIAPDGKHFSLAPDPTESPVLDLMYDLCGNKQYGYQKACTHMAEMGILSRSGRPFTPSTLKGIISNPANIGKVRWGHRKTVRTVKDGKISRSRPHSSDYILADAVWPPRISADLFQRANQPKGSCSAPVRDDRPIQNIFAGLVQCSQCGRLMVRKKAHTKTPYDILICQYTECPTVGIRIDELELALLEWLRNYIDKYELTDALPEDAENIAAKEAIVKNFEKEHETLLKQRESLFDFLEQGIYTKEVFIERSNALEQRVKECMEHIITAQNDLHATLALQANRKNFVPRCKNLLGEWGRLTIPEKNSALKVLIEKIMFTKTKRNKKGQDRSDFEIDVFPKVPK

SEQ ID NO: 5213 - protein, 510 aa, Unknown
  Description of Unknown: Integrase B5214 sequence
  PTHR30461:SF3,SM00857,G3DSA:1.10.10.2600,IPR036162,PF13408, IPR025827,PS51737,G3DSA:3.40.50.1390,IPR006119,IPR038109, PF07508,IPR011109,SSF53041,PF00239,PTHR30461, PS51736,Coil,cd00338
MSTVETTAVVYARYSSHGQTEQSIEGQIAAAQKYAEQHGYTIIHIYADRAMTGRNDDREEFQKMLSDTAMRQFGVILLWKIDRFGRNREEIAFNRYRCKKNGVRVERVAEDVPDGPEGVILDSVLEGMAEYYSLQLAQNVRRGQRESAKKSQTVGGCKIIGYNVNPNTKRYEVDPKTAPFVTEVFKRYANGETISEIVAWLNAQGVRTTRGGEFTVNSLHRLLKNEKYTGVYIFHDIRNEGGMPALIDRATFDKAQEMLKVNRRAPARVWSKTEYLLTDKLFCGHCGTMMVGESGHGRNGTKHNYYTCWNRKKKKMCDKKPIRQDVIEPLVLRAIGKLLENPATLENIADQVWAAYERSDTSGDTIKALDKQIADVDRALSNVMKAIEMGIINEMTKARMDELTDQKQALSAARAEAGLAGGFKLTRDMILFFLQDMAALDRSNRDSQKRLIKTFVNAIYLYDDHFNIAFNYTDNGKMTVRMQEIDDAASGDVFGRCAQSPAKSRLSRLR

SEQ ID NO: 5214 - protein, 510 aa, Unknown
  Description of Unknown: Integrase B5215 sequence
  PTHR30461:SF3,SM00857,G3DSA:1.10.10.2600,IPR036162,PS51737, G3DSA:3.40.50.1390,IPR006119,IPR038109,PF07508,IPR011109, SSF53041,PTHR30461,Coil,PS51736,cd00338, PF00239
MDTDIFAIYLRKSRKDLENKDYDVLKRHRKILLDFAKSKNIVIHEEDIYEEVVSGETIQDRPVIQNLLKKIEVGYYKAVLVMEIERLARGNTIDQGIIAQAFQLTNTLIITPQKTYDTRNEFDNEFLEFGLFMSRREYKAISRRIQTGRIQSCKEGNYVGSVTPYGYDKEKLKGEKGYKLTPNDEAENVKLIFDLFLDGLGTSTLAFKLNDLNIKSRTGKPWTPAMVRNILTNKIYIGILTWGKRANVKKLDNNLISKTRPVNHNCIESKGKHDPIIDELTFYKAQTLLKSNSSKKVPKDKALKNPLAGIIICKKCGTNMIRRPLKNIPDTILCKNHYCDNISSYLYLIEKRLLDSLHTTLLEYYYYLDNYEKEDLKSKKNYDIQIKKIDKDINTLKKQHVRTCELLELGVYSLELFKERSTSINEQVDALIKQKDELIRLNKDNKTEKIIQAIPKIENCLNTYHTLSIEDKNKLLKSIIKKAYYLKDATGGRWNKEAQDNFSIELELNL

SEQ ID NO: 5215 - protein, 510 aa, Unknown
  Description of Unknown: Integrase B5216 sequence
  cd00338,SM00857,G3DSA:1.10.10.2600,IPR036162,PF13408, IPR025827,G3DSA:3.40.50.1390,PS51737,mobidb-lite,IPR006119, IPR038109,PF07508,SSF53041,IPR011109,PTHR30461, PS51736,Coil,PF00239
MEKRAVIYARYSCDKQSEQSIEGQIHVINDFAVRNGYTIVSSYIDRAKSAKTANRPQFLQMISDSAKGIFDFVLVYKLDRFSRNRYDSAFYKHKLKQNGVQVISATECLSDNPESIITEAMLEAMAEFYSAELGQKTKRGMRESALKCMSTGSKPPLGYKWGEDKHLEIDEATADIPRIAFSMYADGKGKQAIAEELNRRGFHTRTGREFKVNSLDNMLTNPKYIGTFTYGTDISIENGCPALISHDIYDKVQGLLKHTKKAPARAKAKVEYYLAGRLKCGICGESMIAVGGTSQNGTQHHYYRCKCRGKGCNKKPERKDFLEWYITEQVLALLNMEEHKERLAEKIIAAYKSGMETNKTEEYKRQIQITETKLNNVLDLLIEKKSDSLMKKLDELELRKSELEEQLRSAELAQSHIPTKREIIEWFDRLSNVDGCENSLQRQVIHTFVKEVFLWDNHAVIVLTLNNTQETVTFEEIREFEQFSDETQEPLPDESESGSCNIRFGSPDWT

SEQ ID NO: 5216 - protein, 510 aa, Unknown
  Description of Unknown: Integrase B5217 sequence
  PTHR30461:SF3,SM00857,G3DSA:1.10.10.2600,IPR036162,PS51737, G3DSA:3.40.50.1390,IPR006119,IPR038109,PF07508,SSF53041, IPR011109,PTHR30461,Coil,G3DSA:2.20.28.10,PS51736, cd00338,PF00239
MIKTCIYLRKSRSDEECEKQGEFETLSRHRSTLLKLAKEQNLDIIEIKEELVSGESISYRPKMIELLDEVKNGLYDSVLVMDIDRLGRGNMQDQGLILETFKKSNTKIITPRKTYDLNNEWDEEYSEFEAFMARKELKLINRRMQRGRVKSVEEGKFIASKPPYGYKFIFDESGKKSMIIDNDKAEVIKMIFDLYVNKHYGGVKISSHLNSLGLKTSTGRTWYPKVVRDILKNKTYAGYVVWNKVDRGKNNSRTRPVDEHIEAKGIHEPIIDESIFIEAQNLFKNSSIPSTKKNTSITNPLAGLIICSECGHKMIAQQSTYKNNELVKFLKCLNCGKNRGSKLSIVEKEIINELENWIASYQVSIKNLESPKNNNSNLESYYSIIKSLDCEYKTLLKQKENLHNLLEQDIYDVDTYLDRSKVLADKIDLNRDNLTQAKKDLKKEKESNFSISDILPQVENVLELYYQSNNMQERNDLLKEVIDYIEYSREPKKRLSKFNIKIYPRLRYNK

SEQ ID NO: 5217 - protein, 510 aa, Unknown
  Description of Unknown: Integrase B5218 sequence
  SM00857,G3DSA:1.10.10.2600,IPR036162,PF13408,PS51737, IPR025827,G3DSA:3.40.50.1390,IPR006119,IPR038109,PF07508, IPR011109,SSF53041,PTHR30461,Coil,PS51736, cd00338,PF00239
MSYFIYARKSRKDAELEALGIDVLERHITTLLELAKTLSLPIGAIYREVVSGDSIDARPVMTQVLSEVEACMWDGALVMDVDRLARGDTIDQGRVQRAFFYSSTRIVTPNKTYDPANEYDNEYFEFSLFMSRREYATIKRRMQRGRERSSSDGYYVGNVAPYGWERVIAPDGKHYSLAPHQTEAPVLDLMYDLCGNKQYGYQKACTYMSNMGILARSGKPFTPSTLKGIISNPANIGKVRWGYRKTVRAVKDGRVVKSRPNATDYILADAAWAPRISTDLFKRANQPKGCFSSPVRNDRPIQNLFAGLVRCSQCGRLMVRKKAQTKTPYDMLICQYTECSTVGIRIDELEEALLEWLKDYIVKYEFTDTHEEDAAAIAAKEMIVTNFETEHQTLLKQRESLFDFLEQGIYTKEIFIERSNALEQRIRDCTNKITAAREDLHTTIARQANRKNFVPKCKNLLSEWDSLTISEKNSALRQLIDRIVLTKTKRNKKNQKNSEFTIDVYPKVPK

SEQ ID NO: 5218 - protein, 510 aa, Unknown
  Description of Unknown: Integrase B5219 sequence
  SM00857,G3DSA:1.10.10.2600,IPR036162,PF13408,PS51737, G3DSA:3.40.50.1390,IPR025827,IPR006119,IPR038109,PF07508, IPR011109,SSF53041,PTHR30461,Coil,PS51736, cd00338,PF00239
MSYFIYARKSRKDAELEALGIDVLERHITTLLELAKTLSLPIGAIYREVVSGDSIDARPVMTQVLSEVEACMWDGALVMDVDRLARGDTIDQGRVQRAFFYSNTRIVTPNKTYDPANEYDNEYFEFSLFMSRREYATIKRRMQRGRERSSSDGYYVGNVAPYGWERVIAPDGKHYSLAPHQTEAPVLDLMYDLCGNKQYGYQKACTYMSNMGILARSGKPFTPSTLKGIISNPANIGKVRWGHRKTVRAVKDGRVVKSRPKATDYILSDAAWAPRISADLFKRANQPKGCFSAPVRSDRPIQNLFAGLVRCSQCGRLMVRKKAQTKTPYDMLICQYAECSTVGIRIDELEEALLGWLKDYIAKYEFADTHEEDTAAIAAKELIVTNFETEHQTLLKQRESLFDFLEQGIYTKEIFIERSNALEQRIRDCMNNITAAREDLHTTIARQANRKNFVPKCKNLLSEWDSLAISEKNSALRQLIDRIVLTKTKRNKKNQKNSEFTIDVYPKVPK

SEQ ID NO: 5219 - protein, 510 aa, Unknown
  Description of Unknown: Integrase B5220 sequence
  SM00857,IPR036162,PF13408,IPR025827,PS51737, G3DSA:3.40.50.1390,IPR006119,PF07508,IPR011109,SSF53041, PTHR30461,Coil,PS51736,cd00338,PF00239
MSYFIYARKSRKDAELEALGIDVLERHITTLLELAKTLSLPIGAIYREVVSGDSIDARPVMSKALAEVESCLWDGCLVMDVDRLARGDTIDQGRVQRAFFYSGTKIVTPTKTYDPSNEYDNEYFEFNLFMSRREYATIKRRMQRGRERSSSDGYYVGNVAPYGWKRITAPDGKHFSLAPDPIEAPVLDLMYDLCGNKQYGYQKACTYMTGMGILARNGRPFTPSTLKGIISNPANIGKVRWGHRKTVRSIRAGMVTKSRPYASDYLLADASWDARIDDKLFQRANLPKGSFSAPVRNDRPIQNMFAGLVRCSECGRLMVRKKSHTKTPYDFLICQYTECPTVGIRIDELEVALIQWLREYISRYEFTDTFQEDTADISAKEAIINNLEADHQTLLKQRESLFDFLEQGIYTKEVFLERSNALELRIKDCMSNIVVAQEDLHLTIARQANRKNFVPKCKNLLSEWETLTIPEKNSALKSLIEKIILSKTKRNKKGQKQSEFSIDVYPKVPK

SEQ ID NO: 5220 - protein, 510 aa, Unknown
  Description of Unknown: Integrase B5221 sequence
  SM00857,G3DSA:1.10.10.2600,IPR036162,PF13408, PS51737,IPR025827,G3DSA:3.40.50.1390,IPR006119, IPR038109,PF07508,IPR011109,SSF53041, PTHR30461,Coil,PS51736,cd00338,PF00239
MSYFIYARKSRKDAELEALGIDVLERHITTLLELAKTLSLPIGAIYREVVSGDSIDARPVMTQVLSEVEACMWDGALVMDVDRLARGDTIDQGRVQRAFFYSNTRIVTPNKTYDPANEYDNEYFEFSLFMSRREYATIKRRMQRGRERSSSDGYYVGNVAPYGWERVIAPDGKHYSLAPHQTEAPVLDLMYDLCGNKQYGYQKACTYMTNMGILARSGKPFSPSTLKGIISNPANIGKVRWGYRKTVRAVKDGRVVKSRPNATDYILADAEWAPRISADLFKRANQPKGCFSSPVRNDRPIQNLFAGLVRCSQCGRLMVRKKAQTKTPYDVLICQYTECSTVGIRIDELEEALLEWLKDYIVKYEFTDTHEEDAAAIAAKEMIVTNFETEHQTLLKQRESLFDFLEQGIYTKEIFIERSNALEQRIRDCMNNIATAQEDLHTTIARQANRKNFVPKCKNLLSEWDSLTISEKNSALRQLIDRIVLTKTKRNKKNQKNSEFTIDVYPKVPK

SEQ ID NO: 5221 - protein, 510 aa, Unknown
  Description of Unknown: Integrase B5222 sequence
  SM00857,G3DSA:1.10.10.2600,IPR036162,PF13408,PS51737, IPR025827,G3DSA:3.40.50.1390,IPR006119,IPR038109,PF07508, IPR011109,SSF53041,PTHR30461,Coil,PS51736, cd00338,PF00239
MSYFIYARKSRKDAELEALGIDVLERHITTLLELAKTLSLPIGAIYREVVSGDSIDARPVMTQVLSEVEACMWDGALVMDVDRLARGDTIDQGRVQRAFFYSNTRIVTPNKTYDPANEYDNEYFEFSLFMSRREYATIKRRMQRGRERSSSDGYYVGNVAPYGWERVIAPDGKHYSLAPHQTEAPVLDLMYDLCGNKQYGYQKACTYMSNMGILARSGKPFTPSTLKGIISNPVNIGKVRWGHRKTVRAVKDGRVVKSRPKATDYILSDAAWAPRISPDLFKRANQPKGCFSAPVRNDRPIQNLFAGLVRCSQCDRLMVRKKAQTKTPYDMLICQYTECSTVGIRIDELEEALLGWLKDYIAKYEFADTHEEDTAAIAAKELIVTNFETEHQTLLKQRESLFDFLEQGIYTKEIFIERSNALEQRIRDCMNNITAAREDLHTTIARQANRKNFVPKCKNLLSEWDSLTVSEKNSALRQLIDRIVLTKTKRNKKNQKNSEFTIDVYPKVPK

SEQ ID NO: 5222 - protein, 510 aa, Unknown
  Description of Unknown: Integrase B5223 sequence
  SM00857,G3DSA:1.10.10.2600,IPR036162,PF13408,IPR025827, G3DSA:3.40.50.1390,PS51737,IPR006119,IPR038109,PF07508, IPR011109,SSF53041,PTHR30461,Coil,PS51736, cd00338,PF00239
MSYFIYARKSRKDAELEALGIDVLERHITTLLELAKALSLPIGAIYREVVSGDSIDARPVMTQVLSEVEACMWDGALVMDVDRLARGDTIDQGRVQRAFFYSNTRIVTPNKTYDPANEYDNEYFEFSLFMSRREYATIKRRMQRGRERSSSDGYYVGNVAPYGWERVIAPDGKHYSLAPHQTEAPVLDLMYDLCGNKQYGYQKACTYMSNMGILARSGKPFTPSTLKGIISNPANIGKVRWGHRKTVRAVKDGRVVKSRPKATDYILSDAAWAPRISPDLFKRANQPKGCFSAPVRNDRPIQNLFAGLVRCSQCDRLMVRKKAQTKTPYDMLICQYTECSTVGIRIDELEEALLGWLKDYIAKYEFADTHEEDTAAIAAKELIVTNFETEHQMLLKQRESLFDFLEQGIYTKEIFIERSNALEQRIRDCMNNITAAREDLHTTIARQANRKNFVPKCKNLLSEWDSLTVSEKNSALRQLIDRIVLTKTKRNKKNQKNSEFTIDVYPKVPK

SEQ ID NO: 5223 - protein, 510 aa, Unknown
  Description of Unknown: Integrase B5224 sequence
  SM00857,G3DSA:1.10.10.2600,IPR036162,PF13408,IPR025827, PS51737,G3DSA:3.40.50.1390,IPR006119,IPR038109,PF07508, IPR011109,SSF53041,PTHR30461,Coil,PS51736, cd00338,PF00239
MSYFIYARKSRKDAELEALGIDVLERHITTLLELAKTLSLPIGAIYREVVSGDSIDARPVMTQVLSEVEACMWDGALVMDVDRLARGDTIDQGRVQRAFFYSNTRIVTPNKTYDPANEYDNEYFEFSLFMSRREYATIKRRMQRGRERSSSDGYYVGNVAPYGWERVIAPDGKHYSLAPHQTEAPVLDLMYDLCGNKQYGYQKACTYMSNMGILARSGKPFTPSTLKGIISNPANIGKVRWGHRKTVRAVKDGRVVKSRPKATDYILSDAAWAPRISPDLFKRANQPKGCFSAPVRNDRPIQNLFAGLVRCSQCDRLMVRKKAQTKTPYDMLICQYTECSTVGIRIDELEEALLGWLKDYIAKYEFSDTHEEDTAAIAAKELIVTNFEAEHQTLLKQRESLFDFLEQGIYTKEIFIERSNALEQRIRDCMNNITAAREDLHTTIARQANRKNFVPKCKNLLSEWDSLTVSEKNSALRQLIDRIVLTKTKRNKKNQKNSEFTIDVYPKVPK

SEQ ID NO: 5224 - protein, 510 aa, Unknown
  Description of Unknown: Integrase B5225 sequence
  cd03768,PTHR30461:SF3,SM00857,IPR036162,PF13408, IPR025827,G3DSA:3.40.50.1390,PS51737,IPR006119,PF07508, IPR011109,SSF53041,PTHR30461,PS51736,Coil, PF00239
MRFFSYGRKSVFSDKSDSIDNQFRMNREYCESKFSGQVDSWQQFSDEDFTGANTSRPDLQRMLSFIKGGFCDVLVVYQLDRLSRDVRDFANIYALLEEHGVMFISIKENIDTTTPIGRAMMYVTVVFAQMERETIAARVTDNMLGLAKKGYWTGGNPPVGYVRKHIVVNGKKHCSIEVDPDGARYVTQIFDTFLAYNCSLQGMETRFKNQGIRTQSGKFFSTTQLHKMLTMPYCVEATPEVYDFYAAKGCIMDPGSPREMWDGSVGVIIYGRSTEKNKKHQAQPPEKWTVCLGKHKPFMPAEKWLAVQSRFTQNKCIKDAKWPVPLLKGVLRCKCGNLMQVSRKKKVDGTCSSWYYCRKRMRQGVDACDMGQIKCDLLDEEVLELFRGITADPALIQKFVKAEAPADVPDLKAAQARVSVCERKIGRLAASLALAEDSAASKYIIAEMERLDVELGALKREASLAEMESHRAAASAKDAKATAAEIAKLIHGLDGFDDKEKPDGLLPRHR

SEQ ID NO: 5225 - protein, 510 aa, Unknown
  Description of Unknown: Integrase B5226 sequence
  PTHR30461:SF3,cd00338,SM00857,G3DSA:1.10.10.2600,IPR036162, PF13408,IPR025827,G3DSA:3.40.50.1390,PS51737,IPR006119, IPR038109,PF07508,IPR011109,SSF53041,PTHR30461, PS51736,Coil,PF00239
MSSTTTAKAVIYARFSSDKQREESIDGQIRECTKFAEDQGLEVIGTYIDRAMSARSDNRPDFLRMIADSARGQFQYVIVYQLDRFSRSRYDSAIYKNKLKKNGVRVLSAKERIGDDPSSIILESMLEGYAEYYSAELSQKVKRGMTENVLEHKCTGGYVPLGYCLAPDKTLQIDPIGAEAVKIIYDKWLAGCRIMEIIRYLNDHNYVTSRKAKFRYSSLNRILTNPIYTGLYQWGSIEVADYAPAIITQKQFALAQEKIHHIKAHPRAKRRSANYALTGMIYCGVCGSPMTGQSGHSKSGALYHYYRCSTKNNYHDRGKKLNIKCTNRNISRDKLEDLVLQTTINILMNPEAVRMIAKQAVAAQEKDPAATEIDRIKEDKKLIQKKLNNSIKAVEAGIISTTLAANISQYEKEIADLDIKMEKIKLLSTPVKIDEIAVEFFLKSLLLNKKEHDKYRLDMFQTFIRRVIVYPDKVEIQYNYTATPHILENPVTKMMTGNPGCSRCERLVTR

SEQ ID NO: 5226 - protein, 510 aa, Unknown
  Description of Unknown: Integrase B5227 sequence
  SM00857,G3DSA:1.10.10.2600,IPR036162,PF13408,IPR025827, G3DSA:3.40.50.1390,PS51737,IPR006119,IPR038109,PF07508, SSF53041,IPR011109,PTHR30461,Coil,PS51736, cd00338,PF00239
MSYFIYARKSRKDADLEALGIDVLERHITTLLELAKALSLPIGAIYREVVSGDSIDSRPVMSQVMAEVESCMWDGCLVMDVDRLARGDTIDQGRVQRAFFYSNTKIVTPNKTYDPANEYDNEYFEFSLFMSRREYATIKRRMQRGRERSSSDGYYVGNIPPYGWRRVIAPDGKHFSLAPDPVEAPVLDLMYDLCGNKQYGYQKACTHMAEMGILSRSGRPFTPSTLKGIISNPANIGKVRWGHRKTVRTVKDGKISRSRPHSSDYILADAVWPPRISADLFQRANQPKGSCSAPVRDDRPIQNIFAGLVRCSQCGRLMVRKKAHTKTPYDILICQYTECPTVGIRIDELELALLEWLRNYVDKYELTDALPEDAENVAAKEAIVKNFEKEHETLLKQRESLFDFLEQGIYTKEIFIERSNALEQRVKECMEHIISAQNDLHATLALQANRKNFVPRCKNLLGEWGKLTIPEKNSALKVLIEKIMFTKTKRNKKGQDRSDFEIDVFPKVPK

SEQ ID NO: 5227 - protein, 510 aa, Unknown
  Description of Unknown: Integrase B5228 sequence
  PTHR30461:SF3,cd00338,SM00857,G3DSA:1.10.10.2600,IPR036162, PF13408,PS51737,G3DSA:3.40.50.1390,IPR025827,IPR006119, IPR038109,PF07508,IPR011109,SSF53041,PTHR30461, PS51736,Coil,PF00239
MSSVDKIAVVYARYSSHGQTEQSIEGQIAAAQKYAEQHGYTIIHIYADRAMTGRNDDREEFQRMLSDTATHQFGVILLWKIDRFGRNREEISFNRYRCKKNGVRVERVAEDVPDGPEGVILDSVLEGMAEYYSLQLAQNVRRGQRESAKKSQTVGGCKIIGYNVNPDTKRYEVDPQTAPFVTEVFKRYANGETISEIVTWLNAHGVRTTRGGEFTVNSLHRLLKNEKYTGVYIFHDIRNEGGMPALIDRATFDKAQEMLKVNRRAPARVWSKTEYLLTDKLFCGHCGSMMVGESGHGRNGTKHNYYTCWNRKKKKLCDKKPVRQDVIEPLVLKSIGKLLENPATLESIADQVWAAYERSDTSGDTIKALDKQIADVNKALSNVMKAIEMGIINEMTKTRMDELTDQKQALSAARAEAGLAGGFKLTRDMILFFLQEIAALDMADRDSQKRLIKTFVNAIYLYDDHFDIAFNYTDKGKVVVRMQEINDAACGEVFGRCAQSPAKSRLSRLR

SEQ ID NO: 5228 - protein, 510 aa, Unknown
  Description of Unknown: Integrase B5229 sequence
  SM00857,G3DSA:1.10.10.2600,IPR036162,PF13408,IPR025827, PS51737,G3DSA:3.40.50.1390,IPR006119,IPR038109,PF07508, IPR011109,SSF53041,PTHR30461,Coil,PS51736, cd00338,PF00239
MSYFIYARKSRKDAELEALGIDVLERHITTLLELAKALSLPIGAIYREVVSGDSIDARPVMTQVLSEVEACMWDGALVMDVDRLARGDTIDQGRVQRAFFYSNTRIVTPNKTYDPANEYDNEYFEFSLFMSRREYATIKRRMQRGRERSSSDGYYVGNVAPYGWERVIAPDGKHYSLAPHQTEAPVLDLMYDLCGNKQYGYQKACTYMSNMGILARSGKPFTPSTLKGIISNPANIGKVRWGHRKTVRAVKDGRVVKSRPKATDYILSDAAWAPRISPDLFKRANQPKGCFSAPVRNDRPIQNLFAGLVRCSQCDRLMVRKKAQTKTPYDMLICQYTECSTVGIRIDELEEALLGWLKDYIAKYEFADTHEEDTAAIAAKELIVTNFETEHQTLLKQRESLFDFLEQGIYTKEIFIERSNALEQRIRDCMNNITAAREDLHTTIARQANRKNFVPKCKNLLSEWDSLTVSEKNSALRQLIDRIVLTKTKRNKKNQKNSEFTIDVYPKVPK

SEQ ID NO: 5229 - protein, 510 aa, Unknown
  Description of Unknown: Integrase B5230 sequence
  SM00857,G3DSA:1.10.10.2600,IPR036162,PF13408,IPR025827, PS51737,G3DSA:3.40.50.1390,IPR006119,IPR038109,PF07508, SSF53041,IPR011109,PTHR30461,Coil,PS51736, cd00338,PF00239
MKRAVFYGRYSSDRQTEQSIEGQRRVCEEFAKAEGIHIVAEYIDRATSGTSTDHRDQFQQMISDSKRGCWEYVLVYKLDRFARNRYDSAVYKQKLKRCGVKVLSATERITDSPEGILIEGLLESMDEYFSRELSRKCKRGIRETIIKGNTFTRAPYGYHKTEKRLTVDEAEASNVRQIFTQYVFGATLQSIADKLNAAGHRTRQGNPFRRYSVSDILHNPKYTGTYYVTDIAEPETCPQIVPQSLYDAAQERLKHSAHNARVNRTGHVFALTGLLQCGICGRKVVGTSVQRKYFYYTCIAKSCKTLPHDHSLTVSSEKVEAAVIAALADYFTPEHVTDFAECLYRMYLAEDSPKPDRNKQIQAIEKQIQGAVNALIACPQSEALQARLTDLEQQKQQLEQAAPEPPKLTQQDFIKFFCWITKALDRADDRKKFFNAVIHSVTLYRDHVVIAINLTKDDVDPPERVILEKSFSDTVVKSSLYPTISKIKLVPPLLLLYVPLPAGIFRHRGA

SEQ ID NO: 5230 - protein, 510 aa, Unknown
  Description of Unknown: Integrase B5231 sequence
  SM00857,G3DSA:1.10.10.2600,IPR036162,PF13408,IPR025827, G3DSA:3.40.50.1390,PS51737,IPR006119,IPR038109,PF07508, SSF53041,IPR011109,PTHR30461,Coil,PS51736, cd00338,PF00239
MKRAVFYGRYSSDRQTEQSIEGQRRVCEEFAKAEGIHIVAEYIDRATSGTSTDHRDKFQQMISDSKNGCWEYVLVYKLDRFARNRYDSAVYKQKLKRCGVKVLSATERITDSPEGILIEGLLESMDEYFSRELSRKCKRGIRETIIKGNSFTRAPYGYHKTEKRLMVDEVESNNVRQIFTQYVGGATLQSIADKLNAAGHRTRQGNPFKRYSISDILHNPKYTGTYYVTDIAEPETCPQIVPQSLYDAAQERLKHSAHNARTNRTGHVFALTGLLQCGICGHNVVGTSVQRKYFYYTCIAKSCETLPHDHSLTVNSEKVESTVIAALADYFTPEHVTDFAECLYRMYLAEDSPKPDHSKQIQAIEKQIQGAVSALIACPQSEALQARLTDLEQQKQQLEQAPPEPPKLTQQDFIKFFCWITKALDRADDRKKFFNAVIHSVTLYRDHVVIAINLTNDNVDPPERVILEKSFSDTVVKSSLYPTISKIKLVPPLLLCYVPLPAGIFRRRGA

SEQ ID NO: 5231 - protein, 510 aa, Unknown
  Description of Unknown: Integrase B5232 sequence
  cd00338,SM00857,G3DSA:1.10.10.2600,IPR036162,PS51737, G3DSA:3.40.50.1390,IPR006119,IPR038109,PF07508,IPR011109, SSF53041,PTHR30461,PS51736,Coil,PF00239
MDTDIFAIYLRKSRKDLENQDYDVLKRHRKILLDFAKSKRITIHEEDIYEEVVSGETIQDRPVIQNLLKKIETGYYKAVLVMEIERLARGNTIDQGIIAQAFQLTNTLIITPNKTYDTNNEYDNEFLEFGLFMSRREYKAISRRIQTGRIESCKEGNYVGSVTPYGYDKEKLKGEKGYKLIPNDEATNVKLIFELFLDGLGTSNLSYKLNELKIKSRTGKQWTPAMVRNILTNKVYIGILTWGRRANVKKLDNNMISKTRPINNDYIESKGKHKPIIDELTFYRTQELLKANSFKKVHKDKSLQNPLAGIVVCKKCGTNMIRRPLKNIPDTLLCKNHYCNNVSSYIYLVEKKLLDSLKNTLNKYYHYLENYEEEHINHKKNYDSQIKKLDKEIEKLKKQHIKTCELLETGVYSLDLFRDRSSSINEQIEGLNKQKEELIKLNENNKVDKIIQAIPKIENCLKTYDTLNVEEKNKLLKTIINKAYYLKDEAGSRWNKDAQDKFILELELLL

SEQ ID NO: 5232 - protein, 510 aa, Unknown
  Description of Unknown: Integrase B5233 sequence
  SM00857,G3DSA:1.10.10.2600,IPR036162,PF13408, PS51737,IPR025827,G3DSA:3.40.50.1390,IPR006119, IPR038109,PF07508,IPR011109,SSF53041, PTHR30461,PS51736,cd00338,PF00239
MSYFIYARKSRKDADLEALGIDVLERHITTLLELAKTLSLPIGAIYREVVSGDSIDSRPVMSQVMAEVESCMWDGCLVMDVDRLARGDTIDQGRVQRAFFYSNTKIVTPNKTYDPANEYDNEYFEFSLFMSRREYATIKRRMQRGRERSSSDGYYVGNIPPYGWRRVIAPDGKHFSLAPDPTESPVLDLMYDLCGNKQYGYQKACTHMAEMGILSRSGRPFTPSTLKGIISNPANIGKVRWGHRKTVRTVKDGKISRSRPHSSDYILADAVWPPRISADLFRRANQPKGSCSAPVRDDRPIQNIFAGLVRCSQCGRLMVRKKAHTKTPYDILICQYTECPTVGIRIDELELALLEWLQNYIDKYELTDALPEDAENVATKEAIVKNFEKEHEMLLKQRESLFDFLEQGIYTKEIFIERSNALEQRVKECMEHIVSAQNDLHATLALQANRKNFVPRCKNLLGEWGELTIPEKNSALKVLIEKIMFTKTKRNKKGQNRSDFEIDVFPKVPK

SEQ ID NO: 5233 - protein, 510 aa, Unknown
  Description of Unknown: Integrase B5234 sequence
  SM00857,G3DSA:1.10.10.2600,IPR036162,PS51737,G3DSA:3.40.50.1390, IPR006119,IPR038109,PF07508,IPR011109,SSF53041, PTHR30461,Coil,PS51736,cd00338,PF00239
MDTDIFAIYLRKSRKDLENKDYDVLKRHRKILLDFAKSKNIVIHEEDIYEEVVSGETIQDRPVIQNLLKKIEVGYYKAVLVMEIERLARGNTIDQGIIAQAFQLTNTLIITPQKTYDTRNEFDNEFLEFGLFMSRREYKAISRRIQTGRIQSCKEGNYIGSVTPYGYDKEKLKGEKGYKLTPNDESENVKLIFDLFLDGLGTSTLAFKLNDLNIKSRTGKPWTPAMVRNILTNKIYIGILTWGKRASVKKLDNNLISKTRPVNHNCIESKGKHDPIIDELTFYKAQTLLKSNSSKKVPKDKALKNPLAGIIVCKKCGTNMIRRPLKNIPDTILCKNHYCDNISSYLYLIEKRLLDSLHTTLLEYYYYLDNYEKEDLKSKKNYDIQIKKIDKDINTLKKQHVRTCELLELGVYSLELFKERSTSINEQVDALIKQKDELIRLNKDNKTEKIIQAIPKIENCLNTYHTLSIEDKNKLLKSIIKKAYYLKNATGGRWNKEAQDNFSIELELNL

SEQ ID NO: 5234 - protein, 510 aa, Unknown
  Description of Unknown: Integrase B5235 sequence
  PTHR30461:SF3,cd00338,SM00857,G3DSA:1.10.10.2600,IPR036162, PS51737,G3DSA:3.40.50.1390,IPR006119,IPR038109,PF07508, IPR011109,SSF53041,PTHR30461,PS51736, Coil,PF00239
MGGRAAIYARFSSHNQRSESIEIQVEKSRDYCRENELTVVAEYCDYAQTGTNTDRAEFQRMMADARRGLFDFVVIWKVTRIMRNRDEMAMARIMLRRCRVEILYAGEDISDGSAGVLQLGMLEVLAEYESALDGERIRDGIQKNAERCMANGCVRYGWDIVDGRYVVNEEEAAAIRLGVRMVLSGKSVADVVRAWEPYRTKRGGKWRFQTVRRILMRRENGGEYRYAGVVVPGGMPAIVPMDDEERVIRMLEDSHRPRAKTEAWDFPLTGKLYDGRDGGLMTGTSGTGKSGRPYHYYRCRSCGRTVRRDVVEKRVADAVREALGSADSRERIARMLADAEEERADEKPLSETIKGELAKIETAFSNIWAAIESGIAPPGGKERIDALKQRQALLKDELRTAEALEAARLDYDRALFWLEGMAAAEVDDAQLLRTFVARVVLGGPDDDDGLRVAFTFDDSAGLGDNPSLPGAIGPGGEVFDRMNASSTKRGSVELFFYKNEFALVYRLGDA

SEQ ID NO: 5235 - protein, 510 aa, Unknown
  Description of Unknown: Integrase B5236 sequence
  PTHR30461:SF3,cd00338,SM00857,G3DSA:1.10.10.2600,IPR036162, PF13408,IPR025827,G3DSA:3.40.50.1390,PS51737,IPR006119, IPR038109,PF07508,IPR011109,SSF53041,PTHR30461, PS51736,Coil,PF00239
MQKRRTKYANSQGDNAVIYARYSSHNQKDTSIEQQIEVCTKYARDNGYRITNIYADRAISGKTDARPQFRLMMQDAREHKFDVVISWKSSRLGRDMLDAMTNDIILRNLGIKCFYTEENFDDTAAGRFALRNMMNVNQFYIENMAEDILRGMRDNAKKCRVNNGSPPLGYRRGADGKYEIVPDEAETVREIFTKVLAGMAFVDIANELNARGIKTKKGAPWGRSSFSRLLSNERYIGTYKWSDIVIENGMPAIIDREVFEMAQKKIKGERPLRRRHNENGDYLLTGKLFCGKCDSPMTGMSGTSKSGAKHHYYACYSARKDGSCDKKAVKRDWVEKTVALFIKEHVLRDEVIEWMVDQYMVYQKATFESQRIMEMRNQLKDVQSQLDNLVDAIARGIYTDSTKDKLLKLEADKKEIEQDIRLATYNLKEYDREHVRCYFLSFKEGSVESKDYLKRLFDQFVTKIYLYDDEIRIAFSGTKDDSPVSFKIIDEAEELAVSSVRLSSASSHHT

SEQ ID NO: 5236 - protein, 509 aa, Unknown
  Description of Unknown: Integrase B5237 sequence
  PTHR30461:SF3,SM00857,G3DSA:1.10.10.2600,IPR036162,PF13408, PS51737,G3DSA:3.40.50.1390,IPR025827,IPR006119,IPR038109, PF07508,SSF53041,IPR011109,PTHR30461,Coil, PS51736,cd00338,PF00239
MPEALNAVIYARYSSDRQTEQSIEGQLRECYAFAKANDIAVIDTYIDRAISGKTDNRPAFQKMIEDSAKRQFQAVIVYRLDRFTRNRYDSAIYKARLKKNGVKVLSAMENLNGSPESIIMESLLEGMAEYYSVELSQKITRGMRENALKGKALGGQRVLGYKVNSDCYFEIDETTAPVVVDIFKLYSSGKTVKEICDILNARGVKTARGGAFNKNSLHTILTNKKYIGIYKTKYGEIVGGIPAIIDKELFEMVALRMEQNKKAPARAKAEINYLLSTKLFCGKCRSAMVGESGTSKTGKKYYYYACVKKKREKACDKSNVKKDWIEDLVIQRTVTDILKDDVIENIADRLVELQKAEAAESGTMLYLENSLAEIQVSIKNIMTAIEKGIITESTKTRLTELEDEKRNVEIEIAKESIARRIISREQIIYWISSFKDGDITSEKYRQQLIDTFVHAVFVYDDKIVITYNYSGENNTATISDLDLSSPPKQQSQNVAVFVYCIFSLALNSF

SEQ ID NO: 5237 - protein, 509 aa, Unknown
  Description of Unknown: Integrase B5238 sequence
  PTHR30461:SF3,SM00857,G3DSA:1.10.10.2600,IPR036162,PF13408, PS51737,IPR025827,G3DSA:3.40.50.1390,IPR006119,IPR038109, PF07508,IPR011109,SSF53041,PTHR30461,Coil, cd00338,PF00239
MKAVIYARYSPGPNQKDKSVEEQIADCRQFARENDIMIVGDYADRKKTGRNDNRAEFQKMLKDSAKGLFDAVIVWKIDRFGRNREEIAINKVKLRRNGVRVMYAKEHIPDGPEGIILESTLEGLAEYYSANLSQNIMRGMRGVAMKGQSTGGGGHSLGYYVDQDKYFQIDEHGAQIVRQIFEMYSSGKQASEIIKELNGRGLKTANGKPFNHNSIARILSNRRYIGEYRWHDILIPDGMPRIIDDETFERVQKRLEKNKKAPARKIQAGSEEEFLLTTKLFCGHCGATMIGDSGTGKSGKKYSYYTCSTRKRRKDGRKCDKKSVRKDELERYIVEQTVAHVLVDDVIEYIADKVVELQRKELQDTSMLDYYKSSLRDTEKSLKNIVTAIEQGIFTPTTKDRLLELEAEKADLEECIQKEEIARPTFSKEQIIFFLERFKGGDVNDQSYQRQIIDTFVSRIWIYDDKTVITYNYSGEGNTITLEAAEKAADEAAGGCSAQLPPSPPRKSG

SEQ ID NO: 5238 - protein, 509 aa, Unknown
  Description of Unknown: Integrase B5239 sequence
  PTHR30461:SF3,cd00338,SM00857,G3DSA:1.10.10.2600,IPR036162, PF13408,IPR025827,PS51737,G3DSA:3.40.50.1390,IPR006119, IPR038109,PF07508,SSF53041,IPR011109,PTHR30461, PS51736,Coil,PF00239
MYEDIKTACLYVRFSSHNQTEQSIEGQTRVCRDFCKRHNIRIVEIYADRATSASKDIEKRVQFLKMIKDSERGLFDAVIVYKLDRFARSRYDSATYKYRLKRNGVQLISATENISNDPEGIILESVLEGMAEFYSAELSQKINRGMRESAYKHNSIGGAVPLGYKIEDKKLVIDPKTAPIVKEAFEKYADGETVAEICRQFNARGYKTSKGTTFGKSSFTKIFRNERYIGVYSFHDYRAEDAIPAIIDKDLWDRVQLRVGKIKNAPARNKAKVVYLLSGKIFCGHCGSKMNGNCNAGNYYYYQCYGKKNGNVDCKKKNIRKEFIERLVAQDALSLLTDEYIEQIATIACEKNQHEIELDSALPTIRDRIHQVDLSLNHLLKAIESGSAPDMLVKRMGELEKEKKDLQAQAKKESEDIVELDKAQVIYWLEQFRGGSIEDQEFCRMLIDLFVNSVTVWDEDDNTYKVTVAYNLTSLPTKTYRLNKGGTLSDFASNAPASQSPKLTSRRLV

SEQ ID NO: 5239 - protein, 509 aa, Unknown
  Description of Unknown: Integrase B5240 sequence
  PTHR30461:SF3,cd00338,SM00857,G3DSA:1.10.10.2600,IPR036162, PF13408,IPR025827,G3DSA:3.40.50.1390,PS51737,IPR006119, IPR038109,PF07508,IPR011109,SSF53041,PTHR30461, PS51736,Coil,PF00239
MNAVLYLRYSSDKQNEQSIEGQKRVCEAFCEKNGYSILSIYIDRAKSASKDTEKRIQFQQMIKDSAKKRFEAVVVYKLDRFARDRYDSAIYKSRLKKNGVRVVSATENISTEPEGIILESVLEGMAEFYSRELSQKVTRGMHETALKANYTGGGVPLGYKVEDKKLIIDERTADIVREAFSLYAAGATISDICSIFAEKGYKSTRGSAFTSHSFTRMLRNEKYIGTYFYKEVKIENAIPAIVDKGIFEMVQKRLKKNASAPARGKASTDFLLSQKLFCGHCGAKMVGESGQGRNGRVYYYYKCATQKKTGDCDKKPVQKDEIERLVVLDTIAMLTPENIEKIADIASSKSVERLQRESIIPALNIELVGVKKAISNIVDAVEQGRASDALFNRLDKLEIKKKNLELEIDKQMDEFPIVDADQVIYWLSKFKDGDISDPIFCKRLIDMLVNSVTLWDGPDGGKKITILYNLSPHEMHTFTISDSGDGGAPPQNNPKLFIYKNVFGQTKTH

SEQ ID NO: 5240 - protein, 509 aa, Unknown
  Description of Unknown: Integrase B5241 sequence
  SM00857,G3DSA:1.10.10.2600,IPR036162,PF13408,PS51737, IPR025827,G3DSA:3.40.50.1390,IPR006119,IPR038109,PF07508, IPR011109,SSF53041,PF00239,PTHR30461,Coil, cd00338
MYVIYLRKSRKDSDLEALGIDVLKRHEETLLELARARSLPIGAIYREVVSGDSIDARPEMVRLLSEVESGIWEGVLVMEVERLARGDTIDQGRVQRAFFYSNTLIVTPGKTYNPAIENDNEYFEFSLFMSRREYATIKRRMQAGRIRSVKDGYYVGNIAPYGWRRVKADDCKHFTLVPDEKENPVLKLMYDFMGNKKYGFQKTCSALTGMGIVSRSGKPFNPATVKTIISNPVNIGMLRWNYRKSQKAIVNGKIATSRPKADDYILVKGKHPGCISEDLYYRANSVSSSMTAPVKRSCRIQNPFAGIVRCSCCGRVMVRKKMSAKQPRDYLICQYAGCTTVAIELEELENAVLEWIRNYIADYKVNNFESADDSEQESLRSILANLEKEKETTLKQRGSLFDLLEQGIYTKEIFFERSTALEDKIKDFDKKIESVNADIVRLDLSKKNRSTFVPKCQELLNAWDTFDAADKNTALKNVIERIDFTKTEKNARGQRHSSFSIDVFPRISR

SEQ ID NO: 5241 - protein, 509 aa, Unknown
  Description of Unknown: Integrase B5242 sequence
  cd00338,SM00857,G3DSA:1.10.10.2600,IPR036162,PF13408, IPR025827,G3DSA:3.40.50.1390,PS51737,IPR006119,IPR038109, PF07508,SSF53041,IPR011109,PTHR30461,Coil, PF00239
MYVIYLRKSRKDSDLEALGIDVLKRHEETLLELARARSLPIGAIYREVVSGDSIDARPEMVRLLSEVESGIWEGVLVMEVERLARGDTIDQGRVQRAFFYSNTLIVTPGKTYNPAIENDNEYFEFSLFMSRREYATIKRRMQAGRIRSVKDGYYVGNIAPYGWRRVKADDCKHFTLVPDEKENPVLKLMYDFMGNKKYGFQKTCSALTGMGIVSRSGKPFNPATVKTIISNPVNIGMLRWNYRKSQKAIVNGKITTSRPKADDYILVKGKHPGCISEDLYYRANSVNSSMTAPVKRSCRIQNPFAGIVRCSCCGRVMVRKKMSAKQPRDYLICQYAGCATVAIELEELENAVLEWIRNYIADYKVNNFESTDDSEQESLRSILVNLEKEKETTLKQRGSLFDLLEQGIYTKEIFFERSTALEDKIKDFDKKIESVNADIVRLDLSKKNRSTFVPKCQELLNAWDTFDAADKNTALKNVIERINFTKTEKNAHGQRHSSFSIDVFPRISR

SEQ ID NO: 5242 - protein, 509 aa, Unknown
  Description of Unknown: Integrase B5243 sequence
  cd00338,SM00857,G3DSA:1.10.10.2600,IPR036162,PF13408, IPR025827,G3DSA:3.40.50.1390,PS51737,IPR006119,IPR038109, PF07508,SSF53041,IPR011109,PTHR30461,Coil, PF00239
MYVIYLRKSRKDSDLEALGIDVLKRHEETLLELARARSLPIGAIYREVVSGDSIDARPEMVRLLSEVESGIWEGVLVMEVERLARGDTIDQGRVQRAFFYSNTLIVTPGKTYNPAIENDNEYFEFSLFMSRREYATIKRRMQAGRIRSVKDGYYVGNIAPYGWRRVKADDCKHFTLVPDEKENPVLKLMYDFMGNKKYGFQKTCSALTGMGIVSRSGKPFNPATVKTIISNPVNIGMLRWNYRKSQKAIVNGKIATSRPKADDYILVKGKHPGCISEDLYYRANSVNSSMTAPVKRSCRIQNPFAGIVRCSCCGRVMVRKKMSTKQPRDYLICQYAGCATVAIELEELENAVLEWIRNYIADYKVNNFESTDDSEQESLRSILVNLEKEKDTTLKQRGSLFDLLEQGIYTKEIFFERSTALEDKIKDFDKKIESVNADIVRLDLSKKNRSTFVPKCQELLNAWDTFDAADKNTALKNVIERIDFTKTEKNARGQRHSSFSIDVFPRISR

SEQ ID NO: 5243 - protein, 509 aa, Unknown
  Description of Unknown: Integrase B5244 sequence
  cd00338,SM00857,G3DSA:1.10.10.2600,IPR036162,PS51737, G3DSA:3.40.50.1390,IPR006119,IPR038109,PF07508,SSF53041, IPR011109,PTHR30461,PS51736,Coil,PF00239
MDKYAIYLRKSRADLEAEKLGEGETLARHKKILTELAARRGLYVEKIYQEIISGAETIKDRPEIQKLINDAYKGKYRGVIIVEITRLSRGSQGDAQIIMDCLKYANRNKGLLVVTPTKVYDVAHNSDDEEYMEFELFMSRREYKMIQKRMDRGKKQCVVEGNYMASYRPYGYDILKTKTSRTLIPNDEEAPIVKKIFDWTVEQNMTPGEIARKLTSMGTPTYTGDPEWSAATVKTILTNPTYIGKVRWNDRMQVKTMVNGELVTSRPRSNHSEHFMLYDGKHKEYALIDEETFNKVSDRFTSDKTKHNLKLYNPLAGIFSCKKCGKMMHYQRYTTKQNVQPRFTHKHSQICKVKSVLATDVMNAVVHALKLYIEDFSVKINNLPQTDENEIAKEIESLTTELMKIEKKLSKLFDAWEDEQISDNEFVKRKAINNQRVENIKAEIEKLENSIPEKEEYEEKIMALSDALDSLLDENIDADIQNEYLKQIIDKIEFSRENNKEFILDVFLK

SEQ ID NO: 5244 - protein, 509 aa, Unknown
  Description of Unknown: Integrase B5245 sequence
  PTHR30461:SF3,SM00857,G3DSA:1.10.10.2600,IPR036162,PF13408, PS51737,G3DSA:3.40.50.1390,IPR025827,IPR006119,IPR038109, PF07508,SSF53041,IPR011109,PTHR30461, Coil,PS51736,cd00338,PF00239
MPEALNAVIYARYSSDRQTEQSIEGQLRECYAFAKANDIAVIDTYIDRAISGKTDNRPAFQKMIEDSAKRQFQAVIVYRLDRFTRNRYDSAIYKARLKKNGVKVLSAMENLNGSPESIIMESLLEGMAEYYSVELSQKITRGMRENALKGKALGGQRVLGYKVNSDCYFEIDETTAPVVVDIFKLYSSGKTVKEICDILNARGVKTARGGAFNKNSLHTILTNKKYIGIYKTKYGEIVGGIPAIIDKELFEMVALRMEQNKKAPARAKAEINYLLSTKLFCGKCRSAMVGESGTSKTGKKYYYYACVKKKREKACDKSNVKKDWIEDLVIQRTVTDILKDDVIDKIADRLVELQKAEAAESGTMLYLENSLAEIQVSIKNIMTAIEKGIITESTKTRLTELEDEKRNVEIEIAKESIARRIISREQIIYWISSFKDGDITSEKYRQQLIDTFVHAVFVYDDKIVITYNYSGENNTATISDLDLSSPPLQSNPNIFVTLDVFGLVVQIER

SEQ ID NO: 5245 - protein, 509 aa, Unknown
  Description of Unknown: Integrase B5246 sequence
  PTHR30461:SF3,cd00338,SM00857,G3DSA:1.10.10.2600,IPR036162, PF13408,IPR025827,PS51737,G3DSA:3.40.50.1390,IPR006119, IPR038109,PF07508,IPR011109,SSF53041,PTHR30461, PS51736,Coil,PF00239
MKRAVFYGRYSSDRQTEQSIEGQRRVCEEFAAGENIQIVREYIDRATSGTSTQHREQFQQMISDSKTGGWDYVLVYKLDRFARNRYDSAVYKRELKRNGVTVLSATERITDSPEGVLIEGLLESMDEYFSRELSRKAKRGMRESILKGHCITRLPYGYKRTGKTCAIDEDAADVIRWIFREYSSGKTIQEIVDTLNVRGFRTMTGKRFKRPTVSVILRNDKYTGTHYVSDFEEPERYPQIISQTMWDSVQSRLRESANRYRKHNDGFIYALTGKINCGYCGYAVNGITSNHKYHYYRCVSGKYNKHICDGCSVRADVVETAVVDALQEYFTAERVEEMGTHLYDLYRKSAPTERDDKRRLAEVDMQITGAVNALIACPESEALQNRLRELEEQKREIEQSHVEHQRLERGHFVEFFRNIVSALEHIDVRTRLFSTLIESVSLYRDHVVIMINLMDDSTDPPTPISLEKYFSSSVGNGRALHTLDKIQLAFPFLLLYVSLPERRNQRERP

SEQ ID NO: 5246 - protein, 509 aa, Unknown
  Description of Unknown: Integrase B5247 sequence
  PTHR30461:SF3,SM00857,G3DSA:1.10.10.2600,IPR036162,PF13408, IPR025827,G3DSA:3.40.50.1390,PS51737,IPR006119,IPR038109, PF07508,SSF53041,IPR011109,PTHR30461,Coil, PS51736,cd00338,PF00239
MARKKKYHLREVHSVCIYARYSAGSRQTDQSIEGQLQVCRDYAAAQGYTVTRIYRDSHISGTTDDRAQFRQMLADSDTGAFDAVLVWKNDRFGRNLEEQVVNEMRLKNNGVSLISVTEPLADGPLGPMQKALLMGIAEFYSAANSENVRRGMRQAALNCQVISGAIPFGYRKGADKRFALDPPAADMVREIYQRYDCGEKIFSIMDDCNRRGFRTVQRSAPFTHNTMYSILSNERYTGVYLWKDVRIEGGMPQIVDRELFERVRAKMQQNKKAPARSKAAEPFLLTTRCFCALCGAPMIGDSGTGKNGTTHYYYSCAARKNARSKRDACPQKSIRKDALEELVLRRTLSDLLQPQTCAQIARQLVEYQQKDRTGVQLEALARRRRQVQKAIENLLDLAEAGQCSAGLANRLALREKELEEIDTAAAQLRAERSVFTEKEILRYLQSFSETQLHDAAFRQRLAETFLQAVYVAPDTVVICYPYTAPQTPVTLDTVRRLLDDNAAAPMQPT

SEQ ID NO: 5247 - protein, 509 aa, Unknown
  Description of Unknown: Integrase B5248 sequence
  cd00338,SM00857,G3DSA:1.10.10.2600,IPR036162,PF13408, IPR025827,G3DSA:3.40.50.1390,PS51737,IPR006119,IPR038109, PF07508,SSF53041,IPR011109,PTHR30461,Coil, PF00239
MYVIYLRKSRKDSDLEALGIDVLKRHEETLLELARARSLPIGAIYREVVSGDSIDARPEMVRLLSEVESGIWEGVLVMEVERLARGDTIDQGRVQRAFFYSNTLIVTPGKTYNPAIENDNEYFEFSLFMSRREYATIKRRMQAGRIRSVKDGYYVGNIAPYGWRRVKADDCKHFTLVPDEKENPVLKLMYDFMGNKKYGFQKTCSALTGMGIVSRSGKPFNPATVKTIISNPVNIGMLRWNYRKSQKAIVNGKIATSRPKADDYILVKGKHPGCISEDLYYRANSVNSSMTAPVKRSCRIQNPFAGIVRCSCCGRVMVRKKMSSKQPRDYLICQYAGCATVAIELEELENAVLEWIRNYIADYKVNNFESTDDSEQESLRSILVNLEKEKETTLKQRGSLFDLLEQGIYTKEIFFERSAALEDKIKDFDKKIESVNADIVRLDLSKKNRSTFVPKCQELLNAWDTFDAADKNTALKNVIERIDFTKTEKNARGQRHSSFSIDVFPRISR

SEQ ID NO: 5248 - protein, 509 aa, Unknown
  Description of Unknown: Integrase B5249 sequence
  SM00857,G3DSA:1.10.10.2600,IPR036162,PF13408,IPR025827, G3DSA:3.40.50.1390,PS51737,IPR006119,IPR038109,PF07508, IPR011109,SSF53041,PF00239,PTHR30461,Coil, cd00338
MYVIYLRKSRKDSDLEALGIDVLKRHEETLLELARAKSLPIGAIYREVVSGDSIDARPEMVRLLSEVESGIWEGVLVMEVERLARGDTIDQGRVQRAFFYSNTLIVTPGKTYNPAIENDNEYFEFSLFMSRREYATIKRRMQAGRIRSVKDGYYVGNIAPYGWRRVKADDCKHFTLVPDEKENPVLKLMYNFMGNKKYGFQKTCSALTGMGIVSRSGKPFNPATVKTIISNPVNIGMLRWNYRKSQKAIVNGKIATSRPKANDYILVKGKHPGCISEDLYYRANSVNSSMTAPVKRSCRIQNPFAGIVRCSCCGRVMVRKKMSAKQPRDYLICQYAGCATVAIELEELENAVLEWIRNYIADYKVNNFESTDDSEQESLRSILVNLEKEKETTLKQRGSLFDLLEQGIYTKEIFFERSTALEDKIKDFDKKIESVNADIVRLDLSKKNRSTFVPKCQELLNAWDTFDAADKNTALKNVIERIDFTKTEKNARGQRHSSFSIDVFPRISR

SEQ ID NO: 5249 - protein, 509 aa, Unknown
  Description of Unknown: Integrase B5250 sequence
  cd00338,SM00857,G3DSA:1.10.10.2600,IPR036162,PF13408, PS51737,G3DSA:3.40.50.1390,IPR025827,IPR006119,IPR038109, PF07508,SSF53041,IPR011109,PTHR30461,Coil, PF00239
MYVIYLRKSRKDSDLEALGIDVLKRHEETLLELARARSLPIGAIYREVVSGDSIDARPEMVRLLSEVESGIWEGVLVMEVERLARGDTIDQGRVQRAFFYSNTLIVTPGKTYNPAIENDNEFFEFSLFMSRREYATIKRRMQAGRIRSVKDGYYVGNIAPYGWRRVKADDCKHFTLVPDEKENPVLKLMYDFMGNKKYGFQKTCSALTGMGIVSRSGKPFNPATVKTIISNPVNIGMLRWNYRKSQKAIVNGKIATSRPKADDYILVKGKHPGCISEDLYNRANSVNSSMTAPVKRSCRIQNPFAGIVRCSCCGRVMVRKKMSAKQPRDYLICQYAGCATVAIELEELENAVLEWIRNYIADYKVNNFESADDSEQESLRSILVNLEKEKETTLKQRGSLFDLLEQGIYTKEIFFERSTALEDKIKDFDKKIESVNADIVRLDLSKKNRSTFVPKCQELLNAWDTFDAADKNTALKNVIERIDFTKTEKNARGQRHSSFSIDVFPRISR

SEQ ID NO: 5250 - protein, 509 aa, Unknown
  Description of Unknown: Integrase B5251 sequence
  PTHR30461:SF3,SM00857,G3DSA:1.10.10.2600,IPR036162,PS51737, G3DSA:3.40.50.1390,IPR006119,IPR038109,PF07508,SSF53041, IPR011109,PF00239,PTHR30461,PS51736,Coil, cd00338
MPFDDYKESVAIYLRKSRMDPDSEDIDETLARHEDTLLKLAKQMDLNIVEIYKEVVSGDGLFTRPEMCRLLQNVEQGNYSAVLCMEIDRLGRSSQKDGGIILETFKDNDVRIITTSKTYDLNDDVDEQVVEMHSFIARQELKAIRRRLNRGIEKTVEMGYHICEPPYGYRRTYIDKRPTLEICEEEANVIRMVFDMYVNQHMGTQTIADNLNKMGYTPRKNDHFSRNTIQFYLQNETYIGQIIWNKRKHIKKKFPTDKHRTVLNPEEKWIVSEGKHPAIISKELFEQAREIHQFRTHPPTAHGIIRNPFAGLIYCKNCGELMQRQYSKISGNRLLCLHSGCIRSIRTMFVEKVILDAVKNILKNSSSAVQNSIQKTNNLQIEMLDRTIKDINTKIKQLNSQKSKLHDLLEQGVYDVDTFLDRSNAIAEKIQNSKLALAQHEKKLNSIQSVPTVQEVLPTLRYLIDEYDNLSAGEKNVIFKKLIKRMVYNRTKDHRGNDFDLDIEWRFTM

SEQ ID NO: 5251 - protein, 509 aa, Unknown
  Description of Unknown: Integrase B5252 sequence
  cd00338,SM00857,G3DSA:1.10.10.2600,IPR036162,PF13408, IPR025827,G3DSA:3.40.50.1390,PS51737,IPR006119,IPR038109, PF07508,IPR011109,SSF53041,PTHR30461,Coil, PF00239
MYVIYLRKSRKDSDLEALGIDVLKRHEETLLELARARSLPIGAIYREVVSGDSIDARPEMVRLLSEVESGIWEGVLVMEVERLARGDTIDQGRVQRAFFYSNTLIVTPGKTYNPAIENDNEYFEFSLFMSRREYATIKRRMQAGRIRSVKDGYYVGNIAPYGWRRVKADDCKHFTLVPDEKENPVLKLMYDFMGNKKYGFQKTCSALTGMGIVSRSGKPFNPATVKTIISNPVNIGMLRWNYRKSQKAIVNGKIATSRPKADDYILVKGKHPGCISEDLYYRANSVNSSMTAPVKRSCRIQNPFAGIVRCSCCGRVMVRKKMSAKQPRDYLICQYAGCTTVAIELDELENAVLEWIRNYIADYKVNNFESADDSGQESLRSILVNLEKEKEITLKQRGSLFDLLEQGIYTKEIFFERSTALEDKIKDFDKKIESVNADIVRLDLSKKNRSTFVPKCQELLNAWDTFDAADKNTALKNVIERIDFTKTEKNARGQRHSSFSIDVFPRISR

SEQ ID NO: 5252 - protein, 509 aa, Unknown
  Description of Unknown: Integrase B5253 sequence
  PTHR30461:SF3,SM00857,G3DSA:1.10.10.2600,IPR036162,PF13408, PS51737,G3DSA:3.40.50.1390,IPR025827,IPR006119,IPR038109, PF07508,SSF53041,IPR011109,PTHR30461,Coil, PS51736,cd00338,PF00239
MPEALNAVIYARYSSDRQTEQSIEGQLRECYAFAKANDIAVIDTYIDRAISGKTDNRPAFQKMIEDSAKRQFQAVIVYRLDRFTRNRYDSAIYKARLKKNGVKVLSAMENLNGSPESIIMESLLEGMAEYYSVELSQKITRGMRENALKGKALGGQRVLGYKVNSDCYFEIDETTAPVVVDIFKLYSSGKTVKEICDILNARGVKTARGGAFNKNSLHTILTNKKYIGIYKTKYGEIVGGIPAIIDKELFEMVALRMEQNKKAPARAKAEINYLLSTKLFCGKCRSAMVGESGTSKTGKKYYYYACVKKKREKACDKSNVKKDWIEDLVIQRTVTDILKDDVIEKIADRLVELQKAEAAQSGTMLYLENSLAEIQVSIKNIMTAIEKGIITESTKTRLTELEDEKRNVEIEIAKESIARRIISREQIIYWISSFKDGDITSEKYRQQLIDTFVHAVFVYDDKIVITYNYSGENNTATISDLDLSSPPLQSNPNIFVTLDVFGLVVQIER

SEQ ID NO: 5253 - protein, 509 aa, Unknown
  Description of Unknown: Integrase B5254 sequence
  SM00857,G3DSA:1.10.10.2600,IPR036162,PS51737,G3DSA:3.40.50.1390, IPR006119,IPR038109,PF07508,IPR011109,SSF53041, PTHR30461,Coil,PS51736,cd00338,PF00239
MSYAIHLRKSRADLEAEARGEGESLARHRSRLLAFAERAGLPIVAEYSEIISGDRLSDRPEMQRLLSDVAGGKYDGVLTVEVSRLTRGDLMDQARIMQTFKYSGTKIITPEHTYDLSEDWDEDVLQSDLMMARREYKYIKRRMQRGRQASASEGLWQGRVPYGYQQVKVRPGKGFTLQPDPDQAPIVRMIFDMYAKDRVGCSTIAKHLNDLGLRTNFGKPWTDSSVLCISKNPVYAGYVTWGKRTSVTRLSPDGSLSTSRVANSAPILALGKHPPLIDQSTFDAAQAIRASHDLTRCHVNTPVRNPLAGLVYCSICGKSMVRKDNGYARGSRYDMLKCKTPGCPTTATALSLVEESILSTLSDWALIGSGSPSSPTQNPHAEQIAAIQSNLDRLRQQRTRIFSAYEEGVYDSTVFVSRRAEKDREIADAESALHALQTSSEPTDDEIIRANYPRIQNVLESYHTTSDPQQRNLLLKSVFTRIEYIKTRRCFRNENPAVALSIHCYPRRY

SEQ ID NO: 5254 - protein, 509 aa, Unknown
  Description of Unknown: Integrase B5255 sequence
  PTHR30461:SF3,SM00857,G3DSA:1.10.10.2600,IPR036162,PF13408, PS51737,IPR025827,G3DSA:3.40.50.1390,IPR006119,IPR038109, PF07508,IPR011109,SSF53041,PTHR30461, PS51736,cd00338,PF00239
MPQVQVIQPIQQQPKRLRVAAYARVSSDSEDQLNSLAVQVDYYTHLIQENPNWEFAGIYTDEGITGTSTKHREQFNRLMDDCRAGLIDRVLVKSASRFARNTADALSSVRELKSLGVTVAFEKEGFDTETSNGEMLLSMICAVAQEESLSISQNMKWGIHKRMRAGNYITNSTPFGYTQINHQLVPEKNNAMIVNDIFKSYLSGMSINEIAEHLNTIYPKENSKWNPRTIHAILRNEKYIGDSLYQKTYTTDSLPLKRYLNTGQRSKYYAMETHEGIISKTDYEKVQNLLAKKSITGEIDRTCVFSKKIYCSICGAICSRKGPPTQGFVWCCRTHLQSKVLCLLKSIREDELQQAFLSIYNRLQCNQKTILEPLVDDLLGLRHLQEQKYKKRLALGEDIQHLAKQKHNLTRIHTLGYIEEPQFIERSAAIEQQIREKKQQLSRNDMPNTSEKILQKTRLIQKKLSSTPPLELFDESVFKELVKKVLISNTAIQFELINGMKLSESRAAT

SEQ ID NO: 5255 - protein, 509 aa, Unknown
  Description of Unknown: Integrase B5256 sequence
  cd00338,SM00857,G3DSA:1.10.10.2600,IPR036162,PF13408, PS51737,IPR025827,G3DSA:3.40.50.1390,IPR006119,IPR038109, PF07508,IPR011109,SSF53041,PTHR30461,Coil, PF00239
MYVIYLRKSRKDSDLEALGIDVLKRHEETLLELARARSLPIGAIYREVVSGDSIDARPEMVRLLSEVESGIWEGVLVMEVERLARGDTIDQGRVQRAFFYSNTLIVTPGKTYNPAIENDNEYFEFSLFMSRREYATIKRRMQAGRIRSVKDGYYVGNIAPYGWRRVKADDCKHFTLVPDEKENPVLKLMYDFMGNKKYGFQKTCSALTGMGIVSRSGKPFNPATVKTIISNPVNIGMLRWNYRKSQKAIVNGKIATSRPKADDYILVKGKHPGCISEDLYNRANSVNSSMTAPVKRSCRIQNPFAGIVRCSCCGRVMVRKKMSAKQPRDYLICQYAGCATVAIELEELENAVLEWIRNYIADYKVNNFESTDDSEQESLRSILVNLEKEKETTLKQRGSLFDLLEQGIYTKEIFFERSTALEDKIKDFDKKIESVNADIVRLDLSKKNRSTFVPKCQELLNAWDTFDAADKNTALKNMIERIDFTKTEKNARGQRHSSFSIDVFPRISR

SEQ ID NO: 5256 - protein, 509 aa, Unknown
  Description of Unknown: Integrase B5257 sequence
  PTHR30461:SF3,IPR036162,PS51737,IPR011109,PTHR30461, PF00239,G3DSA:1.10.10.2600,IPR006119,SSF53041,cd00338, SM00857,IPR025827,IPR038109,mobidb-lite,PS51736, PF13408,G3DSA:3.40.50.1390,PF07508,Coil
MYEDIKTACLYVRFSSHNQTEQSIEGQTRVCQEFCQRHNIKIVEIYADRATSASKNTEKRVSFLKMIKDSEKGLFDAVVVYKLDRFARSRYDSATYKYRLKKNGVQLISATENITNSPEGIILESVLEGMAEFYSAELSQKINRGMRESAYKHNSIGGALPLGYKTVDKKLVIDEKTAPIVREAFTMYAEGHSVAEICRIFNARGYKTSKGTEFGKNSFSKIFRNERYIGTYTYHDYRAEDAIPAIIDRDLWDRVQLRLKKVKNSPGRNKAKRVYLLSGKLFCGHCGESMNGNCNGNKYAFYECYGKKSKYNGCQKRNLRKEYIERLVAQDALSLLTDENIEHLATVACERNDYEIETGSPIPVIKDRIHQTEVSINNLTKAIETGATPDALVKRMVELEREKKDLSAQLKKEEELVVPLEKEQVIFWLEKFKDGDIEDEEFCRLLIDLFVNSVTAWDEDDDMLKVTIAYNLTSLPTKTYRLTKDGTLSDFADNSPGTKSSPKKPSKSA

SEQ ID NO: 5257 - protein, 509 aa, Unknown
  Description of Unknown: Integrase B5258 sequence
  cd00338,SM00857,G3DSA:1.10.10.2600,IPR036162,PF13408, IPR025827,G3DSA:3.40.50.1390,PS51737,IPR006119,IPR038109, PF07508,SSF53041,IPR011109,PTHR30461,Coil, PF00239
MYVIYLRKSRKDSDLEALGIDVLKRHEETLLELARARSLPIGAIYREVVSGDSIDARPEMVRLLSEVESGIWEGVLVMEVERLARGDTIDQGRVQRAFFYSNTLIVTPGKTYNPAIENDNEYFEFSLFMSRREYATIKRRMQAGRIRSVKDGYYVGNIAPYGWRRVKADDCKHFTLVPDEKENPVLKLMYDFMGNKKYGFQKTCSALTGMGIVSRSGKPFNPATVKTIISNPVNIGMLRWNYRKSQKAIVNGKIATSRPKADDYILVKGKHPGCISEDLYYRANSVNSSMTAPVKRSCRIQNPFAGIVRCSCCGRVMVRKKMSAKQPRDYLICQYAGCATVAIELEELENAVLEWIRNYIADYKVNNFESTDDSEQESLRSILVNLEKEKETTLKQRGSLFDLLEQGIYTKEIFFERSTALEDKIKDFDKKIESVNADIVRLDLSKKNRSTFVPKCQELLNAWDTFDAADKNTALKNVIERIDFTKTEKNARGQRHSSFSIDVFPRISR

SEQ ID NO: 5258 - protein, 509 aa, Unknown
  Description of Unknown: Integrase B5259 sequence
  PTHR30461:SF3,SM00857,G3DSA:1.10.10.2600,IPR036162,PF13408, IPR025827,G3DSA:3.40.50.1390,PS51737,IPR006119,IPR038109, PF07508,SSF53041,IPR011109,PF00239,PTHR30461, PS51736,Coil,cd00338
MKKAIAYMRFSSVNQDKGDSLRRQKKLIDDWLKNNPQYTLDPTTYEDLGLSAYKGKHAREGAFSEFIDALENGLIIPGTVLLVESLDRLSREKVGEATERLKYILKCGIDVITLSDNTQYSEASLDDPYALIKAILIAQRANEESEIKSSRVKLSWKKKRDEAELNGRIMTKACPRWLRVSPDYSHFEVIESKVKVIKKIFSLRKENKSLTAITKYLNDRLIENMTGTPGEWSPSVIEKILGNKALIGICRPTYRGRAKGVNEIIDYYPKVLTDDEFYAVQEVRLSPFGFNSHSGNPYLINLLRTVMKCKCCGNTMIVTAVSKSGKGYYVCPMRRLHRCKSPSIKRELVDVNLIEEILFNFDKLQIESNQVSLQETLEKNSIDLQLQINSLVQALTIAPEVNVLAGKVRELDRKLKKIETTIKVLKNKAKKDKSRGSKELNLSLKEDREVCRRLAFKSFREVYIDTETKKCDIYFTNGLVFKNFPLNKRCRADSIISTLKYMDENTVYF

SEQ ID NO: 5259 - protein, 509 aa, Unknown
  Description of Unknown: Integrase B5260 sequence
  PTHR30461:SF3,SM00857,G3DSA:1.10.10.2600,IPR036162,PF13408, PS51737,G3DSA:3.40.50.1390,IPR025827,IPR006119,IPR038109, PF07508,SSF53041,IPR011109,PTHR30461,Coil, PS51736,cd00338,PF00239
MPEALNAVIYARYSSDRQTEQSIEGQLRECYAFAKANDIAVIDTYIDRAISGKTDNRPAFQKMIEDSAKRQFQAVIVYRLDRFTRNRYDSAIYKARLKKNGVKVLSAMENLNGSPESIIMESLLEGMAEYYSVELSQKITRGMRENALKGKALGGQRVLGYKVNSDCYFEIDETTAPVVVDIFKLYSSGKTVKEICDILNARGVKTARGGAFNKNSLHTILTNKKYIGIYKTKYGEIVGGIPAIIDKELFEMVALRMEQNKKAPARAKAEINYLLSTKLFCGKCRSAMVGESGTSKTGKKYYYYACVKKKREKACDKSNVKKDWIEDLVIQRTVTDILKDDVIEKIADRLVELQKAEAAESGTMLYLENSLAEIQVSIKNIMTAIEKGIITESTKTRLTELEDEKRNVEIEIAKESIARRIISREQIIYWISSFKDGDITSEKYRQQLIDTFVHAVFVYDDKIVITYNYSGENNTATISDLDLSSPPLQSNSNIFVMLDVFGLVVQIER

SEQ ID NO: 5260 - protein, 509 aa, Unknown
  Description of Unknown: Integrase B5261 sequence
  PTHR30461:SF3,cd00338,SM00857,G3DSA:1.10.10.2600,IPR036162, PS51737,G3DSA:3.40.50.1390,IPR006119,IPR038109,PF07508, IPR011109,SSF53041,PTHR30461,PS51736,Coil, PF00239
MGGRAAIYARFSSHNQRGESIEIQVEKSRAYCAENDLRVVATYCDFAQTGTNTDRAEFQRMMADAKRGLFDFVVIYKVTRIMRNRDEMAMARIMLRRCRVEILYAGEDISDGSAGVLQLGMLEVLAEYESALDGERIRDGIQKNAERCMANGCVRYGWDIVDGRYVVNEEEAAAIRLGVRMVLSGKSVADVVRAWEPYRTKRGGKWRFQTVRRILMRRENGGEYRYAGVVVPGGMPAIVPMDDEERVIRMLEDSHRPRAKTEAWDFPLTGKLYDGRDGGLMTGTSGTGKSGRPYHYYRCRSCGRTVRRDAVEKRVADAVRDALGSADSRERIARMLADAEEERADEKPLSETIKGELAKIETAFSNIWAAIESGIAPPGGKERIDALKQRQALLKDELRTAEALEAARLDYDRALFWLEGMAAAEVDDAQLLRTFVARVVLGGPDDDDGLRVAFTFDDSAGLGDNPSLPGAIGPGGEVFDRMNASSTNCSVGEHMQVFVVRRAFVLLVE

SEQ ID NO: 5261 - protein, 509 aa, Unknown
  Description of Unknown: Integrase B5262 sequence
  cd00338,SM00857,G3DSA:1.10.10.2600,IPR036162,PF13408, IPR025827,G3DSA:3.40.50.1390,PS51737,IPR006119,IPR038109, PF07508,IPR011109,SSF53041,PTHR30461,Coil, PF00239
MYVIYLRKSRKDSDLEALGIDVLKRHEETLLELARARSLPIGAIYREVVSGDSIDARPEMVRLLSEVESGIWEGVLVMEVERLARGDTIDQGRVQRAFFYSNTLIVTPGKTYNPAIENDNEYFEFSLFMSRREYATIKRRMQAGRIRSVKDGYYVGNIAPYGWRRVKADDCKHFTLVPDEKENPVLKLMYDFMGNKKYGFQKTCSALTGMGIVSRSGKPFNPATVKTIISNPVNIGMLRWNYRKSQKAIVNGKIATSRPKADDYILVKGKHPGCISEDLYYRANSVNSSMTAPVKRSCRIQNPFAGIVRCACCGRIMVRKKMSAKQPRDYLICQYAGCATVAIELEELENAVLEWIRNYIADYKVNNFESTDDSEQEFLRSILVNLEKEKETTLKQRGSLFDLLEQGIYTKEIFFERSTALEDKIKDFDKKIESVNADIVRLDLSKKNRSTFVPKCQELLNAWDTFDAADKNTALKNVIERIDFTKTEKNARGQRHSSFSIDVFPRISR

SEQ ID NO: 5262 - protein, 509 aa, Unknown
  Description of Unknown: Integrase B5263 sequence
  PTHR30461:SF3,SM00857,G3DSA:1.10.10.2600,IPR036162,PF13408, PS51737,G3DSA:3.40.50.1390,IPR025827,IPR006119,IPR038109, PF07508,SSF53041,IPR011109,PTHR30461,Coil, PS51736,cd00338,PF00239
MPEALNAVIYARYSSDRQTEQSIEGQLRECYAFAKANDIAVIDTYIDRAISGKTDNRPAFQKMIEDSAKRQFQAVIVYRLDRFTRNRYDSAIYKARLKKNGVKVLSAMENLNGSPESIIMESLLEGMAEYYSVELSQKITRGMRENALKGKALGGQRVLGYKVNSDCYFEIDETTAPVVVDIFKLYSSGKTVKEICDILNARGVKTARGGAFNKNSLHTILTNKKYIGIYKTKYGEIVGGIPAIIDKELFEMVALRMEQNKKAPARAKAEINYLLSTKLFCGKCRSAMVGESGTSKTGKKYYYYACVKKKREKACDKSNVKKDWIEDLVIQRTVTDILKDDVIEKIADRLVELQKAEAAESGTMLYLQNSLAEIQVSIKNIMTAIEKGIITESTKTRLTELEDEKRNVEIEIAKESIARRIISREQIIYWISSFKDGDITSEKYRQQLIDTFVHAVFVYDDKIVITYNYSGENNTATISDLDLSSPPLQSNPNIFVTLDVFGLVVQIER

SEQ ID NO: 5263 - protein, 509 aa, Unknown
  Description of Unknown: Integrase B5264 sequence
  PTHR30461:SF3,SM00857,G3DSA:1.10.10.2600,IPR036162,PF13408, IPR025827,PS51737,G3DSA:3.40.50.1390,IPR006119,IPR038109, PF07508,IPR011109,SSF53041,PTHR30461,PS51736, cd00338,PF00239
MPQVQVIQPIQQQPKRLRVAAYARVSSDSEDQLNSLAVQVDYYTHLIQENPNWEFAGIYTDEGITGTSTKRREQFNRLMDDCRAGLIDRVLVKSASRFARNTADALSSVRELKSLGVTVAFEKEGFDTETSNGEMLLSIICAVAQEESLSISQNMKWGIHKRMRTGNYITNATPFGYTQINHQLVPEKNNAMIVNDIFKSYLSGMSINEIAEHLNTIYPKENSKWNPRTIHAILRNEKYIGDSLYQKTYTTDSLPLKRYLNTGQRSKYYAMETHEGIISKTDYEKVQNLLAKKSITGEIDRTCVFSKKIYCSICGAICSRKGPPTQGFVWCCRTHLQSKALCLLKSIREDELQQAFLSIYNRLQCNQKTILEPLVDDLLGLRHLQEQKYKKRLALGEDIQHLAKQKHNLTRIHTLGYIEEPQFIERSAAIEQQIRERKQQLSRNDMSNTSEKILQKTRLIQKKLSSTPPLELFDESVFKELVKKVLISNTAIQFELINGMKLSESRAAT

SEQ ID NO: 5264 - protein, 509 aa, Unknown
  Description of Unknown: Integrase B5265 sequence
  PTHR30461:SF3,cd00338,SM00857,G3DSA:1.10.10.2600,IPR036162, PF13408,IPR025827,PS51737,G3DSA:3.40.50.1390,IPR006119, IPR038109,PF07508,IPR011109,SSF53041,PTHR30461, PS51736,Coil,PF00239
MPKVTVIPPSINRATRQDISAPTRRKVAAYARVSTDFEEQLTSYEAQISYYTNYIQRNPDWEFVKIYTDEGISATSTKHREGFNSMIADALDGKIDLIITKSVSRFARNTVDSLTTIRKLKEHHVECFFEKENIWTFDSKGELLITIMSSLAQEESRSISENVTWGQRKRFADGKVSLPYAHFLGYRKGENGLPEIVPEEAETVRYIYQRFIDGLTPYKIANELTAQGVPTPCGKEKWSASTVKSILTNEKYKGDALLQKKFTVDFLTKKQQINEGQVPQYYVENSHPAIITPEEFDFVQSEFQKRCMKPYSSTSIYATKIICGDCGSYFGAKVWHSNSKYRRVIYQCNSKFKGSHFCTTPHLYEPEIQEKFLQAFAQYFSQKDVVIKNCQFALNCLKKQESKKKELQDELVAVNEKLKEYIQHGGEDFDALNAKYEELSAQLDAEEAAESDRKRRIAKMQKILQTLKKTDSVLETFDESVWNAVLENLTVFHDGSLVFLFRDGTEIKV

SEQ ID NO: 5265 - protein, 509 aa, Unknown
  Description of Unknown: Integrase B5266 sequence
  PTHR30461:SF3,cd00338,SM00857,G3DSA:1.10.10.2600,IPR036162, PF13408,IPR025827,PS51737,G3DSA:3.40.50.1390,IPR006119, IPR038109,PF07508,SSF53041,IPR011109,PTHR30461, PS51736,Coil,PF00239
MRAFIYGRFSSHKQQELSIEAQIDICREYAEKHNITVVGEYVDRARSARTENRADFRRLIRDACTGVVDCVLVWRYDRFFRDRAESALYRKQLEAAGVHLISVTEFIPDGSAGVITQGMIETVAEYFSAKLSEDVTRGMNKAAQHCQITGGAPLGYRPGPNKRWQIDPVGAELVKRCFEWYDSGKSMGELADHFNKEGHKTAKGNSFNKSSFTTILRNKKYIGIYEYDGTVSIAGGVPRIIEDDLFFRVQRKLDANRHRPGAYKAEVPYLLSGKLFCGKCGSPMTGTAGTGKSGVRHYYYICNNRRAKKCDKKNVRLDLIEEAVLQSALDVLTDDNISYISAEVERRCSENSGNKALVASLRVQLTEVEKQLKNIGNAIAQGIITETTKQMLMDAEADRAALRQQIDRATVQASLEVKAEAVACWLDGFRHGDRKSPEFRKDVFGALVHSVFVYDDYMKIIFNVDSAGAALVPFSAVQNAATSDFVGALPGSYLGGSGVPKGSSYRTPL

SEQ ID NO: 5266 - protein, 509 aa, Unknown
  Description of Unknown: Integrase B5267 sequence
  PTHR30461:SF3,cd00338,SM00857,G3DSA:1.10.10.2600,IPR036162, PF13408,IPR025827,PS51737,G3DSA:3.40.50.1390,IPR006119, IPR038109,PF07508,IPR011109,SSF53041,PTHR30461, PS51736,Coil,PF00239
MKRAVFYGRYSSDRQTEQSIEGQRRVCEEFAAGENIQIVREYIDRATSGTSTQHREQFQQMISDSKTGGWDYVLVYKLDRFARNRYDSAVYKRELKRNGVTVLSATERITDSPEGVLIEGLLESMDEYFSRELSRKAKRGIRESILKGHCITRLPYGYKRTGKTCAIDEDAADMIRWIFREYSSGKTIQEIVDTLNIRGFRTATGRTFQRCTISVILRNDKYTGTHYVSDFEEPEKYPQIISQTLWDSVQSRLQESAHRYRKHMDGFAFALTGKISCAYCGYAIKGVTTNRKYHYYRCIAGKYNKQTCNGCSVRAEVVETAVIDALQEYFTAERVEEMGTHLYNLYRKSAPSEKDNKRRLSEVDMQITGAVNALIACPESEALQNRLRELEEQKREIEQLHVEHQRLEKRHFVEFFRSIVSALEHIDVRTRLFSTLIHSVSLYRDHVVILINLMDDSTDPPTPISLEKYFSSSVGNGRALHTLDKIQLAFPFLLLYVSLPERRNQRERP

SEQ ID NO: 5267 - protein, 509 aa, Unknown
  Description of Unknown: Integrase B5268 sequence
  PTHR30461:SF3,cd00338,SM00857,G3DSA:1.10.10.2600,IPR036162, PF13408,PS51737,G3DSA:3.40.50.1390,IPR025827,IPR006119, IPR038109,PF07508,IPR011109,SSF53041,PTHR30461, PS51736,Coil,PF00239
MKRAVFYGRYSSDRQTEQSIEGQRRVCEEFAAGENIQIVREYIDRATSGTSTQHREQFQQMISDSKTGGWEYVLVYKLDRFARNRYDSAVYKRELKRNGVTVLSATERITDSPEGVLIEGLLESMDEYFSRELSRKAKRGMRESILKGHCITRLPYGYKRTGKTCAIDEDAADVIRWIFREYSSGKTIQEIVDTLNIRGFRTMTGKRFKRPTVSVILRNDKYTGTHYVSDFEEPERYPQIISQTMWDSVQSRLRESANRYRKHDDGFVYALTGKINCGYCGYAVNGITSNHKYHYYRCVSGKYNKHICDGCSVRADVVETAVVDALQEYFTAERVEEMGTHLYDLYRKSAPTERDDKRRLTEVDMQITGAVNALIACPESEALQNRLRDLEEQKREIEQSHVKHQYLEKSHFVEFFRNIVSALEHIDVRTRLFSTLIESVSLYRDHVVIIINLMDDSTDPPTPISLEKYFSSSVANGRALHTLDKIQLAFPFLLLYVSLPERRNQRERP

SEQ ID NO: 5268 - protein, 509 aa, Unknown
  Description of Unknown: Integrase B5269 sequence
  PTHR30461:SF3,cd00338,SM00857,G3DSA:1.10.10.2600,IPR036162, PF13408,IPR025827,PS51737,G3DSA:3.40.50.1390,IPR006119, IPR038109,PF07508,SSF53041,IPR011109,PTHR30461, PS51736,Coil,PF00239
MSNAVIYARYSSGHQREESIEGQIRECTNFAKRNGLTIVEHYIDRAISAKTDDRPSFQQMVADSSKKTFDTIIVYTLDRFARNRYDSAVYKAKLKRNGVRVLSAKENITSDPSGIILESVLEGMAEYYSVELAQKVKRGMTENALACRWASGRIPFGYTIDADKHLHPDPALVPIVQEAFEMYAAGAKIVDIARKINSYHVVTGMGNKFGRSSFDRMIRSETYIGVFKWNDIRKENAIPPIITPELFYKCQARYNARNRKNVARPSAIYLLSGKLRCGCCGGSMCGMSGKSRNGTMHYYYSCYSTRRRTSHCDIGNIRRDEIEHIIAAHAASILKKPINLDIIANQALKTNNSVKNYRLESLIQQEKDLTQKLENCMKAIDQGLVSITLMDRIKQYEADLQSVKNDISLEKIKSNPIQVTKEHIIFFLEKFALLEGEKFKDRIISTMVRDIVIKKEKDGNYLVTVQYNYANSKELPNEESYSVPESIGSQDVELVEMRGVEPLSENIAI

SEQ ID NO: 5269 - protein, 509 aa, Unknown
  Description of Unknown: Integrase B5270 sequence
  PTHR30461:SF3,SM00857,G3DSA:1.10.10.2600,IPR036162,PS51737, G3DSA:3.40.50.1390,IPR006119,IPR038109,PF07508,SSF53041, IPR011109,PF00239,PTHR30461,PS51736,Coil, cd00338
MPFDDYKESVAIYLRKSRMDPDSEDIDETLARHEDTLLKLAKQMDLNIVEIYKEVVSGDGLFTRPEMCRLLQNVEQGNYSAVLCMEIDRLGRSSQKDGGIILETFKDNDVRIITTSKTYDLNDDVDEQVVEMHSFIARQELKAIRRRLNRGIEKTVEMGYHICEPPYGYRRTYIDKRPTLEICEEEANVIRMVFDMYVNQHMGTQTIADNLNKMGYTPRKNDHFSRNTIQFYLQNETYIGQIIWNKRKHIKKKFPTDKHRTVLNPEEKWIVSEGKHPAIISKELFEQAQEIHQFRTHPPTAHGIIRNPFAGLIYCKNCGELMQRQYSKISGNRLLCLHSGCIRSIRTMFVEKVILDAVKNILKNSSSAVQNSIQKTNNLQIEMLDRTIKDINTKIKQLNSQKSKLHDLLEQGVYDVDTFLDRSNAIAEKIQNSKLALAQHEKKLNSIQSVPTVQEVLPTLRYLIDEYDNLSAGEKNVIFKKLIKRMVYNRTKDHRGNDFDLDIEWRFTM

SEQ ID NO: 5270 - protein, 509 aa, Unknown
  Description of Unknown: Integrase B5271 sequence
  PTHR30461:SF3,cd00338,SM00857,G3DSA:1.10.10.2600,IPR036162, PS51737,G3DSA:3.40.50.1390,IPR006119,IPR038109,PF07508, IPR011109,SSF53041,PTHR30461,PS51736,Coil, PF00239
MGGRAAIYARFSSHNQRGESIEIQVEKSRAYCAENDLRVVATYCDFAQTGTNTDRAEFQRMMADAKRGLFDFVVIYKVTRIMRNRDEMAMARIMLRRCRVEILYAGEDISDGSAGVLQLGMLEVLAEYESALDGERIRDGIQKNAERCMANGCVRYGWDIVDGRYVVNEEEAAAIRLGVRMVLSGKSVADVVRAWEPYRTKRGGKWRFQTVRRILMRRENGGEYRYAGVVVPGGMPAIVPMDDEERVIRMLEDSHRPRAKTEAWDFPLTGKLYDGRDGGLMTGTSGTGKSGRPYHYYRCRSCGRTVRRDVVEKRVADAVREALGSADSRERIARMLADAEEERADEKPLSETIKGELAKIETAFSNIWAAIESGIAPPGGKERIDALKQRQALLKDELRTAEALEAARLDYDRALFWLEGMAAAEVDDAQLLRTFVARVVLGGPDDDDGLRVAFTFDDSAGLGDNPSLPGAIGPGGEVFDRMNASSTNCSVGEHIRVFVVRRAFVLLVR

SEQ ID NO: 5271 - protein, 509 aa, Unknown
  Description of Unknown: Integrase B5272 sequence
  PTHR30461:SF3,SM00857,G3DSA:1.10.10.2600,IPR036162,PF13408, IPR025827,G3DSA:3.40.50.1390,PS51737,IPR006119,IPR038109, PF07508,IPR011109,SSF53041,PF00239,PTHR30461, PS51736,Coil,cd00338
MNAVLYLRYSSDKQNEQSIEGQKRVCEAFCEKNGYSILSIYIDRAKSASKDTEKRIQFQQMIKDSAKKRFEAVVVYKLDRFARDRYDSAIYKSRLKKNGVRVVSATENISTEPEGIILESVLEGMAEFYSRELSQKVTRGMHETALKANYTGGGVPLGYKVEDKKLIIDERTADIVREAFSLYAAGATISDICSIFKEKGYKSTRGTAFTSHSFTRMLRNEKYIGTYFYKEVKIESAIPAIVDKGIFEMVQKRLKKNASAPARGKASTDFLLSQKLFCGHCGAKMVGESGRGHNGHIYYYYKCATQKKSGDCDKKPVPKDEIERLVVLDTIAMLTPENIEKIADIASSKSVERLRSESIIPALNIELVGVKKAISNLVDAVEQGRASDALFNRLDKLEIKKKDLELEIDKQMNEFPIVDADQVIYWLSKFKDGDINDPIFCKRLIDMLVNSVTLWDGPDGGKKITILYNLSPHEMHTFTISDSGDGGAPPRNNPKLFIYKNVFGQTKAH

SEQ ID NO: 5272 - protein, 509 aa, Unknown
  Description of Unknown: Integrase B5273 sequence
  PTHR30461:SF3,SM00857,G3DSA:1.10.10.2600,IPR036162,PF13408, PS51737,G3DSA:3.40.50.1390,IPR025827,IPR006119,IPR038109, PF07508,SSF53041,IPR011109,PTHR30461,Coil, PS51736,cd00338,PF00239
MPEALNAVIYARYSSDRQTEQSIEGQLRECYAFAKANGIAVIDTYIDRAISGKTDNRPAFQKMIEDSAKRQFQAVIVYRLDRFTRNRYDSAIYKARLKKNGVKVLSAMENLNGSPESIIMESLLEGMAEYYSVELSQKITRGMRENALKGKALGGQRILGYKVNSDCYFEIDETTAPVVVDIFKLYSSGKTVKEICDILNARGVKTARGGAFNKNSLHTILTNKKYIGIYKTKYGEIVGGIPAIIDKELFEMVALRMEQNKKAPARAKAEINYLLSTKLFCGKCRSAMVGESGTSKTGKKYYYYACVKKKREKACDKSNVKKDWIEDLVIQRTVTDILKDDVIEKIADRLVELQKAEAAQSGTMLYLENSLAEIQVSIKNIMTAIEKGIITESTKTRLTELEDEKRNVEIEIAKESIARRIISREQIIYWISSFKDGDITSEKYRQQLIDTFVHAVFVYDDKIVITYNYSGENNTATISDLDLSSPPLQSNPNIFVTLDVFGLVVQIER

SEQ ID NO: 5273 - protein, 509 aa, Unknown
  Description of Unknown: Integrase B5274 sequence
  PTHR30461:SF3,SM00857,G3DSA:1.10.10.2600,IPR036162,PF13408, PS51737,G3DSA:3.40.50.1390,IPR025827,IPR006119,IPR038109, PF07508,SSF53041,IPR011109,PTHR30461,Coil, PS51736,cd00338,PF00239
MPEALNAVIYARYSSDRQTEQSIEGQLRECYAFAKANDIAVIDTYIDRAISGKTDNRPAFQKMIEDSAKRQFQAVIVYRLDRFTRNRYDSAIYKARLKKNGVKVLSAMENLNGSPESIIMESLLEGMAEYYSVELSQKITRGMRENALKGKALGGQRVLGYKVNSDCYFEIDETTAPVVVDIFKLYSSGKTVKEICDILNARGVKTARGGAFNKNSLHTILTNKKYIGIYKTKYGEIVGGIPAIIDKELFEMVALRMEQNKKAPARAKAEINYLLSTKLFCGKCRSAMVGESGTSKTGKKYYYYACVKKKREKACDKSNVKKDWIEDLVIQRTVTDILKDDVIDKIADRLVELQKAEAAESGTMLYLENSLAEIQVSIKNIMTAIEKGIITESTKTRLTELEDEKRNVEIEIAKESIARRIISREQIIYWISSFKDGNITSEKYRQQLIDTFVHAVFVYDDKIVITYNYSGENNTATISDLDLSSPPLQSNPNIFVTLDVFGLVVQIER

SEQ ID NO: 5274 - protein, 509 aa, Unknown
  Description of Unknown: Integrase B5275 sequence
  PTHR30461:SF3,cd00338,SM00857,G3DSA:1.10.10.2600,IPR036162, PF13408,IPR025827,PS51737,G3DSA:3.40.50.1390,IPR006119, IPR038109,PF07508,SSF53041,IPR011109,PTHR30461, PS51736,Coil,PF00239
MRAFIYGRFSSHKQQELSIEAQIDICREYAEKHNITVVGEYVDRARSARTENRADFRRLIRDACTGVVDCVLVWRYDRFFRDRAESALYRKQLEAAGVHLISVTEFIPDGSAGVITQGMIETVAEYFSAKLSEDVTRGMNKAAQHCQITGGAPLGYRPGPNKRWQIDPVGAELVKRCFEWYDSGKSMGELADHFNKEGHKTAKGNSFNKSSFTTILRNKKYIGIYEYDGTVSIAGGVPRIIEDDLFFRVQRKLDANRHRPGAYKAEVPYLLSGKLFCGKCGSPMTGTAGTGKSGARHYYYICNNRRAKKCDKKNVRLDLIEEAVLQSALDVLTDDNISYISAEVERRCSENSGNKALVASLRVQLTEVEKQLKNIGNAIAQGIITETTKQMLMDAEADRAALRQQIDRATVQASLEVKAEAVACWLDGFRHGDRKSPEFRKDVFGALVHSVFVYDDYMKIIFNVDSAGAALVPFSAVQNAATSDFVGALPGSYLGGSGVPKGSSYRTPL

SEQ ID NO: 5275 - protein, 509 aa, Unknown
  Description of Unknown: Integrase B5276 sequence
  PTHR30461:SF3,SM00857,G3DSA:1.10.10.2600,IPR036162,PF13408, PS51737,G3DSA:3.40.50.1390,IPR025827,IPR006119,IPR038109, PF07508,SSF53041,IPR011109,PTHR30461,Coil, PS51736,cd00338,PF00239
MPEALNAVIYARYSSDRQTEQSIEGQLRECYAFAKANDIAVIDTYIDRAISGKTDNRPAFQKMIEDSAKRQFQAVIVYRLDRFTRNRYDSAIYKARLKKNGVKVLSAMENLNGSPESIIMESLLEGMAEYYSVELSQKITRGMRENALKGKALGGQRVLGYKVNSDCYFEIDETTAPVVVDIFKLYSSGKTVKEICDILNARGVKTARGGAFNKNSLHTILTNKKYIGIYKTKYGEIVGGIPAIIDKELFEMVALRMEQNKKAPARAKAEINYLLSTKLFCGKCRSAMVGESGTSKTGKKYYYYACVKKKREKACDKSNVKKDWIEDLVIQRTVTDILKDDVIEKIADRLVELQKAEAAESGTMLYLENSLAEIQVSIKNIMTAIEKGIITESTKTRLTELEDEKRNVEIEIAKESIARRIISREQIIYWISSFKDGDITSEKYRQQLIDTFVHAVFVYDDKIVITYNYSGENNTATISDLDLSSPPLQSNPNIFVTLDVFGLVVQIER

SEQ ID NO: 5276 - protein, 509 aa, Unknown
  Description of Unknown: Integrase B5277 sequence
  PTHR30461:SF3,IPR036162,PS51737,IPR011109,PTHR30461, PF00239,G3DSA:1.10.10.2600,IPR006119,SSF53041,cd00338, SM00857,IPR025827,IPR038109,mobidb-lite,PS51736, PF13408,G3DSA:3.40.50.1390,PF07508,Coil
MYEDIKTACLYVRFSSHNQTEQSIEGQTRVCRDFCKRHNIRIVEIYADRATSASKDIEKRVQFLKMIKDSEKGLFDAVIVYKLDRFARSRYDSATYKYRLKRNGVQLISATENISNDPEGIILESVLEGMAEFYSAELSQKINRGMRESAYKHNSIGGAIPLGYKIEDKKLVIDPKTAPIVKEAFEKYADGETVAEICRQFNARGYKTSKGTAFGKSSFTKIFRNERYIGVYSFHDYRAEDAIPAIIDKDLWDRVQLRVGKIKNAPARNKAKVVYLLSGKIFCGHCGSKMNGNCNAGNYYYYQCYGKKNGNVDCKKKNIRKEFIERLVAHDALSLLTDEYIEQIATIACEKNQHEIELDSALPTIRDRIHQVDLSLNNLLKAIESGSAPDMLVKRMGELEKEKKDLQVQAKKESEDIVELDKAQVIYWLEQFRGGSIEDEEFCRMLIDLFVNSVTVWDEDDGSYKVTVAYNLTSLPTKTYRLNKGGTLSDFTSNAPASQNPRLTSHRLV

SEQ ID NO: 5277 - protein, 509 aa, Unknown
  Description of Unknown: Integrase B5278 sequence
  PTHR30461:SF3,SM00857,G3DSA:1.10.10.2600,IPR036162,PF13408, PS51737,G3DSA:3.40.50.1390,IPR025827,IPR006119,IPR038109, PF07508,IPR011109,SSF53041,PF00239,PTHR30461, PS51736,Coil,cd00338
MPEALNAVIYARYSSDRQTEQSIEGQLRECYAFAKANDIAVIDTYIDRAISGKTDNRPAFQKMIEDSAKRQFQAVIVYRLDRFTRNRYDSAIYKARLKKNGVKVLSAMENLNGSPESIIMESLLEGMAEYYSVELSQKITRGMRENALKCKALGGQRVLGYKVNSDCYFEIDETTAPVVVDIFKLYSSGKTVKEICDILNARGVKTARGGAFNKNSLHTILTNKKYIGIYKTKYGEIVGGIPAIIDKELFEMVALRMEQNKKAPARAKAEINYLLSTKLFCGKCRSAMVGESGTSKTGKKYYYYACVKKKREKACDKSNVKKDWIEDLVIQRTVTDILKDDVIDKIADRLVELQKAEAAESGTMLYLENSLAEIQVSIKNIMTAIEKGIITESTKTRLTELEDEKRNVEIEIAKESIARRIISREQIIYWISSFKDGDITSEKYRQQLIDTFVHAVFVYDDKIVITYNYSGENNTATISDLDLSSPPLQSNPNIFVTLDVFGLVVQIER

SEQ ID NO: 5278 - protein, 509 aa, Unknown
  Description of Unknown: Integrase B5279 sequence
  cd00338,SM00857,G3DSA:1.10.10.2600,IPR036162,PF13408, IPR025827,PS51737,G3DSA:3.40.50.1390,IPR006119,IPR038109, PF07508,SSF53041,IPR011109,PTHR30461,Coil, PF00239
MYVIYLRKSRKDSDLEALGIDVLKRHEETLLELARARNLPIGAIYREVVSGDSIDARPEMVRLLSEVESGIWEGVLVMEVERLARGDTIDQGRVQRAFFYSNTLIVTPGKTYNPAIENDNEYFEFSLFMSRREYATIKRRMQAGRIRSVKDGYYVGNIAPYGWRRVKADDCKHFTLVPDEKENPVLKLMYDFMGNKKYGFQKTCSALTGMGIVSRSGKPFNPATVKTIISNPVNIGMLRWNYRKSQKAIVNGKIATSRPKADDYILVKGKHPGCISEDLYYRANSVNSSMTAPVKRSCRIQNPFAGIVRCSCCGRVMVRKKMSAKQPRDYLICQYAGCATVAIELDELENAVLEWIRNYIADYKVNNFESTDDSEQESLRSILVNLEKEKETTLKQRGSLFDLLEQGIYTKEIFFERSTALEDKIKDFDKKIESVNADIVRLDLSKKNRSTFVPKCQELLNAWDTFDAADKNTALKNVIERIDFTKTEKNARGQRHSSFFIDVFPRISR

SEQ ID NO: 5279 - protein, 509 aa, Unknown
  Description of Unknown: Integrase B5280 sequence
  cd00338,SM00857,G3DSA:1.10.10.2600,IPR036162,PF13408, IPR025827,PS51737,G3DSA:3.40.50.1390,IPR006119,IPR038109, PF07508,IPR011109,SSF53041,PTHR30461,Coil, PF00239
MYVIYLRKSRKDSDLEALGIDVLKRHEETLLELARARSLPIGAIYREVVSGDSIDARPEMVRLLSEVESGIWEGVLVMEVERLARGDTIDQGRVQRAFFYSNTLIVTPGKTYNPAIENDNEYFEFSLFMSRREYATIKRRMQAGRIRSVKDGYYVGNIAPYGWRRVKADDCKHFTLVPDEKENPVLKLMYDFMGNKKYGFQKTCSALTGMGIVSRSGKPFNPATVKTIISNPVNIGMLRWNYRKSQKAIVNGKIATSRPKADDYILVKGKHPGCISEDLYYRANSVNSSMTAPVKRSCRIQNPFAGIVRCSCCGRVMVRKKMSTKQPRDYLICQYAGCATVAIELEELENAVLEWIRNYIADYKVNNFESADDSEQESLRSILVNLEKEKETTLKQRGSLFDLLEQGIYTKEIFFERSTALEDKIKDFNKKIESVNADIVRLDLSKKNRSTFVPKCQELLNAWDTFDAADKNTALKNVIERIDFTKTEKNARGQRHSSFSIDVFPRISR

SEQ ID NO: 5280 - protein, 509 aa, Unknown
  Description of Unknown: Integrase B5281 sequence
  PTHR30461:SF3,cd00338,SM00857,G3DSA:1.10.10.2600,IPR036162, PF13408,IPR025827,PS51737,G3DSA:3.40.50.1390,IPR006119, IPR038109,PF07508,IPR011109,SSF53041,PTHR30461, PS51736,Coil,PF00239
MKRAVFYGRYSSDRQTEQSIEGQRRVCEEFAAGENIQIVREYIDRATSGTSTQHREQFQQMISDSKTGGWDYVLVYKLDRFARNRYDSAVYKRELKRNGVTVLSATERITDSPEGVLIEGLLESMDEYFSRELSRKAKRGMRESILKGHCITRLPYGYKRTGKTCAIDEDAADVIRWIFREYSSGKTIQEIVDTLNVRGFRTMTGKRFKRPTVSVILRNDKYTGTHYVSDFEEPERYPQIISQTMWDSVQSRLRESANRYRKHNDGFVYALTGKINCGYCGYAVNGITSNHKYHYYRCVSGKYNKHICDGCSVRADVVETAVVDALQEYFTAERVEEMGTHLYDLYRKSAPTERDDKRRLTEVDMQITGAVNALIACPESEALQNRLRDLEEQKREIEQSHVKHQYLEKSHFVEFFRNIVSALEHIDVRTRLFSTLIESVSLYRDHVVIIINLMDDSTDPPTPISLEKYFSSSVANGRALHTLDKIQLAFPFLLLYVSLPERRNQRERP

SEQ ID NO: 5281 - protein, 509 aa, Unknown
  Description of Unknown: Integrase B5282 sequence
  cd00338,SM00857,G3DSA:1.10.10.2600,IPR036162,PS51737, G3DSA:3.40.50.1390,IPR006119,IPR038109,PF07508,IPR011109, SSF53041,PTHR30461,PS51736,Coil,PF00239
MDKYAIYLRKSRADLEAEKLGEGETLARHKKILTELAARRGLYVEKIYQEIISGAETIKDRPEIQKLINDAYKGKYRGVIIVEVTRLSRGSQGDAQIIMDCLKYANRNKGLLVVTPTKVYDVAHNSDDEEYMEFELFMSRREYKMIQKRMDRGKKQCVVEGNYMASYRPYGYDILKTKTSRTLIPNGEEAPIVKKIFSWTVEQNMTPGEIARKLTSMGTPTYTGDPEWSAATIKTILTNPTYIGKVRWNDRMQVKTMVNGELVTSRPRSNHTEHFMLYDGKHKEHALIDEDTFNKVSERFTSDKTKHNLKLYNPLAGIFSCKNCGKMMHYQRYTTKQNVQPRFTHKQSQICKVKSVLATDVMNAVVHALKLYIEDFNVKINNLPQTDENEIAKEIESLTTELMKIEKKLSKLFDAWEDEQISDNEFVKRKAVNNQRIENIKAEIEKLENSIPEKEEYEEKIMALSDALDSLLDENIDADIQNEYLKQIIDKIEFSRENNKEFILDVFLK

SEQ ID NO: 5282 - protein, 509 aa, Unknown
  Description of Unknown: Integrase B5283 sequence
  PTHR30461:SF3,cd00338,SM00857,G3DSA:1.10.10.2600,IPR036162, PS51737,G3DSA:3.40.50.1390,IPR006119,IPR038109,PF07508, IPR011109,SSF53041,PTHR30461,PS51736, Coil,PF00239
MGGRAAIYARFSSHNQRGESIEIQVEKSRAYCAENDLRVVATYCDFAQTGTNTDRAEFQRMMADAKRGLFDFVVIYKVTRIMRNRDEMAMARIMLRRCRVEILYAGEDISDGSAGVLQLGMLEVLAEYESALDGERIRDGIQKNAERCMANGCVRYGWDIVDGRYVVNEEEAAAIRLGVRMVLSGKSVADVVRAWEPYRTKRGGKWRFQTVRRILMRRENGGEYRYAGVVVPGGMPAIVPMDDEERVIRMLEDSHRPRAKTEAWDFPLTGKLYDGRDGGLMTGTSGTGKSGRPYHYYRCRSCGRTVRRDVVEKRVADAVREALGSADSRERIARMLADAEEERADEKPLSETIKGELAKIETAFSNIWAAIESGIAPPGGKERIDALKQRQALLKDELRTAEALEAARLDYDRALFWLEGMAAAEVDDAQLLRTFVARVVLGSPDDDDGLRVAFTFDDSAGLGDNPSLPGAIGPGGEVFDRMNASCTNCSVGEHIRVFVVRRAFVLLVR

SEQ ID NO: 5283 - protein, 509 aa, Unknown
  Description of Unknown: Integrase B5284 sequence
  cd00338,SM00857,G3DSA:1.10.10.2600,IPR036162,PF13408, IPR025827,PS51737,G3DSA:3.40.50.1390,IPR006119,IPR038109, PF07508,IPR011109,SSF53041,PTHR30461,PS51736, Coil,PF00239
MAYCIYLRKSRADMEAEARGEGETLARHKRTLTDLAAQRHLPVAEIYAEIVSGETIAERPEMRRMLSAIESGAYEGVICMDVDRLGRGDGSDQARILKTLKYTHTLVITPYKVYDPAGSEIDEEFLEYSQQFARMEYRHIKRRMWAGRVASARAGKWQSPRAPYGYTRVKTADGAWTLAPVPIEADAVRMIYDWYGTGKMGKNNIANALNDMGLRTHLGARFVPSAIRTILNNPVYLGKVRWCLRRTKTVIEDGREYLTRPLSDECMIYDGLHPAIITQAQWDAVQSRLADNPPPPCKAYARLSNPLAGLMYCSECGHAMSYTPMSNRNQAYAYKCITPGCPTSGIYANYVFGQLDEVLRTWQAMGDPQVDAARPAESAPDPRALRIAAAQSSLDTLLAQRTKLQELVEAGAYTIPVYIERNALNEDRIKAATAELAEAQRAVAPEQAIIAHYEQITHILDVAGKVPAEELNALLKQIIAKIVYHKSKRCNRSSNPAEHLTLDIYPKVD

SEQ ID NO: 5284 - protein, 509 aa, Unknown
  Description of Unknown: Integrase B5285 sequence
  PTHR30461:SF3,SM00857,G3DSA:1.10.10.2600,IPR036162,PF13408, IPR025827,PS51737,G3DSA:3.40.50.1390,IPR006119,IPR038109, PF07508,IPR011109,SSF53041,PTHR30461,PS51736, cd00338,PF00239
MPQVQVIQPIQQQPKRLRVAAYARVSSDSEDQLNSLAVQVDYYTHLIQENPNWEFAGIYTDEGITGTSTKRREQFNRLMDDCRAGLIDRVLVKSASRFARNTADALSSVRELKSLGVTVAFEKEGFDTETSNGEMLLSIICAVAQEESLSISQNMKWGIHKRMRTGNYITNATPFGYTQINHQLVPEKNNAMIVNDIFKSYLSGMSINEIAEHLNTIYPKENSKWNPRTIHAILRNEKYIGDSLYQKTYTTDSLPLKRYLNTGQRSKYYAMETHEGIISKTDYEKVQNLLAKKSITGEIDRTCVFSKKIYCSICGAICSRKGPPTQGFVWCCRTHLQSKALCLLKSIREDELQQAFLSIYNRLQCNQKTILEPLVDDLLGLRHLQEQKYKKRLALGEDIQHLAKQKHNLTRIHTLGYIEEPQFIERSAAIEQQIRERKQQLSRNDMSNTSEKILQKTRLIQKKLSSAPPLELFDESVFKELVKKVLISNTAIQFELINGMKLSESRAAT

SEQ ID NO: 5285 - protein, 509 aa, Unknown
  Description of Unknown: Integrase B5286 sequence
  cd00338,SM00857,G3DSA:1.10.10.2600,IPR036162,PS51737, G3DSA:3.40.50.1390,IPR006119,IPR038109,PF07508,IPR011109, SSF53041,PTHR30461,PS51736,Coil,PF00239
MDKYAIYLRKSRADLEAEKLGEGETLARHKKILTELAARRGLYVEKIYQEIISGAETIKDRPEIQKLINDAYKGKYRGVIIVEVTRLSRGSQGDAQIIMDCLKYANRNKGLLVVTPTKVYDVAHNSDDEEYMEFELFMSRREYKMIQKRMDRGKKQCVVEGNYMASYRPYGYDILKTKTSRTLIPNEEEAPIVKKIFRWTVEQNMTPGEIARKLTSMGTPTYTGDLEWSVATIKTILTNPTYIGKVRWNDRMQVKTMVNGELVTSRPRSNHTEHFMLYDGKHKEYALIDEETFNKVSERFTSDKTKHNLKLYNPLAGIFSCKNCGKMMHYQRYTTKQNVQPRFTHKQSQICKVKSVLATDVMNAVVHALKLYIEDFNVKINNLPQTDENEIAKEIESLTTELMKIEKKLSKLFDAWEDEQISDNEFVKRKAVNNQRIENIKAEIEKLENSIPEKEEYEEKIMALSDALDSLLDENIDADIQNEYLKQIIDKIEFSRENNKEFILDVFLK

SEQ ID NO: 5286 - protein, 509 aa, Unknown
  Description of Unknown: Integrase B5287 sequence
  PTHR30461:SF3,SM00857,G3DSA:1.10.10.2600,IPR036162,PF13408, PS51737,IPR025827,G3DSA:3.40.50.1390,IPR006119,IPR038109, PF07508,IPR011109,SSF53041,PTHR30461, Coil,cd00338,PF00239
MKAVIYARYSPGPNQKDKSVEEQIADCRQFARENDIMIVGDYADRKKTGRNDNRAEFQKMLKDSAKGLFDAVIVWKIDRFGRNREEIAINKVKLRRNGVRVMYAKEHIPDGPEGIILESTLEGLAEYYSANLSQNIMRGMRGVAMKGQSTGGGGHSLGYYVDQDKYFQIDEHGAQIVRQIFEMYSSGKQASEIIKELNGRGLKTANGKPFNHNSIARILSNRRYIGEYRWHDILIPDGMPRIIDDETFERVQKRLEKNKKAPARKIQAGSEEEFLLTTKLFCGHCGATMIGDSGTGKSGKKYSYYTCSTRKRRKDGRKCDKKSVRKDELERYIVEQTVAHVLVDDVIEYIADKVVELQRKELQDTSMLDYYKSSLRDTEKSLKNIVTAIEQGIFTPTTKDRLLELEAEKADLEECIQKEEIARPTFSKEQIIFFLERFKGGDVNDQSYQRQIIDTFVSRIWIYDDKTVITYNYSGEGNTITLEAAEKAADEAVGGCSAQLPPSPPRKSG

SEQ ID NO: 5287 - protein, 509 aa, Unknown
  Description of Unknown: Integrase B5288 sequence
  cd00338,SM00857,G3DSA:1.10.10.2600,IPR036162,PF13408, IPR025827,G3DSA:3.40.50.1390,PS51737,IPR006119,IPR038109, PF07508,SSF53041,IPR011109,PTHR30461,Coil, PF00239
MYVIYLRKSRKDSDLEALGIDVLKRHEETLLELARSRSLPIGAIYREVVSGDSIDARPEMVRLLSEVESGIWEGVLVMEVERLARGDTIDQGRVQRAFFYSNTLIVTPGKTYNPAIENDNEYFEFSLFMSRREYATIKRRMQAGRIRSVKDGYYVGNIAPYGWRRVKADDCKHFTLVPDEKENPVLKLMYDFMGNKKYGFQKTCSALTGMGIVSRSGKPFNPATVKTIISNPVNIGMLRWNYRKSQKAIVNGKIATSRPKADDYILVKGKHPGCISEDLYYRANSVNSSMTAPVKRSCRIQNPFAGIVRCSCCGRVMVRKKMSAKQPRDYLICQYAGCATVAIELEELENAVLEWIRNYIADYKVNNFESTDDSEQESLRSILVNLEKEKETTLKQRGSLFDLLEQGIYTKEIFFERSTALEDKIKDFDKKIESVNADIVRLDLSKKNRSTFVPKCQELLNAWDTFDAADKNTALKNVIERIDFTKTEKNARGQRHSSFSIDVFPRISR

SEQ ID NO: 5288 - protein, 509 aa, Unknown
  Description of Unknown: Integrase B5289 sequence
  PTHR30461:SF3,SM00857,G3DSA:1.10.10.2600,IPR036162,PF13408, PS51737,IPR025827,G3DSA:3.40.50.1390,IPR006119,IPR038109, PF07508,SSF53041,IPR011109,PTHR30461,Coil, PS51736,cd00338,PF00239
MPEALNAVIYARYSSDRQTEQSIEGQLRECYAFAKANDIAVIDTYIDRAISGKTDNRPAFQKMIEDSAKRQFQAVIVYRLDRFTRNRYDSAIYKARLKKNGVKVLSAMENLNGSPESIIMESLLEGMAEYYSVELSQKITRGMRENALKGKALGGQRVLGYKVNSDCYFEIDETTAPVVGDIFKLYSSGKTVKEICDILNARGVKTARGGAFNKNSLHTILTNKKYIGIYKTKYGEIVGGIPAIIDKELFEMVALRMEQNKKAPARAKAEINYLLSTKLFCGKCRSAMVGESGTSKTGKKYYYYACVKKKREKACDKSNVKKDWIEDLVIQRTVTDILKDDVIEKIADRLVELQKAEAAESGTMLYLENSLAEIQVSIKNIMTAIEKGIITESTKTRLTELEDEKRNVEIEIAKESIARRIISREQIIYWISSFKDGDITSEKYCQQLIDTFVHAVFVYDDKIVITYNYSGENNTATISDLDLSSPPLQSNPNIFATLDVFGLVVQIER

SEQ ID NO: 5289 - protein, 509 aa, Unknown
  Description of Unknown: Integrase B5290 sequence
  PTHR30461:SF3,SM00857,G3DSA:1.10.10.2600,IPR036162,PF13408, PS51737,G3DSA:3.40.50.1390,IPR025827,IPR006119,IPR038109, PF07508,SSF53041,IPR011109,PTHR30461,Coil, PS51736,cd00338,PF00239
MPEALNAVIYARYSSDRQTEQSIEGQLRECYAFAKANDIAVIDTYIDRAISGKTDNRPAFQKMIEDSAKRQFQAVIVYRLDRFTRNRYDSAIYKARLKKNGVKVLSAMENLNGSPESIIMESLLEGMAEYYSVELSQKITRGMRENALKGKALGGQRVLGYKVNSDCYFEIDETTAPVVVDIFKLYSSGKTVKEICDILNARGVKTARGGAFNKNSLHTILTNKKYIGIYKTKYGEIVGGIPAIIDKELFEMVALRMEQNKKAPARAKAEINYLLSTKLFCGKCRSAMVGESGTSKTGKKYYYYACVKKKREKACDKSNVKKDWIEDLVIQRTVTDILKDDVIEKIADRLVELQKAEAAESGTMLYLENSLAEIQVSIKNIMTAIEKGIITESTKTRLTELEDEKRNVEIEIAKESIARRIISREQIIYWISSFKDGDITSEKYRQQLIDTFVHAVFVYDDKIVITYNYSGENNTATISDLDLSSPPLQSNSNIFVTLDVFGLVVQIER

SEQ ID NO: 5290 - protein, 509 aa, Unknown
  Description of Unknown: Integrase B5291 sequence
  cd00338,SM00857,G3DSA:1.10.10.2600,IPR036162,PS51737, G3DSA:3.40.50.1390,IPR006119,IPR038109,PF07508,IPR011109, SSF53041,PTHR30461,PS51736,Coil,PF00239
MDKYAIYLRKSRADLEAEKLGEGETLARHKKILTELAARRGLYVEKIYQEIISGAETIKDRPEIQKLINDAYKGKYRGVIIVEVTRLSRGSQGDAQIIMDCLKYANRNKGLLVVTPTKVYDVAHNSDDEEYMEFELFMSRREYKMIQKRMDRGKKQCVVEGNYMASYRPYGYDILKTKTSRTLIPNEEEAPIVKKIFRWTVEQNMTPGEIARKLTSMGTPTYTGDPEWSAATIKTILTNPTYIGKVRWNDRMQVKTMVNGELVTSRPRSNHTEHFMLYDGKHKEHALIDEETFNKVSERFTSDKTKHNLKLYNPLAGIFSCKNCGKMMHYQRYTTKQNVQPRFTHKQSQICKVKSVLATDVMNAVVHALKLYIEDFDVKINNLPQTDENKIAKEIESLTTELMKIEKKLSKLFDAWEDEQISDNEFVKRKAVNNQRIENIKAEIEKLENSIPEKEEYEEKIMALSDALDSLLDENIDADIQNEYLKQIIDKIEFSRENNKEFILDVFLK

SEQ ID NO: 5291 - protein, 509 aa, Unknown
  Description of Unknown: Integrase B5292 sequence
  PTHR30461:SF3,SM00857,G3DSA:1.10.10.2600,IPR036162,PF13408, IPR025827,PS51737,G3DSA:3.40.50.1390,IPR006119,IPR038109, PF07508,SSF53041,IPR011109,PTHR30461, PS51736,cd00338,PF00239
MPQVQVIQPIQQQPKRLRVAAYARVSSDSTDQLNSLSVQVDYYTHLIQENPNWDFAGIYADEGITGTSTKHREQFNRLMEDCRAGLVDRVLVKSASRFARNTADALASVREMKSLGVTVVFEKEGFDTETSNGEMILSMICAVAQEESLSISKDLKWGIRKRMQNGTYTNSSVPFGYSLENHLLVINNQQAMIVADIFKRYLAGESISKIAQYLNNTYPKETGVWQYSSVQLILQNETYKGDTRYQKHYTANLFPTKVSHNRGQVSQYYIAKGHEAIISDEDFDKVQSLLKMKAPHKPKVAEKLFDQKLYCATCGTLFARKTRTSGAVVWGCRRHLNKSGLCPVKSVYETELCRAFLCMHNKLLINQEKIFEPLLNSLSHLKSCQEKLDTMRMGIQVEIQRLAKQRHNLERIYAQGLIEDSQYLERKALIEKQFYEKKEFLTRKPLDGNIDRLLKNTRQIKRLLGTCQPLMYFDKQVFTSLVSKVTISDTSFEFELINGMRVSERRTSK

SEQ ID NO: 5292 - protein, 509 aa, Unknown
  Description of Unknown: Integrase B5293 sequence
  PTHR30461:SF3,SM00857,G3DSA:1.10.10.2600,IPR036162,PF13408, PS51737,G3DSA:3.40.50.1390,IPR025827,IPR006119,IPR038109, PF07508,SSF53041,IPR011109,PTHR30461,Coil, PS51736,cd00338,PF00239
MPEALNAVIYARYSSDRQTEQSIEGQLRECYAFAKANDIAVIDTYIDRAISGKTDNRPAFQKMIEDSAKRQFQAVIVYRLDRFTRNRYDSAIYKARLKKNGVKVLSAMENLNGSPESIIMESLLEGMAEYYSVELSQKITRGMRENALKGKALGGQRVLGYKVNSDCYFEIDETTAPVVVDIFKLYSSGKTVKEICDILNARGVKTARGGAFNKNSLHTILTNKKYIGIYKTKYGEIVGGIPAIIDKELFEMVALRMEQNKKAPARAKAEINYLLSTKLFCGKCRSAMVGESGTSKTGKKYYYYACVKKKREKACDKSNVKKDWIEDLVIQRTVTDILKDDVIEKIADRLVELQKAEAAESGTMLYLENSLAEIQVSIKNIMTAIEKGIITESTKTRLTELEDEKRNVEIEIAKESIARRIISREQIIYWISSFKDGDITSEKYRQQLIDTFVHAVFVYDDKIVITYNYSGENNTATISDLDLSSPPLQSNPNIFVSLDVFGLVVQIER

SEQ ID NO: 5293 - protein, 509 aa, Unknown
  Description of Unknown: Integrase B5294 sequence
  cd00338,SM00857,G3DSA:1.10.10.2600,IPR036162,PF13408, PS51737,IPR025827,G3DSA:3.40.50.1390,IPR006119,IPR038109, PF07508,IPR011109,SSF53041,PTHR30461,Coil, PF00239
MYVIYLRKSRKDSDLEALGIDVLKRHEETLLELARARSLPIGAIYREVVSGDSIDARPEMVRLLSEVESGIWEGVLVMEVERLARGDTIDQGRVQRAFFYSNTLIVTPGKTYNPAIENDNEYFEFSLFMSRREYATIKRRMQAGRIRSVKDGYYVGNIAPYGWRRVKADDCKHFTLVPDEKENPVLKLMYDFMGNKKYGFQKTCSALTGMGIVSRSGKPFNPATVKTIISNPVNIGMLRWNYRKSQKAIVNGKIATSRPKADDYILVKGKHPGCISEDLYNRANSVNSSMTAPVKRSCRIQNPFAGIVRCSCCGRVMVRKKMSAKQPRDYLICQYAGCATVAIELEELENAVLEWIRNYIADYKVNNFESADDSEQESLRSILVNLEKEKETTLKQRGSLFDLLEQGIYTKEIFFERSTALEDKIKDFDEKIESVNADIVRLDLSKKNRSTFVPKCQELLNAWDTFDAADKNTALKNVIERIDFTKTEKNARGQRHSSFSIDVFPRISR

SEQ ID NO: 5294 - protein, 509 aa, Unknown
  Description of Unknown: Integrase B5295 sequence
  PTHR30461:SF3,IPR036162,PS51737,IPR011109,PTHR30461, PS00397,PF00239,G3DSA:1.10.10.2600,IPR006119,SSF53041, cd00338,SM00857,IPR025827,IPR038109,PS51736, IPR006118,PF13408,G3DSA:3.40.50.1390,PF07508,Coil
MIRLSKQSNAVLYGRGATKEQISESPKFRFAAAYIRVSTDDQDELSPESQLDEIRKYAKREGIILLEDCIYIEEPISGRKAKNRPKFQEMIARAKESDCPFSVILLWKFARFARNQEESIFYKSILRSKCKVDVVSITEPLIAGPFGKLIERIIEWMDEFYSIRLSQEVKRSMRVNAERGKRQCTASFGYRLDESDKMVPDPAEADYVRRIFDEFIAGKGLFPIAKEMNALGVKTHRGNPFENRTVEYIIRNPVYIGKLRWNPEGRTRRDFFNENIIIADGDHEPIIDLDTWEAAQRRMDEVKSQWGYKARPSTELKHWMSGIVRCSACGATLVFAKPHYFKCGNYTKGRCTHTQHIRVDLLEDAIISRLGQDATSSTGIIYDITYTNASEGRDLVHLEAALRILESKKERLQEAYLAGVIELDDFSKAKKALEENMAQTAKELEERKSNSDEEITRAAIKGAISTALETLRSSTATTVEKNNAARSVIENCVFDKDSYTLAITYRIIL

SEQ ID NO: 5295 - protein, 509 aa, Unknown
  Description of Unknown: Integrase B5296 sequence
  cd00338,SM00857,G3DSA:1.10.10.2600,IPR036162,PF13408, IPR025827,G3DSA:3.40.50.1390,PS51737,IPR006119,IPR038109, PF07508,IPR011109,SSF53041,PTHR30461,Coil, PF00239
MYVIYLRKSRKDSDLEALGIDVLKRHEETLLELARARSLPIGAIYREVVSGDSIDARPEMVRLLSEVESGIWEGVLVMEVERLARGDTIDQGRVQRAFFYSNTLIVTPGKTYNPAIENDNEYFEFSLFMSRREYATIKRRMQAGRIRSVKDGYYVGNIAPYGWRRVKADDRKHFTLVPDEKENPVLKLMYDFMGNKKYGFQKTCSALTGMGIVSRSGKPFNPATVKTIISNPVNIGMLRWNYRKSQKAIVNGKIATSRPKADDYILVKGKHPGCISEDLYYRANSVNSSMTAPVKRSCRIQNPFAGIVRCSCCGRVMVRKKMSAKQPRDYLICQYAGCATVAIELDELENAVLEWIRNYIADYKVNNFESTDDSEQESLRSILVNLEKEKETTLKQRGSLFDLLEQGIYTKEIFFERSTALEDKIKDFDKKIESVNADIVRLDLSKKNRSTFVPKCQELLNAWDTFDAADKNTALKNVIERIDFTKTEKNARGQRHSSFSIDVFPRISR

SEQ ID NO: 5296 - protein, 509 aa, Unknown
  Description of Unknown: Integrase B5297 sequence
  SM00857,G3DSA:1.10.10.2600,IPR036162,PS51737,G3DSA:3.40.50.1390, IPR006119,IPR038109,PF07508,SSF53041,IPR011109, PTHR30461,Coil,PS51736,cd00338,PF00239
MSYAIHLRKSRADLEAEARGEGESLARHRARLLAFAERAGLPIVAEYSEIISGDRLSDRPEMQRLLSDVAGGKYDGVLTVEVSRLTRGDLMDQARIMQTFKYSGTKIITPEHTYDLSEDWDEDVLQSDLMMARREYKYIKRRMQRGRQASASEGLWQGRVPYGYQQVKVRPGKGFTLQPDPDQAPIVRMIFDMYAKDRVGCSTIAKHLNDLGLRTNLGKPWTDSSVLCISKNPVYAGYVTWGKRTSVTRLSPDGSLSTSRVANSAPILALGKHPPLIDQSTFDAAQAIRASHDLTRCHVNTPVRNPLAGLVYCSICGKSMVRKDNGYARGSRYDMLKCKTPGCPTTATALSLVEESILSTLSDWALIGSGSPSSPSQNPHAEQIAAIQSNLDRLRQQRTRIFSAYEEGVYDSTVFVSRRAEKDREIADAESALHALQTSSEPTDDEIIRANYPRIQNVLESYHTTSDPQQRNLLLKSVFTRIEYIKTRRCFRNENPAVALSIHCYPRRY

SEQ ID NO: 5297 - protein, 509 aa, Unknown
  Description of Unknown: Integrase B5298 sequence
  PTHR30461:SF3,IPR036162,PS51737,IPR011109,PTHR30461, PF00239,G3DSA:1.10.10.2600,IPR006119,SSF53041,cd00338, SM00857,IPR025827,IPR038109,G3DSA:2.20.28.10, PS51736,PF13408,G3DSA:3.40.50.1390,PF07508,Coil
MKTCIYLRKSRSDEEAEKQGEFETLSRHRSTLLKVAKEQNLNIVEIKEELVSGESIAYRPKMLELLEEVKNGLYDSVLVMDIDRLGRGNMQDQGLILETFKKSNTKIITPRKTYDLNNEWDEEYSEFEAFMARKELKLITRRMQRGRVKSVEEGKFIASKPPYGYKFVFDESGSKSMVIDEDKAEVVRMIFDLYVNKHYGGVKIATHLNSLGLKTTTGRTWYDKGVRDILKNKTYAGYVVWNKVERGKNSSKTRPIDERIEAKGIHEPIIDESIFLEAQSLFKSNFIPSTKQHSTITNPLAGLIVCSECGHRMIAQQSTYKNKEIVKFVKCLNCGKNRGVRLDILEKDIINELADWVDAYNVSIKDLDSNENKNPNLEPYYSIIKSLESEYQTLMKQKENLHNLLEQGIYDVDTYLDRSKILTDKIDLNRSNLSQAKKDLENEKESVFSIADIIPQIKKVLELYYQSNDMQERNELLKEVIDYIDYSREPKKRTSRFNIKIYPRLIKNK

SEQ ID NO: 5298 - protein, 509 aa, Unknown
  Description of Unknown: Integrase B5299 sequence
  PTHR30461:SF3,IPR036162,PS51737,IPR011109,PTHR30461, PS00397,PF00239,G3DSA:1.10.10.2600,IPR006119,SSF53041, SM00857,IPR025827,IPR038109,PS51736,cd03768, IPR006118,PF13408,G3DSA:3.40.50.1390,PF07508
MRRAALYIRVSTLEQAQEGYSVGEQRERLIAYCKAQDWLIADIYVDGGYTGSNLNRPGIQKLMSETEKFDVVLVYKLDRLSRSQRDTLYLIEEIFRPNKVDFVSMQESFDTSSPFGKAMIGLLAVFAQLEREQIKERTWMGRVARAKTGLHHGGGNIPIGYDYEDGKLIVNPYEAEQVRKIYEWYLSGASLKAITDKLQDAGYTNKYSSYNSWSSVRNILENETYIGRLHFGGVVVDHAHEAIITEEQFNAAQILRGKRREQFGSHAFQSKHVLTGLLFCGHCGGRYYLRNTGKYSYYACYSRTKQMKNMIKDPNCQNKIWRAQDLEPIIEEKILALLRNPQIAEELAAGKPKTAAPVSKNTDIERRIREIDRQIGKLMELYQQDDIPPELLGEKINRLYGEKTALENSITPSRVFIAAAATPPLNRQSTISFMSIPPLRLQPVNYLDGVVQTAFRCLVFLPPVFCRPSRKAVGHGLDNEARDPISVAGEQNGCGFHVADVGSELIVQP

SEQ ID NO: 5299 - protein, 509 aa, Unknown
  Description of Unknown: Integrase B5300 sequence
  PTHR30461:SF3,cd00338,SM00857,G3DSA:1.10.10.2600,IPR036162, PF13408,IPR025827,G3DSA:3.40.50.1390,PS51737,IPR006119, IPR038109,PF07508,SSF53041,IPR011109,PTHR30461, PS51736,Coil,PF00239
MYEDIKTACLYVRFSSHNQTEQSIEGQTRVCRDFCKRHNIRIVEIYADRATSASKDIEKRVQFLKMIKDSEKGLFDAVIVYKLDRFARSRYDSATYKYRLKRNGVQLISATENISNDPEGIILESVLEGMAEFYSAELSQKINRGMRESAYKHNSIGGAIPLGYKIEDKKLVIDPKTAPIVKEAFEKYADGETVAEICRQFNARGYKTSKGTAFGKSSFTKIFRNERYIGVYTFHDYRAEDAIPAIIDKDLWDRVQLRVGKIKNAPARNKAKVVYLLSGKIFCGHCGSKMNGNCNAGNYYYYQCYGKKNGNVDCKKKNIRKEFIERLVAQDALSLLTDEYIEQIATIACEKNQHEIELDSALPTIRDRIHQVDLSLNNLLKAIESGSAPDMLVKRMGELEKEKKDLQAQVKKESEDIVELDKAQVIYWLEQFRGGSIEDEEFCRMLIDLFVNSVTVWDEDDNTYKVTVAYNLTSLPTKTYRLNKGGTLSDFTSNAPVLPDLYFLFYHNP

SEQ ID NO: 5300 - protein, 509 aa, Unknown
  Description of Unknown: Integrase B5301 sequence
  PTHR30461:SF3,SM00857,G3DSA:1.10.10.2600,IPR036162,PF13408, PS51737,G3DSA:3.40.50.1390,IPR025827,IPR006119,IPR038109, PF07508,IPR011109,SSF53041,PF00239,PTHR30461, PS51736,Coil,cd00338
MYEDIKTACLYVRFSSHNQTEQSIEGQTRVCRDFCKRHNIKIVEIYADRATSASKDIEKRVQFLKMIKDSEKGLFDAVIVYKLDRFARSRYDSATYKYRLKRNGVQLISATENISNDPEGIILESVLEGMAEFYSAELSQKINRGMRESAYKHNSIGGAIPLGYKIEDKKLVIDPKTAPIVKEAFEKYADGETVAEICRQFNARGYKTSKGTAFGKSSFTKIFRNERYIGVYSFHDYRAEDAIPAIIDKDLWDRVQLRVGKIKNAPARNKAKVVYLLSGKIFCGHCGSKMNGNCNAGNYYYYQCYGKKNGNVDCKKKNIRKEFIERLVAQDALSLLTDEYIEQIATIACEKNQHEIELDSALPTIRDRIHQVDLSLNNLLKAIESGSAPDMLVKRMGELEKEKKDLQVQAKKESEDIVELDKAQVIYWLEQFRGGSIEDEEFCRMLIDLFVNSVTVWDEDDNTYKVTVAYNLTSLPTKTYRLNKGGTLSDFASNAPPCQTSPKTARISP

SEQ ID NO: 5301 - protein, 509 aa, Unknown
  Description of Unknown: Integrase B5302 sequence
  PTHR30461:SF3,SM00857,G3DSA:1.10.10.2600,IPR036162,PF13408, IPR025827,G3DSA:3.40.50.1390,PS51737,IPR006119,IPR038109, PF07508,SSF53041,IPR011109,PTHR30461,Coil, PS51736,cd00338,PF00239
MPEALNAVIYARYSSDRQTEQSIEGQLRECYAFAKANDIAVIDTYIDRAISGKTDNRPAFQKMIEDSAKRQFQAVIVYRLDRFTRNRYDSAIYKARLKKNGVKVLSAMENLNGSPESIIMESLLEGMAEYYSVELSQKITRGMRENALKGKALGGQRVLGYKVNSDCYFEIDETTAPVVVDIFKLYNSGKTVKEICDILNARGVKTARGGAFNKNSLHTILTNKKYIGIYKTKYGEIVGGIPAIIDKELFEMVALRMEQNKKAPARAKAEINYLLSTKLFCGKCRSAMVGESGTSKTGKKYYYYACVKKKREKTCDKSNVKKDWIEDLVIQRTVTDILKDDVIEKIADRLVELQKAEAAESGTMLYLENSLAEIQVSIKNIMTAIEKGIITESTKTRLTELEDEKRNVEIEIAKESIARRIISREQIIYWISSFKDGDITSEKYRQQLIDTFVHAVFVYDDKIVITYNYSGENNTATISDLDLSSPPLQSNPNIFVTLDVFGLVVQIER

SEQ ID NO: 5302 - protein, 509 aa, Unknown
  Description of Unknown: Integrase B5303 sequence
  PTHR30461:SF3,SM00857,G3DSA:1.10.10.2600,IPR036162,PF13408, PS51737,G3DSA:3.40.50.1390,IPR025827,IPR006119,IPR038109, PF07508,SSF53041,IPR011109,PTHR30461,Coil, PS51736,cd00338,PF00239
MPEALNAVIYARYSSDRQTEQSIEGQLRECYAFAKANDIAVIDTYIDRAISGKTDNRPAFQKMIEDSAKRQFQAVIVYRLDRFTRNRYDSAIYKARLKKNGVKVLSAMENLNGSPESIIMESLLEGMAEYYSVELSQKITRGMRENALKGKALGGQRVLGYKVNSDCYFEIDETTAPVVVDIFKLYSSGKTVKEICDILNARGVKTARGGAFNKNSLHTILTNKKYIGIYKTKYGEIVGGIPAIIDKELFEMVALRMEQNKKAPARAKAEINYLLSTKLFCGKCRSAMVGESGTSKTGKKYYYYACVKKKREKACDKSNVKKDWIEDLVIQRTVTDILKDDVIEKIADRLVELQKAEAAESGTMLYLQNSLAEIQVSIKNIMTAIEKGIITESTKTRLTELEDEKRNVEIEIAKESIARRIISREQIIYWISSFKDGDITSEKYRQQLIDTFVHAVFVYDDKIVITYNYSGENNTATISDLDLSSPPEQDCYFNKIAILLFYPKVSRTP

SEQ ID NO: 5303 - protein, 509 aa, Unknown
  Description of Unknown: Integrase B5304 sequence
  PTHR30461:SF3,IPR036162,PS51737,IPR011109,PTHR30461, PF00239,G3DSA:1.10.10.2600,IPR006119,SSF53041,cd00338, SM00857,IPR025827,IPR038109,mobidb-lite,PS51736, PF13408,G3DSA:3.40.50.1390,PF07508,Coil
MRAFIYCRFSSYKQQELSIEGQRDVCQEYADKHNITVVGLYADRARSGKTDNRVDFRRLMRDAVKGEVDCVLVWRYDRFFRNRAESALYRKQLEAAGVHLISVTEYIPEGSAGIITQGMIETVAEYFSAKLSEDVSRGMTKAAEHCQVVGCAPLGYRPGPDKRWKIDPVGAELVRRIFEWYASGKPMRELAAQLNEEGYRTKRGTPYNRNSFNSILRNEKYIGVYSYGGTVRIEGGCPRIIEDDLFFTVQRRLSVNKHRPGAYKAEVPYLLSGKLFCGLCGAPMTGTAGTSHTGARHHYYICNNRRAKTCKKKNVRLDLIENAVLQSAVGLLTDENIAYISVEVERRCAEDNESAALLASLNEQLADVQRRLKNIGNAIAQGMITETTKELLEEAEADRAALRKQIDRAKVQAALVVKAEAVACWLDGFRRGDRKDPDFRRQVFGALVHSVFVYDDYLKIIFNIDSAGAAVVPFEAVQAATPSEAPPGSSLDIKGAPKKNRLGKPFMAA

SEQ ID NO: 5304 - protein, 509 aa, Unknown
  Description of Unknown: Integrase B5305 sequence
  PTHR30461:SF3,SM00857,G3DSA:1.10.10.2600,IPR036162,PF13408, IPR025827,G3DSA:3.40.50.1390,PS51737,IPR006119,IPR038109, PF07508,SSF53041,IPR011109,PF00239,PTHR30461, PS51736,Coil,cd00338
MSSVDKIAVVYARYSSHGQTEQSIEGQIAAAQKYAEQHGYTIIHIYADRAMTGRNDDREEFQRMLSDTATHQFGVILLWKIDRFGRNREEIAFNRYRCKKNGVRVERVAEDVPDGPEGVILDSVLEGMAEYYSLQLAQNVRRGQRESAKKSQTVGGCKIIGYNVNPDTKRYEVDPKTAPFVTEVFKRYANGETISEIVAWLNAQGVRTTRGGEFTVNSLHRLLKNEKYTGVYIFHDIRNEGGMPALIDHATFDKVQEMLKVNRRAPARVWSKTEYLLTDKLFCGHCGAMMVGESGHGRNGTKHNYYTCWNRKKKKSCDKKPVRQDVIESLVLRSIGKLLENPATLENIADQVWAAYERSDTSGDTIKALDKQIADVDRALSNVMKAIEMGIINEMTKARMDELTDQKQALSAARAEAGLAGGFKLTRDMILFFLQEIAALDMADRDSQKRLIKTFVNAIYLYDDHFDIAFNYTDNGKVVVRMQEINDAACGEVFGRCAQSPAKRPSVKS

SEQ ID NO: 5305 - protein, 509 aa, Unknown
  Description of Unknown: Integrase B5306 sequence
  cd00338,SM00857,G3DSA:1.10.10.2600,IPR036162,PF13408, IPR025827,G3DSA:3.40.50.1390,PS51737,IPR006119,IPR038109, PF07508,SSF53041,IPR011109,PTHR30461,Coil, PF00239
MYVIYLRKSRKDSDLEALGIDVLKRHEETLLELARARSLPIGAIYREVVSGDSIDARPEMVRLLSEVESGIWEGVLVMEVERLARGDTIDQGRVQRAFFYSNTLIVTPGKTYNPAIENDNEYFEFSLFMSRREYATIKRRMQAGRIRSVKDGYYVGNIAPYGWRRVKADDCKHFTLVPDEKENPVLKLMYDFMGNKKYGFQKTCSALTGMGIVSRSGKPFNPATVKTIISNPVNIGMLRWNYRKSQKAIVNGKIATSRPKADDYILVKGKHPGCISEDLYYRANSVNSSMTAPVKRSCRIQNPFAGIVRCSCCGRVMVRKKMSAKQPRDYLICQYAGCATVAIELDELENAVLEWIRNYIADYKVNNFESTDDSEQESLRSILVNLEKEKETTLKQRGSLFDLLEQGIYTKEIFFERSTALEDKIKDFDKKIESVNADIVRLDLSKKNRSTFVPKCQELLNAWDTFDAADKNTALKNVIERIDFTKTEKNARGQRHSSFSIDVFPRISR

SEQ ID NO: 5306 - protein, 509 aa, Unknown
  Description of Unknown: Integrase B5307 sequence
  PTHR30461:SF3,SM00857,IPR036162,PF13408,IPR025827, G3DSA:3.40.50.1390,IPR006119,PF07508,SSF53041,IPR011109, PTHR30461,Coil,PS51736,cd00338,PF00239
MKIAIYSRKSKETDTGESIKNQIRMCKEYFTRQYDDCTFEIFEDEGFSGGNTNRPAFKRMMQLAKHKQFDIIAAYRIDRIGRNTLDFLMMFEELKQYDIKLISVTEGFDPDTPAGKMMMSMLSSMAEMERMNIAQRIKDNMTELAKMGRWSGGTPPTGYKSITNVNSYGKKETYLDLIPEMEEKIKYIFKRAAEGYTTFQIGKETNLSSKTVYNIITNPVYVKSTEESAKYLESLGYLVYGELNGLGFMPYNRRPKKSGKKLFNATGMFVSVSKHNAIIDAPTWIKANSNISNRGQESRPRISPNSFLSHLIKCSCGNNMFVHQGRANSSGEKVYYFRCSAQKNKQNDCTAKWLKVSSVEESVLKILEGFALDKKTLEKFITSKKDIDYDSLIKDVKKDIGRKNKDIENLTEKLILIEGPAVKIVTSKINELSKEIDNLNSELLSLERKKIFQEQDKININTLHSSIIKLVNHFPTLPIEDKQTSIRGIIKEIRFNGNDEIEVVLVGGI

SEQ ID NO: 5307 - protein, 509 aa, Unknown
  Description of Unknown: Integrase B5308 sequence
  PTHR30461:SF3,SM00857,G3DSA:1.10.10.2600,IPR036162,PF13408, PS51737,G3DSA:3.40.50.1390,IPR025827,IPR006119,IPR038109, PF07508,IPR011109,SSF53041,PTHR30461, Coil,PS51736,cd00338,PF00239
MPEALNAVIYARYSSDRQTEQSIEGQLRECYTFAKANDIAVIDTYIDRAISGKTDNRPAFQKMIEDSAKRQFQAVIVYRLDRFTRNRYDSAIYKARLKKNGVKVLSAMENLNGSPESIIMESLLEGMAEYYSVELSQKITRGMRENALKGKALGGQRVLGYKVNSDCYFEIDETTAPVVFDIFKLYSSGKTVKEICDILNARGVKTARGGAFNKNSLHTILTNKKYIGIYKTKYGEIVGGIPAIIDKELFEMVALRMEQNKKAPARAKAEINYLLSTKLFCGKCRSAMVGESGTSKTGKKYYYYACVKKKREKACDKSNVKKDWIEDLVIQRTVTDILKDDVIEKIADRLVELQKAEAAQSGTMLYLENSLAEIQVSIKNIMTAIEKGIITESTKTRLTELEDEKRNVEIEIAKESIARRIISREQIIYWISSFKDGDITSEKYRQQLIDTFVHAVFVYDDKIVITYNYSGENNTATISDLDLSSPPLQSNPNIFVTLDVFGLVVQIER

SEQ ID NO: 5308 - protein, 509 aa, Unknown
  Description of Unknown: Integrase B5309 sequence
  PTHR30461:SF3,cd00338,SM00857,G3DSA:1.10.10.2600,IPR036162, PF13408,PS51737,G3DSA:3.40.50.1390,IPR025827,IPR006119, IPR038109,PF07508,IPR011109,SSF53041,PTHR30461, PS51736,Coil,PF00239
MNVVIYARFSSHSQTEQSIEGQLKVCYEYAESNHYTVVGEYIDRAISGTTDNRAEFQRMISDSDKHTFEGVLVYQLDSFARNRYDSAINKAKLKKNGVRVLSAKENIADDASGILVEGVLESMAEYYSVELSQKIHRGMAINAEKCLSNGSNPGMGFKVDAERRFHVDEEEAAIVREIYERYASGETKAEIIRDLKRRRVKTSLGKEFSPNSLSHLLSNKRYIGVYLYKGKETPGGMPRILDDDLFYRVQSMMNKNKNAPARTHGEGEYLLTTKLFCGHCKEMMVGYGGTSKTGRQYHYYMCKNARRKKCGKKIVSKSYIEDRVVNECLKMLTEEKIRFIAKKVAEECAKSPDNLTAKALKKAIREADTAIENLWKAIEQGQAVEMLTERLNKRMAEKAELEAQLAIEENKKITLTEAQILAFLDYVCEMPADDVNKCRAIINIFVHSIYLYDDHFTLIINASKKPLSIDNIPLDDIETAFEGETGALEGCSSLSTPAPPTRSRLHMQS

SEQ ID NO: 5309 - protein, 509 aa, Unknown
  Description of Unknown: Integrase B5310 sequence
  SM00857,IPR006118,G3DSA:1.10.10.2600,IPR036162,PS51737, G3DSA:3.40.50.1390,PS00398,IPR006119,IPR038109,PF07508, IPR011109,SSF53041,PTHR30461,Coil,PS51736, cd00338,PF00239
MRRAISYIRFSSERQLKGDSVRRQSKLVTDWLDKNPEFYLDSSLSFKDLGKSAFSGKHLKGGLGDFLTAIEKGLVKAGDTLLIESLDRLSRQDIDIASELLRRILRAGVDVVTLSDGEHYTKESLKDPLSLIKSILIMQRAHEESLRKSERVQAAWNRKKELISEGIKISRRCPAWLKLNDDRRTFTIIPDKVEVVKRAFDLRLQGLSFWAITRTLNDEGHLSLNQYTPKQKGWSDTAVKKLLRNRAVIGCFTPAGREEVQGYYPAIISESLFYRVQQLNTGQYGRASVSSNPLSVNLFRGIIKCSECGATIVLGGYALKRFGMYRCPNRSANRCSAKAISRKQTDATILYMLALCDRFETENTDIIDSLKLQREDLQRKISKMAELAIELDDMTIITEKLRDMKNALSKLNHDIEEETKRIKAITTGSLKDIDRTTKEGMIETQLLIKGVLKEIVIDAAKRRCKVTFHNGRIIDLPITENPSEDVTEAIQSLSEVTERGLIDVDEVII

SEQ ID NO: 5310 - protein, 509 aa, Unknown
  Description of Unknown: Integrase B5311 sequence
  PTHR30461:SF3,SM00857,G3DSA:1.10.10.2600,IPR036162,PS51737, G3DSA:3.40.50.1390,IPR006119,IPR038109,PF07508,IPR011109, SSF53041,PTHR30461,Coil,G3DSA:2.20.28.10,PS51736, cd00338,PF00239
MKTCIYLRKSRSDEEAEKQGEFETLSRHRSTLLKVAKEQNLNIVEIKEELVSGESIAYRPKMLELLDEVKNGFYDSVLVMDIDRLGRGNMQDQGLILETFKKSNTKIITPRKTYDLNNEWDEEYSEFEAFIARKELKLITRRMQRGRVKSVEEGKFIASKPPYGYKFVFDESGNKSMVIDEDKADVVRMIFDLYVNKHYGGVKIATHLNSLGLKTTTGRTWYDKGVRDILKNKTYAGYVVWNKVERGKNSSKTRPIDERIEAKGVHEPIIDESIFLEAQSLFKSNFIPSTKQNSTITNPLAGLVVCSECGHKMIAQQSTYKNKEIVKFVKCLNCGKNRGIRLDILEKDIINELADWVDAYNLSIKDLDSNETKNPNLESYYSIIKSLESEYQTLMKQKENLHNLLEQGIYDVDTYLDRSKILTDKIDLNRSNLSQAKKDLENEKESVFSIADIIPQIKKVLELYYQSNDMQERNELLKEVIDYIDYSREPKKRTSRFNIKIYPRLIKNK

SEQ ID NO: 5311 - protein, 509 aa, Unknown
  Description of Unknown: Integrase B5312 sequence
  PTHR30461:SF3,cd00338,SM00857,G3DSA:1.10.10.2600,IPR036162, PF13408,IPR025827,G3DSA:3.40.50.1390,PS51737,IPR006119, IPR038109,PF07508,IPR011109,SSF53041,PTHR30461, PS51736,Coil,PF00239
MPQVQVIQPIQQQPKRLRVAAYARVSTKSNEQLHSMSVQTEYYEDLIQKNPNWEFVGVYADEGISGTSIKHRAELNRLMEDCRAGMIDRILVKSASRMARNTVDLLTLVRELKSIGVTVQFEKEQFDTDSATGEMMLSMMCAIAQEESLSISKNMKWGIRKKMQAGTYVNCATPFGYRQQDHQLVLEKNEAAVVRLIFEKYLSGVGIAEIARYLNKNHPKEDGRWYTSAVQFMLHNEAYKGDTLHQKHYTTDTLPFRVYHNEGQFPKYCAYKSHEAIVSDEEFEKVQNLLKTKQMSVPNAAPRVFTKKIYCTECGTVFAQASRANGMVAWGCRKHLNKSSLCPVKSVYETELCRAFLYMYNKLQANRARIFRPMVDSLLQLKSQQEHQNTERESIYAEIQRLAKQNHNLERIHAQGYIEDTQYIERKTLIEQQLGEKRVQLSRTSISRNVELTLKSTRQIEKILASDPPLTYFDEHTFTEMVKKVSVSNTAIEFELINGMKLSEERTEK

SEQ ID NO: 5312 - protein, 508 aa, Unknown
  Description of Unknown: Integrase B5313 sequence
  SM00857,G3DSA:1.10.10.2600,IPR036162,PS51737,G3DSA:3.40.50.1390, IPR006119,IPR038109,PF07508,IPR011109,SSF53041, PF00239,PTHR30461,Coil,cd00338
MYAMYLRKSRADDKDIPLEKVLKNHYNMLTELADKLKIQIEEENIFREIETGDSISIRPKMQDLLEKVSEGLYEGVFCTELSRLCRGSKIDQEIVSSTFTAAECKIITPSKTYDLANNEFDEEMVDFGLFMSRREYKTITKRMQRGREQSVKQGKYIGSILPYGYNKEKLEGENGFKLTINEEEAHIVKLIFKWFLEDNIGASIIAKRLNQGGYPTRSGRVWSYNSVKNILTSNVVAGYLKHGERKYKKYIDAKGNVKKSRPVNKDVEYYKGLHEAIIPLHKFEKVQDILNSRKQHKSNFDLPLSNPLAGLIRCSECNRIMVKRRCSQGDFLYCSTTGCKNIGSYLNRVEEHILQALSNMLSDYEYYVDNYEQETIKEKRNVDNDLKRIEKEIEKLNKQFEKCCTFLEQDVYTIEVYKDRTSKIKDKIKILEENKKVLEKEFGSDKVIKIKKLIPKLENVLKNYNILSIEGKNELLKSIIKEITYAKKKKSKKGSNEDYFELEITLNI

SEQ ID NO: 5313 - protein, 508 aa, Unknown
  Description of Unknown: Integrase B5314 sequence
  PTHR30461:SF3,SM00857,G3DSA:1.10.10.2600,IPR036162,PS51737,G3DSA: 3.40.50.1390,IPR006119,IPR038109,PF07508,SSF53041,IPR011109, PTHR30461,Coil,PS51736,cd00338,PF00239
MICAMYLRKSRADLTAEARGEGETLARHRETLMRVAVQQNLIVTDVYAEVVSGDTIAERPEMQRLLRAIERGDYDAVLCMDIDRLGRGDGGDQSIILKALKYSGTIVITPYKNYDTRREMDEEFFEYSQFLARGEYKRIKRRMWAGRVAAAKEGKWLSPKAPFGYRRVRLEHTKGWTLVPDPAEADAVRSMFEWYGSGEVGKNIIANRINAMGFRTLSGVSFTSSTIANILNNPVYLGKIRWCNRRKRVDMVNGVEVVTRPRSDECMIIDGLHPALIDNVAWDAVQARLATHQDSHVKKSANIVNPLASIMVCGICGKSMLFTPEYTRNDIVATYRCRTAGCPTSGINVQCVYDALLYTLKCWSAYTKEDEPSASKPPKNQSAIVAATTQLAQLNKQLTRLQDLLETGVYSAETYLARSKVLNDRINDTISEIDRLKQLQATDERAAIIRLKPKIDHVLDVWDISTAEDRNTLLRQVLRKVVYHKTHRCFRNDNPADFLSLDFYPMLE

SEQ ID NO: 5314 - protein, 508 aa, Unknown
  Description of Unknown: Integrase B5315 sequence
  PTHR30461:SF3,SM00857,G3DSA:1.10.10.2600,IPR036162,PF13408, PS51737,G3DSA:3.40.50.1390,IPR025827,IPR006119,IPR038109, PF07508,SSF53041,IPR011109,PF00239,PTHR30461, PS51736,Coil,cd00338
MKKAIAYMRFSSPGQMSGDSLNRQRRLITEWLKVNSDYYLDTVTYEDLGLSAFNGKHAQSGAFSEFLDAIEHGYILPGTTLLVESLDRLSREKVGEAIERLKLILNHGIDVITLCDNTVYNIDSLNEPYSLIKAILIAQRANEESEIKSSRVKLSWKKKRQDALESGTIMTASCPRWLSLDDKRTAFIPDPDRVKTIELIFKLRMERRSLNAIAKYLNDHAVKNFSGKESAWGPSVIEKLLANKALIGICVPSYRARGKGISEIAGYYPRVISDDLFYAVQEIRLAPFGISNSSKNPMLINLLRTVMKCEACGNTMIVHAVSGRLHGYYVCPMRRLHRCDRPSIKRDLVDYNIINELLFNCSKIQPVENKKDANETLELKIIELQMKINNLIVALSVAPEVTAIAEKIRLLDKELRRASVSLKTLKSKGVSSLGDFHAIDLTSKNGRELCRTLAYKIFEKIIINTDNKTCDIYFMNGIVFKHYPLMKVISAQQAISTLKYMVDGEIYF

SEQ ID NO: 5315 - protein, 508 aa, Unknown
  Description of Unknown: Integrase B5316 sequence
  PTHR30461:SF3,SM00857,G3DSA:1.10.10.2600,IPR036162,PF13408, PS51737,G3DSA:3.40.50.1390,IPR025827,IPR006119,IPR038109, PF07508,IPR011109,SSF53041,PF00239,PTHR30461, PS51736,Coil,cd00338
MKKAIAYMRFSSPGQMSGDSLNRQRRLIAEWLKVNSDYYLDTITYEDLGLSAFKGKHAQSGAFSEFLDAIEHGYILPGTTLLVESLDRLSREKVGEAIERLKLILNHGIDVITLCDNTVYNIDSLNEPYSLIKAILIAQRANEESEIKSSRVKLSWKKKRQDALESGTIMTASCPRWLSLDDKRTAFVPDPDRVKTIELIFKLRMERRSLNAIAKYLNDHAVKNFSGKESAWGPSVIEKLLANKALIGICVPSYRARGKGISEIAGYYPRVISDDLFYAVQEIRLAPFGISNSSKNPMLINLLRTVMKCEACGNTMIVHAVSGSLHGYYVCPMRRLHRCDRPSIKRDLVDYNIINELLFNCSKIQPVENKKDANETLELKIIELQMKINNLIAALSVAPEVTAIAEKIRVLDKELRRASVSLKTLKSKAVSSLGDFHAIDLTSKNGRELCRTLAYKTFEKIIINTDNKTCDIYFMNGIVFKHYPLMKTISAQQAISTLKYMVDGEVYF

SEQ ID NO: 5316 - protein, 508 aa, Unknown
  Description of Unknown: Integrase B5317 sequence
  PTHR30461:SF3,SM00857,G3DSA:1.10.10.2600,IPR036162,PF13408, IPR025827,PS51737,G3DSA:3.40.50.1390,IPR006119,IPR038109, PF07508,IPR011109,SSF53041,PF00239,PTHR30461, PS51736,Coil,cd00338
MKKAIAYMRFSSPGQMSGDSLNRQRRLIAEWLKVNSDYYLDTITYEDLGLSAFKGKHAQSGAFSEFLDAIEHGYILPGTTLLVESLDRLSREKVGEAIERLKLILNHGIDVITLCDNTVYNIDSLNEPYSLIKAILIAQRANEESEIKSSRVKLSWKKKRQDALESGTIMTASCPRWLSLDDKRTAFVPDPDRVKTIELIFKLRMERRSLNAIAKYLNDHAVKNFSGKESAWGPSVIEKLLANKALIGICVPSYRARGKGISEIAGYYPRVISDDLFYAVQEIRLAPFGISNSSKNPMLINLLRTVMKCEACGNTMIVHAVSRSLHGYYVCPMRRLHRCDRPSIKRDLVDYNIINELLFNCSKIQPVENKKDANETLELKIIELQMKINNLIAALSVAPEVTAIAEKIRVLDKELRRASVSLKTLKSKAVSSLGDFHAIDLTSKNGRELCRTLAYKTFEKIIINTDNKTCDIYFMNGIVFKHYPLMKTISAQQAISTLKYMVDGEVYF

SEQ ID NO: 5317 - protein, 508 aa, Unknown
  Description of Unknown: Integrase B5318 sequence
  PTHR30461:SF3,cd00338,SM00857,G3DSA:1.10.10.2600,IPR036162, PF13408,PS51737,G3DSA:3.40.50.1390,IPR025827,IPR006119, IPR038109,PF07508,IPR011109,SSF53041,PTHR30461, PS51736,Coil,PF00239
MKKAIAYMRFSSPGQMSGDSLNRQRRLIAEWLKVNSDYYLDTITYEDLGLSAFKGKHAQSGAFSEFLDAIEHGYILPGTTLLVESLDRLSREKVGEAIERLKLILNHGIDVITLCDNTVYNIDSLNEPYSLIKAILIAQRANEESEIKSSRVKLSWKKKRQDAMESGTIMTASCPRWLSLDDKRTAFVPDPDRVKTIELIFKLRMERRSLNAIAKYLNDHAVKNFSGKESAWGPSVIEKLLANKALIGICVPSYRARGKGISEIAGYYPRVISDDLFYAVQEIRLAPFGISNSSKNPMLINLLRTVMKCEACGNTMIVHAVSGSLHGYYVCPMRRLHRCDRPSIKRDLVDYNIINELLFNCSKIQPVENKKDANETLELKIIELQMKINNLIVALSVAPEVTAIAEKIRLLDKELRRASVSLKTLKSKGVNSFSDFYAIDLTSKNGRELCRTLAYKTFEKIIINTDNKTCDIYFMNGIVFKHYPLMKVISAQQAISALKYMVDGEIYF

SEQ ID NO: 5318 - protein, 508 aa, Unknown
  Description of Unknown: Integrase B5319 sequence
  PTHR30461:SF3,cd00338,SM00857,G3DSA:1.10.10.2600,IPR036162, PF13408,PS51737,G3DSA:3.40.50.1390,IPR025827,IPR006119, IPR038109,PF07508,IPR011109,SSF53041,PTHR30461, PS51736,Coil,PF00239
MKKAIAYMRFSSPGQMSGDSLNRQRRLIAEWLKVNSDYYLDTITYEDLGLSAFKGKHAQSGAFSEFLDAIEHGYILPGTTLLVESLDRLSREKVGEAIERLKLILNHGIDVITLCDNTVYNIDSLNEPYSLIKAILIAQRANEESEIKSSRVKLSWKKKRQDALESGTIMTASCPRWLSLDDKRTAFVPDPDRVKTIELIFKLRMERRSLNAIAKYLNDHAVKNFSGKESAWGPSVIEKLLANKALIGICVPSYRARGKGISEIAGYYPRVISDDLFYAVQEIRLAPFGISNSSKNPMLINLLRTVMKCEACGNTMIVHAVSGSLHGYYVCPMRRLHRCDRPSIKRDLVDYNIINELLFNCSKIQPVENKKDANETLELKIIELQMKINNLIVALSVAPEVTAIAEKIRLLDKELRRASVSLKTLKSKGVNSFSDFYAIDLTSKNGRELCRTLAYKTFEKIIINTDNKTCDIYFMNGIVFKHYPLMKVISAQQAISALKYMVDGEIYF

SEQ ID NO: 5319 - protein, 508 aa, Unknown
  Description of Unknown: Integrase B5320 sequence
  PTHR30461:SF3,cd00338,SM00857,G3DSA:1.10.10.2600,IPR036162, PF13408,PS51737,G3DSA:3.40.50.1390,IPR025827,IPR006119, IPR038109,PF07508,IPR011109,SSF53041,PTHR30461, PS51736,Coil,PF00239
MKKAIAYMRFSSPGQMSGDSLNRQRRLIAEWLKVNSDYYLDTITYEDLGLSAFKGKHAQSGAFSEFLDAIEHGYILPGTTLLVESLDRLSREKVGEAIERLKLILNHGIDVITLCDNTVYNIDSLNEPYSLIKAILIAQRANEESEIKSSRVKLSWKKKRQDALESGTIMTASCPRWLSLDDKRTAFVPDPDRVKTIELIFKLRMERRSLNAIAKYLNDHAVKNFSGKESAWGPSVIEKLLANKALIGICVPSYRARGKGISEIAGYYPRVISDDLFYAVQEIRLAPFGISNSSKNPMLINLLRTVMKCEACGNTMIVHAVSGSLHGYYVCPMRRLHRCDRPSIKRDLVDYNIINELLFNCSKIQPVENKKDANETLELKIIELQMKINNLIVALSVAPEVTAIAEKIRLLDKELRRASVSLKTLKSKGVNSFSDFYAIDLTSKNGRELCRTLAYKTFEKIIINTDNKTCDIYFMNGIVFKHYPLMKVISAQQAISALKYMVDGEVYF

SEQ ID NO: 5320 - protein, 508 aa, Unknown
  Description of Unknown: Integrase B5321 sequence
  PTHR30461:SF3,SM00857,G3DSA:1.10.10.2600,IPR036162,PF13408, IPR025827,G3DSA:3.40.50.1390,PS51737,IPR006119,IPR038109, PF07508,IPR011109,SSF53041,PTHR30461,PS51736, cd00338,PF00239
MSVQVIKSKNTRKGRIRVAAYCRVSTETEIQEGSIENQIEHYEELIKSNPDYEFVNVYYDFGISGYKEKRPGFQEMMKDARSGKIDLIITKSITRFARNTNTLLKATRELKSLGIGVFFELQNMNTLNEGGELLLTVYAAFAQGESETYRELAQMTFKRKFSEGRPEYQLRKTLGFDMTENNEIQIVPKEAEGVKQIFQWVKENYSTQTIVKMAAAKGITLKSGKPFTAQWVYKTVRNVAYKGDYIMQRTYTDSERKVHVNQTLVPSFYIENDHDAIVSKRLWNAANKVIDDRAKERTTHLEMKPLTEENYPYIHKLHCAKCGGVLHGQKTKSGAQYSFSCGRRNRQGKGFCSGVSVPQKVIESWGEIDGNIYISFDPDKPLHKQHSYVKESTWKKNHTKKKLPPLPAYNVENYPYYRRVYCAECGHLLTRSRRYDGLVEFICNGMASRGKSYCKGVRVPVEVLNRLPEWDGFYWIKEDKENGEKHYSYTCKEEKPQRKEYSAGGRED

SEQ ID NO: 5321 - protein, 508 aa, Unknown
  Description of Unknown: Integrase B5322 sequence
  PTHR30461:SF3,cd00338,SM00857,G3DSA:1.10.10.2600,IPR036162, PF13408,PS51737,G3DSA:3.40.50.1390,IPR025827,IPR006119, IPR038109,PF07508,IPR011109,SSF53041,PTHR30461, PS51736,Coil,PF00239
MKKAIAYMRFSSPGQMSGDSLNRQRRLIAEWLKVNSDYYLDTITYEDLGLSAFKGKHAQSGAFSEFLDAIEHGYILPGTTLLVESLDRLSREKVGEAIERLKLILNHGIDVITLCDNTVYNIDSLNEPYSLIKAILIAQRANEESEIKSSRVKLSWKKKRQDALESGTIMTASCPRWLSLDDKRTAFVPDPDRVKTIELIFKLRMERRSLNAIAKYLNDHAVKNFSGKESAWGPSVIEKLLANKALIGICVPSYRARGKGISEIAGYYPRVISDDLFYAVQEIRLAPFGISNSSKNPMLINLLRTVMKCEACGNTMIVHAVSGSLHGYYVCPMRRLHRCDRPSIKRDLVDYNIINELLFNCSKIQPVENKKDANETLELKIIELQMKINNLIAALSVAPEVTAIAEKIRVLDKELRRASVSLKTLKSKAVSSLGDFHAIDLNSKNGRELCRTLAYKTFEKIIINTDNKTCDIYFMNGIVFKHYPLMKTISAQQAISTLKYMVDGEVYF

SEQ ID NO: 5322 - protein, 508 aa, Unknown
  Description of Unknown: Integrase B5323 sequence
  PTHR30461:SF3,IPR036162,PS51737,IPR011109,PTHR30461, PS00397,PF00239,G3DSA:1.10.10.2600,IPR006119,SSF53041, cd00338,SM00857,IPR025827,IPR038109,PS51736, IPR006118,PF13408,G3DSA:3.40.50.1390,PF07508,Coil
MKKEEDTVKTAALYIRVSTDKQEELSPDSQRCLLLDYAKSHNMIVSNQHIYTENGISGRKADKRPKFQQMIAAAKSDEHPFDVILLWKFSRFARNQEESIVYKSMLRNKCHVDVVSISEPLIEGPFGGLIERIIEWMDEFYSIRLSGDVTRGMTENALRGAYQCRPPLGYRIPHHKATPEIIPEEAAIVQLIFDKYVNEKMSLFALTKYLNAQGYKTSRGKPFEKRSLEYIIQNPGYAGDIRWNRTINETNEIRDRSEWIIRPGHHPAIISKELFEQAQERFNKEYTPRNAKPSEVTKHWLSGLLKCSGCGRSLSSCVVHRKSLPDTFYFQCYGYLKGKCSTNCYVNESVIGPAVLNALKDALNNGSVSYSLRQRQTDHAPDAEIKNIEKKLSRLDSKELRAKEAYIDGIDTIEEYRANKERISQERTELEEQLAKLTQVPEEPEDNTRKMLQSISSILDILQSDSFTPQEKNAALKSIVEKITYDRANSHIDVDFYLTENPEMPANP

SEQ ID NO: 5323 - protein, 508 aa, Unknown
  Description of Unknown: Integrase B5324 sequence
  PTHR30461:SF3,cd00338,SM00857,G3DSA:1.10.10.2600,IPR036162, PF13408,PS51737,IPR025827,G3DSA:3.40.50.1390,IPR006119, IPR038109,PF07508,IPR011109,SSF53041,PTHR30461, PS51736,Coil,PF00239
MKKAIAYMRFSSPGQMSGDSLNRQRRLITEWLKVNSDYYLDTVTYEDLGLSAFNGKHAQSGAFSEFLDAIEHGYILPGTTLLVESLDRLSREKVGEAIERLKLILNHGIDVITLCDNTVYNIDSLNEPYSLIKAILIAQRANEESEIKSSRVKLSWKKKRQDALESGTIMTASCPRWLSLDDKRTAFVPDPDRVKTIELIFKLRMERRSLNAIAKYLNDHAVKNFSGKESAWGPSVIEKLLANKALIGICVPSYRARGKGISEIAGYYPRVISDDLFYAVQEIRLAPFGISNSSKNPMLINLLRTVMKCEACGNTMIVHAVSGSLHGYYVCPMRRLHRCDRPSIKRDLVDYNIINELLFNCSKIQPVENKKDANETLELKIIELQMKINNLIAALSVAPEVTAIAEKIRVLDKELRRASVSLKTLKSKAVSSLGDFHAIDLTSKNGRELCRTLAYKTFEKIIINTDNKTCDIYFMNGIVFKHYPLMKTISAQQAISTLKYMVDGEVYF

SEQ ID NO: 5324 - protein, 508 aa, Unknown
  Description of Unknown: Integrase B5325 sequence
  PTHR30461:SF3,SM00857,G3DSA:1.10.10.2600,IPR036162,PF13408, PS51737,G3DSA:3.40.50.1390,IPR025827,IPR006119,IPR038109, PF07508,IPR011109,SSF53041,PF00239,PTHR30461, PS51736,Coil,cd00338
MKKAIAYMRFSSPGQMSGDSLNRQRRLIAEWLKVNSDYYLDTITYEDLGLSAFKGKHAQSGAFSEFLDAIEHGYILPGTTLLVESLDRLSREKVGEAIERLKLILNHGIDVITLCDNTVYNIDSLNEPYSLIKAILIAQRANEESEIKSSRVKLSWKKKRQDALESGTIMTASCPRWLSLDDKRTAFVPDPDRVKTIELIFKLRMERRSLNAIAKYLNDHAVKNFSGKESAWGPSVIEKLLANKALIGICVPSYRARGKGISEIAGYYPRVISDDLFYAVQEIRLAPFGISNSSKNPMLINLLRTVMKCEACGSTMIVHAVSGSLHGYYVCPMRRLHRCDRPSIKRDLVDYNIINELLFNCSKIQPVENKKDANETLELKIIELQMKINNLIVALSVAPEVTAIAEKIRLLDKELRRASVSLKTLKSKGVNSFSDFYAIDLTSKNGRELCRTLAYKTFEKIIINTDNKTCDIYFMNGIVFKHYPLMKVISAQQAISALKYMVDGEIYF

SEQ ID NO: 5325 - protein, 508 aa, Unknown
  Description of Unknown: Integrase B5326 sequence
  PTHR30461:SF3,IPR036162,PS51737,IPR011109,PTHR30461, PS00397,PF00239,G3DSA:1.10.10.2600,IPR006119,SSF53041, cd00338,SM00857,IPR025827,IPR038109,PS51736, IPR006118,PF13408,G3DSA:3.40.50.1390,PF07508,Coil
MNNVIVYARVSTLIQAEQGYSIDAQLEDCRKKAQELGAIHIEEYIDIGKSGKFLERPELQKMLYNIKHSEMKYDALIIYKLDRLSRDSMGLAYIIKILQQNNIKIISTDGAHYGTNPQDILIMQMMGSISEFENALRKERSIRGKIEKRRQGKIDKVKKYGFIYNDKKKNFDINKEEAEIIKKIFNWFTEERIGAFKIAKRINKLKIPTPLPSKNIHIWHENTIRGILRDESYAGTMHTMKYKFEKISIKKIKKTIRPKSEWIDVSVPAIVEKITWEKAQEILNDNKNNKRNTKNIWLLQGLVLCNICKKPMYIKQTITKSKNTNNKVFYFRCRTKIYNHAGLPEKCDARSVQVNVVEDLVWNTLLKIFYSKETLEKYLKRNRKENTENILLEELITKRQTLLNKKNTITDWFLDGKLEEDIATEKLNKLNMELDTLNLRIKMLKKNATKQPATIESLYNKFHEVNNPDREKKKEIIQSIVDKIYLERLDDTNGKYCVPKLKLNIILY

SEQ ID NO: 5326 - protein, 508 aa, Unknown
  Description of Unknown: Integrase B5327 sequence
  SM00857,G3DSA:1.10.10.2600,IPR036162,PS51737,G3DSA:3.40.50.1390, IPR006119,IPR038109,PF07508,SSF53041,IPR011109, PTHR30461,Coil,cd00338,PF00239
MYAMYLRKSRADDKDIPLEKVLKNHYNMLTELADKLKIQIEEENVFREIETGDSISIRPKMQDLLEKVSEGLYEGVFCTELSRLCRGSKIDQEIVSSTFTAAECKIITPSKTYDLANNEFDEEMVDFGLFMSRREYKTITKRMQRGREQSVKQGKYIGSILPYGYNKEKLEGENGFRLVINEEEAHIVRLIFKWFLEDNAGASIIAKRLNQGGYPTRSGRVWSYSSVKNILTSNVVAGYLKHGERKYKKYIDTKGNVKKSRPVNAAVEYYKGLHEAIIPLHEFEKVQDILNSRKQHKSNFDLPLSNPLAGLIKCSECNRIMVKRRCAQGDFLYCSTTGCKNIGSYLNRVEEHILQALSNTLSDYEYYVDNYEQEMIKEKRNVDNDLKRIEKEIEKLNKQFEKCCTFLEQDVYTIEIFKDRTSKIKDKIKILEENKKVLEKEFGSDKVIKIKKLIPELENVLKNYNTLSIEGKNELLKSIIKEAIYSKKKKCKKGSNEDYFELEITLNI

SEQ ID NO: 5327 - protein, 508 aa, Unknown
  Description of Unknown: Integrase B5328 sequence
  SM00857,G3DSA:1.10.10.2600,IPR036162,PS51737, G3DSA:3.40.50.1390,IPR006119,IPR038109,PF07508, IPR011109,SSF53041,PTHR30461,Coil, cd00338,PF00239
MYAMYLRKSRADDKDIPLEKVLKNHYNMLTELADKLKIQIEEENVFREIETGDSISIRPKMQDLLEKVSEGLYEGVFCTELSRLCRGSKIDQEIVSSTFTAAECKIITPSKTYDLANNEFDEEMVDFGLFMSRREYKTITKRMQRGREQSVKQGKYIGSILPYGYNKEKLEGENGFKLTINEEEAHIVKLIFKWFLEDNIGASIIAKRLNQGGYPTRSGRVWSYNSVKNILTSNVVAGYLKHGERKYKKYIDAKGNVKKSRPVNKDVEYYKGLHEAIIPLHKFEKVQDILNSRKQHKSNFDLPLSNPLAGLIRCSECNRIMVKRRCSQGDFLYCSTTGCKNIGSYLNRVEEHILQALSNMLSDYEYYVDNYEQETIKEKRNVDNDLKRIEKEIEKLNKQFEKCCTFLEQDVYTIEVYKDRTSKIKDKIKILEENKKVLEKEFGSDKVIKIKKLIPKLENVLKNYNILSIEGKNELLKSIIKEITYAKKKKSKKGSNEDYFELEITLNI

SEQ ID NO: 5328 - protein, 508 aa, Unknown
  Description of Unknown: Integrase B5329 sequence
  PTHR30461:SF3,IPR036162,PS51737,IPR011109,PTHR30461, PS00397,PF00239,G3DSA:1.10.10.2600,IPR006119,SSF53041, cd00338,SM00857,IPR025827,IPR038109,PS51736, IPR006118,PF13408,G3DSA:3.40.50.1390,PF07508,Coil
MYNVIIYARVSTLIQAEQGYSIDAQLEDCRKKAQELGATNIEEYIDRGKSGKFLERPELQKMLYNIKHSETNYDALIIYKLDRLSRDSMGLAYIIKILQQNNIKIISTDGAHYGTNPQDILIMQMMGSISEFENALRKERSIRGKIEKRRQGKIDKVKKYGFIYNNKKKNFDINKEEAEIIKKIFNWFTEERIGAFKIAKRINKLKIPTPLPSKNIHIWHENTIRGILRDESYAGTMHTMKYKFEKISIKKIKKTIRPKSEWIDVSVPAIVEKITWEKAQEILNDNKNNKRNTKNIWLLQGLVLCNICKKPMYIKQTITKSKNTNNKVFYFRCRTKIYNHAGLPEKCDARSVQVNVVEDLVWNTLLKIFYSKETLEKYLKRNRKENTENILLEELITKRQTLLNKKNTITDWFLDGKLEEDIATEKLNKLNMELDTLNLRIKMLKKNATKQPATIESLYNKFHEVNNPDREKKKEIIQSIVDKIYLERLDDTNGKYCVPKLKLNIILY

SEQ ID NO: 5329 - protein, 508 aa, Unknown
  Description of Unknown: Integrase B5330 sequence
  cd00338,SM00857,G3DSA:1.10.10.2600,IPR036162,PS51737, G3DSA:3.40.50.1390,IPR006119,IPR038109,PF07508,IPR011109, SSF53041,PTHR30461,Coil,PF00239
MYAMYLRKSRADDKDIPLEKVLKNHYNMLTELADKLKIQIEEENVFREIETGDSISIRPKMQDLLEKVSEGLYEGVFCTELSRLCRGSKIDQEIVSSTFTAAECKIITPSKTYDLANNEFDEEMVDFGLFMSRREYKTITKRMQRGREQSVKQGKYIGSILPYGYNKEKLEGENGFKLVINEEEAHIIKLIFKWFLEDNAGASIIAKRLNQGGYPTRSGRVWSYSSVKNILTSNVVAGYLKHGERKYKKYIDTKGNVKKSRPVNKDAEYYKGLHEAIIPLHEFEKVQDILNSRKQHKSNFDLPLSNPLAGLIKCSECNRIMVKRPCPQGNFLYCPTTGCKNMGSYLDRVEEHILQALSNTLSDYEYYVDNYEQETIKEKRNVDNDLKRIEKEIEKLNKQFEKCCTFLEQDVYTIEVFKDRTSKIKDKIRILEENKKVLEKEFGDDKVIKIKKLIPELENVLKNYNTLSIEGKNELLKSIIKEAIYSKKKKCKKGSGEDYFELEITLNI

SEQ ID NO: 5330 - protein, 508 aa, Unknown
  Description of Unknown: Integrase B5331 sequence
  PTHR30461:SF3,cd00338,SM00857,G3DSA:1.10.10.2600, IPR036162,PF13408,PS51737,G3DSA:3.40.50.1390, IPR025827,IPR006119,IPR038109,PF07508, IPR011109,SSF53041,PTHR30461,PS51736,Coil,PF00239
MKKAIAYMRFSSPGQMSGDSLNRQRRLIAEWLKVNSDYYLDTITYEDLGLSAFKGKHAQSGAFSEFLDAIEHGYILPGTTLLVESLDRLSREKVGEAIERLKLILNHGIDVITLCDNTVYNIDSLNEPYSLIKAILIAQRANEESEIKSSRVKLSWKKKRQDALESGTIMTASCPRWLSLDDKRTAFVPDPDRVKTIELIFKLRMERRSLNAIAKYLNDHAVKNFSGKQSAWGPSVIEKLLANKALIGICVPSYRARGKGISEIAGYYPRVISDDLFYAVQEIRLAPFGISNSSKNPMLINLLRTVMKCEACGNTMIVHAVSGSLHGYYVCPMRRLHRCDRPSIKRDLVDYNIINELLFNCSKIQPVENKKDANETLELKIIELQMKINNLIVALSVAPEVTAIAEKIRLLDKELRRASVSLKTLKSKGVNSFSDFYAIDLTSKNGRELCRTLAYKTFEKIIINTDNKTCDIYFMNGIVFKHYPLMKVISAQQAISALKYMVDGEVYF

SEQ ID NO: 5331 - protein, 508 aa, Unknown
  Description of Unknown: Integrase B5332 sequence
  SM00857,G3DSA:1.10.10.2600,IPR036162,PS51737,G3DSA:3.40.50.1390, IPR006119,IPR038109,PF07508,SSF53041,IPR011109, PF00239,PTHR30461,Coil,cd00338
MYAMYLRKSRADDKDIPLEKVLKNHYNMLTELADKLKIQIEEENVFREIETGDSISIRPKMQDLLEKVSEGLYEGVFCTELSRLCRGSKIDQEIVSSTFTAAECKIITPSKTYDLANNEFDEEMVDFGLFMSRREYKTITKRMQRGREQSVKQGKYIGSILPYGYNKEKLEGENGFRLVINEEEAYIVRLIFKWFLEDNTGASIIAKRLNQGGYPSRSGRVWSYSSVKNILTSNVVAGYLKHGERKYKKYIDAKGNVKKSRPVNAAVEYYKGLHEAIIPLHEFEKVQDILNSRKQHKSNFDLPLSNPLAGLIKCSECGRVLIKRPCPQGNFLYCPTAGCKNMGSYLYRVEEHILQALSNTLSDYEYYVDNYEQETIKEKRNVDNDLKRIEKEIEKLNKQFEKCCTFLEQDVYTIEVFKDRTSKIKDKIRILEENKKVLEKEFGDEKVIKIKKLIPKLENVLKNYNTLSIEGKNELLKSIIKEITYTKKKKSKKGSNEDYFELEITLNI

SEQ ID NO: 5332 - protein, 508 aa, Unknown
  Description of Unknown: Integrase B5333 sequence
  PTHR30461:SF3,IPR036162,PS51737,IPR011109, PTHR30461,PS00397,PF00239,G3DSA:1.10.10.2600, IPR006119,SSF53041,cd00338,SM00857,IPR025827,IPR038109 ,PS51736,IPR006118,PF13408,G3DSA:3.40.50.1390,PF07508,Coil
MKKEEDTVKTAALYIRVSTDKQEELSPDSQRRLLLDYAKSHNMIVSNQHIYTENGISGRKADKRPKFQQMIAAAKSDEHPFDVILLWKFSRFARNQEESIVYKSMLRNKCHVDVVSISEPLIEGPFGGLIERIIEWMDEFYSIRLSGDVTRGMTENALRGAYQCRPPLGYRIPHHKATPEIIPEEAAIVQLIFDKYVNEKMSLFALTKYLNAQGYKTSRGKPFEKRSLEYIIQNPGYAGDIRWNRTINETNEIRDRSEWIIRPGHHPAIISKELFEQAQERFNKEYTPRNAKPSEVTKHWLSGLLKCSGCGRSLSSCVVHRKSLPDTFYFQCYGYLKGKCSTNCYVNESVIGPAVLNALKDALNNGSVSYSLRQRQTDHAPDAEIKNIEKKLSRLDSKELRAKEAYIDGIDTIEEYRANKERISQERTELEEQLAKLTQVPEEPEDNTRKMLQSISSILDILQSDSFTPQEKNAALKSIVEKITYDRANSHIDVDFYLTENPEMPANP

SEQ ID NO: 5333 - protein, 508 aa, Unknown
  Description of Unknown: Integrase B5334 sequence
  PTHR30461:SF3,SM00857,G3DSA:1.10.10.2600,IPR036162,PF13408, IPR025827,G3DSA:3.40.50.1390,PS51737,IPR006119,IPR038109, PF07508,IPR011109,SSF53041,PTHR30461,Coil, PS51736,cd00338,PF00239
MKKAIAYMRFSSPGQMSGDSLNRQRRLIAEWLKVNSDYYLDTITYEDLGLSAFKGKHAQSGAFSEFLDAIEHGYILPGTTLLVESLDRLSREKVGEAIECLKLILNHGIDVITLCDNTVYNIDSLNEPYSLIKAILIAQRANEESEIKSSRVKLSWKKKRQDALESGTIMTASCPRWLSLDDKRTAFVPDPDRVKTIELIFKLRMERRSLNAIAKYLNDHAVKNFSGKESAWGPSVIEKLLANKALIGICVPSYRARGKGISEIAGYYPRVISDDLFYAVQEIRLAPFGISNSSKNPMLINLLRTVMKCEACGNTMIVHAVSGSLHGYYVCPMRRLHRCDRPSIKRDLVDYNIINELLFNCSKIQPVENKKDANETLELKIIELQMKINNLIAALSVAPEVTAIAEKIRVLDKELRRASVSLKTLKSKAVSSLGDFHAIDLTSKNGRELCRTLAYKTFEKIIINTDNKTCDIYFMNGIVFKHYPLMKTISAQQAISTLKYMVDGEVYF

SEQ ID NO: 5334 - protein, 508 aa, Unknown
  Description of Unknown: Integrase B5335 sequence
  SM00857,G3DSA:1.10.10.2600,IPR036162,PS51737,G3DSA:3.40.50.1390, IPR006119,IPR038109,PF07508,IPR011109,SSF53041, PF00239,PTHR30461,Coil,cd00338
MYAMYLRKSRADDKDIPLEKVLKNHYNMLTELADKLKIQIEEENVFREIETGDSISIRPKMQDLLEKVSEGLYEGVFCTELSRLCRGSKIDQEIVSSTFTAAECKIITPSKTYDLANNEFDEEMVDFGLFMSRREYKTITKRMQRGREQSVKQGKYIGSILPYGYNKEKLEGENGFRLVINEEEAHIVRLIFKWFLEDNAGASIIAKRLNQGGYPSRSGRVWSYSSVKNILTSNVVAGYLKHGERKYKKYIDAKGNVKKSRPVNAAVEYYKGLHEAIIPLHEFEKVQDILNSRKQHKSNFDLPLSNPLAGLVKCSECNRIMVKRRCSQGDFLYCSTTGCKNIGSYLNRVEEHILQALSNTLSDYEYYVDNYEQEMIKEKRNVDNDLKRIEKEIEKLNKQFEKCCTFLEQDVYTIEVFKDRTSKIKDKIRILEENKKVLEKEFGDDKVIKIKKLIPELENVLKNYNTLSIEGKNELLKSIIKEAIYSKKKKCKKGSGEDYFELEITLNI

SEQ ID NO: 5335 - protein, 508 aa, Unknown
  Description of Unknown: Integrase B5336 sequence
  PTHR30461:SF3,cd00338,SM00857,G3DSA:1.10.10.2600, IPR036162,PF13408,PS51737,IPR025827, G3DSA:3.40.50.1390,IPR006119,IPR038109,PF07508, IPR011109,SSF53041,PTHR30461,PS51736,Coil,PF00239
MKKAIAYMRFSSPGQMSGDSLNRQRRLITEWLKVNSDYYLDTVTYEDLGLSAFNGKHAQSGAFSEFLDAIEHGYILPGTTLLVESLDRLSREKVGEAIERLKLILNHGIDVITLCDNTVYNIDSLNEPYSLIKAILIAQRANEESEIKSSRVKLSWKKKRQDALESGTIMTASCPRWLSLDDKRTAFVPDPDRVKTIELIFKLRMERRSLNAIAKYLNDHAVKNFSGKESAWGPSVIEKLLANKALIGICVPSYRARGKGISEIAGYYPRVISDDLFYAVQEIRLAPFGISNSSKNPMLINLLRTVMKCEACGNTMIVHAVSGSLHGYYVCPMRRLHRCDRPSIKRDLVDYNIINELLFNCSKIQPVENKKDANETLELKIIELQMKINNLIAALSVAPEVTAIAEKIRVLDKELRRASVSLKTLKSKAVSSLGDFHAIDLTSKNGRELCRTLAYKTFEKIIINTDNKTCDIYFMNGIVFKHYPLMKIISAQQAISTLKYMVDGEVYF

SEQ ID NO: 5336 - protein, 508 aa, Unknown
  Description of Unknown: Integrase B5337 sequence
  cd00338,SM00857,G3DSA:1.10.10.2600,IPR036162,PS51737, G3DSA:3.40.50.1390,IPR006119,IPR038109,PF07508,IPR011109, SSF53041,PTHR30461,Coil,PF00239
MYAMYLRKSRADDKDIPLEKVLKNHYNMLTELADKLKIQIEEENVFREIETGDSISIRPKMQDLLEKVSEGLYEGVFCTELSRLCRGSKIDQEIVSSTFTAAECKIITPSKTYDLANNEFDEEMVDFGLFMSRREYKTITKRMQRGREQSVKQGKYIGSILPYGYNKEKLEGENGFRLVINEEEAHIVKLIFKWFLEDNAGASIIAKRLNQGGYPTRSGRVWSYSSVKNILTSNVVAGYLKHGERKYKKYIDTKGNVKKSRPVNAAVEYYKGLHEAIIPLSDFEKVQDILNSRKQHKSNFDLPLSNPLAGLIKCSECGRVLIKRPCPQGNFLYCPTTGCKNMGSYLNRVEEHILQALSNTLSDYEYYVDNYEQETIKEKRNVDNDLKRIEKEIEKLNKQFEKCCTFLEQDVYTIEIFKDRTSKIKDKIRILEENKKVLEKEFGDDKVIKIKKLIPKLENVLKNYNTLSIEGKNELLKSIIKEAIYSKKKKCKKGSREDYFELEITLNI

SEQ ID NO: 5337 - protein, 508 aa, Unknown
  Description of Unknown: Integrase B5338 sequence
  PTHR30461:SF3,SM00857,G3DSA:1.10.10.2600,IPR036162,PS51737, G3DSA:3.40.50.1390,IPR006119,IPR038109,PF07508,IPR011109, SSF53041,PTHR30461,PS51736,cd00338,PF00239
MKKAIAYMRFSSPGQMSGDSLNRQRRLIAEWLKVNSDYYLDTITYEDLGLSAFKGKHAQSGAFSEFLDAIEHGYILPGTTLLVESLDRLSREKVGEAIERLKLILNHGIDVITLCDNTVYNIDSLNDPYSLIKAILIAQRANEESEIKSSRVKLSWKKKRQDALESGTIMTASCPRWLSLDDKRTAFIPDPDRVKTIELIFKLRMERRSLNAIAKYLNDHAVKNFSGKESAWGPSVIEKLLANKALIGICVPSYRARGKGISEIAGYYPRVISDDLFYAVQEIRLAPFGISNSSKNPMLINLLRTVMKCEACGNTMIVQAVSGSLHGYYVCPMRRLHRCGRPSIKRNLVDYNIINELLFNCSKIQPVENKKDANETLELKIIELHMKINNLIAALSVAPEVTAIAEKIRVLDKELRRASVSLKTLKSKAVSSLGDFHAIDLTSKNGRELCRTLAYKTFEKIIINTDNKTCDIYFMNGIVFKHYPLMKTISAQQAISTLKYMVDGEVYF

SEQ ID NO: 5338 - protein, 508 aa, Unknown
  Description of Unknown: Integrase B5339 sequence
  PTHR30461:SF3,SM00857,G3DSA:1.10.10.2600,IPR036162,PS51737, G3DSA:3.40.50.1390,IPR006119,IPR038109,PF07508,IPR011109, SSF53041,PTHR30461,Coil,PS51736,cd00338, PF00239
MICAMYLRKSRADLTAEARGEGETLARHRETLMRVAVQQNLIVTDVYAEVVSGDTIAERPEMQRLLRAIERGDYDAVLCMDIDRLGRGDGGDQSIILKALKYSGTIVITPYKNYDTRREMDEEFFEYSQFLARGEYKRIKRRMWAGRVAAAKEGKWLSPKAPFGYRRVRLEHTKGWTLVPDPAEADAVRSMFEWYGSGEVGKNIIANRINAMGFRTLSGVNFTSSTIANILNNPVYLGKIRWCNRRKRVDMVNGVEVVTRPRSEECMITEGLHPALIDNVAWDAVQARLATHQDSHVKKSANIVNPLASIMVCGICGKSMLFTPEYTRNDIVATYRCRTAGCPTSGINVQCVYDALLYTLKCWSAYAKEDEPSASKPPKNQSAIVAATTQLAQLNKQLTRLQDLLETGIYSAETYLARSKVLNDRINDTISEIDRLKQLQATDERAAIIRLKPKIDHVLDVWEISTAEDQNTLLRQVLRKVVYHKTHRCFRNDNPADFLSLDFFPVLE

SEQ ID NO: 5339 - protein, 508 aa, Unknown
  Description of Unknown: Integrase B5340 sequence
  PTHR30461:SF3,cd00338,SM00857,G3DSA:1.10.10.2600,IPR036162, PF13408,PS51737,G3DSA:3.40.50.1390,IPR025827,IPR006119, IPR038109,PF07508,IPR011109,SSF53041,PTHR30461, PS51736,Coil,PF00239
MKKAIAYMRFSSPGQMSGDSLNRQRRLIAEWLKVNSDYYLDTITYEDLGLSAFKGKHAQSGAFSEFLDAIEHGYILPGTTLLVESLDRLSREKVGEAIERLKLILNHGIDVITLCDNTVYNIDSLNDPYSLIKAILIAQRANEESEIKSSRVKLSWKKKRKDALESGTIMTASCPRWLSLDDKRTAFVPDPDRVKTIELIFKLRMERRSLNAIAKYLNDHAVKNFSGKESAWGPSVIEKLLANKALIGICVPSYRARGKGISEIAGYYPRVISDDLFYAVQEIRLAPFGISNSSKNPMLINLLRTVMKCEACGNTMIVHAVSGSLHGYYVCPMRRLHRCDRPSIKRDLVDYNIINELLFNCSKIQPVENKKDANETLELKIIELQMKINNLIAALSVAPEVTAIAEKIRVLDKELRRASVSLKTLKSKAVSSLGDFHAIDLTSKNGRELCRTLAYKTFEKIIINTDNKTCDIYFMNGIVFKHYPLMKTISAQQVISTLKYMVDGEVYF

SEQ ID NO: 5340 - protein, 508 aa, Unknown
  Description of Unknown: Integrase B5341 sequence
  SM00857,G3DSA:1.10.10.2600,IPR036162,PF13408,PS51737, G3DSA:3.40.50.1390,IPR025827,IPR006119,IPR038109,PF07508, SSF53041,IPR011109,PTHR30461,Coil,cd00338, PF00239
MYGMYLRKSRADDPNETMDETLAKHEKLLFDLAESMHIDRSEIIVLKEVVSGESIANRPEIQRGLKLIMDGVIDQGMFAVDSQRLARGDTLDQGTILRVFSLTKVKIITPLKIINPADEFDEDYFEFDLFMGRREYKMINRRMQRGRHISVQEGYYVGSIAPYGYNRCRYNKSYSLEINQEEYHIFALMKDMAIEGMGTTNIANKLNEMGFKPRKGDRWTTATVRGILINKTNLGLIKWNSRKEVKKFDNNEIVKTRPINKEAEYYPGLHPAIITQEEYDTIIEQMKARNNAPIKKNMKIRNPLAGLIVCADCGRNMVRRPYKKNQDSLICPTSNCKNVASYVSVVEERIIESLKAILNQYKTFVDDYDHSNKDKYVSSKKTRIETLDKEIEKLHGQINKACEMLELGAYSVALFRERKKTLDDKIRSLEKEKATIEKESEDEKVEQYRKAIPKIEKAVSLYFDASIEERNKLLKSVIEKCYYKKEVPGSRWKNDAMKEFKLEIHMKV

SEQ ID NO: 5341 - protein, 508 aa, Unknown
  Description of Unknown: Integrase B5342 sequence
  PTHR30461:SF3,SM00857,G3DSA:1.10.10.2600,IPR036162,PF13408, PS51737,G3DSA:3.40.50.1390,IPR025827,IPR006119,IPR038109, PF07508,IPR011109,SSF53041,PTHR30461,Coil, PS51736,cd00338,PF00239
MKRAVFYGRYSSDRQTEQSIEGQRRVCEEFAKAEQIQIVGEYIDRATSGTSTEHREQFQKMLKDSKNGGWDYVLVYKLDRFARSRYDSAISKQQLKKNGVKVLSATERITDSPEGILIEGLLESMDEYFSRELSRKCKRGIRESIIKGHNFGGRVLYGYDRKDKRFVINEEQAVNVRRIFKSYLSGCTIQSIADQLNADGYRTNYGNEFKRYTVSDILHNDKYTGIHYIDGIEEPETCPAIISQTTFERVKEKLNQSAHRSREHTTGHTYALSGLLQCGVCGRYVCGSSVERKYFYYACRSREHAENSVHIHADKLEQVVIDALQTFFTEEQVSTLAERLYQIYTTDMDGKPDRSKRLNEIEKQIQGTVNALIACPSSKALQEKLTQLEEQKAEIEKMPILQPQLKKEHFENYFRWLALRLEHIEDRQTFFHTVIHKVLVYPEKAVIILNMTDEMADPPKREQVEAFMSNVGEVSLYPCPNCTIVKPSPSRFCDICTAPQRSNAISLI

SEQ ID NO: 5342 - protein, 508 aa, Unknown
  Description of Unknown: Integrase B5343 sequence
  PTHR30461:SF3,IPR036162,PS51737,IPR011109,PTHR30461, PS00397,PF00239,G3DSA:1.10.10.2600,IPR006119,SSF53041, cd00338,SM00857,IPR025827,IPR038109,PS51736, IPR006118,PF13408,G3DSA:3.40.50.1390,PF07508,Coil
MKKEEDTVKTAALYIRVSTDKQEELSPDSQRRLLLDYAKSHNMIVSNQHIYTENGISGRKADKRPKFQQMIAAAKSDEHPFDVILLWKFSRFARNQEESIVYKSMLRNKCHVDVVSISEPLIEGPFGGLIERIIEWMDEFYSIRLSGDGTRGMTENALRGAYQWRPPLGYRIPHHKATPEIIPEEAAIVQLIFDKYVNEKMSLFALTKYLNAQGYKTSRGKPFEKRSLEYIIQNPGYAGDIRWNRTINETNEIRDRSEWIIRPGHHPAIISKELFEQAQERFNKEYTPRNAKPSEVTKHWLSGLLKCSGCGRSLSSCVVHRKSLPDTFYFQCYGYLKGKCSTNCYVNESVIGPAVLNALKDALNNGSVSYSLRQRQTDHAPDAEIKNIEKKLSRLDSKELRAKEAYIDGIDTIEEYRANKERISQERTELEEQLAKLTQVPEEPEDNTRKMLQSISSILDILQSDSFTPQEKNAALKCNVEKITSDRANSHIDVDFYLTENPEMPANP

SEQ ID NO: 5343 - protein, 508 aa, Unknown
  Description of Unknown: Integrase B5344 sequence
  PTHR30461:SF3,IPR036162,PS51737,IPR011109,PTHR30461, PS00397,PF00239,G3DSA:1.10.10.2600,IPR006119,SSF53041, cd00338,SM00857,IPR025827,IPR038109,PS51736, IPR006118,PF13408,G3DSA:3.40.50.1390,PF07508,Coil
MNNVIIYARVSTLIQAEQGYSIDAQLEDCRKKAQELGATNIEEYIDRGKSGKFLERPELQKMLYNIKHSETNYDALIIYKLDRLSRDSMGLAYIIKILQQNNIKIISTDGAHYGTNPQDILIMQMMGSISEFENALRKERSIRGKIEKRRQGKIDKVKKYGFIYNNKKKNFDINKEEAEIIKKIFNWFTEERIGAFKIAKRINKLKIPTPLPSKNIHIWHENTIRGILRDESYAGTMHTMKYKFEKIGIKKIKKTIRPKSEWIDVTVPAIVEKITWEKAQEILDDNKNNKRNTKKLWLLQGLVLCNICKKPMYIKQTITKSKNTSNKVFYFRCRTKIYNHAGLPEKCNARSVQVHVVEDLVWNTLLKIFYSKETLEKYLKRNRKENTENILLEELITKRQTILNKKNTITDWFLDGKLEEDIVNEKLNKLNMELDTLNLRIKMLKKNTIKQPATIENLYNKFHEVNNPDREKKKEIIQSIVDKIYLERLDNTNGKYCVPKIKLNIVLY

SEQ ID NO: 5344 - protein, 508 aa, Unknown
  Description of Unknown: Integrase B5345 sequence
  PTHR30461:SF3,SM00857,G3DSA:1.10.10.2600,IPR036162,PF13408, IPR025827,G3DSA:3.40.50.1390,PS51737,IPR006119,IPR038109, PF07508,SSF53041,IPR011109,PTHR30461,Coil, PS51736,cd00338,PF00239
MTVINEYCDRAISGKTDNRPSFQRLIKDSEKGQFEAVIMYTLDRFARNRYDSAIYKAKLKKHGVRVFYAKQPMPDTPEGIILESVLEGYAEYYSENLSRNIKRGLKENALQCIATGGAGVALGYTVGEDRKYKIDPVGAKIVQEVFEMYADGMSATQIINVCNERGYKTSRGNPFNKNSLRTMLKNDKYIGVYRFMDVVVEGGVPAIISKELFDKVQAKLQHNYTARARNKAKEDYLLTTKLFCGHCGSPMVGESGTSKTGKLHFYYKCIDRKRKHVCTKKVEKKDWIEELVTRFTVQEVLTDENIDRIATKAMEIIEKESADTTYLEGLQNELKEVQKKIKNIMTAIEQGIITSTTKDRLEELESEKNEIEGRIAREEIKKPLLTKERIVYWLLSFKSGDINDMEYRRRVIDTLVNSVYIYDDGDKGRRIVLTFNVSGQNTATISCSDIACSAPPYIEDVVITVARLPREQEERFESGIFYHFWDTYSNFQKLFMGKRTTVFRILRR

SEQ ID NO: 5345 - protein, 508 aa, Unknown
  Description of Unknown: Integrase B5346 sequence
  PTHR30461:SF3,SM00857,G3DSA:1.10.10.2600,IPR036162,PF13408, PS51737,G3DSA:3.40.50.1390,IPR025827,IPR006119,IPR038109, PF07508,SSF53041,IPR011109,PTHR30461,Coil, PS51736,cd00338,PF00239
MPTVTVIQPTIAAEQNTKIRCAAYCRVSSDSEDQLNSFMAQTRYYEKAFEKSDREQLVDIYADEGITGTREDKRDEFQRMIKDCRRGKIDRIYTKSISRFARNTKDCLKNIRELKSLGITVFFEKENIDTAKLTDEMMITIMGGLAQEESISISKNLKWSYQKRFEKGIVNVFSAPFGFKLNNGVLIIDKIQARIVEEIFDMFLNGIGYQRISEICQNKYKAYKDKFSYYGIRYILSNEKYIGDSVYQKTFTTNNLPYRKIQNNGQLNKYYIQNTHEAIISIEIFEKAQKLIESRKHKNIVSESPFRGKLICANCGTKYKRKDSRNKIYWVCRKHDNLAELCMNKRVEEKFIKQSFIRLHNKLWHDYKQILVPLQTALQDLKFRKFSGKTQVMDISKEIAKLREQTHVLARLKTKGFLDEAKYIEQTTEFTAKINKLQAELKKLTRSDDEDETLDKIEILIDFFEKRDSPMTEFEETAFESIVDKIVVKSQHELEFHLIGGLKFEEKI

SEQ ID NO: 5346 - protein, 508 aa, Unknown
  Description of Unknown: Integrase B5347 sequence
  PTHR30461:SF3,cd00338,SM00857,G3DSA:1.10.10.2600,IPR036162, PF13408,PS51737,G3DSA:3.40.50.1390,IPR025827,IPR006119, IPR038109,PF07508,IPR011109,SSF53041,PTHR30461, PS51736,Coil,PF00239
MKKAIAYMRFSSPGQMSGDSLNRQRRLIAEWLKVNSDYYLDTITYEDLGLSAFKGKHAQSGAFSEFLDAIEHGYILPGTTLLVESLDRLSREKVGEAIERLKLILNHGIDVITLCDNTVYNIDSLNEPYSLIKAILIAQRANEESEIKSSRVKLSWKKKRQDALESGTIMTASCPRWLSLDDKRTAFVPDPDRVKTIELIFKLRMERRSLNAIAKYLNDHAVKNFSGKESAWGPSVIEKLLANKALIGICVPSYRARGKGISEIAGYYPRVISDDLFYAVQEIRLAPFGISNSSKNPMLINLLRTVMKCEACGNTMIVHAVSGSLHGYYVCPMRRLHRCDRPSIKRDLVDYNIINELLFNCSKIQPVENKKDANETLELKIIELQMKINNLIVALSVAPEVTAIAEKIRLLDKELRRALVSLKTLKSKGVNSFSDFYAIDLTSKNGRELCRTLAYKIFEKIIINTDNKTCDIYFMNGIVFKHYPLMKVISAQQAISALKYMVDGEVYF

SEQ ID NO: 5347 - protein, 508 aa, Unknown
  Description of Unknown: Integrase B5348 sequence
  PTHR30461:SF3,SM00857,G3DSA:1.10.10.2600,IPR036162,PF13408, PS51737,G3DSA:3.40.50.1390,IPR025827,IPR006119,IPR038109, PF07508,IPR011109,SSF53041,PTHR30461,Coil, PS51736,cd00338,PF00239
MKPLSRPSGLPPKAVIYARFSSHNQREESIEQQVAECRAYAAANDLDVIRIYHDSAKTGKNDNRTQYQRLQRDAKKGEFEFVIAYKSNRIARNMLLALSFEGEMEKLGIRVVYAKEEFGDTAAGRFALRTMMNVNQFYSENMAEDIRRGLRDNAETCKVTGALPYGYQSGENGKPVICEAQAEIVREIFKRVSGGEAFVHIANDLNMRGIKTQKGGFWNKNSFHSILNNERYTGVYIYTDIRIEGGMPQIVEKELFLKVSNRIHNKNNPQGRHRENGDYLLTGKLRCGHCGTFMMGTSGTGKSGKLHYYYACQNARKKEKECDKKNVRRDYIEHEIAAAIKEYILQGTVIDWIADCVVQYQKANREASELDMLKSQLSDTQKSIKNIMTAIENGIFTDTTKSRLLELEQAQKELTNNILIMEAASAPVPRDRVVTWLESFRGGDVDDPSYRKTLFNSFLSTAYLYDDGRCKIVFDIGGKGKELDFSVLSEEDADLSGCSYKLPSNPPT

SEQ ID NO: 5348 - protein, 508 aa, Unknown
  Description of Unknown: Integrase B5349 sequence
  cd00338,SM00857,G3DSA:1.10.10.2600,IPR036162,PS51737, G3DSA:3.40.50.1390,IPR006119,IPR038109,PF07508,IPR011109, SSF53041,PTHR30461,Coil,PF00239
MYAMYLRKSRADDKDIPLEKVLKNHYNMLTELADKLKIQIEEENVFREIETGDSISIRPKMQGLLEKVSEGLYEGVFCTELSRLCRGSKIDQEIVSSTFTAAECKIITPSKTYDLANNEFDEEMVDFGLFMSRREYKTITKRMQRGREQSVKQGKYIGSILPYGYNKEKLEGENGFRLVINEEEAHIVRLIFKWFLEDNAGASIIAKRLNQGGYPTRKGQVWSYSSVKNILTSNVVAGYLKHGERKYKKYIDTKGNVKKSRPVNAAVEYYKGLHEAIIPLSDFEKVQDILNSRKQHKSNFDLPLSNPLAGLIKCSECNRIMVKRRCAQGDFLYCSTTGCKNIGSYLNRVEEHILQALSNTLSDYEYYVDNYEQETIKEKRNVDNDLKRIEKEIEKLNKQFEKCCTFLEQDVYTIEVFKDRTSKIKDKIRILEENKKVLEKEFGSDKVIKIKKLIPKLENVLKNYNTLSIEGKNELLKSIIKEITYTKKKKSKKGSNEDYFELEITLNI

SEQ ID NO: 5349 - protein, 508 aa, Unknown
  Description of Unknown: Integrase B5350 sequence
  cd00338,SM00857,G3DSA:1.10.10.2600,IPR036162, PF13408,IPR025827,G3DSA:3.40.50.1390,PS51737, IPR006119,IPR038109,PF07508,IPR011109, SSF53041,PTHR30461,PS51736,Coil,PF00239
MRVAMYLRKSRQDEELINATVEETLAKHEMQLREFANANNIIVNKVFKEVASAGDIENRPVFNELLLEIEKGLWDAILIVSIDRLTRGNALDLERIKNTFKIMNCKIITPLKIYDPVNDDDEFFLDFNMFISSRELKIIRNRMLKGRRTAIEQGFYTASILPFGYSKTKSETGKGWILVPDEKEAPIVKYIFENYASGKRPADIIHYLNNNGMYTKKGVKWNHAKLKRVLKNNVYIGKLAIDRRKTISKIENGVVIKKLVENPDVKFVDGKHEHLIDQVTWDKVQERIRLNFVDMTPIKSELVNPLAGIVKCPHCGKTMKRNHDKKGYMKPYLICPTLRCPTVSAEFDLVEARILDELKQELKNFNVYLDNYEAEYTIQKENKDNELKLLNDTLVKKQNMYARACEMLEEGIYTKELFLSRTSQINAEIESIKNNISELELKDDNNVEVYKRMIPNLEFCINEYHNLDTQKKNMLLKSLIDEVTYSRTKRSLRNQPKDNFDLVIKLRI

SEQ ID NO: 5350 - protein, 508 aa, Unknown
  Description of Unknown: Integrase B5351 sequence
  PTHR30461:SF3,cd00338,SM00857,G3DSA:1.10.10.2600,IPR036162, PF13408,PS51737,G3DSA:3.40.50.1390,IPR025827,IPR006119, IPR038109,PF07508,IPR011109,SSF53041,PTHR30461, PS51736,Coil,PF00239
MKKAIAYMRFSSPGQMSGDSLNRQRRLIAEWLKVNSDYYLDTITYEDLGLSAFKGKHAQSGAFSEFLDAIEHGYILPGTTLLVESLDRLSREKVGEAIERLKLILNHGIDVITLCDNTVYNIDSLNEPYSLIKAILIAQRANEESEIKSSRVKLSWKKKRQDALESGTIMTASCPRWLSLDDKRTAFVPDPDRVKTIEIIFKLRMERRSLNAIAKYLNDHAVKNFSGKESAWGPSVIEKLLANKALIGICVPSYRARGKGISEIAGYYPRVISDDLFYAVQEIRLAPFGISNSSKNPMLINLLRTVMKCEACGNTMIVHAVSGSLHGYYVCPMRRLHRCDRPSIKRDLVDYNIINELLFNCSKIQPVENKKDANETLELKIIELQMKINNLIVALSVAPEVTAIAEKIRLLDKELRRASVSLKTLKSKGVNSFSDFYAIDLTSKNGRELCRTLAYKTFEKIIINTDNKTCDIYFMNGIVFKHYPLMKVISAQQAISALKYMVDGEIYF

SEQ ID NO: 5351 - protein, 508 aa, Unknown
  Description of Unknown: Integrase B5352 sequence
  cd00338,SM00857,G3DSA:1.10.10.2600,IPR036162,PS51737, G3DSA:3.40.50.1390,IPR006119,IPR038109,PF07508,SSF53041, IPR011109,PTHR30461,Coil,PF00239
MYAMYLRKSRADDKDIPLEKVLKNHYNMLTELADKLKIQIEEENVFREIETGDSISIRPKMQDLLEKVSEGLYEGVFCTELSRLCRGSKIDQEIVSSTFTAAECKIITPSKTYDLANNEFDEEMVDFGLFMSRREYKTITKRMQRGREQSVKQGKYIGSILPYGYNKEKLEGENGFRLVINEEEAHIVRLIFKWFLEDNAGASIIAKRLNQGGYPTRSGRVWSYSSVKNILTSNVVAGYLKHGERKYKKYIDTKGNVKKSRPVNKDAEYYKGLHEAIIPLHEFEKVQDILNSRKQHKSNFDLPLSNPLAGLIKCSECGRVLIKRPCPQGNFLYCPTTGCKNMGSYLNRVEEHILQALSNTLSDYEYYVDNYEQETIKEKRNVDNDLKRIEKEIEKLNKQFEKCCTFLEQDVYTIEVFKDRTSKIKDKIRILEENKKVLEKEFGSDKVIKIKKLIPKLENVLKNYNTLSIEGKNELLKSIIKEITYTKKKKSKKGSNEDYFELEITLNI

SEQ ID NO: 5352 - protein, 508 aa, Unknown
  Description of Unknown: Integrase B5353 sequence
  PTHR30461:SF3,cd00338,SM00857,G3DSA:1.10.10.2600, IPR036162,PF13408,PS51737,G3DSA:3.40.50.1390, IPR025827,IPR006119,IPR038109,PF07508, IPR011109,SSF53041,PTHR30461,PS51736,Coil,PF00239
MKKAIAYMRFSSPGQMSGDSLNRQRRLITEWLKVNSDYYLDTVTYEDLGLSAFNGKHAQSGAFSEFLDAIEHGYILPGTTLLVESLDRLSREKVGEAIERLKLILNHGIDVITLCDNTVYNIDSLNEPYSLIKAILIAQRANEESEIKSSRVKLSWKKKRQDALESGTIMTASCPRWLSLDDKRTAFVPDPDRVKTIELIFKLRMERRSLNAIAKYLNDHAVKNFSGKESAWGPSVIEKLLANKALIGICVPSYRARGKGISEIAGYYPRVISDDLFYAVQEIRLAPFGISNSSKNPMLINLLRTVMKCEACGNTMIVHAVSGSLHGYYVCPMRRLHRCDRPSIKRDLVDYNIINELLFNCSKIQPVENKKDANETLELKIIELQMKINNLIVALSVAPEVTAIAEKIRLLDKELRRASVSLKTLKSKGVSSLGDFHAIDLTSKNGRELCRTLAYKIFEKIIINTDNKTCDIYFMNGIVFKHYPLMKVISAQQAISTLKYMVDGEIYF

SEQ ID NO: 5353 - protein, 508 aa, Unknown
  Description of Unknown: Integrase B5354 sequence
  SM00857,G3DSA:1.10.10.2600,IPR036162,PF13408,PS51737, G3DSA:3.40.50.1390,IPR025827,IPR006119,IPR038109,PF07508, SSF53041,IPR011109,PTHR30461,Coil,PS51736, cd00338,PF00239
MAKPEVSELAVVYARYSSHSQGEQSIEGQLSNARDYAAAHGYTLVHEYVDRAKSGRTDNRAEFQQMLKDTAKRQFSVIILWKVDRFGRNREEIAINKMKCRKNGVRVEYVAETIPDSPEGVILESVLEGFAEYYSLQLSQNIRRGRAESAEKCQSLGGNRPLGYKTGPDKKFVIDENTAPTVKMIFTMYADGKTVTEIVDKLNEMGLRTLRGGPFTKNSLHSILKNKKYIGIYEYQGREIKDGVPRIIEDDVFNKVQEMLKINKRAPAKTWSRADYILTDKLFCGKCGALMFGESGTSKTGAKHNYYICSNKKRFRSCDKKAVRQADIEGTVLNATHELLQDDELLDYIVDRTWEYYLAQDNSQEELRNLQRQLAQTDTAISNLIRAIEAGILTEETKKRMDELTQQKADLKASIADREIARGFHLKKSHIAYYLRSLRDADWSDKEAQKRLIQTFVNAVFVYDDHITLTYNFSGDKNTITLRDMQRFEDGEEFGCRASRSTITGHQF

SEQ ID NO: 5354 - protein, 508 aa, Unknown
  Description of Unknown: Integrase B5355 sequence
  PTHR30461:SF3,cd00338,SM00857,G3DSA:1.10.10.2600,IPR036162, PF13408,IPR025827,PS51737,G3DSA:3.40.50.1390,IPR006119, IPR038109,PF07508,SSF53041,IPR011109,PTHR30461, PS51736,Coil,PF00239
MKKENEIRAVVYARYSSHSQTEQSIEGQISAAQVYAKAKGYTIVKEYVDRAKTGKNDNREAFQQMLSDTAKHEFSVIIVWKVDRFGRNREEITFNKYRCKKNDVRVEYIAEAVPDSPEGVILESVLEGMAEYYSLQLAQNIRRGIRASAEKCQAIGGHCSLGYAIDPRTKKYVIDPDTAPTVQLIFEKYAEGYTGMDIVRLLNEKGLRTVRGKPFTKNSLWTILKNERYAGVYLFKDEVRVEGGIPALVSRETFDKVQEMLEINHRSPVNTWNRATYLLTDKLFCGHCGSKMVGECGTSRTGATYNYYICAGKKRERNCSKKAVRQDWIEKVVLQQIRRVLFDQEFLEFIAHKAYTYYLEEKKKLDQSAAIKAQLSSVESSIDNLIRAMEAGIFSASTKSRLDDLENQKAALTRTLAEIKLSEESFDLTEDRILFFLESMRGLDMDDVDSRKRLVKTFVNAVYLYDDKITLAFNFTDSCEKPEIIELTDIADGVVEKFVHRASCSTMV

SEQ ID NO: 5355 - protein, 508 aa, Unknown
  Description of Unknown: Integrase B5356 sequence
  SM00857,G3DSA:1.10.10.2600,IPR036162,PS51737,G3DSA:3.40.50.1390, IPR006119,IPR038109,PF07508,IPR011109,SSF53041, PTHR30461,Coil,cd00338,PF00239
MYAMYLRKSRADDKDIPLEKVLKNHYNMLTELADKLKIQIEEENVFREIETGDSISIRPKMQDLLEKVSEGLYEGVFCTELSRLCRGSKIDQEIVSSTFTAAECKIITPSKTYDLANNEFDEEMVDFGLFMSRREYKTITKRMQRGREQSVKQGKYIGSILPYGYNKEKLEGENGFRLVINEEEAHIVRLIFKLFLEDNAGASIIAKRLNQGGYPTRSGRVWSYSSVKNILTSNVVAGYLKHGERKYKKYIDTKGNVKKSRPVNAAVEYYKGLHEAIIPLHEFEKVQDILNSRKQHKSNFDLPLSNPLAGLIKCSECNRIMIKRRCAQGDFLYCSTTGCKNIGSYLNRVEEHILQALSNTLSDYEYYVDNYEQEMIKEKRNVDNDLKRIEKEIEKLNKQFEKCCTFLEQDVYTIEIFKDRTSKIKDKIKILEENKKVLEKEFGSDKVIKIKKLIPELENVLKNYNTLSIEGKNELLKSIIKEAIYSKKKKCKKGSNEDYFELEITLNI

SEQ ID NO: 5356 - protein, 508 aa, Unknown
  Description of Unknown: Integrase B5357 sequence
  PTHR30461:SF3,cd00338,SM00857,G3DSA:1.10.10.2600, IPR036162,PF13408,IPR025827,PS51737, G3DSA:3.40.50.1390,IPR006119,IPR038109,PF07508, SSF53041,IPR011109,PTHR30461,PS51736,Coil,PF00239
MYEDIKTACLYVRFSSHNQTEQSIEGQTRVCRDFCKRHNIRIVEIYADRATSASKDIEKRVQFLKMIKDSEKGLFDAVIVYKLDRFARSRYDSATYKYRLKRNGVQLISATENISNDPEGIILESVLEGMAEFYSAELSQKINRGMRESAYKHNSIGGAVPLGYKIEDKKLVIDPKTAPIVKEAFEKYADGETVAEICRQFNARGYKTSKGTAFGKSSFTKIFRNERYIGVYTFHDYRAEDAIPAIIDKDLWDRVQLRVGKIKNAPARNKAKVVYLLSGKIFCGHCGSKMNGNCNAGNYCYYQCYGKKNGNVDCKKKNIRKEFIERLVAQDALSLLTDEYIEQIATIACEKNQHEIELDSALPTIRDRIHQVDLSLNHLLKAIESGSAPDMLVKRMGELEKEKKDLQAQAKKESEDIVELDKAQVIYWLEQFRGGSIEDEEFCRMLIDLFVNSVTVWDEDDNTYKVTVAYNLTSLPTKTYRLNKGGTLSDFASNAPGMKNTDIPYISS

SEQ ID NO: 5357 - protein, 508 aa, Unknown
  Description of Unknown: Integrase B5358 sequence
  cd03768,PTHR30461:SF3,SM00857,IPR036162,PF13408, IPR025827,G3DSA:3.40.50.1390,IPR006119,PF07508,IPR011109, SSF53041,PTHR30461,PS51736,Coil,PF00239
MKNIAIYSRKSRETDKGESISTQIQLCKEYFLRDNIDCKFETFQDEGFSGGNTNRPEFQRMMLLAKHKQFDIIACYKVDRISRNIVDFMNTFDTLEKHNVSLVSISEGFDPTTPVGRIMMTMLAGFAEMERMNTAQRVKDNLKALAKLGRWSGGTPPTGYRSVRVENGDKTAMYLELNNEWKDKIEFMYKSVSEGNSIRHLAKILDMPNKTIANIISNPTYCKSDETSKKYLESIGFEVFGELDGYGYLSYNRRPRGKNGKKKFNSDEKFVAVSRHEGVVDSSLWISANEKVSTRADEAKPRISSNSFLAHIVKCSCGSGMYIEPGNRRKDGTRNYYFCCSRRKINKDLCSNGWLNAANLENDILQILKKSSEDKSILENYIDSKPSPTIDSDISNTKRQILSNTNRLNSLTEKFILLENSAAKLIANKMNEISALNDKLNSELLNLERKKLLNSIDNVNVDKIQIYICDLLSNWETLSIEDKQTAMQNIFDSILWDGKKGFNIKLNI

SEQ ID NO: 5358 - protein, 508 aa, Unknown
  Description of Unknown: Integrase B5359 sequence
  PTHR30461:SF3,cd00338,SM00857,G3DSA:1.10.10.2600,IPR036162, PF13408,PS51737,IPR025827,G3DSA:3.40.50.1390,IPR006119, IPR038109,PF07508,IPR011109,SSF53041, PTHR30461,PS51736,Coil,PF00239
MKKAIAYMRFSSPGQMSGDSLNRQRRLITEWLKVNSDYYLDTVTYEDLGLSAFNGKHAQSGAFSEFLDAIEHGYILPGTTLLVESLDRLSREKVGEAIERLKLILNHGIDVITLCDNTVYNIDSLNEPYSLIKAILIAQRANEESEIKSSRVKLSWKKKRQDALESGTIMTASCPRWLSLDDKRTAFVPDPDRVKTIELIFKLRMERRSLNAIAKYLNDHAVKNFSGKESAWGPSVIEKLLANKALIGICVPSYRARGKGISEIAGYYPRVISDDLFYAVQEIRLAPFGISNSSKNPMLINLLRTVMKCEACGNTMIVHAVSGSLHGYYVCPMRRLHRCDRPSIKRDLVDYNIINELLFNCSKIQPVENKKDANETLELKIIELQMKINNLIVALSVAPEVTAIAEKIRLLDKELRRASVSLKTLKSKGMSSLGDFHAIDLTSKNGRELCRTLAYKIFEKIIINTDNKTCDIYFMNGIVFKHYPLMKVISAQQAISTLKYMVDGEIYF

SEQ ID NO: 5359 - protein, 508 aa, Unknown
  Description of Unknown: Integrase B5360 sequence
  SM00857,G3DSA:1.10.10.2600,IPR036162,PS51737,G3DSA:3.40.50.1390, IPR006119,IPR038109,PF07508,IPR011109,SSF53041, PF00239,PTHR30461,Coil,cd00338
MYAMYLRKSRADDKDIPLEKVLKNHYNMLTELADKLKIQIEEENVFREIETGDSISIRPKMQDLLEKVSEGLYEGVFCTELSRLCRGSKIDQEIVSSTFTAAECKIITPSKTYDLANNEFDEEMVDFGLFMSRREYKTITKRMQRGREQSVKQGKYIGSILPYGYNKEKLDGENGFKLVINEEEAHIVKLIFKWFLKDNVGASIIAKRLNQGGYPTRSGRVWSYSSVKNILTSNVVAGYLKHGERKYKKYIDTKGNVKKSRPVNKDAEYYKGLHEAIIPLHEFEKVQDILNSRKQHKSNFDLPLSNPLAGLIKCSECNRIMVKRPCPQGNFLYCPTTGCKNMGSYLDRVEEHILQALSNTLSDYEYYVDNYEQETIKEKRNVDNDLKRIEKEIEKLNKQFEKCCTFLEQDVYTIEVFKDRTSKIKDKIRILEENKKVLEKEFGDDKVIKIKKLIPELENVLKNYNTLSIEGKNELLKSIIKEAIYSKKKKCKKGSGEDYFELEITLNI

SEQ ID NO: 5360 - protein, 508 aa, Unknown
  Description of Unknown: Integrase B5361 sequence
  SM00857,G3DSA:1.10.10.2600,IPR036162,PS51737, G3DSA:3.40.50.1390,IPR006119,IPR038109,PF07508, IPR011109,SSF53041,PTHR30461,Coil, cd00338,PF00239
MYAMYLRKSRADDKDIPLEKVLKNHYNMLTELADKLKIQIEEENVFREIETGDSISIRPKMQDLLEKVSEGLYEGVFCTELSRLCRGSKIDQEIVSSTFTAAECKIITPSKTYDLANNEFDEEMVDFGLFMSRREYKTITKRMQRGREQSVKQGKYIGSILPYGYNKEKIEGENGFKLVINEEESHIVRLIFKWFLEDNVGASIIAKRLNQRGYPTRKGQVWSYSSVKNILTNNVVSGYLKHNNRKYKKYIDAKGNVKKSRPVNQNAEYYKGLHEAIIPLADFEKVQNILGTRKQHKSNFDLPLSNPLAGLMKCSECNRVMIKRRCAQGDFLYCPTTGCENKGSYLHRVEENILQALSDTLSDYNYYLDNYEQEMIKEKRNVDNDLERIEKEIEKLNKQFEKCCTFLEQDVYTVEVFQDRTKKIKDKIKILEENKKVLEKEFKNDKVVKIKKSIPKLENVLKNYNTLNIEGKNELLKSIIKEVIYSKKKKCKKGSDEDYFELEITLNI

SEQ ID NO: 5361 - protein, 508 aa, Unknown
  Description of Unknown: Integrase B5362 sequence
  PTHR30461:SF3,cd00338,SM00857,G3DSA:1.10.10.2600,IPR036162, PF13408,PS51737,IPR025827,G3DSA:3.40.50.1390,IPR006119, IPR038109,PF07508,IPR011109,SSF53041,PTHR30461, PS51736,Coil,PF00239
MKKAIAYMRFSSPSQMSGDSLNRQRRLITEWLKVNSDYYLDTVTYEDLGLSAFNGKHAQSGAFSEFLDAIEHGYILPGTTLLVESLDRLSREKVGEAIERLKLILNHGIDVITLCDNTVYNIDSLNEPYSLIKAILIAQRANEESEIKSSRVKLSWKKKRQDALESGTIMTASCPRWLSLDDKRTAFVPDPDRVKTIELIFKLRMERRSLNAIAKYLNDHAVKNFSGKESAWGPSVIEKLLANKALIGICVPSYRARGKGISEIAGYYPRVISDDLFYAVQEIRLAPFGISNSSKNPMLINLLRTVMKCEACGNTMIVHAVSGSLHGYYVCPMRRLHRCDRPSIKRDLVDYNIINELLFNCSKIQPVENKKDANETLELKIIELQMKINNLIAALSVAPEVTAIAEKIRVLDKELRRASVSLKTLKSKAVSSLGDFHAIDLTSKNGRELCRTLAYKTFEKIIINTDNKTCDIYFMNGIVFKHYPLMKTISAQQAISTLKYMVDGEVYF

SEQ ID NO: 5362 - protein, 508 aa, Unknown
  Description of Unknown: Integrase B5363 sequence
  PTHR30461:SF3,IPR036162,PS51737,IPR011109,PTHR30461, PS00397,PF00239,G3DSA:1.10.10.2600,IPR006119,SSF53041, cd00338,SM00857,IPR025827,IPR038109,PS51736, IPR006118,PF13408,G3DSA:3.40.50.1390,PF07508,Coil
MKKEEDTVKTAALYIRVSTDKQEELSPDSQRRLLLDYAKSHNMIVSNQHIYTENGISGRKADKRPKFQQMIAAAKSDEHPFDVILLWKFSRFARNQEESIVYKSMLRNKCHVDVVSISEPLIEGPFGGLIERIIEWMDEFYSIRLSGDVTRGMTENALRGAYQCRPPLGYRIPHHKATPEIIPEEAAIVQLIFDKYVNEKMSLFALTKYLNAQGYKTSRGKPFEKRSLEYIIQNPGYAGDIRWNRTISETNEVRDRSEWIIRPGHHPAIISKELFEQAQERFFKEYTPRNAKPSEVTKHWLSGLLKCSGCGRSLSSCVVHRKSLPDTFYFQCYGYLKGKCSTNCYVSESVIGPAVLNALKDALNNGSVSYSLRQRQTDHAPDAEIKNIEKKLSRLDSKELRAKEAYIDGIDTIEEYRANKERINQERVELEEQLSKLTQKPDDPEDNTRKMLQSISSILDILQSDSFTPQEKNAALKSIVEKITYDRANSHIDVDFYLAENPGMPANL

SEQ ID NO: 5363 - protein, 508 aa, Unknown
  Description of Unknown: Integrase B5364 sequence
  PTHR30461:SF3,cd00338,SM00857,G3DSA:1.10.10.2600,IPR036162, PF13408,PS51737,G3DSA:3.40.50.1390,IPR025827,IPR006119, IPR038109,PF07508,IPR011109,SSF53041,PTHR30461, PS51736,Coil,PF00239
MKKAIAYMRFSSPGQMSGDSLNRQRRLIAEWLKVNSDYYLDTITYEDLGLSAFKGKHAQSGAFSEFLDAIEHGYILPGTTLLVESLDRLSREKVGEAIERLKLILNHGIDVITLCDNTVYNIDSLNEPYSLIKAILIAQRANEESEIKSSRVKLSWKKKRQDALESGTIMTASCPRWLSLDDKRTAFVPDPDRVKTIELIFKLRMERRSLNAIAKYLNDHAVKNFSGKESAWGPSVIEKLLANKALIGICVPSYRARGKGISEIAGYYPRVISDDLFYAVQEIRLAPFGISNSSKNPMLINLLRTVMKCEACGNTMIVHAVSGSLHGYYVCPMRRLHRCDRPSIKRDLVDYNIINELLFNCSKIQPVENKKDANETLELKIIELQMKINNLIVALSVAPEVTAIAEKIRLLDKELRRASVSLKTLKSKGVNSFSDFYAIDLTSKNGRELCRTLAYKTFEKIIINTDNETCDIYFMNGIVFKHYPLMKVISAQQAISALKYMVDGEIYF

SEQ ID NO: 5364 - protein, 508 aa, Unknown
  Description of Unknown: Integrase B5365 sequence
  PTHR30461:SF3,IPR036162,PS51737,IPR011109,PTHR30461, PS00397,PF00239,G3DSA:1.10.10.2600,IPR006119,SSF53041, cd00338,SM00857,IPR025827,IPR038109,PS51736, IPR006118,PF13408,G3DSA:3.40.50.1390,PF07508,Coil
MKKEEDTVKTAALYIRVSTDKQEELSPDSQRRLLLDYAKSHNMIVSNQHIYTENGISGRKADKRPKFQQMIAAAKSDEHPFDVILLWKFSRFARNQEESIVYKSMLRNKCHVDVVSISEPLIEGPFGGLIERIIEWMDEFYSIRLSGDVTRGMTENALRGAYQCRPPLGYRIPHHKATPEIIPEEAAIVQLIFDKYVNEKMSLFALTKYLNAQGYKTSRGKPFEKRSLEYIIQNPGYAGDIRWNRTINETNEIRDRSEWIIRPGHHPAIISKELFEQAQERFNKEYTPRNAKPSEVTKHWLSGLLKCSGCGRSLSSCVVHRKSLPDTFYFQCYGYLKGKCSTNCYVNESVIGPAVLNALKDALNNGSVSYSLRQRQTDHAPDAEIKNIEKKLSRLDSKELRAKEAYIDGIDTIEEYRANKERINQERTELEEQLEKLTRKPENPEDNTRKMLQSISSILDILQSDAFTPQEKNAALKSIVEKITYDRANSHIDVDFYLAENPEMPANP

SEQ ID NO: 5365 - protein, 508 aa, Unknown
  Description of Unknown: Integrase B5366 sequence
  PTHR30461:SF3,SM00857,G3DSA:1.10.10.2600,IPR036162,PF13408, PS51737,IPR025827,G3DSA:3.40.50.1390,IPR006119,IPR038109, PF07508,IPR011109,SSF53041,PTHR30461,Coil, cd00338,PF00239
MKAVIYARYSPGPNQKDKSVEEQIADCRQFARENDIMIVGDYADRKKTGRNDNRAEFQKMLKDSAKGLFDAVIVWKIDRFGRNREEIAINKVKLRRNGVRVMYAKEHIPDGPEGIILESTLEGLAEYYSANLSQNIMRGMRGVAMKGQSTGGGGHSLGYYVDQDKYFQIDEHGAQIVRQIFEMYSSGKQASEIIKELNGRGLKTANGKPFNHNSIARILSNRRYIGEYRWHDILIPDGMPRIIDDETFERVQKRLEKNKKAPARKIQAGSEEEFLLTTKLFCGHCGATMIGDSGTGKSGKKYSYYTCSTRKRKDGRKCDKKSVRKDELERYIVEQTVAHVLVDDVIEYIADKVVELQRKELQDTSMLDYYKSSLRDTEKSLKNIVTAIEQGIFTPTTKDRLLELEAEKADLEECIQKEEIARPTFSKEQIIFFLERFKGGDVNDQSYQRQIIDTFVSRIWIYDDKTVITYNYSGEGNTITLEAAEKAADEAAGGCSAQLPPSPPRKSG

SEQ ID NO: 5366 - protein, 508 aa, Unknown
  Description of Unknown: Integrase B5367 sequence
  PTHR30461:SF3,SM00857,G3DSA:1.10.10.2600,IPR036162,PS51737, G3DSA:3.40.50.1390,IPR006119,IPR038109,PF07508,SSF53041, IPR011109,PTHR30461,Coil,PS51736,cd00338, PF00239
MICAMYLRKSRADLTAEARGEGETLARHRETLMRVAVQQNLIVTDVYAEVVSGDTIAERPEMQRLLRAIERGDYDAVLCMDIDRLGRGDGGDQSIILKALKYSGTIVITPYKNYDTRREMDEEFFEYSQFLARGEYKRIKRRMWAGRVAAAKEGKWLSPKAPFGYRRVRLEHTKGWTLVPDPAEADAVRSMFEWYGSGEVGKNIIANRINAMGFRTLSGVNFTSSTIANILNNPVYLGKIRWCNRRKRVDMVNGMEVVTRPRSDECMIIDGLHPALIDNDAWDAVQARLATHQDSHVKKSANIVNPLASIMVCGICGKSMLFTPEYTRNDIVATYRCRTAGCPTSGINVQCVYDALLYTLKSWSAYVKEDEPSASKSPKNQSAIVAATAQLAQLNKQLTRLQDLLETGVYSAETYLARSKVLNDRINDTISEIDRLKQLQATDERAAIIRLKPKIDHVLDVWDISTAEDQNTLLRQVLRKVVYHKTHRCFRNDNPADFLSLDFFPVLE

SEQ ID NO: 5367 - protein, 508 aa, Unknown
  Description of Unknown: Integrase B5368 sequence
  PTHR30461:SF3,SM00857,G3DSA:1.10.10.2600,IPR036162,PF13408, PS51737,G3DSA:3.40.50.1390,IPR025827,IPR006119,IPR038109, PF07508,IPR011109,SSF53041,PTHR30461,Coil, PS51736,cd00338,PF00239
MYEDIKTACLYVRFSSHNQTEQSIEGQTRVCQEFCQRHNIKIVEIYADRATSASKNTEKRVSFLKMIKDSEKGLFDAVVVYKLDRFARSRYDSATYKYRLKKNGVQLISATENITNSPEGIILESVLEGMAEFYSAELSQKINRGMRESAYKHNSIGGALPLGYKTVDKKLVIDEKTAPIVREAFTMYAEGHSVAEICRIFNARGYKTSKGTEFGKNSFSKIFRNERYIGTYTYHDYRAEDAIPAIIDRDLWDRVQLRLKKVKNSPGRNKAKRVYLLSGKLFCGHCGESMNGNCNGNKYAFYECYGKKSKYNGCQKRNLRKEYIERLIAQDALSLLTDENIEHLATVACERNDYEIETGSPIPVIRDRIHQTEVSINNLTKAIETGATPDALVKRMVELEREKKDLSAQLKKEEELIVPLEKEQVIFWLEKFKDGDIEDEEFCRLLIDLFVNSVTVWDEDNDMLKVTIAYNLTSLPTKTYRLTKDGTLSDFTGNAPALQLVQLGVFLL

SEQ ID NO: 5368 - protein, 508 aa, Unknown
  Description of Unknown: Integrase B5369 sequence
  SM00857,G3DSA:1.10.10.2600,IPR036162,PS51737,G3DSA:3.40.50.1390, IPR006119,IPR038109,PF07508,IPR011109,SSF53041, PTHR30461,Coil,cd00338,PF00239
MYAMYLRKSRADDKDIPVEKVLKNHYNMLTELADKLKIQIEEENVFREIETGDSISIRPKMQDLLEKVSEGLYEGVFCTELSRLCRGSKIDQEIVSSTFTAAECKIITPSKTYDLANNEFDEEMVDFGLFMSRREYKTITKRMQRGREQSVKQGKYIGSILPYGYNKEKLEGENGFKLVINEEEAHIVKLIFKWFLEDNVGASIIAKRLNQGGYPSRSGRVWSYSSVKNILTSNVVAGYLKHGERKYKKYIDTKGNVKKSRPVNKDAEYYKGLHEAIIPLHEFEKVQDILNSRKQHKSNFDLPLSNPLAGLIRCSECNRIMVKRRCAQGDFLYCSTTGCKNIGSYLNRVEENILHALSSTLSDYEYYVDNYEQEMIKEKRNVDNDLKRIENEINKLNKQFEKCCTFLEQDVYTIEIFKDRTSKIKDKIKILEENKKVLEKEFGSDKVIKIKKLIPELENVLKNYNTLSIEGKNELLKSIIKEITYTKKKKSKKGSNEDYFELEITLNI

SEQ ID NO: 5369 - protein, 508 aa, Unknown
  Description of Unknown: Integrase B5370 sequence
  PTHR30461:SF3,SM00857,G3DSA:1.10.10.2600,IPR036162,PS51737, G3DSA:3.40.50.1390,IPR006119,IPR038109,PF07508,IPR011109, SSF53041,PTHR30461,PS51736,cd00338,PF00239
MKKAIAYMRFSSPGQMSGDSLNRQRRLIDEWLKVNSDYYLDTITYEDLGLSAFKGKHAQSGAFSEFLDAIEHGYILPGTTLLVESLDRLSREKVGEAIERLKLILNHGIDVITLCDNTVYNIDSLNDPYSLIKAILIAQRANEESEIKSSRVKLSWKKKRQDALESGTIMTASCPRWLSLDDKRTAFIPDPDRVKTIELIFKLRMERRSLNAIAKYLNDHAVKNFSGKESAWGPSVIEKLLANKALIGICVPSYRARGKGISEIAGYYPRVISDDLFYAVQEIRLAPFGISNSSKNPMLINLLRTVMKCEACGNTMIVHAVSGSLHGYYVCPMRRLHRCGRPSIKRDLVDYNIINELLFNCSKIQPVENKKDANETLELKIIELHMKINNLIAALSVAPEVTAIAEKIRVLDKELRRASVSLKTLKSKAVSSLGDFHAIDLTSKNGRELCRTLAYKTFEKIIINTDNKTCDIYFMNGIVFKHYPLMKVISAQQAISALKYMVDGEVYF

SEQ ID NO: 5370 - protein, 508 aa, Unknown
  Description of Unknown: Integrase B5371 sequence
  PTHR30461:SF3,cd00338,SM00857,G3DSA:1.10.10.2600,IPR036162, PF13408,PS51737,IPR025827,G3DSA:3.40.50.1390,IPR006119, IPR038109,PF07508,IPR011109,SSF53041,PTHR30461, PS51736,Coil,PF00239
MKKAIAYMRFSSPGQMSGDSLNRQRRLIAEWLKVNSDYYLDTITYEDLGLSAFKGKHAQSGAFSEFLDAIEHGYILPGTTLLVESLDRLSREKVGEAIERLKLILNHGIDVITLCDNTVYNIDSLNEPYSLIKAILIAQRANEESEIKSSRVKLSWKKKRQDALESGTIMTASCPRWLSLDDKRTAFVPDPDRVKTIELIFKLRMERRSLNAIAKYLNDHAVKNFSGKESAWGPSVIEKLLANKALIGICVPSYRARGKGISEIAGYYPRVISDDLFYAVQEIRLAPFGISNSSKNPMLINLLRTVMKCEACGNTMIVHAVSGSLHGYYVCPMRRLHRCDRPSIKRDLVDYNIINELLFNCSKIQPVENKKDANETLELKIIELQMKINNLIVALSVAPEVTAIAEKIRLFDKELRRASVSLKTLKSKGVNSFSDFYAIDLTSKNGRELCRTLAYKTFEKIIINTDNKTCDIYFMNGIVFKHYPLMKVISAQQAISALKYMVDGEIYF

SEQ ID NO: 5371 - protein, 508 aa, Unknown
  Description of Unknown: Integrase B5372 sequence
  PTHR30461:SF3,SM00857,G3DSA:1.10.10.2600,IPR036162,PS51737, G3DSA:3.40.50.1390,IPR006119,IPR038109,PF07508,SSF53041, IPR011109,PTHR30461,Coil,PS51736,cd00338, PF00239
MICAMYLRKSRADLTAEARGEGETLARHRETLMRVAVQQNLIVTDVYAEVVSGDTIAERPEMQRLLRAIERGDYDAVLCMDIDRLGRGDGGDQSIILKALKYSGTIVITPYKNYDTRREMDEEFFEYSQFLARGEYKRIKRRMWAGRVAAAKEGKWLSPKAPFGYRRMRLEHTKGWTLVPDPAEADAVRSMFEWYGSGEVGKNIIANRINAMGFRTLSGVNFTSSTIANILNNPVYLGKIRWCNRRKRVDMVNGMEVVTRPRSDECMIIDGLHPALIDNDAWDAVQARLATHQDSHVKKSANIVNPLASIMVCGICGKSMLFTPEYTRNDIVATYRCRTAGCPTSGINVQCVYDALLYTLKSWSAYVKEDEPSASKPPKNQSAIVAATTQLAQLNKQLTRLQDLLETGVYSAETYLARSKVLNDRINDTISEIDRLKQLQATDERAAIIRLKPKIDHVLDVWEISTPEDQNTLLRQVLRKVVYHKTHRCFRNDNPADFLSLDFFPVLE

SEQ ID NO: 5372 - protein, 508 aa, Unknown
  Description of Unknown: Integrase B5373 sequence
  PTHR30461:SF3,SM00857,G3DSA:1.10.10.2600,IPR036162,PF13408, IPR025827,G3DSA:3.40.50.1390,PS51737,IPR006119,IPR038109, PF07508,SSF53041,IPR011109,PTHR30461,Coil, PS51736,cd00338,PF00239
MKKAIAYMRFSSPGQMSGDSLNRQRRLIAEWLKVNSDYYLDTITYEDLGLSAFKGKHAQSGAFSEFLDAIEHGYILPGTTLLVESLDRLSREKVGEAIERLKLILNHGIDVITLCDNTVYNIDSLNEPYSLIKAILIAQRANEESEIKSSRVKLSWKKKRQDALESGTIMTASCPRWLSLDDKRTAFVPDPDRVKTIELIFKLRMERRSLNAIAKYLNDHAVKNFSGKESAWGPSVIEKLLANKALIGICVPSYRARGKGISEIAGYYPRVISDDLFYAVQEIRLAPFGISNSSKNPMLINLLRTVMKCEACGNTMIVHAVSGSLHGYYVCPMRRLHRCDRPSIKRDLVDYNIINELLFNCSKIQPVENKKDANETLELKIIELQMKINNLIVALSVAPEVTAIAEKIRLLDKELRRASVSLKTLKSKGVNSFSDFYTIDLTSKNGRELCRTLAYKTFEKIIINTDNKTCDIYFMNGIVFKHYPLMKVISAQQAISALKYMVDGEIYF

SEQ ID NO: 5373 - protein, 508 aa, Unknown
  Description of Unknown: Integrase B5374 sequence
  SM00857,G3DSA:1.10.10.2600,IPR036162,PS51737,G3DSA:3.40.50.1390, IPR006119,IPR038109,PF07508,IPR011109,SSF53041, PF00239,PTHR30461,Coil,cd00338
MEEILIYLRKSRQDEPSETIEQVLARHEKQLQEYAVKTYGYRIKEENIYREVVSGETIDDRPKINELFKRMEDESVTGVLVIEPQRLTRGDMLDCGTVVHIFRYTNTLVVTPSKTYNLADKYDRKFFEMELTRGNDYLEYVKEILARGRNASVHEGNYIASVAPFGYDKVKEGKSYTLAINEKESEYVRMIFDLYIQGNGASRIAKTINDLGARTKTGNIFKESAIRDILKNEIYIGKIRWGHKLVVKAYENGKIVKKRPRNEDYELIQGKHAPIISEETFEKAKIRKGKTTREGYSTELTNQFAGLIKCKKCGKAIAMRPQNKHREKSLSNRYYCKSGIYCTTKSCNEDVVVNMVISSLKATLNDFRTKIDNYAAEHETGLETLINALENDLKKLEVKQNELYDFLESGIYTKDVFIMRNEKLGQERERLQKALEKAKTEIPTLKEMKTKYTNLHTAIDMIQDDSINAKTKNNFLKEVIDVIYYTKDTATPNHGDDSKNIKLEIILK

SEQ ID NO: 5374 - protein, 508 aa, Unknown
  Description of Unknown: Integrase B5375 sequence
  PTHR30461:SF3,IPR036162,PS51737,IPR011109, PTHR30461,PS00397,PF00239,G3DSA:1.10.10.2600, IPR006119,SSF53041,cd00338,SM00857,IPR025827,IPR038109 ,PS51736,IPR006118,PF13408,G3DSA:3.40.50.1390,PF07508,Coil
MNNVIIYARVSTLIQAEQGYSIDAQLEDCRKKAQELGATNIEEYIDRGKSGKFLERPELQKMLYNIKHSEMKYDALIIYKLDRLSRDSMGLAYIIKILQQNNIKIISTDGAHYGTNPQDILIMQMMGSISEFENALRKERSIRGKIEKRRQGKIDKVKKYGFIYNDKKKNFDINKEEAEIIKKIFNWFTEERIGAFKIAKRINKLKIPTPLPSKNIHIWHENTIRGILRDESYAGTMHTMKYKFEKISIKKIKKTIRPKSEWIDVSVPAIVEEITWEKAQEILNDNKNNKRNTKNIWLLQGLVLCNICKKPMYIKQTITKSKNTNNKVFYFRCRTKIYNHAGLPEKCDARSVQVNVVEDLVWNTLLKIFYSKETLEKYLKRNRKENTENILLEELITKRQTLLNKKNTITDWFLDGKLEEDIATEKLNKLNMELDTLNLRIKMLKKNATKQPATIESLYNKFHEVNNPDREKKKEIIQSIVDKIYLERLDDTNGKYCVPKLKLNIILY

SEQ ID NO: 5375 - protein, 508 aa, Unknown
  Description of Unknown: Integrase B5376 sequence
  cd00338,SM00857,G3DSA:1.10.10.2600,IPR036162,PS51737, G3DSA:3.40.50.1390,IPR006119,IPR038109,PF07508,IPR011109, SSF53041,PTHR30461,Coil,PF00239
MYAMYLRKSRADDKDIPLEKVLKNHYNMLTELADKLKIQIEEENVFREIETGDSISIRPKMQDLLEKVSEGLYEGVFCTELSRLCRGSKIDQEIVSSTFTAAECKIITPSKTYDLANNEFDEEMVDFGLFMSRREYKTITKRMQRGREQSVKQGKYIGSILPYGYNKEKLEGENGFRLVINEEEAHIVRLIFKWFLEDSAGASIIAKRLNQGGYPSRSGRVWSYSSVKNILTSNVVAGYLKHGERKYKKYIDTKGNVKKSRPVNAAVEYYKGLHEAIIPLSDFEKVQDILNSRKQHKSNFDLPLSNPLAGLIRCSECNRVMVKRRCAQGDFLYCSTTGCKNIGSYLNRVEEHILQALSNTLSDYEYYVDNYEQETIKEKRNVDNDLKRIEKEIEKLNKQFEKCCTFLEQDVYTIEVFKDRTSKIKDKIRILEENKKVLEKEFGDDKVIKIKKLIPELENVLKNYNTLSIEGKNELLKSIIKEAIYSKKKKCKKGSNEDYFELEITLNI

SEQ ID NO: 5376 - protein, 508 aa, Unknown
  Description of Unknown: Integrase B5377 sequence
  PTHR30461:SF3,SM00857,G3DSA:1.10.10.2600,IPR036162, PF13408,PS51737,IPR025827,G3DSA:3.40.50.1390, IPR006119,IPR038109,PF07508,IPR011109, SSF53041,PTHR30461,Coil,PS51736,cd00338,PF00239
MPTVTVIQPTIAEEKAVKKRCAAYCRVSSDSEDQLNSFMAQMRYYSQVFDNSETEELVDVYADEGITGTREDKRDEFQRMIKDCRKGKIDRIYTKSISRFARNTRDCLKNVRELKSLGITIFFEKENIDTANMTDEMMITIMGGLAQEESVSISRNLKWSYQKRFEEGTINVFSAPFGYKLSNGSLIINETQAQIVKEIFEMFLNGIGYQRISEICQNKYSSYKDNFSYYGIRYILSNEKYIGDSKYQKTFTTDTLPYRKLPNKGELIQYYIQATHKAIISKETFEKAQALIECRKHKNIVSESPFSGKIICANCGTKYKRKCSGDKIYWVCRRHDNLAQLCTNKRIEEKFIRQSFIILHNKLLFNYKQILIPLQTALQDLKLKKFSGKTQVMDIHKEIAKLREQAHVLARLKTKGFLDEAKYIEQTTELTAKINKLQSELKKLTRSDYEDETLDQIEILIDFFEKRDKPITEFEESTFESIVEKIVVIDQHELEFHLIGGLKFKENI

SEQ ID NO: 5377 - protein, 507 aa, Unknown
  Description of Unknown: Integrase B5378 sequence
  PTHR30461:SF3,cd00338,SM00857,G3DSA:1.10.10.2600,IPR036162, PF13408,IPR025827,G3DSA:3.40.50.1390,PS51737,IPR006119, IPR038109,PF07508,IPR011109,SSF53041,PTHR30461, PS51736,Coil,PF00239
MSSVETTAVVYARYSSHGQTEQSIEGQIAAAQKYAEQHGYTIIHIYADRAMTGRNDDREEFQKMLSDTAMRQFGVILLWKIDRFGRNREEIAFNRYRCKKNGVRVERVAEDVPDGPEGVILDSVLEGMAEYYSLQLAQNVRRGQRESAKKSQTVGGCKIIGYNVNPDTKRYEVDPKTAPFVTEVFKRYANGETISEIVAWLNAQGVRTTRGGEFTVNSLHRLLKNEKYTGVYIFHDIRNEGGMPALIDRATFDKAQEMLKVNRRAPARVWSKTEYLLTDKLFCGHCGTMMVGESGHGRNGTKHNYYTCWNRKKKKTCDKKPIRQDVIEPLVLRAIGKLLENPATLENIADQVWAAYERSDTSGDTIKALDKQIADVDRALSNVMKAIEMGIINEMTKARMDELTDQKQALSAARAEAGLAGGFKLTRDMILFFLQDMAALDRSNRDCQKRLIKTFVNAIYLYDDHFDIAFNYTSNGKMVVKMQEINDTTSGEVFGRCAQSPAKRPSV

SEQ ID NO: 5378 - protein, 507 aa, Unknown
  Description of Unknown: Integrase B5379 sequence
  PTHR30461:SF3,cd00338,SM00857,G3DSA:1.10.10.2600,IPR036162, PS51737,G3DSA:3.40.50.1390,IPR006119,IPR038109,PF07508, SSF53041,IPR011109,PTHR30461,PS51736,Coil, PF00239
MRKKVAYLRKSRADIELENTTGEDTLKRHREIIKKLAKQNSVILDAYFEEVVSGETIQARPKIQELLKEVENNEIEEVYVVDVDRLARGDTEDQGRISKTFKFGNTKIVTPGKTYDPNNEFDEDFFEFGLFMSRREYKIINKRLNRGRLSSINEGKFIGSVCPYGYSKEKLKGQKGYKLIINEEEAKIVKIIFNLALSGIGASNIANHLNRIGSKPRKAEIWVSASIRDIIHNPVYYGMIKWNYRKTIKTMKNGIIYKSRPKQKEYILVEGLHEAIIDEETWKIANKNSKIKEGKSVKKDLTLQNPLAGLVECGICHRTMQRRNYRSGHIDGLICPLPHCKNVGSHLHMVENAILDSLQRYLNQYEETLASYKKDEQVHELDTNNVELIEKEIEKTKNQLNKAFDLLEQEIYDNTTFIERSKSLKIRIDELKKEKEKYSIKTKQEKIEKIKDIIPKLRNAINTYSASLPATDRNELLKSVINKVYYIKSVRGKGHEEEFELQINIKL

SEQ ID NO: 5379 - protein, 507 aa, Unknown
  Description of Unknown: Integrase B5380 sequence
  SM00857,G3DSA:1.10.10.2600,IPR036162,PF13408,IPR025827, G3DSA:3.40.50.1390,PS51737,IPR006119,IPR038109,PF07508, IPR011109,SSF53041,PTHR30461,Coil,PS51736, cd00338,PF00239
MKECIEYLRKSQFDRDFADLSIEETLAKHEQSLNEFIEKTDYTVTEVLKEVVSGETLAQRPQMMLLLDKINSGNYYGVICKDIDRLSRGNSLDSGYIMQVLKINNCKIITPEKVYDLNDDQDEQFTDLKFLFSRFELSTIKKRLNAGRIGAVKQGLWVGSHAPYGYERYKLVGEKGYSLKPIPAQAEIVRLIYDMYVNQHLGYVSIAEKLKDIDKSRTWTKVGVAGVINNPVYAGYVRYGYAKYEKVISDGKIITVKKHNDPDKTPRYKGRHEAIISKELYDKATAIRQNRIHPSVKVHRPLHDPLAGILFCAKCGKAIRVHRPAKDRKNQRERYDCVNTSCDCRSSYSDDIESAILNELRKWLKGYTVTVKAPADDITNYQFLLDNARNELTALETKQNKLCELLESGVYTTALFQQRNAILTQQIDETIECITELEKRLETQNKRVSERSQIVPTVKHILDDYDKLDTETKNKLLKQVLHRVTYYRQRGTDDVQIKIYPVLSSCK

SEQ ID NO: 5380 - protein, 507 aa, Unknown
  Description of Unknown: Integrase B5381 sequence
  PTHR30461:SF3,cd00338,SM00857,G3DSA:1.10.10.2600,IPR036162, PS51737,G3DSA:3.40.50.1390,IPR006119,IPR038109,PF07508, IPR011109,SSF53041,PTHR30461,PS51736,Coil, PF00239
MRKKVAYLRKSRADIELENTTGEDTLKRHREIIKKLAKQNSVILDTYFEEVVSGETIQARPKIQELLKEVENNEIDEVYVVDVDRLARGDTEDQGRISKTFKFGNTKIVTPGKTYDPNNEFDEDFFEFGLFMSRREYKIINKRLNRGRLSSINEGKFIGSVCPYGYSKEKLKGQKGYKLIINEEEAKIVKIIFNLALSGIGASNIANHLNRIGSKPRKAEIWVSASIRDIIHNPVYYGMIKWNYRKTIKTMKNGIIYKSRPKQKEYILVEGLHEAIIDEETWKIANNNSKIKEGKSVKKDLTLQNPLAGLVECGICHRTMQRRNYRSGHIDGLICPLPHCKNVGSHLHMVENAILDSLQRYLNQYEETLASYKKNEQVHELDTNNVELIEKEIEKTKNQLNKAFDLLEQEIYDNTTFIERSKSLKIRIDELKKEKEKYSIKTKQEKIEKIKDIIPKLRNAINTYSTSLPATDRNELLKSVINKVYYIKSVRGKGHEEEFELQINIKL

SEQ ID NO: 5381 - protein, 507 aa, Unknown
  Description of Unknown: Integrase B5382 sequence
  IPR036162,PS51737,PS00398,IPR011109,PTHR30461, PF00239,G3DSA:1.10.10.2600,IPR006119,SSF53041,cd00338, SM00857,IPR025827,IPR038109,PS51736,IPR006118, PF13408,G3DSA:3.40.50.1390,PF07508,Coil
MKRVISYIRFSSERQAKGDSLRRQSKMVTDWLKAHPEYYLDQDLSFRDLGVSGFTGKHLKGGLGDFLTAIEKGLVKAGDTLLIESLDRLSRQNVDRASELLRNILRSGVDVVTLSDGEHYTRESLKDPLALIKSILIMQRSHEESLRKSERIQAAWNRKKELISEGIKISKRCPAWLRLNDDRKTFSVIPEKVETVKRCFQLRLEGKSIWEIVRTLNAEGHRSMNQYKPGKFGQTSVQDLLKNRSVIGYFTPKGCEEISGYYPAIIDETTFYKVQQLSHSRYGKRSVSDKPLSVNLFKGVIRCSECGHALIITGFSDTRSGIYRCPLRNENRCSAKGLSRKQTDGTLLTLLSRLDRFDSDTTNIIDMLRLHREHISSNIEKLVQLSLEIEDLNAITSKLKQLKGELSQVDADIEKETQRLKSIDVGCLSDCDLTTKAGRIEAQLIIKSAVKEVVLNTAKRRCKVTFHNGKTITLSITENPSEDVTEAIQSLSEVTERGLIDVDEVII

SEQ ID NO: 5382 - protein, 507 aa, Unknown
  Description of Unknown: Integrase B5383 sequence
  cd03768,PTHR30461:SF3,SM00857,IPR036162,PF13408, IPR025827,G3DSA:3.40.50.1390,IPR006119,PF07508,IPR011109, SSF53041,PTHR30461,PS51736,Coil,PF00239
MSRIAIYSRKSKDTDTGESIKNQIQMCKDYFLRKDANHTFEIFQDEGFSGGNTNRPEFKRMMLLAKNGQFDIIACYKVDRIGRNIVDFMNTFSELEKNNITLVSVTEGFDPSTPAGRMMMTMIAGFAEMERMNIAQRIKDNMESLAKMGRWSGGTCPTGYRSIKISNSGKYAMYLELIPEWKEKLLDIFKYAADGKTCSSIGKLVSMSSKSIANIISNPVYCKSDLPSKKFLESLGYDVYGDCNGNGYIAYNRRPKAKNGKKLFNSKNMFVAVSTHEAPIHSSEWIKANLNIKSRAQEKRPRISQYSWLAHLVKCKCGSGMYLTPGRFRKDGSRYYYFCCSARKYNKSCSAKRINANHLEEDILEILEAVSKNKTLLKSYISPPSNNEIKSKIIKIKNEIKKNNKIMESLASKLALLEDYAASVIIEKMNSISLSIENLNTELLQLQREDLLNNLDELNEDVLFNSIQEMLTNWDFLDMEEKQDCVKNIINEIHLLDNSKFKIKFNL

SEQ ID NO: 5383 - protein, 507 aa, Unknown
  Description of Unknown: Integrase B5384 sequence
  IPR036162,PS51737,PS00398,IPR011109, PTHR30461,PF00239,G3DSA:1.10.10.2600,IPR006119, SSF53041,cd00338,SM00857,IPR025827,IPR038109,PS51736 ,IPR006118,PF13408,G3DSA:3.40.50.1390,PF07508,Coil
MKRAISYIRFSSEKQSRGDSLRRQSKMVNDWLKAHPEYYLDQDLSFRDLGVSGFTGKHLKGGLGDFLTAIEKGLVKAGDTLLIESLDRLSRQDVDQASELLRNILRSGVDVVTLSDGEHYTKESLKDPLALIKSILIMQRSHEESLRKSERIQAAWDAKKEAAKAGIKIYKRCPAWLKLNDDRKTFSVIPEKVETVKRCFQLRLEGKSIWEIVRTLNDEGHQTLNQYKAGKFGQTSVQDLLKNRSVIGYFTPKGCEEIAGYFPPIIPETDFYKVQQLSYSRYGRKPASDKPLSVNLFKGVIRCSECGHALIITGFSDTRNGIYRCPLRNENRCSAKGLSRKQTDGTLLALLSRIDRFDSDMTNTIDTLKLHREHISSNIEKLVQLSLEIEDLSAITSKLKQLKGELSQVDADIEKETQRLKSIDVGCLSDCDLTTKAGRIEAQLIIKSAVKEVILNTAKRRCKVTFHNSKSITLPITETPSEDVTEAIQSLSEVTERGLIDVDEVII

SEQ ID NO: 5384 - protein, 507 aa, Unknown
  Description of Unknown: Integrase B5385 sequence
  cd00338,SM00857,G3DSA:1.10.10.2600,IPR036162,PS51737, SSF90257,G3DSA:3.40.50.1390,IPR006119,IPR038109,PF07508, SSF53041,IPR011109,PTHR30461,PS51736,Coil, PF00239
MPYCMYLRKSRKDSDHPGQADEDVLARHEMLLRETAKRLGLNVTAIYREVVSGDSIAGRPVMQQLLREVSAGDWDGVLVVEIERLARGDTQDQGMVAKAFQYSGTKIVTPMKVYDPNDEFDEEYFEFGLYMSRRELKTINRRLIRGREASAKQGKYIGGVPPFGYDKQKLPDQKGYTLVPNADADTVRLIYDLYLSSSEMGTGDLATVLNNSGYRTQKNHFWTATNILKILSNPVYMGKIKMGYRPKVKIFEDGIQKVIRPVKAFGEYTLIDGLHDGLISEERWYQAAEKVKSSALVNTPKKYTPQNPFSGLMKCQLCGYAVKRQTNARGGSIYCVTPGCPCQYTDISELELQLIASLGQILSEFQKTESERTVIHHEITTIEQQLTQLKREQERLQRQLDNLFDLLEQGIYDKSTFTSRRTHLEQQLAETEETLAQLTTNRDEIQHKQARAAAMIPRIQSVLDTYLYLDSALEKNRMLKTILRRIDYLRLDRDTPPSLTLYLNWED

SEQ ID NO: 5385 - protein, 507 aa, Unknown
  Description of Unknown: Integrase B5386 sequence
  PTHR30461:SF3,cd00338,SM00857,G3DSA:1.10.10.2600,IPR036162, PF13408,PS51737,IPR025827,G3DSA:3.40.50.1390,IPR006119, IPR038109,PF07508,SSF53041,IPR011109,PTHR30461, PS51736,Coil,PF00239
MNTKQSMGVYCVRKGVYRMEQYCIYLRKSRADAEAEARGEGETLARHEHALLGLAKSQKLAIVKIYREIVSGDSIAARPQMQQMLQDVTDKKYTGVLVMEIERLARGDTIDQGVVAQAFRESNTKIVTPIKTYDPSNEFDEEYFEFSLFMSRREYKTIKRRMQAGRIASIKEGNYIGTNPPYGYKKIQPEPKVKTLEIVPDEADAVRMMFDMYLSGMGAKAIATRLNQLQIPPRKSPAWEPVSIRKILQSPIYAGKIEWHTKKDGTILADGLHPEIISWEEFQQVQERRKRKTSPVPTGYTTQNYYHNILFCANCGHQMKRRPAPNGSSHMLCVRQQCRGKVVSAPTSRVDEAVLEAIRYRIQELKLSKEKIEKEDYHTKENEEKQRTRLKKALEKLQKQKEKLHTLLETDVYSVETFLERSKVLEQQKLDLETELAELNDAQKEVHLSPKQALLWLQHTLDHFETANPEQKNKMLQRVIKRIEYSKTERMCYRKQTSDLALHVEFL

SEQ ID NO: 5386 - protein, 507 aa, Unknown
  Description of Unknown: Integrase B5387 sequence
  cd03768,PTHR30461:SF3,SM00857,IPR036162,PF13408, IPR025827,G3DSA:3.40.50.1390,IPR006119,PF07508,SSF53041, IPR011109,PTHR30461,PS51736,Coil,PF00239
MSRIAIYSRKSKETDTGESIKNQIQICKDYFLRKDANHTFEIFQDEGFSGGNTNRPEFKRMMLLAKNGQFDIIACYKVDRIGRNIVDFMNTFSELEKNNITLVSVTEGFDPSTPAGRMMMTMIAGFAEMERMNIAQRIKDNMESLAKMGRWSGGTCPTGYRSIKISNSGKYAMYLELIPEWKEKLLDIFKYAADGKTCSSIGKLVSMSSKSIANIISNPVYCKSDLPSKKYLESLGYDVYGECNGNGYIAYNRRPKAKNGKKLFNSKNMFVAVSTHEAPIHSSEWIKANLNIKARAQEKRPRISQYSWLAHLVKCKCGSGMYLTPGRFRKDGSRNYYFCCSSRKYNKSCSAKRINANHLEEDILEILEAFSKNKTLLKSYISPPSNNEIKSKIIKIKSEIKKNNKIMESLASKLALLEDYAASVIIEKMNSISLSIENLNTELLQLQREDLLNNLDEFNEDILFNSIQEMLTNWDFLDMEEKQDYVKNIITEIDLLDNGKFKIKFNL

SEQ ID NO: 5387 - protein, 507 aa, Unknown
  Description of Unknown: Integrase B5388 sequence
  IPR036162,PS51737,PS00398,IPR011109, PTHR30461,PF00239,G3DSA:1.10.10.2600,IPR006119, SSF53041,cd00338,SM00857,IPR025827,IPR038109,PS51736 ,IPR006118,PF13408,G3DSA:3.40.50.1390,PF07508,Coil
MKRVISYIRFSSERQAKGDSLRRQSKMVNDWLKAHPEYYLDQDLSFRDLGVSGFTGKHLKGGLGDFLTAIEKGLVKAGDTLLIESLDRLSRQDVDQASELLRNILRSGVDVVTLSDGEHYTKESLRDPLSLIKSILIMQRAHEESLRKAERIQAAWDAKKEAAKAGIKISRRCPAWLKLNDDRKSFSVIPEKVETVKRCFQLRLEGKSIWEIVRTLNAEGHQTLNQYKAGKFGQTSVQDLLKNRSVIGYFTPKGCEEISGYYPAIIDETTFYKVQQLSYARYGRKPASDKPLSVNLFKGVIRCSECGHALIITGFSDTRSGIYRCPLRNENRCNAKGLSRKQTDSTLLALLSRLDRFDSDMTNTVDTLKLHREHISSNIEKLVQLSLEIEDLSAITSKLKQLKGELSQVDADIEKETQRLKSIDVGCLSDCDLTTKAGRIEAQLIIKSAVKEVVLNTAKRRCKVTFHNGKVIDLPITENPSEDVTEAIQSLSEVTERGLIDVDEVII

SEQ ID NO: 5388 - protein, 507 aa, Unknown
  Description of Unknown: Integrase B5389 sequence
  SM00857,G3DSA:1.10.10.2600,IPR036162,PS51737,G3DSA:3.40.50.1390, IPR006119,IPR038109,PF07508,IPR011109,SSF53041, PF00239,PTHR30461,PS51736,Coil,cd00338
MSYCIYLRKSRADLELEAMGEMETLARHQNILIDLAKRNHLTITKIYKEIVSGETIEARPEIQEMLNEVEDGKWDGVLVMEVERLARGDTIDQGIVARAFKRGKAKIVTPNKTYDPDNEFDEEYFEFGLFMSRREYKTINRRIQRGRIAAVQEGKFISSVPPYGYDKVKIVNGSGYTLKPNNESDVVKKIFSLYLSGIGMQRICGQLDQLCIKPRYRNTWSKSTVSDILTNPVYTGKIRWQYRPYEKSGGNYASRRKSNDCILVKGLHPAIINDEDFEKAQLIMKKHYRAPVKSNLSLKNSLSGLGYCKKCGTMLTRLGASSKNKVDKIICPNRNCNTVSAPLDMVEKTIVRELQDWLHDYIVRGKQEGVLPDTKILEKSLSKLKSDLSKIEKQISKTYDLLEQGVYTTEVFQSRHKVLEENKSDLLQKINNISGKLNDNRLMTLEKLEQTQHILDAYFLLETPEEKNSLLKSILDRFEYQKDERNTKGNLYNNNFTVDIFPSLPQI

SEQ ID NO: 5389 - protein, 507 aa, Unknown
  Description of Unknown: Integrase B5390 sequence
  PTHR30461:SF3,SM00857,G3DSA:1.10.10.2600,IPR036162,PF13408, PS51737,G3DSA:3.40.50.1390,IPR025827,IPR006119,IPR038109, PF07508,IPR011109,SSF53041,PF00239, PTHR30461,PS51736,Coil,cd00338
MKGVIYARYSPGPNQTDQSIEGQLRECKQFAEENNITIVNTYADKKQTGRNDNRVQFQKMLQDSKKKQFDYVIVWKIDRFGRNREEIAKNKAILRMSGVKVLFAKEHIPDGPEGIILESVLEGLAEYYSANLSQNIIRGMRESAMKCKCNGSGLPLGYNVDKEHNYIRNDEEATLIKMIFKMYDDGSKINDICKYLNAHNYKTKRNSKFTHTGVSRILHNRQYIGEYRWKDIITPNGMPRIIDDELFERVAKRLERTKRAPSASRGDVKFLLTGKLFCGYCKSTMIGDSGTGKSGRKFYYYNCRIKKNKHTCKKKTVRKDWLEYEVARITANIVLQDKIIDYVSDKVVEIQKKEHEDKSNLNYYTVKLKETNSAIKNIMKVIESGIFTESMRERLLKLEDERSTYETEIAKEEIMRPTITKEQVVFFLKQFKNGNIEDKDYQAKLIDIFVNKVILYDDKIIITYNYSGEHNETSAKIIEEAAEELINEQEKCSDKLLSSPPRYDKSA

SEQ ID NO: 5390 - protein, 507 aa, Unknown
  Description of Unknown: Integrase B5391 sequence
  PTHR30461:SF3,SM00857,G3DSA:1.10.10.2600,IPR036162,PF13408, IPR025827,PS51737,G3DSA:3.40.50.1390,IPR006119,IPR038109, PF07508,SSF53041,IPR011109,PTHR30461,Coil, PS51736,cd00338,PF00239
MPEALNAVIYARYSSDRQTEQSIEGQLRECYAFAKANDIAVIDTYIDRAISGKTDNRPAFQKMIEDSAKRQFQAVIVYRLDRFTRNRYDSAIYKARLKKNGVKVLSAMENLNGSPESIIMESLLEGMAEYYSVELSQKITRGMRENALKGKALGGQRVLGYKVNSDCYFEIDETTAPVVVDIFKLYSSGKTVKEICDILNARGVKTARGGAFNKNSLHTILTNKKYIGIYKTKYGEIVGGIPAIIDKELFEMVALRMEQNKKAPARAKAEINYLLSTKLFCGKCRSAMVGESGTSKTGKKYYYYACVKKKREKACDKSNVKKDWIEDLVIQRTVTDILKDDVIEKIADRLVELQKAEAAESGTMLYLENSLAEIQVSIKNIMTAIEKGIITESTKTRLTELEDEKRNVEIEIAKESIARRIISREQIIYWISSFKDGDITSEKYRQQLIDTFVHAVFVYDDKIVITYNYSGENNTATISDLDLSSPPNRYWTNTYFFSGGFAVKCSL

SEQ ID NO: 5391 - protein, 507 aa, Unknown
  Description of Unknown: Integrase B5392 sequence
  cd00338,SM00857,G3DSA:1.10.10.2600,IPR036162,PF13408, PS51737,G3DSA:3.40.50.1390,IPR025827,IPR006119,IPR038109, PF07508,SSF53041,IPR011109,PTHR30461,PS51736, Coil,PF00239
MYEDIKTACLYVRFSSHNQTEQSIEGQTRVCRDFCKRHNIRIVEIYADRATSASKDIEKRVQFLKMIKDSEKGLFDAVIVYKLDRFARSRYDSATYKYRLKRNGVQLISATENISNDPEGIILESVLEGMAEFYSAELSQKINRGMRESAYKHNSIGGAVPLGYKIEDKKLVIDPKTAPLVKEAFEKYADGETVAEICRQFNARGYKTSKGTAFGKSSFTKIFRNERYIGVYTFHDYRAEGAVPAIIDKDLWDRVQLRVGKIKNAPARNKAKVVYLLSGKLFCGHCGSRMNGNCNASNYCYYQCYGKKNGHVDCNKKNIRKEFIERLVAQDALSLLTDEYIEQIAAIACEKNQHEIELDSALPTIRDRIHQVDLSLNNLLKAIESGSAPDMLVKRMGELEKEKKDLQAQAKKESEDIVELDKAQVIYWLEQFRGGSIEDEEFCRMLIDLFVNSVTVWDEDDDTYKVTVAYNLTSLPTKTYRLSKGGTLSDFASNAPARKSRKTLVHN

SEQ ID NO: 5392 - protein, 507 aa, Unknown
  Description of Unknown: Integrase B5393 sequence
  PTHR30461:SF3,SM00857,G3DSA:1.10.10.2600,IPR036162,PF13408, IPR025827,G3DSA:3.40.50.1390,PS51737,IPR006119,IPR038109, PF07508,IPR011109,SSF53041,PTHR30461,Coil, PS51736,cd00338,PF00239
MKGWYFFMANGVIYARYSSNHQREESIEGQLRECNAFAKAQNIDIINTYIDRALSAKTDDRPGFLKMIADSSKQAFDYVIVYQLDRFARNRYDSAFYKMKLKKNGVKVLSAKENITNDPAGIILESVLEGMAEYYSVELAQKVKRGMTENALAARWASGRIPFGYKVDAQKHLIPDPVAGRAVTAIFIRFARGEKIKSIVDYLNSLNYKTSLRNKFNRSSFQRMIVNPVYIGTFRWNDIVLENAVPPLIDQLTFETCQRRIAAKKRDKNAVNRKSDMFLLTTKLKCAECGGNMVGISGTSRNSQKYYYYGCYNTRRHNTACKIGYINRDELEDAVFEAAMDVLSSDENIDIIAEQAFKISQQQEENPRIKELEMQKKETEKKLANCVKALESGLFSETLANAIKKNEDELKSINLALAHENLSSASFEITKQHIAFFLSQFRHMEPTKAREAVLNTLLREAVIKKESDSNYLVTVRFNYTATPTLSDTKEVSVRIMNDWWRQAGSNR

SEQ ID NO: 5393 - protein, 507 aa, Unknown
  Description of Unknown: Integrase B5394 sequence
  PTHR30461:SF3,SM00857,G3DSA:1.10.10.2600,IPR036162,PF13408, PS51737,G3DSA:3.40.50.1390,IPR025827,IPR006119,IPR038109, PF07508,SSF53041,IPR011109,PTHR30461,Coil, PS51736,cd00338,PF00239
MPEALNAVIYARYSSDRQTEQSIEGQLRECYAFAKANDIAVIDTYIDRAISGKTDNRPAFQKMIEDSAKRQFQAVIVYRLDRFTRNRYDSAIYKARLKKNGVKVLSAMENLNGSPESIIMESLLEGMAEYYSVELSQKITRGMRENALKGKALGGQRVLGYKVNSDCYFEIDETTAPVVVDIFKLYSSGKTVKEICDILNARGVKTARGGAFNKNSLHTILTNKKYIGIYKTKYGEIVGGIPAIIDKELFEMVALRMEQNKKAPARAKAEINYLLSTKLFCGKCRSAMVGESGTSKTGKKYYYYACVKKKREKACDKSNVKKDWIEDLVIQRTVTDILKDDVIEKIADRLVELQKAEAAESGTMLYLENSLAEIQVSIKNIMTAIEKGIITESTKTRLTELEDEKRNVEIEIAKESIARRIISREQIIYWISSFKDGDITSEKYCQQLIDTFVHAVFVYDDKIVITYNYSGENNTATISDLDLSSPPNRYWTNTYFFSGGFAVKCSL

SEQ ID NO: 5394 - protein, 507 aa, Unknown
  Description of Unknown: Integrase B5395 sequence
  IPR036162,PS51737,PS00398,IPR011109,PTHR30461, PF00239,G3DSA:1.10.10.2600,IPR006119,SSF53041,cd00338, SM00857,IPR025827,IPR038109,PS51736,IPR006118, PF13408,G3DSA:3.40.50.1390,PF07508,Coil
MKRAISYIRFSSEKQSRGDSLRRQAKMVTDWLKAHPEYYLDESLTFRDLGVSGFTGKHLKGGLGDFLTAIEKGLVKAGDTLLIESLDRLSRQDVDQASELLRNILRSGVDVVTLSDGEHYTRESLKDPLALIKSILIMQRAHEESLRKAERIQAAWDAKKEAAKAGIKISRRCPAWLKLNDDRKSFSVIPEKVETVKRCFQLRLEGKSIWEIVRTLNAEGHQTLNQYKAGKFGQTSVQDLLKNRSVIGYFTPKGCEEISGYYPAIIDETTFYKVQQLSYARYGRKPASDKPMAVNLFKGVIRCSECGHALIITGFSDTRNGIYRCPLRNENRCSAKGLSRKQTDGTLLALLSRLDRFDSDMTNTIDTLKLHREHISSNIEKLVQLSLEIEDLSAITSKLRQLKNELSQVDADIEKETQRLKSIDVACLSDCDLTTKAGRIEAQLIIKSAVKEVVLNTAKRRCKVTFHNGKAITLPITENPSDNVTEAIQSLSEVTERGLIDVDEVII

SEQ ID NO: 5395 - protein, 507 aa, Unknown
  Description of Unknown: Integrase B5396 sequence
  cd00338,SM00857,G3DSA:1.10.10.2600,IPR036162,PF13408, PS51737,IPR025827,G3DSA:3.40.50.1390,IPR006119,IPR038109, PF07508,IPR011109,SSF53041,PTHR30461,PS51736, Coil,PF00239
MQKNTTVETTTKAVIYARYSSDRQREESIEGQLRVCEDFAKRNGMTILHVYADRALSGRSDQRPEFQMMIQAAATQAFDTVLVYKLNRFARNRYDSAKYKHKLKKYGVKVVSAMENIANDPSGILLESVIEGMAEYYSAELAENVMRGMTENALECKWPGGTVPLGYKLDAAHHLIIDEPAAKTVRWIYQMALEGRQPSSIIRELNAAGCRTAFGRPFGRTSLNTILKNERYIGAFVWNDIKKPNAIPAIVNPEDWQKVQEITKAKKKCIAKSRGENYLLTGRLFCGQCGGSMVGTAGTSKMQRVYHYYDCGNHLKKKGCTTKAIRADKLEDIICNTTTQLLSNQEAISAIAKQAISAQKEQGPSLVLQSLQNQRTEISRKLQNCIKAVEKGLISQTVTNHIQDYEKQLQTLNDDIRKEELMNQVPRLTEKHIEFFFWSISQQIKKADKYKSILLSSLVRSVIIYGDFIEIQYNYKKELPILQNPVKIKSSYLNKMVIHPGFEPGTP

SEQ ID NO: 5396 - protein, 507 aa, Unknown
  Description of Unknown: Integrase B5397 sequence
  PTHR30461:SF3,SM00857,G3DSA:1.10.10.2600,IPR036162,PS51737, G3DSA:3.40.50.1390,IPR006119,IPR038109,PF07508,IPR011109, SSF53041,PF00239,PTHR30461,PS51736,Coil, cd00338
MRKKVAYLRKSRADIELENTTGEDTLKRHREIIKKLAKQNSVILDVFFEEVVSGETIQARPKIQELLKEVENNEIDEVYVVDVDRLARGDTEDQGRISKTFKFGNTKIVTPGKTYDPNNEFDEDFFEFGLFMSRREYKIINKRLNRGRLSSINEGKFIGSVCPYGYSKEKLKGQKGYKLIINEEEAKIVKIIFNLALSGIGASNIANHLNRIGSKPRKAEIWVSASIRDIIHNPVYYGMIKWNYRKTIKTMKNGIIYKSRPKQKKYILVEGLHEAIIDEETWKIANKNSKIKEGKSVKKDLTLQNPLAGLVECGICHRTMQRRNYRSGHIDGLICPLPHCKNVGSHLHMVENAILDSLQRYLNQYEETLASYKKDEQVHELDTNNVELIEKEIEKTKNQLNKAFDLLEQEIYDNTTFIERSKSLKIRIDELKKEKEKYSIKTKQEKIEKIKDIIPKLRNAINTYSASLPATDRNELLKSVINKVYYIKSVRGKGHEEEFELQINIKL

SEQ ID NO: 5397 - protein, 507 aa, Unknown
  Description of Unknown: Integrase B5398 sequence
  PTHR30461:SF3,SM00857,G3DSA:1.10.10.2600,IPR036162,PF13408, IPR025827,G3DSA:3.40.50.1390,PS51737,IPR006119,IPR038109, PF07508,SSF53041,IPR011109,PTHR30461,Coil, PS51736,cd00338,PF00239
MNTVIYARYSAGPRQTDQSIEGQLRVCTDFCKQRGLTVIDTYCDRHISGRTDERPEFQRLITDAKRKKFEAVVVYKTDRFARNKYDSAVYKRELKRNGIQIFYAAEAIPDGPEGIILESLMEGLAEYYSAELAQKIKRGMHESALKCQSTGSGRPLGYRVDEQKHFQIDPESAQTVQTIFEQYIKGESNAAICELLNSRGLRTAQGKPFNKNSINRIIKNRKYIGEYRYHDIVVEGGMPAIISKDTFNLAQAEMERRRTRKAPKSPKAEYLLAGRLFCGHCKGPMQGVSGTGKSGNKWYYYYCGNTRGENKTCDKKQVSRDRLERAVVDFTVRYILQEEVLEELARKVHAAQERQNDTASEIAFYEKKLADNKKSIANVLRAIESGAMTQTLPARLQELENEQAVILGEISFLKGKRLAFTEDQIFFALMKHLEPYPGESEQDYRRRIISDFVSEVYLYDDRLLIYFNISSEDGKLKSTDLSNIEGGEFDEGLVSSTITRKDELFIL

SEQ ID NO: 5398 - protein, 507 aa, Unknown
  Description of Unknown: Integrase B5399 sequence
  PTHR30461:SF3,SM00857,G3DSA:1.10.10.2600,IPR036162,PF13408, PS51737,IPR025827,G3DSA:3.40.50.1390,IPR006119,IPR038109, PF07508,IPR011109,SSF53041,PTHR30461,Coil, PS51736,cd00338,PF00239
MNAVIYARYSSDNQREESIEGQLRECREYAERNGMNVVATYIDRALSAKTDDRPQFQQMIRDSNTHKFEVVLVWKLDRFSRNRYDSANYKRKLAQNHVRVVSATEPISNTPEGIMLESLLEGMAEYYSAELSEKVSRGHKENALKAKFNGGTIPLGYRIDENQHYQIDPATAPLVLETFERYADGECVRKIVESFNARGLRTSRGAPFSINSFQAILKNRRYLGEYRYKDTVIPDAIPAIITPEVFEKVQRRCEQNKKAPAHTKTDVNYMLTTKLFCGKCGAMMAGESGKSHTGAWHYYYKCGNHKRHGRSVCDLKAVRKEPLERFVVKVAIEKVLKTDTLELLAQKLLEYQNKENTRLPVLQAGLKDISKRINNIVSAIEQGIFTPATKQRLDELEEQRKELEASILQEQIAKPLLTREQILFWFERFRQGDPSDPAYQQKIIDCFVNSVYIFDDHLVINFNYRDGDKLVSLQEVKSSFLGGNRSPIFKPHCIAKNGLTVRFFFIL

SEQ ID NO: 5399 - protein, 507 aa, Unknown
  Description of Unknown: Integrase B5400 sequence
  IPR036162,PS51737,PS00398,IPR011109,PTHR30461, PF00239,G3DSA:1.10.10.2600,IPR006119,SSF53041,cd00338, SM00857,IPR025827,IPR038109,PS51736,IPR006118, PF13408,G3DSA:3.40.50.1390,PF07508,Coil
MKRVISYIRFSSERQAKGDSLRRQSKMVNDWLKAHPEYYLDQDLSFRDLGVSGFTGKHLKGGLGDFLTAIEKGLVKAGDTLLIESLDRLSRQDVDQASELLRNILRSGVDVVTLSDGEHYTRESLKDPLALIKSILIMQRSHEESLRKSERIQAAWNRKKELISEGIKISKRCPAWLKLNDDRKSFSVIPEKVETVKRCFQLRLEGKSIWEIVRTLNDEGHQTLNQYKAGSFGQTSVQDLLKNRSVIGYFTPKGCEEIAGYYPAIIDETTFYKVQQLSYSRYGRKPASDKPMAVNLFKGVIRCSECGHALIITGFSDTRSGIYRCPLRNENRCSAKGLSRKQTDGTLLTLLSRLDRFDSDMTNTIDTLKLHREHISSNIEKLVQLSLEIEDLSAITIKLKQLKGELSQVDADIEKETQRLKSIDVGCLSDCDLTTKAGRIEAQLIIKSAVKEVVLNTAKRRCKVSFHNGKVIDLSITENPSEDVTEAIQSLSEVTERGLIDVDEVII

SEQ ID NO: 5400 - protein, 507 aa, Unknown
  Description of Unknown: Integrase B5401 sequence
  PTHR30461:SF3,SM00857,G3DSA:1.10.10.2600,IPR036162,PS51737, G3DSA:3.40.50.1390,IPR006119,IPR038109,PF07508,SSF53041, IPR011109,PTHR30461,Coil,PS51736,cd00338, PF00239
MPNILNNNVVYDDNTKQLLYQSEDENGNTRVSTEMQPQSALDSQEAVACEFAKCNNIDIIKVFSDKGISGTTDNRPNFQEMIKYVENQNNDIQLIIVYKLDRLFRQEQLFNVYEYRLNKCGVFVLSATEETYKNDIGSRVLKAVTLINNEFEAKKIRENVKRGQTYTAKQGKTNGGIAPLGYDINADGKYVVNPEEAKIVKKIFEMKSNGVTYEQMADTLNKQNYRTKIGRKFTKNSFHEILTNPKYKGVFVYNRSALATEYNKSPNRHKYKSADNIITVKGKIERIVSESLWDSVQPKKNLSGKTNKGKYLLSGLVKCPICHNSYHVDTKGNVQYLRHNKNKTDKCINSIPMDNVKEKVILKVINKIFSKYNVEYFTNNFDTISQTQTASIEQHIKKLKFKINALKVKYDNLLNTLSETTDENIKTSITDKLTSINTEISTYTNSIEKLKNSIPQPPTKDNIRTSKKKLKAFLTNPNNILDSKKLIHSIIDSVYITENDIKVIFKE

SEQ ID NO: 5401 - protein, 507 aa, Unknown
  Description of Unknown: Integrase B5402 sequence
  PTHR30461:SF3,cd00338,SM00857,G3DSA:1.10.10.2600,IPR036162, PF13408,IPR025827,PS51737,G3DSA:3.40.50.1390,IPR006119, IPR038109,PF07508,IPR011109,SSF53041,PTHR30461, PS51736,Coil,PF00239
MYEEIKEVALYVRYSSANQTEQSIEGQIRVCTDFCQRHGFRIVEIYADRATSASKDIEKRVEFLRMIKDSEKKNFQAVIVYKLDRFARSRYDSANYKYRLRKNGVQLISATENISNDPEGIILESVLEGMAEFYSAELSQKINRGMKESAYKHNSIGGVIPLGYKSEGKKLVIDEETAPIVRQAFEMYAEGHSVAEICRLFNARGYKTSKGTRFGKSSFSRMFHNERYIGVYQYHDYRAEDAIPAIIDKKLFYQVQARMKSNNRSPGQHKAKHFYLLSGKLYCGHCGSKMNASSNTTSGYTYYECYGKKNLHVDCHKRNLRQDFIEDVVIRDAMSLLTDENIEQIAEVAIRTNLHDVEGNTDIPAIKDRLHETTLSLSNLVKAIESGLAPETLVKRMMELEKDKKTLEEELKREEKKVIYLDKEQVIFWLEQFKGGDIEDDDFRRLLVNLFVNSVTVWDEEDDHFKVTIAYNLSSLNEKTYHLKRGGRQSDFNLNAPKSIPDNFLSL

SEQ ID NO: 5402 - protein, 507 aa, Unknown
  Description of Unknown: Integrase B5403 sequence
  IPR036162,PS51737,PS00398,IPR011109,PTHR30461, PF00239,G3DSA:1.10.10.2600,IPR006119,SSF53041,cd00338, SM00857,IPR025827,IPR038109,PS51736,IPR006118, PF13408,G3DSA:3.40.50.1390,PF07508,Coil
MKRAISYIRFSSEKQSRGDSLRRQSKMVNDWLKAQPEYYLDQDLSFRDLGVSGFTGKHLKGGLGDFLTAIEKGLVKAGDTLLIESLDRLSRQAVDRASELLRNILRSGVDVVTLSDGEHYTKESLRDPLSLIKSILIMQRAHEESLRKAERIQAAWDAKKEAAKAGIKISRRCPAWLRLNDDRKSFSVIPEKVETVKRCFQLRLEGKSIWAIVRTLNDEGHQTLNQYKAGKFGQTSVQDLLKNRSVIGYFTPKGCEEIAGYYPAIIDETTFYKVQQLSHSRYGKRSVSDKPLSVNLFKGVIRCSECGHALIITGFSDTRNGIYRCPLRNENRCSAKGLSRKQTDGTLLTLLSRLDRFDSDTTNTIDMLRLHREHISSNIEKLVQLSLEIEDLSAITIKLKQLKGELSQVDADIEKETQRLKSIDVGCLSDCDLTTKAGRIEAQLIIKSAVKEVVLNTAKRRCKVTFHNGKSITLSITENPSEDVTEAIQSLSEVTERGLIDVDVVEI

SEQ ID NO: 5403 - protein, 506 aa, Unknown
  Description of Unknown: Integrase B5404 sequence
  PTHR30461:SF3,cd00338,SM00857,G3DSA:1.10.10.2600,IPR036162, PS51737,G3DSA:3.40.50.1390,IPR006119,IPR038109,PF07508, IPR011109,SSF53041,PTHR30461,PS51736,Coil, PF00239
MKVCMYLRKSRQDEELEKRENTDTLARHRSTLLEVAKKQHLDIIEVHEEIVSGGSIASRPKMLKLLEEVRNNMYDAVLCMDLDRLGRGGMQDQGLILDTFKETNTLIVTPDKTYDLNNELDEEMTEFKSFFARRELKMITKRMQRGRIKSIEEGKFIASNAPFGYKFEYDREGKRLLIIDEDKAAIVKEIFALYISNYGSYKIKVYLDTIGVKTNSGKPFSEQAIRRILKNSIYCGYVSWNKVKRKGTKSIVNSKDKIIYAKGRHQAIISEDMFNLAQNILEGNQVPSVSQNKKMINPLAGLIKCACCNHTMIVSKSTYKNNDIVLFLKCAHCNKNSSSKLESVENTILGYMQQFLNEYQNEILKKDISDNNNDRISNLKHTLSLLEKETIELQKQKNKLHDFLERGVYDIDTYLERTNVLRVKTEKNETAINNLKELIEKEMKIDLNYSELIPRVEKIINSYKNTQNILDKNILLKSVIEEVIYYKEKGIRNGKFELDIKLRLPI

SEQ ID NO: 5404 - protein, 506 aa, Unknown
  Description of Unknown: Integrase B5405 sequence
  cd00338,SM00857,G3DSA:1.10.10.2600,IPR036162,PF13408, PS51737,IPR025827,G3DSA:3.40.50.1390,IPR006119,IPR038109, PF07508,IPR011109,SSF53041,PTHR30461,PS51736, Coil,PF00239
MYGMYLRKSRSDDPNEDINDTLAKHEKILFDLADSLNINRKEIMQFKEVVSGENIQNRPEMKKLLEYVMEGVLEGVLVVDSQRLARGDTVDQGTIIRAFSINNTKIITPMKTIDPQNEYDQEYFEFDLFMGRREYKMITRRMQRGRHIAAQEGYYVGSIAPYSYSRIKLEKGYSLEIYEEENIVFNIMKKKALEDEGSTNISNHLNELGYKPRKGEYWTKSAVEAILLNETNLGLIKWNSRKEVKVFKDGKIVKTRPRNPNYELYPGKHPAIMTQDEYDRIKFLMKKRSHPVKKDKTLQNPLAGLIVCGFCNHKMARRPYKNGRVETILCTTSRCKNVASDIHVVEQRIIDTLKDTLKNYTNYVNNYSVSVNKTYDDNKKLQLEECDKELEKLNKQIIKACEMLELGAYTVELFKERKNTLENKINTVNKRKDILAKETEAMKIEQYKKAIPQLQNAIDLYWKSSTEEKNKILKSIIDKCIYKKEKGGRWDPDAIKQFKLEIYLKV

SEQ ID NO: 5405 - protein, 506 aa, Unknown
  Description of Unknown: Integrase B5406 sequence
  cd00338,SM00857,G3DSA:1.10.10.2600,IPR036162,PF13408, IPR025827,G3DSA:3.40.50.1390,PS51737,IPR006119,IPR038109, PF07508,SSF53041,IPR011109,PTHR30461,PS51736, Coil,PF00239
MNAVIYARYSSDKQTEQSIEGQLREGYAYAERAGMTIVGAYIDRAISGISDQRPDFQRMIADSAKRQFEAVIVWKLDRFARNRYDSAIYKSKLKKNGVRVFSVTEGIGDGDESIILEAVLEAMAEMYSKQLGQNAARGMRETARKGLCTGGQIPLGYVVGEDHKLHIDSKTAPAVQLIYTLFADGKTKTQIAKELNARGFRTKNGKLYTSNSFFRILTNPMYYGDYTYKGDIPRECPAIISRALYDKCQERNEATKRSRGMKTSEVEWLLRGKLFCGHCGTQMTGDSGTGRANEKHYYYTCHKRKRYKDCDKKSEKKEQLERAVCQKTVEYVLREDRIGYIAERVVEQYEKEFDASIIKEKEMSLVKLDAELDKCAESLMHTTVRSVVDRINARAKELEAAKSELEHELAQLRITSKARITVDEIITFLRGFCSGDVEDIQFRRKIVDTFINAVYVFDDKYVVYYNVRDCKQVTYSDMLASIHAPSDMSAHGSDCLLYGEPLLNVP

SEQ ID NO: 5406 - protein, 506 aa, Unknown
  Description of Unknown: Integrase B5407 sequence
  cd00338,SM00857,G3DSA:1.10.10.2600,IPR036162,PF13408, PS51737,IPR025827,G3DSA:3.40.50.1390,IPR006119,IPR038109, PF07508,IPR011109,SSF53041,PTHR30461,PS51736, Coil,PF00239
MYGMYLRKSRSDDPNEDINDTLAKHEKILFDLADSLNINRKEIMQFKEVVSGENIQNRPEMKKLLEYVMEGVLEGVLVVDSQRLARGDTVDQGTIIRAFSINNTKIITPMKTIDPQNEYDQEYFEFDLFMGRREYKMITRRMQRGRHIAAQEGYYVGSIAPYSYSRIKLEKGYSLEIYEEENIVFNIMKKKALEDEGSTNISNHLNELGYKPRKGEYWTKSAVEAILLNETNLGLIKWNSRKEVKVFKDGKIVKTRPRNPNYELYPGKHPAIMTQDEYDRIKFLMKKRSHPVKKDKTLQNPLAGLIVCGFCNHKMARRPYKNGRVETILCTTSRCKNVASDIHVVEQRIIDTLKDTLKNYTNYVNNYSVSVNKTYDDNKKLQLEECDKELERLNKQIIKACEMLELGAYTVELFKERKNTLENKINTVNKRKDILAKETEAMKIEQYKKAIPQLQNAIDLYWKSSTEEKNKILKSIIDKCIYKKEKGGRWDPDAIKQFKLEIYLKV

SEQ ID NO: 5407 - protein, 506 aa, Unknown
  Description of Unknown: Integrase B5408 sequence
  PTHR30461:SF3,SM00857,G3DSA:1.10.10.2600,IPR036162,PF13408, IPR025827,PS51737,G3DSA:3.40.50.1390,IPR006119,IPR038109, PF07508,SSF53041,IPR011109,PTHR30461,Coil, PS51736,cd00338,PF00239
MKAVIYARYSAGSGQTELSIEGQLRECKKYIEKKGYALGEVYADRHVSGLSTKGREEFKRLMDDAKAHKFDVVVCYDTSRFARDKFDAVVYKTELRKRLGIAIEWATMNVEGPEGVLLEAIMEGWNQYFSEELSRKTKRGMAEAASKGLSLGSRPPLGYTLKDRRFVVNEAGAEAVREVFKAYTGGASFADCARMLNGQGFRTATGKLFNGSAVRYMLTNKKYLGIHGGASGVVPAIVDPEVFQAARDRIGERPPKSVKHDFALVGKLTCGCCGSRMTGTSTLSKGRRYYYYKCSNKCAGQPVRQDKLDSFVAACAQEVLSKPETVKEVAARLFAYQKKENPLESKIEALGKSLKSLDMKIDNLTTALAERPASKALLTRLDDLEEQREQVQRAIEAEPEQEPCRILSEQAIADGLTGLLAPLSDPDRIHSQERWILDSLVEAVELTPDEVLITYATDSIVKRDQEGQVSKKVLIGTPDSTFFETMELYTAPGAVILSCSRSAASF

SEQ ID NO: 5408 - protein, 506 aa, Unknown
  Description of Unknown: Integrase B5409 sequence
  PTHR30461:SF3,SM00857,G3DSA:1.10.10.2600,IPR036162,PF13408, IPR025827,G3DSA:3.40.50.1390,PS51737,IPR006119,IPR038109, PF07508,SSF53041,IPR011109,PF00239,PTHR30461, PS51736,Coil,cd00338
MTNTKDLQTGVIYARYSSDKQRDESIEGQIRECTEYAQREGILITKIYTDRALSARTDNRPEFLQMIRDSAHQSFNYVIVYQLDRFSRSREDSAKYKGILRRNGVRVLSAKEHITNEPAGIILESMLEGMAEYYSVELSQKVKRGMTENALKGKMNGAAIPLGYDLTESHHLAVNAHEAKAVRLIYDLYLKQHSIAKISDILHSKGYLTKKGRKISPSVIKNILSNEKYIGVYSWGDIRIEDSIPPIISRKVFDEVQTIMPTRIRNKGRRSEMYNLCGKLICGECGGHYMGSTATSRNKEKHYYYVCTNRRKYHTCAAPNIRRDELEDLVINRTLEILNQPSNIARIVDLVMSGYDNTTQEAKTAIQGINNKIKAIDTELNNCMNAIKQGFITERLKGEIENLENERNNLLEQKANHESAIIPIKFTADHIEYFLERMTKENPTTKAGRSRILDTFIKSVTIYSDRVEIVFNYKHELPEFNDRCETGSHFSVLVGPPGIEPGTDRL

SEQ ID NO: 5409 - protein, 506 aa, Unknown
  Description of Unknown: Integrase B5410 sequence
  cd09606,PTHR30461:SF3,cd00338,SM00857,G3DSA:1.10.10.2600, IPR036162,PS51737,G3DSA:3.40.50.1390,IPR006119,IPR038109, PF07508,SSF53041,IPR011109,PTHR30461,PS51736, Coil,PF00239
MVLMYLRKSRSDNPYETVEEVLSRHETMLQEYAEKSYGYRIPESQIYREVVSGEKIHTRPEMQILLKRIESSNVKSVLVVDPQRLSRGDLMDCGRLMQAFKYSRTTIVTPMKIFDLWDKFDEKMFQDELLRGRDYLEYAKEVMARGRKLSASEGWYLGSVPPFGYDIDYVMDGKRRRKTLKPNQIEAPIVDKIFSWFVDLKMSLYGIAAKLNNMGIKPRKAEHFSTDAVRHILSNPIYIGKISVGRRPMVEKLVDGKVVVSRPRTAPQRIFDGKQPAITQEERFYAAQERLGNLPKTKMGKGVTNPLVGILKCSCGRAMIYHTGRGEARLMCANRRYCGSRSVPFEEIYNAIIDALKENARDFQIKIDSGIDIALQRYNEEVSEIKGNLQELDVQQERLFSFLESGTYDEMTFRKRNSILMEKQEKLKKQYEEILANEPETIDYKEKIGTLYQAIDAMKSEELTAKQKNDFLKNIIGSIVYTQLEILDNGTRWGKNQYRLDIFLKN

SEQ ID NO: 5410 - protein, 506 aa, Unknown
  Description of Unknown: Integrase B5411 sequence
  PTHR30461:SF3,IPR036162,PS51737,IPR011109,PTHR30461, PS00397,PF00239,G3DSA:1.10.10.2600,IPR006119,SSF53041, cd00338,SM00857,IPR025827,IPR038109,PS51736, IPR006118,PF13408,G3DSA:3.40.50.1390,PF07508,Coil
MTKIITAGIYVRVSTSEQAEQGYSIQTQIRACKDKAYELGAIDILEYADEGFSGAKLDRPAMAKLRDDIRKDKLDIIICYDPDRLARNLAHQLLITDEIEKYCREGLIFVSVSFENSPEGRLFYSMRGAFSAYEREKILERIIRGKKGKLLAGRLGNNHLYGYDFDKDTQMYVINENEAKIIRKIFEWYISGISSEQITDKLNANNIPKIWQGKRYKWSGSTVRTILKNEKYTGIFHGWQYLQVINKCGGYSIKKKDKSQWIDIEIPAIISNEIFEKAQKQIIKNRTYNTRKEKEVHLLTGLAYCGSCGNKIYNHHNIRRKYYVCSILYDKRITDKKICKPKFLHIPEVDELVWNALTKICSSPKLIKEYMTDINNHENTFLNYKEKLCMLDKKLTKLKNSQNDILEWFSDGLIDKETTQKKLENNKQKIEQLNSNKKELLINISNLKEKHTPEDIYNIFKKSTKISIDDKRNILRSILDKIYLTKLDKSKGCKSKLSLKIVFVFK

SEQ ID NO: 5411 - protein, 506 aa, Unknown
  Description of Unknown: Integrase B5412 sequence
  SM00857,G3DSA:1.10.10.2600,IPR036162,PF13408,PS51737, G3DSA:3.40.50.1390,IPR025827,IPR006119,IPR038109,PF07508, IPR011109,SSF53041,PTHR30461,Coil,PS51736, cd00338,PF00239
MAKPEVSELAVVYARYSSHSQGEQSIEGQLSNARDYAAAHGYTIVHEYVDRAKSGRTDNRAEFQQMLKDTAKRQFSVIILWKVDRFGRNREEIAINKMKCRKNGVRVEYVAETIPDSPEGVILESVLEGFAEYYSLQLSQNIRRGRAESAEKCQSLGGNRPLGYKTGPDKKFVIDENTAPTVKMIFTMYADGKTVTEIVDKLNEMGLRTLRGGPFTKNSLHSILKNKKYIGVYEYQGREIKDGVPRIIEDDVFNKVQEMLKINKRAQAKTWSRADYILTDKLFCGKCGALMFGESGTSKTGVKHNYYICSNKKRFRSCDKKAVRQADIEDTVLNATHELLQDDELLDYIVDRTWEYYLAQDNSQEELRNLQRQLAQTDTAISNLIRAIEAGILTEETKKRMDELTQQKADLKASIADREIARGFHLQKSHIAFYLRSLRDADWSDKEAQKRLIQTFVNAVFVYDDHITLTYNFSGDKSTITLHDMQRFEDGEEFGCRASRSTISPP

SEQ ID NO: 5412 - protein, 506 aa, Unknown
  Description of Unknown: Integrase B5413 sequence
  cd00338,SM00857,G3DSA:1.10.10.2600,IPR036162,PF13408, PS51737,G3DSA:3.40.50.1390,IPR025827,IPR006119,IPR038109, PF07508,IPR011109,SSF53041,PTHR30461,PS51736, Coil,PF00239
MYGMYLRKSRSDDPNEDINDTLAKHEKILFDLADSLNINRKEIMQFKEVVSGENIQNRPEMKKLLEYVMEGVLEGVLVVDSQRLARGDTVDQGTIIRAFSINNTKIITPMKTIDPQNEYDQEYFEFDLFMGRREYKMITRRMQRGRHIAAQEGYYVGSIAPYSFSRIKLDKGYSLEIYEEENIVFNIMKKKALEDEGSTNISNHLNELGYKPRKGEYWTKSAVEAILLNETNLGLIKWNSRKEVKVFKDGKIVKTRPRNPNYELYPGKHPAIMTQDEYDRIKFLMKKRSHPVKKDKTLQNPLAGLIVCGFCNHKMARRPYKNGRVETILCTTSRCKNVASDIHVVEQRIIDTLKDTLKNYTNYVNNYSVSVNKTYDDNKKLQLEECDKELEKLNKQIIKACEMLELGAYTVELFKERKNTLENKINTVNKRKDILAKETEAMKIEQYKKAIPQLQNAIDLYWKSSTEEKNKILKSIIDKCIYKKEKGGRWDPDAIKQFKLEIYLKV

SEQ ID NO: 5413 - protein, 506 aa, Unknown
  Description of Unknown: Integrase B5414 sequence
  cd00338,SM00857,G3DSA:1.10.10.2600,IPR036162,PF13408, IPR025827,G3DSA:3.40.50.1390,PS51737,IPR006119,IPR038109, PF07508,SSF53041,IPR011109,PTHR30461,PS51736, Coil,PF00239
MNAVIYARYSSDKQTEQSIEGQLREGYAYAERAGMTIVGAYIDRAISGTSDQRPDFQRMIADSAKRQFEAVIVWKLDRFARNRYDSAIYKSKLKKNGVRVFSVTEGIGDGDESIILEAVLEAMAEMYSKQLGQNAARGMRETARKGLCTGGQIPLGYVVGEDHKLHIDSKTAPAVQLIYTLFADGKTKTQIAKELNARGFRTKNGKLYTSNSFFRILTNPMYYGDYTYKGDIPRECPAIISRALYDKCQERNEATKRSRGMKTSEVEWLLRGKLFCGHCGTQMTGDSGTGRANEKHYYYTCHKRKRYKDCDKKSEKKEQLERAVCQKTVEYVLREDRIGYIAERVVEQYEKEFDASIIKEKEMSLVKLDAELDKCAESLMHTTVRSVVDRINARAEELEAAKSELEHELAQLRITSKARITVDEIITFLRGFCSGDVEDIQFRRKIVDTFINAVYVFDDKYVVYYNVRDCKQVTYSDMLASIHAPSDMSAHGSDCLLYGEPLLNVP

SEQ ID NO: 5414 - protein, 506 aa, Unknown
  Description of Unknown: Integrase B5415 sequence
  SM00857,G3DSA:1.10.10.2600,IPR036162,PS51737,G3DSA:3.40.50.1390, IPR006119,IPR038109,PF07508,IPR011109,SSF53041, PF00239,PTHR30461,PS51736,Coil,cd00338
MVLMYLRKSRADNPYETVEEVLSRHETILQEYAERKYGERIPESQIYREVVSGEKIETRPEMKSVLRRMEAPDVDAVLVVDPQRLSRGDLIDCGTLMQAFKYSYTKIETPMKVFDLWDKFDEKMIRDELMRGREYLEYAKEVMARGRKLSTSEGWYVSSIIPFGYDVDYVMDGKRRRKTLKPNPIESVIVQNIFEWFVNDKLSMYAISDRLNAAGIKTRKDKEFATDAVRGILKNPVYIGKIAIGRRDTKENMVDGKVVKSRPRTEPKKIFDGRHPAIVSEEIFNAAQERIGTLPKVKRSTEFRNPFSGIARCSCGRALAYNIGRGEVRLICGGRKKCGARSVPLDDFTNKVIKALKETASDFSVQIDSGIDIDIQRHAEETKQAEATLRDLEIQQERLYSFLESGTYSEETFRKRNAMLEEKKEKAQNHYEYLLDNEPVKIDYEKKVGTLYQAIDNIASDKLTPKQKNDFLKTIISKIIYTPLPPIDDGTRFGKHQYRLDIFLKD

SEQ ID NO: 5415 - protein, 506 aa, Unknown
  Description of Unknown: Integrase B5416 sequence
  PTHR30461:SF3,SM00857,G3DSA:1.10.10.2600,IPR036162,PF13408, IPR025827,PS51737,G3DSA:3.40.50.1390,IPR006119,IPR038109, PF07508,IPR011109,SSF53041,PF00239, PTHR30461,Coil,cd00338
MRTVITYLRFSSAIQGAEGADSTRRQNDLFKQWLKKNSDAQVVASFSDEGLSGYKGKHLTGQFGDMLARIESGEFPEGTILLVESIDRIGRLEHLETEALMNRILGNGLEIHTLQDGLIYTKDALADDLGISIIQRVKAYIAHQESKQKSFRVSQKWEQRAKLALAGEQRLTKMVPGWIDPDTFKLNEHAETVRLIFKLLLSGESLHNIARHLQSNGIKSFSRRKDANGFSVHSVRTILRSETTIGTLPASQRNDRPAIPNYYEAAIDASTFNKAQEILGKNRIGRTPASDNPLTINIFKGLFRCQCGASVHPTGTKNKYQGVYRCNNHLDGRCDVPPLKRKPFDKWMLENFLGMIDVGNDGEAEGKIASLQHEVEIVTTRIKKATALLLEMDDIDELKIQIKELNQRRTELQTTIDNMRRKASLTDKELPQLKDIDLTTKAGRVECQLILSKHLKGLTLGKDSVIVTLQNDTEITIPTNPLPLNDGTSIFEIAEKELLEIDAYQL

SEQ ID NO: 5416 - protein, 506 aa, Unknown
  Description of Unknown: Integrase B5417 sequence
  cd00338,SM00857,G3DSA:1.10.10.2600,IPR036162,PF13408, IPR025827,G3DSA:3.40.50.1390,PS51737,IPR006119,IPR038109, PF07508,SSF53041,IPR011109,PTHR30461,PS51736, Coil,PF00239
MNAVIYARYSSDKQTEQSIEGQLREGYAYAERAGMTIVGAYIDRAISGTSDQRPDFQRMIADSAKRQFEAVIVWKLDRFARNRYDSAIYKSKLKKNGVRVFSVTEGIGDGDESIILEAVLEAMAEMYSKQLGQNAARGMRETARKGLCTGGQIPLGYVVGEDHKLHIDSKTAPAVQLIYTLFADGKTKTQIAKELNARGFRTKNGKLYTSNSFFRILTNPMYYGDYTYKGDIPRECPAIISRALYDKCQERNEATKRSRGMKTSEVEWLLRGKLFCGHCGTQMTGDSGTGRANEKHYYYTCHKRKRYKDCDKKSEKKEQLERAVCQKTVEYVLREDRIGYIAERVVEQYEKEFDASIIKEKEMSLVKLDAELDKCAESLMHTTVRSVVDRINARAEELEAAKFELEHELAQLRITSKARITVDEIITFLRGFCSGDVEDIQFRRKIVDTFINAVYVFDDKYVVYYNVRDCKQVTYSDMLASIHAPSDMSAHGSDCLLYGEPLLNVP

SEQ ID NO: 5417 - protein, 506 aa, Unknown
  Description of Unknown: Integrase B5418 sequence
  PTHR30461:SF3,IPR036162,PS51737,IPR011109,PTHR30461, PS00397,PF00239,G3DSA:1.10.10.2600,IPR006119,SSF53041, cd00338,SM00857,IPR025827,IPR038109,PS51736, IPR006118,PF13408,G3DSA:3.40.50.1390,PF07508,Coil
MTKIITAGIYVRVSTSEQAEQGYSIQTQIKACKDKAYELGAIDILEYADEGFSGAKLDRPAMTRLRDDIRNHKLDIIICYDPDRLARNLAHQLLITDEIEKYCREGLIFVSVSFENSPEGRLFYSMRGAFSAYEREKILERIIRGKKGKLQAGRLGNNHLYGYDFDKDTQMYVINENEAKIIRQIFEWYISGISSEQITDKLNANNIPKIWQGKRYKWSGSTVRTIIKNEKYTGIFHGWQYLQVINKCGGYSIKKKDKSQWIDIEIPAIISNEIFEKAQKQIIKNRTYNTRKEKEVHLLTGLAYCGSCGNKIYNHHNVRRKYYVCSILYDKRITDKKICKPKFLHIPEVDELVWNALTKICSSPKLIKEYMTDINNHENTFLNYKEKLCMLDKKLTKLKNSQNDILEWFSDGLIDKETAQKKLENNKQKIEQLNSNKKELLINISNLKEKHTPEDIYNIFKKSAKISIDDKRNILRSILDKIYLTKLDKSKECKSKLSLKIVFVFK

SEQ ID NO: 5418 - protein, 506 aa, Unknown
  Description of Unknown: Integrase B5419 sequence
  cd00338,SM00857,G3DSA:1.10.10.2600,IPR036162,PF13408, PS51737,IPR025827,G3DSA:3.40.50.1390,IPR006119,IPR038109, PF07508,IPR011109,SSF53041,PTHR30461,PS51736, Coil,PF00239
MYGMYLRKSRSDDPNEDINDTLAKHEKILFDLADSLNINRKEIMQFKEVVSGENIQNRPEMKKLLEYVMEGVLEGVLVVDSQRLARGDTVDQGTIIRAFSINNTKIITPMKTIDPQNEYDQEYFEFDLFMGRREYKMITRRMQRGRHIAAQEGYYVGSIAPYSFSRIKLDKGYSLEIYEEENIVFNIMKKKALEDEGSTNISNHLNELGYKPRKGEYWTKSAVEAILLNETNLGLIKWNSRKEVKVFKDGKIVKTRPRNPNYELYPGKHPAIMTQDEYDRIKFLMKKRSHPVKKDRTLQNPLAGLIVCGFCNHKMARRPYKNGRVETILCTTSRCKNVASDIHVVEQRIIDTLKDTLKNYTNYVNNYSVSVNKTYDDNKKLQLEECDKELERLNKQIIKACEMLELGAYTVELFKERKNTLENKINTVNKRKDILAKETEAMKIEQYKKAIPQLQNAIDLYWKSSTEEKNKILKSIIDKCIYKKEKGGRWDPDAIKQFKLEIYLKV

SEQ ID NO: 5419 - protein, 506 aa, Unknown
  Description of Unknown: Integrase B5420 sequence
  PTHR30461:SF3,cd00338,SM00857,G3DSA:1.10.10.2600,IPR036162, PS51737,G3DSA:3.40.50.1390,IPR006119,IPR038109,PF07508, SSF53041,IPR011109,PTHR30461,PS51736,Coil, PF00239
MPRQTKKFQATATKGIIWARVSSREQEDGYSLDAQIENSKSYAARKGIDIIKIFEIIESSTQGDRKQFHDMINWVKRQKQRIAIISDKVDRLQRRVSEVPVLEELRKAGKIELHFSRENKVIEKDTNGSDLACYRMIVVMAENYTDCISDNVKRSFKQMRKEGKWAHKAPVGYRNVKDSKGNSDVVIDPDRGFLITALFKEYASGIYNLEQMTKKAQEIGLTMPGSKKLYKQTIRNILSNRFYAGEMYGYGEYYKHQYKTLIDWKTFNRCQEVLEGRMNHKEQKHEHLFKGIMKCKECGTMISPYISIHAAKKKGGEKIAYKYLFCPKCKGTHINEEKGIEKIKQALGSLKSLPNGVLEKMMHCLQDLVYEDHRIELEHKKYLERKLLECDTKQERWHELYAEASITRNIHSKKIKELAQEKEKIAEQLLGYNHIAQQNFITLNYLTRLYFHADQIWDFPKNEQKQKILKLLCSEILLDGKNIVISIRKPILELAKIGSCQIWQGQ

SEQ ID NO: 5420 - protein, 506 aa, Unknown
  Description of Unknown: Integrase B5421 sequence
  cd09606,PTHR30461:SF3,SM00857,G3DSA:1.10.10.2600,IPR036162, PS51737,G3DSA:3.40.50.1390,IPR006119,IPR038109,PF07508, SSF53041,IPR011109,PF00239,PTHR30461,PS51736, Coil,cd00338
MVLMYLRKSRSDNPYETVEEVLSRHETLLQEYAEKVYGYRIPESQIYREVVSGEKIHTRPEMQILLKRIESSDVKSVLVVDPQRLSRGDLMDCGRLMQAFKYSRTTIVTPMKIFDLWDKFDEKMFQDELLRGRDYLEYAKEVMARGRKLSASEGWYLGSVPPFGYDIDYVMDGKRRRKTLKPNQIEAPIVDKIFSWFVDLKMSLYGIAAKLNNMGIKPRKAEHFSTDAVRHILSNPIYIGKISVGRRPMVEKLVDGKVVVSRPRTAPQRIFDGKQPAITQEERFYAAQERLGNIPKTKMGKGVTNPLVGILKCSCGRAMIYHPGRGEARLMCANRRYCGSRSVPFEEIYNAIIDALKENARDFQIKIDSGIDIALQRYNEEVSEIKGNLQELDVQQERLFSFLESGTYDEMTFRKRNSILMEKQEKLKKQYEEILANEPETIDYKEKIGTLYQAIDAMKSEELTAKQKNDFLKNIIGSIVYTQLEILDNGTRWGKNQYRLDIFLKN

SEQ ID NO: 5421 - protein, 506 aa, Unknown
  Description of Unknown: Integrase B5422 sequence
  PTHR30461:SF3,cd00338,SM00857,G3DSA:1.10.10.2600,IPR036162, PF13408,PS51737,G3DSA:3.40.50.1390,IPR025827,IPR006119, IPR038109,PF07508,IPR011109,SSF53041,PTHR30461, PS51736,Coil,PF00239
MRKKCYIYTRVSTAAQTEGYSLEAQTERLRKYAEYKEMEVVREYCDAGRSGMSIKGRPAFMEMMDDISCEKDEISCVLVFKLSRFGRNAADILKSVQLLMDFDVDLVCVEDAIDSSTQGGRLTLAILSAVAEMEHENITVQFMAARMQKLMNGGWPGGGVPYGYVSVNKELVVVPEAADLVRMIYQKYLEPDMMLNTVVGWMNENGYKRVAKGEDKVITSDFVSSVLGNPVYYGMIVYNRRTNSEEIKRNPKEIISVMGKHEAIIPKDVWMRVQEKRKRLRRPQKKVDDPERISLLSGLVKCPVCGTGMITKKNKRKNNNHGGYYKIVYSYGCRNYRKSAGRVCNCSWTYNQEKLDGAVMEIVRKVTKTREFRQAVMDVVGDRSSLDACEEDLKRTRRELHSQEHLKYKLGMELDNLDVFSENYDSEYEAVQLKIDGVYDNIETLEEKIRKLKKRMDALKKGVRSSDNIQKILDNFDLLFERMNCEERRELCRQFVEKIDVFPEER

SEQ ID NO: 5422 - protein, 506 aa, Unknown
  Description of Unknown: Integrase B5423 sequence
  SM00857,G3DSA:1.10.10.2600,IPR036162,PF13408,IPR025827, PS51737,G3DSA:3.40.50.1390,IPR006119,IPR038109,PF07508, SSF53041,IPR011109,PF00239,PTHR30461,PS51736, Coil,cd00338
MAKPEVSELAVVYARYSSHSQGEQSIEGQLSNARDYAAAHGYTIVHEYVDRAKSGRTDNRAEFQQMLKDTAKRQFSVIILWKVDRFGRNREEIAINKMKCRKNGVRVEYVAETIPDSPEGVILESVLEGFAEYYSLQLSQNIRRGRAESAEKCQSLGGNRPLGYKTGPDKKFIIDENTAPTVKMIFTMYADGKTVTEIVDKLNEMGLRTLRGGPFTKNSLHSILKNKKYIGIYEYQGREIMDGVPRIIEDDVFNKVQEMLKINKRAPAKTWSRADYILTDKLFCGKCGALMFGESGTSHTGAKHNYYICSNKKRFRSCDKKAVRQADIEDTVLNATHELLQDDELLDYIVDRTWEYYLAQDNSQEELRNLQRQLAQTDTAISNLIRAIEAGILTEETKKRMDELTQQKADLKASIADREIARGFHLQKSHIAFYLRSLRDADWSDKEAQKRLIQTFVNAVFVYDDHITLTYNFSGDKSTITLRDMQRFEDGEEFGCRASRSTISPP

SEQ ID NO: 5423 - protein, 506 aa, Unknown
  Description of Unknown: Integrase B5424 sequence
  PTHR30461:SF3,IPR036162,PS51737,IPR011109,PTHR30461, PS00397,PF00239,G3DSA:1.10.10.2600,IPR006119,SSF53041, cd00338,SM00857,IPR025827,IPR038109,PS51736, IPR006118,PF13408,G3DSA:3.40.50.1390,PF07508,Coil
MTKIITAGIYVRVSTSEQAEQGYSIQTQIKACKDKAYELGAIDILEYADEGFSGAKLDRPAMTRLRDDIRNHKLDIIICYDPDRLARNLAHQLLITDEIEKYCREGLIFVSVSFENSPEGRLFYSMRGAFSAYEREKILERIIRGKKGKLLAGRLGNNHLYGYDFDKDTQMYVINENEAKIIRQIFEWYISGISSEQITDKLNANNIPKIWQGKRYKWSGSTVRTILKNEKYTGIFHGWQYLQVINKCGGYSIKKKDKSQWIDIEIPAIISNEIFEKAQKQIIKNRTYNTRKEKEVHLLTGLAYCGSCGNKIYNHHNIRRKYYVCSILYDKRITDKKICKPKFLHIPEVDELVWNALTKICSSPKLIKEYMTDINNHENTFLNYKEKLCMLDKKLTKLKNSQNDILEWFSDGLIDKETAQKKLENNKQKIEQLNSNKKELLINISNLKEKHTPEDIYNIFKKSAKISIDDKRNILRSILDKIYLTKLDKSKECKSKLSLKIVFVFK

SEQ ID NO: 5424 - protein, 506 aa, Unknown
  Description of Unknown: Integrase B5425 sequence
  PTHR30461:SF3,SM00857,G3DSA:1.10.10.2600,IPR036162,PF13408, IPR025827,G3DSA:3.40.50.1390,PS51737,IPR006119,IPR038109, PF07508,SSF53041,IPR011109,PTHR30461,Coil, PS51736,cd00338,PF00239
MRTVITYLRFSSATQGAEGADSTRRQNDLFKQWLKKNSDAQVVASFSDEGLSGYKGKHLTGQFGDMLARIEAGEFPGGTILLVESIDRIGRLEHLETEALMNRIIAHGIEIHTLQDGLIYTRDALSDDLGISIIQRVKSYLAHQESKQKSFRVSEKWKQRAKLALAGKQRLTKMVPGWIDPDTLKLNEHAETVRLIFKLLLSGESLHNIARHLQSNGIKSFSRRKDANGFSVHSVRTILRSETTIGTLPASQRNDRPAIPNYYEAAIDAATFNKAQEILDKNRKGRTPASDNPLTINIFKGLFRCQCGASVHPTGTKNKYAGVYRCNNHLDGRCDVPPLKRKPFDRWMIDNFLGMIDVGNDGEAEGKIASLQHEVEIVTARIKKATALLLEMDDITELKAQVKGLNQKRTELQTTIDNMRRKASLTDKELPQLKDIDLTTKAGRVECQLILSKHLKGLTLGKDSVTVTLQNDTEITIPTNPLPLNDGSPIFEIADKELLDIDAYQL

SEQ ID NO: 5425 - protein, 506 aa, Unknown
  Description of Unknown: Integrase B5426 sequence
  PTHR30461:SF3,IPR036162,PS51737,IPR011109,PTHR30461, PS00397,PF00239,G3DSA:1.10.10.2600,IPR006119,SSF53041, cd00338,SM00857,IPR025827,IPR038109,PS51736, IPR006118,PF13408,G3DSA:3.40.50.1390,PF07508,Coil
MTKIITAGIYVRVSTSEQAEQGYSIQTQIRACKDKAYELGAIDILEYADEGFSGAKLDRPAMAKLRDDIRKDKLDIIICYDPDRLARNLAHQLLITDEIEKYCREGLIFVSVSFENSPEGRLFYSMRGAFSAYEREKILERIIRGKKGKLLAGRLGNNHLYGYDFDKDTQMYVINENEAKIIRKIFEWYISGISSEQITDKLNANNIPKIWQGKRYKWSGSTVRTILKNEKYTGIFHGWQYLQVINKCGGYSIKKKDKSQWIDIEIPAIISNEIFEKAQKQIIKNRTYNTRKEKEVHLLTGLAYCGSCGNKIYNHHNIRRKYYVCSILYDKRITDKKICKPKFLHIPEVDELVWNALTKICSSPKLIKEYMTDINNHENTFLNYKEKLCMLDKKLTKLKNSQNDILEWFSDGLIDKETAQKKLENNKQKIEQLNSNKKELLINISNLKEKHTPEDIYNIFKKSAKISIDDKRNILRSILDKIYLTKLDKSKECKSKLSLKIVFVFK

SEQ ID NO: 5426 - protein, 506 aa, Unknown
  Description of Unknown: Integrase B5427 sequence
  cd00338,SM00857,G3DSA:1.10.10.2600,IPR036162,PF13408, IPR025827,G3DSA:3.40.50.1390,PS51737,IPR006119,IPR038109, PF07508,IPR011109,SSF53041,PTHR30461,PS51736, Coil,PF00239
MYGMYLRKSRSDDPNEDINDTLAKHEKILFDLADSLNINRKEIMQFKEVVSGENIQNRPEMKKLLEYVMEGVLEGVLVVDSQRLARGDTVDQGTIIRAFSINNTKIITPMKTIDPQNEYDQEYFEFDLFMGRREYKMITRRMQRGRHIAAQEGYYVGSIAPYSYSRIKLEKGYSLEIYEEENIVFNIMKKKALEDEGSTNISNHLNDLGYKPRKGEYWTKSAVEAILLNETNLGLIKWNSRKEVKVFKDGKIVKTRPRNPNYELYPGKHPAIMTQDEYDRIKFLMKKRSHPVKKDKTLQNPLAGLIVCGFCNHKMARRPYKNGRVETILCTTSRCKNVASDIHVVEQRIIDTLKDTLKNYTNYVNNYSVSVNKTYDDNKKLQLEECDKELERLNKQIIKACEMLELGAYTVELFKERKNTLENKINTVNKRKDILAKETEAMKIEQYKKAIPQLQNAIDLYWKSSTEEKNKILKSIIDKCTYKKEKGGRWDPDAIKQFKLEIYLKV

SEQ ID NO: 5427 - protein, 506 aa, Unknown
  Description of Unknown: Integrase B5428 sequence
  PTHR30461:SF3,SM00857,G3DSA:1.10.10.2600,IPR036162,PF13408, IPR025827,G3DSA:3.40.50.1390,PS51737,IPR006119,IPR038109, PF07508,SSF53041,IPR011109,PF00239,PTHR30461, PS51736,Coil,cd00338
MRSVITYLRFSSATQGAEGADSTRRQNELFKQWLRKNSDAQVVASFNDEGLSGYKGKHLSGQFGDMLSRIESGEFPEGTILLVEAIDRIGRLEHLETEALMNRIIAHGIEIHTLQDGLIYTRDALSDDLGISIIQRVKSYIAHQESKQKSFRVSQKWEQRAKLALAGEQRLTRNVPGWIDPETFKLNEHAETVRLIFKLLLDGESLHNIARHLQSNGIRSFSRRKDANGFSVHSVRTILRSETAIGTLPASQRNDRPAIPNYYEAAIDASTFNKAQEILGKNRIGRTPASDNPLTINIFKGLFRCQCGASVHPTGTKNKYQGVYRCNNHLDGRCDVPPLKRKPFDRWMIDNFLGMIDVVSDGETERRIAALQHEVETVTARIKKATALLLEMDDITELKAQVKELNQKRTELQTTIDTLKRKTSLTDKELPQLKDIDLMTKAGRVECQLILSKHLKGLTLGKDSVTVTLQNDTEITIPTNPLPLNDGTSIFEIADKELLEIDAYQL

SEQ ID NO: 5428 - protein, 506 aa, Unknown
  Description of Unknown: Integrase B5429 sequence
  PTHR30461:SF3,SM00857,G3DSA:1.10.10.2600,IPR036162,PF13408, PS51737,G3DSA:3.40.50.1390,IPR025827,IPR006119,IPR038109, PF07508,IPR011109,SSF53041,PTHR30461,Coil, cd00338,PF00239
MRTAITYLRYSSAIQGAEGADSTRRQNDLFKQWLKKNSDAQIVASFSDEGLSGYKGKHLTGQFGDMLARIEAGEFPAGTILLVESIDRIGRLEHLETEALMNRILCNGIEIHTLQDGLVYTKDALADDLGISIIQRVKAYIAHQESKQKSFRVSQKWGQRAKLALAGKQRLTKMVPGWIDPETFKLNEHAETVRLIFKLLLDGESLHNIARHLQANNISSFSRRKDANGFSVHSVRTVLRSESVIGTLPASQRNDRPAIPNYYEAAIDAATFNKAQEILDKNRKGRTPASDNPLTINIFKGLFRCQCGASVHPTGTKNKYAGVYRCNNHLDGRCDVPPLKRKPFDKWVLENFLGMIDVGNDGESERKIAALQHEVEIVTARIKKATALLLEMDDIDELKIQLKELNQRRTELQTTIDSMRRKTSLTDKELPQLKDIDLTTKAGRVECQLILSKHLKGLTLGKGSVTITLQNDTEITIPTNPLPLNDGSPIFEIADKELLDIDAYQL

SEQ ID NO: 5429 - protein, 506 aa, Unknown
  Description of Unknown: Integrase B5430 sequence
  PTHR30461:SF3,SM00857,G3DSA:1.10.10.2600,IPR036162,PS51736, PS51737,G3DSA:3.40.50.1390,PF13408,IPR025827,IPR006119, IPR038109,PF07508,IPR011109,SSF53041,PTHR30461, mobidb-lite,cd00338,PF00239
MQAAAYARYSTEHQTESSIAYQMRKIEEYCNDHSITVIARYTDEAKSGTNTQRPAFQQLCKDAAQRKFDAVVIYDISRGSRDVSDWFGFRKQMAILGIQVISVEDRIGDILNPSDYLTELITVGLGQHHVLTSRQKSMDSIATKAKTGQFLGGTPNFGYNVVNGRYVINPAEAEIVQKIYRMYAAGKSYGEILAEIGEVRGKRGRVIGKNSLHYLLRNERYIGVYSWCKYHHKIMGKYAGNIPNENAVRIEDSIPAIIDKDTWEAVQIRMNDKKQRACNKAKRSYLLSGLIECTECGANYVGHTSTNKKGYSTRYYCCGNKYRNHTCHAKNLNAEELEIFVVQNLKQYLSDLDFSQMAQQVADEINGASVDLKAERKELADIIFQLNNGTKAILKGIDYPELQEEMFRLRVRKSELEDIIRRGEEKKPVSAEKLEQLFQHAVKQLDTDTKQICKSMVKIYAHPNGDCDLEVGVHISGCGRAKSANRKTEHKQPTRKKKKPKSKETR

SEQ ID NO: 5430 - protein, 506 aa, Unknown
  Description of Unknown: Integrase B5431 sequence
  PTHR30461:SF3,cd00338,SM00857,G3DSA:1.10.10.2600,IPR036162, PS51737,G3DSA:3.40.50.1390,IPR006119,IPR038109,PF07508, SSF53041,IPR011109,PTHR30461,PS51736,Coil, PF00239
MKTAIYLRKSRQDEELEKRENTDTLARHRSTLLSIAKKQHLDIIEVKEEIVSGGSIASRPKMLELLDEVKNNDYDAVLCMDLDRLGRGGMQDQGLILDTFKESHTLIITPDKTYDLNNDLDEEMTEFKSFFARRELKMITKRMQRGRLKSIEEGNYISSQAPFGYKFEYTKDGKRLLVIDEEKASIVKEIFALYISNYGSYRIKVYLDNIGAKTNAGKPFTENAIRRILKNNIYCGYVSWNKVKRKGTKSVNNSKDDIIYAKGKHEAIISENMFKIAKNILEGKQTPSLSLNKNLINPLAGLVKCACCNHTMAVSRTTYKNGDTVLFLKCNHCSKNSSSKLEVVEKSILDYLEVFLYEYKNEILNNKIENHNNDRIDNLKHTLQLLEKESSELNKQKNNLHDLLERGVYDIDTYLERTNILRSKTEDNERAIKNTKELIKNESKVNLSYTELIPKINKIILGYKNTDNVFDKNMLLKSIIDEIIYFKERGNRKGKFELDIKLKLPV

SEQ ID NO: 5431 - protein, 506 aa, Unknown
  Description of Unknown: Integrase B5432 sequence
  PTHR30461:SF3,cd00338,SM00857,G3DSA:1.10.10.2600,IPR036162, PF13408,PS51737,G3DSA:3.40.50.1390,IPR025827,IPR006119, IPR038109,PF07508,SSF53041,IPR011109,PTHR30461, Coil,PF00239
MRSVITYLRFSSAIQGAEGADSTRRQNDLFKQWLKKNSDAQVVASFSDEGLSGYKGKHLTGQFGDMLARIESGEFPEGTILLVESIDRIGRLEHLETEALMNRILGNGLEIHTLQDGLIYTKDALADDLGISIIQRVKAYIAHQESKQKSFRVSEKWKQRAKLALAGEQRLTKMVPGWIDPDTLKLNEHAETVRLIFKLLLSGESLHNIARHLQSNGIKSFSRRKDANGFSVHSVRTILRSETTIGTLPASQRNDRPAIPNYYEAAIDAATFNKAQEILDKNRKGRTPASDNPLTINIFKGLFRCQCGASVHPTGTKNKYAGVYRCNNHLDGRCDVPPLKRKPFDKWMLENFLGMIDVGNDGEAEGKIASLQHEVEIVTTRIKKATALLLEMDDIDELKIQIKELNQRRTELQTTIDNMRRKASLTDKELPQLKDIDLTTKAGRVECQLILSKHLKGLTLGKDSVIVTLQNDTEITIPTNPLPLNDGTSIFEIAEKELLEIDAYQL

SEQ ID NO: 5432 - protein, 506 aa, Unknown
  Description of Unknown: Integrase B5433 sequence
  PTHR30461:SF3,cd00338,SM00857,G3DSA:1.10.10.2600,IPR036162, PF13408,IPR025827,PS51737,G3DSA:3.40.50.1390,IPR006119, IPR038109,PF07508,SSF53041,IPR011109,PTHR30461, PS51736,Coil,PF00239
MRSVITYLRYSSAIQGAEGADSTRRQNDLFKQWLKKNSDAQVVASFSDEGLSGYKGKHLTGQFGDMLARIESGEFSKGTILLVESIDRIGRLEHLETEALMNRIIAHGIEIHTLQDGLIYTRDALSDDLGISIIQRVKSYLAHQESKQKSFRVSQKWGQRAKLALAGKQRLTKMVPGWIDPETFEVNEHAETVRLIFKLLLDGESLHNIARHLQANNISSFSRRKDANGFSVHSVRTILRSETTIGTLPASQRNDRPAIPNYYEAAIDAATFNKAQEILDKNRKGRTPASDNPLTINIFKGLFRCQCGASVHPTGTKNKYAGVYRCNNNPDGRCDVPPLKRKPFDRWMIDNFLGMIDVGNDGESERKIAALQHEVEIVTARIKKATALLLEMDDITELKTQVKGLNQKRTELQTTIDNMRRKASLTDKELPQLKDIDLTTKAGRVECQLILSKHLKGLTLGKDSVTVTLQNDTKITIPTNPLPLNDGSPIFEIADKELLDIDAYQL

SEQ ID NO: 5433 - protein, 506 aa, Unknown
  Description of Unknown: Integrase B5434 sequence
  cd00338,SM00857,G3DSA:1.10.10.2600,IPR036162,PF13408, PS51737,G3DSA:3.40.50.1390,IPR025827,IPR006119,IPR038109, PF07508,IPR011109,SSF53041,PTHR30461,PS51736, Coil,PF00239
MYGMYLRKSRSDDPNEDINDTLAKHEKILFDLADSLNINRKEIMQFKEVVSGENIQNRPEMKKLLEYVMEGVLEGVLVVDSQRLARGDTVDQGTIIRAFSINNTKIITPMKTIDPQNEYDQEYFEFDLFMGRREYKMITRRMQRGRHIAAQEGYYVGSIAPYSFSRIKLDKGYSLEIYEEENIVFNIMKKKALEDEGSTNISNHLNELGYKPRKGEYWTKSAVEAILLNETNLGLIKWNSRKEVKVFKDGKIVKTRPRNPNYELYPGKHPAIMTQDEYDRIKFLMKKRSHPVKKDRTLQNPLAGLIVCGFCNHKMARRPYKNGRVETILCTTSRCKNVASDIHVVEQRIIDTLKDTLKNYTNYVNNYSVSVNKTYDDNKKLQLEECDKELEKLNKQIIKACEMLELGAYTVELFKERKNTLENKINTVNKRKDILAKETEAMKIEQYKKAIPQLQNAIDLYWKSSTEEKNKILKSIIDKCIYKKEKGGRWDPDAIKQFKLEIYLKV

SEQ ID NO: 5434 - protein, 506 aa, Unknown
  Description of Unknown: Integrase B5435 sequence
  PTHR30461:SF3,cd00338,SM00857,G3DSA:1.10.10.2600,IPR036162, PF13408,IPR025827,G3DSA:3.40.50.1390,PS51737,IPR006119, IPR038109,PF07508,IPR011109,SSF53041,PTHR30461, PS51736,Coil,PF00239
MPKKETTAPVKAVLYARYSSDRQREESIEGQIRVCEDYARRNNMVIVHTYADRAMTGRSDQRPEFQMMIQAAATQAFDVVLVYKLNRFARNRYDSAKYKHKLKKYGVHVVSAMENIANDPSGILLESVIEGMAEYYSAELAENVMRGMTENALECKWSGGLVPLGYKLDADHHLVIDEAGAQIVRRIYQMVLDGRTPTGIINELNAANCRTSTGRPFGKSSLTTILRNEKYIGTYTWNHIRKENAIPAIIDRKTFEAVQKTLQYRKNNHVKVCSENFLLTGKLFCGQCGSNMVGTSGTSKYKNTYYYYACTKHLKKDGCTARNIRADKLEELVCSVTTRILSSKEAVHAIARQAVEAQKKQKESLTVQSLKNQSAEINKKLKNCVQAVESGLISVTITNHIKEYEKRLTGLNEAISREELLSGKSKLTEKHIEFFFYSIAQKIKTADKYKSILLSSLVRSVIVYDDYIEIQYNYKNELPLLQNPVRVKSSNLNGMVIHPGFEPGTP

SEQ ID NO: 5435 - protein, 506 aa, Unknown
  Description of Unknown: Integrase B5436 sequence
  cd00338,SM00857,G3DSA:1.10.10.2600,IPR036162,PS51737, G3DSA:3.40.50.1390,IPR006119,IPR038109,PF07508,SSF53041, IPR011109,PTHR30461,PS51736,Coil,PF00239
MVLMYLRKSRSDNPYETVEEVLSRHETILQEYAEKKYGERIPESQIYREVVSGEKIETRPEMKSVLRRMEAPDVDAVLVVDPQRLSRGDLIDCGTLMQAFKYSYTKIETPMKVFDLWDKFDEKMIRDELMRGREYLEYAKEVMARGRKLSTSEGWYVSSIIPFGYDVDYVMDGKRRRKTLKPNPIESVIVQNIFDWFVKDKLSMYAISDRLNAAGIKTRKDKEFATDSVRGILKNPVYIGKIAIGRRDTKENMVDGKIVKSRPRTEQKKIFEGQHPAIISEEIFNAAQDRIGTLPKVKRSTEFRNPFSGIARCSCGRALAYNIGRGEVRLICGGRKKCGARSVTLDDFTSKVIKALKETASDFSVQIDSGIDIDIQKHAEETKQAEATLRDLEIQQERLYSFLESGTYSEEIFRKRNAMLEEKKEKAQNHYEYLLDNEPVKIDYEKKVGTLYQAIDNIASDKLTPKQKNDFLKTIISKIIYTPLPSIYDGTRFGQHQYRLDIFLKD

SEQ ID NO: 5436 - protein, 506 aa, Unknown
  Description of Unknown: Integrase B5437 sequence
  PTHR30461:SF3,cd00338,SM00857,G3DSA:1.10.10.2600,IPR036162, PF13408,PS51737,G3DSA:3.40.50.1390,IPR025827,IPR006119, IPR038109,PF07508,IPR011109,SSF53041, PTHR30461,PS51736,Coil,PF00239
MRSVITYLRFSSAIQGAEGADSTRRQNDLFKQWLKKNSDAQVVASFSDEGLSGYKGKHLTGQFGDMLARIESGEFPEGTLLLVEAIDRIGRLEHLETEALMNRIIAHGIEIHTLQDGLIYTRDALSDDLGISIIQRVKSYVAHQESKQKSFRVSQKWKQRAKLALAGEQRLTKMVPGWIDPDTFKCNEHAETVRLIFKLLLDGESLHNIARHLQANNISSFSRRKDANGFSVHSVRTILRSETTRGTLPASQRNDRPAIPNYYEAAIDASTFNKAQEILDKNRKGRTPASDNPLTINIFKGLFRCQCGASVHPTGTKNKYAGVYRCNNHLDGRCDVPPLKRKPFDKWMIDNFLGMIDVGNDGEAEGKIASLQHEVEIVTARIKKATALLLEMDDIDELKIQLKELNQKRTELQTMIDNMRRKASLTDKELPQLKDIDLMTKAGRVECQLILSKHLKGLTLGKDSVTVTLQNDTEIIVPTDPLPLNDGTSIFEIAEKELLEIDAYQL

SEQ ID NO: 5437 - protein, 506 aa, Unknown
  Description of Unknown: Integrase B5438 sequence
  PTHR30461:SF3,SM00857,G3DSA:1.10.10.2600,IPR036162,PF13408, PS51737,G3DSA:3.40.50.1390,IPR025827,IPR006119,IPR038109, PF07508,SSF53041,IPR011109,PF00239,PTHR30461, PS51736,Coil,cd00338
MRSVITYLRFSSAIQGAEGADSTRRQNDLFKQWLKKNSDAQVVASFSDEGLSGYKGKHLTGQFGDMLARIESGEFPEGTLLLVEAIDRIGRLEHLETEALMNRIIAHGIEIHTLQDGLIYTRDALSDDLGISIIQRVKSYLAHQESKQKSFRVSEKWKQRAKLALAGKQRLTKMVPGWIDPDTLKLNEHAETVRLIFKLLLSGESLHNIARHLQSNGIKSFSRRKDANGFSVHSVRTVLRSVSAIGTLPASQRNDRPAIPNYYEAAIDASMFNKAQEILDKNRKGRTPASDNPLTINIFKGLFRCQCGASVHPTGTKNKYQGVYRCNNHLDGRCDVPPLKRKPFDKWMIDNFLGMIDVGNDGEAEGKIASLQHEVEIVTTRIKKATALLLEMDDIDELKIQLKELNQKRTELQTTIDNMRRKASLTDKELPQLKDIDLTTKAGRVECQLILSKHLKGLTLGKGSVTITLQNDTEITIPTNPLPLNDGSPIFEIADKELLDIDAYQL

SEQ ID NO: 5438 - protein, 506 aa, Unknown
  Description of Unknown: Integrase B5439 sequence
  PTHR30461:SF3,SM00857,G3DSA:1.10.10.2600,IPR036162,PF13408, IPR025827,G3DSA:3.40.50.1390,PS51737,IPR006119,IPR038109, PF07508,IPR011109,SSF53041,PTHR30461,Coil, PS51736,cd00338,PF00239
MRAVIYARYSAGSGQTELSIEGQLRECKKYIEKKGYTLGEVYADRHVSGLSTKGREEFKRLMDDAKAHKFDVVVCYDTSRFARDKFDAVVYKTELRKRLGIAIEWATMNVEGPEGVLLEAIMEGWNQYFSEELSRKTKRGMAEAASKGLSLGSRPPLGYTLKDRHFVVDEAGAEAVREVFKAYTGGASFADCARMLNAQGFRTATGKPFNGSAVRYMLTNKKYLGIHGGASGVVPAIVDPEVFQAARDRIGERPPKSVKHDFALVGKLTCGCCGSRMTGTSTLSKGRRYYYYKCSNKCEGQPVRQDKLDSFVAACAQEALSKPKTIKEVASRLFAYQKKESPLESKIEALGKSLKSLDMKIDNLTTALAERPASKALLTRLDDLEEQREQVQRAIEAEPEQEPCRILSEHAIADGLAGLLAPLSDPDRIQSQERWILDSLVEAVELTPDEVLITYATDSIVKRDQEGQVSKKVLIGTPDSTFFETMELYTAPGAVILSCSRSAASF

SEQ ID NO: 5439 - protein, 506 aa, Unknown
  Description of Unknown: Integrase B5440 sequence
  cd09606,PTHR30461:SF3,cd00338,SM00857,G3DSA:1.10.10.2600, IPR036162,PS51737,G3DSA:3.40.50.1390,IPR006119,IPR038109, PF07508,IPR011109,SSF53041,PTHR30461,PS51736, Coil,PF00239
MVLMYLRKSRSDNPYETVEEVLSRHETMLQEYAEKSYGYRIPESQIYREVVSGEKIHTRPEMQILLKRIESSDVKSVLVVDPQRLSRGDLMDCGRLMQAFKYSRTTIVTPMKIFDLWDKFDEKMFQDELLRGRDYLEYAKEVMARGRKLSASEGWYLGSVPPFGYDIDYVMDGKRRRKTLKPNQIEAPIVDKIFSWFVDLKMSLYGIAAKLNNMGIKPRKAEHFSTDAVRHILSNPIYIGKISVGRRPMVEKLVDGKVVVSRPRTDPQRIFDGKQPAITQEERFYAAQERLGNLPKTKMGKGVTNPLVGILKCSCGRAMIYHPGRGEARLMCANRRYCGSRSVPFEEIYNAIIDALKENARDFQIKIDSGIDIALQRYNEEVSEIKGNLQELDVQQERLFSFLESGTYDEMTFRKRNSILMEKQEKLKKQYEEILANEPETIDYKEKIGTLYQAIDAMKSEELTAKQKNDFLKNIIGSIVYTQLEILDNGTRWGKNQYRLDIFLKN

SEQ ID NO: 5440 - protein, 506 aa, Unknown
  Description of Unknown: Integrase B5441 sequence
  PTHR30461:SF3,IPR036162,PS51737,IPR011109,PTHR30461, PS00397,PF00239,G3DSA:1.10.10.2600,IPR006119,SSF53041, cd00338,SM00857,IPR025827,IPR038109,PS51736, IPR006118,PF13408,G3DSA:3.40.50.1390,PF07508,Coil
MTKIITAGIYVRVSTSEQAEQGYSIQTQIKACKDKAYELGAIDILEYADEGFSGAKLDRPAMTRLRDDIRNHKLDIIICYDPDRLARNLAHQLLITDEIEKYCREGLIFVSVSFENSPEGRLFYSMRGAFSAYEREKILERIIRGKKGKLQAGRLGNNHLYGYDFDKNTQMYVINENEAKIIRQIFEWYISGISSEQITDKLNANNIPKIWQGKRYKWSGSTVRTIIKNEKYTGIFHGWQYLQVINKCGGYSIKKKDKSQWIDIEIPAIISNEIFEKAQKQIIKNRTYNTRKEKEVHLLTGLAYCGSCGNKIYNHHNVRRKYYVCSILYDKRITDKKICKPKFLHIPEVDELVWNALTKICSSPKLIKEYMTDINNHENTFLNYKEKLCMLDKKLTKLKNSQNDILEWFSDGLIDKETAQKKLENNKQKIEQLNSNKKELLINISNLKEKHTPEDIYNIFKKSAKISIDDKRNILRSILDKIYLTKLDKSKECKSKLSLKIVFVFK

SEQ ID NO: 5441 - protein, 506 aa, Unknown
  Description of Unknown: Integrase B5442 sequence
  PTHR30461:SF3,SM00857,G3DSA:1.10.10.2600,IPR036162,PF13408, PS51737,G3DSA:3.40.50.1390,IPR025827,IPR006119,IPR038109, PF07508,IPR011109,SSF53041,PTHR30461,Coil, cd00338,PF00239
MRSVITYLRYSSAIQGAEGADSTRRQNDLFKQWLKKNSDAQVVASFSDEGLSGYKGKHLTGQFGDMLARIESGEFPEGTILLVESIDRIGRLEHLETEALMNRILGNGLEIHTLQDGLIYTKDALADDLGISIIQRVKAYIAHQESKQKSFRVSQKWEQRAKLALAGEQRLTKMVPGWIDPDTFKLNEHAETVRLIFKLLLSGESLHNIARHLQANNISSFSRRKDANGFSVHSVRTILRSETTIGTLPASQRNDRPAIPNYYEPAIDASTFNKAQEILDKNRKGRTPASDNPLTINIFKGLFRCQCGASVHPTGTKNKYAGVYRCNNHLDGRCDVQPLKRKPFDRWMIDNFLGMIDVGNDGKSKRKIASLQHEVEIVTARIKKATALLLEMDDITELKTQVRELNQKRTELQTTIDTLKRKTSLTDKELTQLKDIDLMTKAGRVECQLILSKHLKGLTLGKDSVTVTLQNDTEITIPTNPLPLNDGSPIFEIADKELLDIDAYQL

SEQ ID NO: 5442 - protein, 506 aa, Unknown
  Description of Unknown: Integrase B5443 sequence
  PTHR30461:SF3,cd00338,SM00857,G3DSA:1.10.10.2600,IPR036162, PF13408,PS51737,G3DSA:3.40.50.1390,IPR025827,IPR006119, IPR038109,PF07508,IPR011109,SSF53041,PTHR30461, PS51736,Coil,PF00239
MKNAMYLRKSRQDEGGLEETLRKHKEILLDFAVKNNIQISDDDIYEETISGESLYARPEMLKLLQNIDNGMYNAVLCVDVDRLGRGGMSDQGIIFETFKNNDTKIITPRKVYDLNDEFDEDNIEFESFMARRELKIIKRRLKRGTKKSIEEGCYLANAPYGYKNTVVNKKHTLEIVEDEARIVRTIFDLYVNKGMGCQSIAYAINAMGAKPRRTEQFGRTTVMFILKNNVYIGKIVWDKKTHIRKNTRGNSKHIVIYNDKDKWTVCEGLHPPIIDMETWNKAQQIIAERTHPPTNKGEIKNVLSHLIYCGNCGGLMTRTISRGSKNDTRNKKYYYSCKSKGCIKATQCHYVDDIVINTLRYRFKDMVLDIAEQNNVHYIDYSSQIKGIKSELKKLDTQLNSLHDLLEQGIYDIPTFMDRQKTINMKKSELNNQLDIIDKKTSENKMIDEISMMNRIQSVLDVFDRATPQEKNQLLRTIVDKITYYKKPSDPTDKCRLVITLKPVFF

SEQ ID NO: 5443 - protein, 506 aa, Unknown
  Description of Unknown: Integrase B5444 sequence
  PTHR30461:SF3,cd00338,SM00857,G3DSA:1.10.10.2600,IPR036162, PF13408,IPR025827,G3DSA:3.40.50.1390,PS51737,IPR006119, IPR038109,PF07508,SSF53041,IPR011109,PTHR30461, PS51736,Coil,PF00239
MYEDIKTACLYVRFSSHNQTEQSIEGQTRVCRDFCKRHNIRIVELYADRATSASKDIEKRVQFLKMIKDSEKGLFDAVIVYKLDRFARSRYDSATYKYRLKRNGVQLISATENISNDPEGIILESVLEGMAEFYSAELSQKINRGMRESAYKHNSIGGAIPLGYKIEDKKLVIDPKTAPIVKEAFEKYADGETVAEICRQFNARGYKTSKGTAFGKSSFTKIFRNERYIGVYTFHDYRAEDAIPAIIDKDLWDRVQLRVGKIKNAPARNKAKVVYLLSGKIFCGHCGSKMNGNCNAGNYCYYQCYGKKNGNVDCKKKNIRKEFIERLVAQDALSLLTDEYIEQIATIACEKNQHEIELDSALPTIRDRIHQVDLSLNHLLKAIESGLAPDMLVKRMGELEKEKKDLQAQAKKESEDIVELDKAQVIYWLEQFRGGSIEDEEFCRMLIDLFVNSVTVWDEDDNTYKVTVAYNLTSLPTKTYRLNKGGTLSDFASNAPARPPVVYANA

SEQ ID NO: 5444 - protein, 506 aa, Unknown
  Description of Unknown: Integrase B5445 sequence
  PTHR30461:SF3,SM00857,G3DSA:1.10.10.2600,IPR036162,PF13408, IPR025827,G3DSA:3.40.50.1390,PS51737,IPR006119,IPR038109, PF07508,IPR011109,SSF53041,PF00239,PTHR30461, PS51736,Coil,cd00338
MPKKETTAPVKAVLYARYSSDRQREESIEGQIRVCEDYARRNNMVIVHTYADRAMTGRSDQRPEFQMMIQAAATQAFDVVLVYKLNRFARNRYDSAKYKHKLKKYGVHVVSAMENIADDPSGILLESVIEGMAEYYSAELAENVMRGMTENALECKWSGGLVPLGYKLDADHHLVIDEAGAQIVRRIYQMVLDGRTPTGIINELNAANCRTSTGRPFGKSSLTTILRNEKYIGTYTWNHIRKENAIPAIIDRKTFEAVQKTLQYRKNNHVKVCSENFLLTGKLFCGQCGSNMVGTSGTSKYKKTYYYYACTKHLKKDGCTARNIRADKLEELVCSVTTRILSSKEAVHAIARQAVEAQKKQKESLTVQSLKNQAAEINKKLKNCVQAVESGLISVTITNHIKEYEKRLTELNKAISREELLSGKSKLTEKHIEFFFYSIAQKIKTADKYKSILLSSLVRCVIVYNDYIEIQYNYKNELPLLQNPVRVKSSNLNGMVTQEGFEPPTP

SEQ ID NO: 5445 - protein, 506 aa, Unknown
  Description of Unknown: Integrase B5446 sequence
  cd09606,PTHR30461:SF3,cd00338,SM00857,G3DSA:1.10.10.2600, IPR036162,PS51737,G3DSA:3.40.50.1390,IPR006119,IPR038109, PF07508,SSF53041,IPR011109,PTHR30461,PS51736, Coil,PF00239
MVLMYLRKSRSDNPYETVEEVLSRHETMLQEYAEKAYGYRIPESQIYREVVSGEKIHTRPEMQILLKRIESSDVKSVLVVDPQRLSRGDLMDCGRLMQAFKYSRTTIVTPMKIFDLWDKFDEKMFQDELLRGRDYLEYAKEVMARGRKLSASEGWYLGSVPPFGYDIDYVMDGKRRRKTLKPNQIEAPIVDKIFSWFVDLKMSLYGIAAKLNNMGIKPRKAEHFSTDAVRHILSNPIYIGKISVGRRPMVEKLVDGKVVVSRHRTAPQRIFDGKQPAITQEERFYAAQERLGNLPKTKMGKGVTNPLVGILKCSCGRAMIYHPGRGEARLMCANRRYCGSRSVPFEEIYNAIIDALKENARDFQIKIDSGIDIALQRYNEEVSEIKGNLQELDVQQERLFSFLESGTYDEMTFRKRNSILMEKQEKLKKQYEEILANEPETIDYKEKIGTLYQAIDAMKSEELTAKQKNDFLKNIIGSIVYTQLEILDNGTRWGKNQYRLDIFLKN

SEQ ID NO: 5446 - protein, 506 aa, Unknown
  Description of Unknown: Integrase B5447 sequence
  PTHR30461:SF3,cd00338,SM00857,G3DSA:1.10.10.2600,IPR036162, PF13408,IPR025827,PS51737,G3DSA:3.40.50.1390,IPR006119, IPR038109,PF07508,IPR011109,SSF53041,PTHR30461, PS51736,Coil,PF00239
MTNTKDLQTGVIYARYSSDKQRDESIEGQIRECTEYAQREGILITKIYTDRALSARTDNRPEFLQMIRDSANQSFNYVIVYQLDRFSRSREDSAKYKGILRRNGVRVLSAKEHITNEPAGIILESMLEGMAEYYSVELSQKVKRGMTENALKGKMNGAAIPLGYDVTESHHLAVNAHEAKAVRLIYDLYLKHHSIAKISDILHSKGYLTKKGRKISPSVIKNILSNEKYIGVYSWGDVRIENAVPPIISQKVFDEVQQVMPNRIKNKGRRSEMYNLCGKLICGECGGHYMGSTATSRNKEKHHYYVCTNRRKHHTCAAPNIRRDELEDLVINRTLEILNQPSNIARIVDLVMSGYSNTTQEAKTAIHGINNKIKAIDTELDNCMTAIKQGFITDRLKSEIESLENERQDLLEQKTNHESAIIPIKFTADHIEYFLERMAKENPTTKAGRSRILDTFIKSVTIYSDRVEIVFNYKNELPAFSNQCATGSHFKVLVGPPGIEPGTDRL

SEQ ID NO: 5447 - protein, 506 aa, Unknown
  Description of Unknown: Integrase B5448 sequence
  PTHR30461:SF3,cd00338,SM00857,G3DSA:1.10.10.2600,IPR036162, PS51737,G3DSA:3.40.50.1390,IPR006119,IPR038109,PF07508, IPR011109,SSF53041,PTHR30461,Coil,PF00239
MVLMYLRKSRADNPYETVEEVLSRHETILQEYAERKYGERIPESQIYREVVSGEKIETRPEMKSVLRRMEAPDVDAVLVVDPQRLSRGDLIDCGTLMQAFKYSYTKIETPMKVFDLWDKFDEKMIRDEFLRGREYLEYAKEVMARGRKLSTSEGWYVSSIIPFGYDVDYVMDGKRRRKTLKPNPIESVIVQNIFEWFVNDKLSMYAISDRLNAAGIKTRKDKEFATDAVRGILKNPVYIGKIAIGRRDTKENMVDGKVVKSRPRTEPKKIFDGRHPAIVSEEIFNAAQERIGTLPKVKRSTEFRNPFSGIARCSCGRALAYNIGRGEVRLICGGRKKCGARSVPLDDFTNKVIKALKETASDFSVQIDSGIDIDIQRHAEETKQAEATLRDLDIQQERLYSFLESGTYSEEIFRKRNAILEEKKEKAQNHYKYLLDNEPVKIDYEKKVGTLYQAIDNVASDKLTPKQKNDFLKTIISKIIYTPLPSIDDGTRFGQHQYRLDIFLKD

SEQ ID NO: 5448 - protein, 506 aa, Unknown
  Description of Unknown: Integrase B5449 sequence
  PTHR30461:SF3,SM00857,G3DSA:1.10.10.2600,IPR036162,PF13408, IPR025827,G3DSA:3.40.50.1390,PS51737,IPR006119,IPR038109, PF07508,IPR011109,SSF53041,PTHR30461, Coil,PS51736,cd00338,PF00239
MEKQTAVIYARYSSDRQREESIEGQIRECKAFAAANGYRIIGTYIDRAMSARTDQRPDFQRMIHDSDRHLFQFVIVYALDRFSRSRYDSAIYKNRLKKNGVRVLSAKENIRDDPTGVILESLLEGYAEYYSLELAQKVRRGMADNLLEKKWVGTVIPFGYKKGIDSRLYVDESKRQAVIDIFQMYSDRYRLVDIIAYLNAHHFANAQGRPFSRNSLNNILVNSIYTGTFRWAGTVYPGYAPRIISDELFNKVQKIKEGRKRNMVKSASPDYELTGKIFCGRCGRPMVGVSGTGKSGNTYFYYKCSGKTHGRKDCDAKAIRRDAVESAVYNAAVAMLKQPHAIKIITAQAILAQEREQGNSEVDRLKHEKAALDAKIRNISKAVAAGLTADEIISQANEYSDRSKDLEALIRIEELKEKAFTLTPEAVTFFLEKLLEKAETGNATLSTFWDFIRCIKINGYIAEIHFNYIAVPATLDNPIRVKIETNEECSNDDVLVDHQGFEPRTP

SEQ ID NO: 5449 - protein, 506 aa, Unknown
  Description of Unknown: Integrase B5450 sequence
  SM00857,G3DSA:1.10.10.2600,IPR036162,PF13408,PS51737, G3DSA:3.40.50.1390,IPR025827,IPR006119,IPR038109,PF07508, SSF53041,IPR011109,PTHR30461,Coil,PS51736, cd00338,PF00239
MAKPEVSELAVVYARYSSHSQGEQSIEGQLSNARDYAAAHGYTIVHEYVDRAKSGRTDNRAEFQQMLKDTAKRQFSVIILWKVDRFGRNREEIAINKMKCRKNGVRVEYVAETIPDSPEGVILESVLEGFAEYYSLQLSQNIRRGRAESAEKCQSLGGNRPLGYKTGPDKKFVIDENTAPTVKMIFTMYADGKTVTEIVDKLNEMGLRTLRGGPFTKNSLHSILKNKKYIGVYEYQGREIKDGVPRIIEDDVFNKVQEMLKINKRAPAKTWSRADYILTDKLFCGKCGALMFGESGTSKTGVKHNYYICSNKKRFRSCDKKAVRQADIEDTVLNATHELLQDDELLDYIVDRTWEYYLAQDNSQEELRNLQRQLAQTDTAISNLIRAIEAGILTEETKKRMDELTQQKADLKASIADREIARGFHLQKSHIAFYLRSLRDADWSDKEAQKRLIQTFVNAVFVYDDHITLTYNFSGDKSTITLHDMQRFEDGEEFGCRASRSTISQP

SEQ ID NO: 5450 - protein, 506 aa, Unknown
  Description of Unknown: Integrase B5451 sequence
  PTHR30461:SF3,SM00857,G3DSA:1.10.10.2600,IPR036162,PS51737, G3DSA:3.40.50.1390,IPR006119,IPR038109,PF07508,SSF53041, IPR011109,PTHR30461,Coil,PS51736,cd00338, PF00239
MNTVIYLRKSRADEEAEKQGEYETLARHKSTLLKIAKEKKLNIVEIKEELVSGESISNRPKMLELLSEVEKGMYDAVLVMDIDRLGRGNMQDQGLILSTFKESNTKIITPRKIYDLNNEFDEEYSEFEAFMARKELKLITRRMQRGRIKSVEDGKFIAQAAPYGYKVEYNGKDRYLVIDEGKSEVIKIIFDMYSQNIGANRIASHLNELGYRTTTGRTWYDKAIRDIIKNKTYCGYIVWNKVERKKVSQRIKSIDKQIESKGKHEPIISEELWNKCQNIRTKRSISPTPNNIMTNPLSGVVKCNLCGYTLVAKSSTVKQPDGSIGYTKYLVCTNCRNRGTKLAIVEEKILYSLASWLTEYKVLLNNTDFKQENNIENYTKIVDNLKKELDNLNKQKENLHDLLERGIYDVDTFIERSNNIGTRIDSINDTLDSTMNIIENERKKEQAKYNIIPTLENVLEQYYNTDDILLKNKLLKSVLDKVVYTKDHKRRDEYDFDIVLYPKLPH

SEQ ID NO: 5451 - protein, 506 aa, Unknown
  Description of Unknown: Integrase B5452 sequence
  cd00338,SM00857,G3DSA:1.10.10.2600,IPR036162,PF13408, PS51737,IPR025827,G3DSA:3.40.50.1390,IPR006119,IPR038109, PF07508,SSF53041,IPR011109,PTHR30461,PS51736, Coil,PF00239
MYGMYLRKSRSDDPNEDINDTLAKHEKILFDLADSLNINRKEIMQFKEVVSGENIQNRPEMKKLLEYVMEGVLEGVLVVDSQRLARGDTVDQGTIIRAFSINNTKIITPMKTIDPQNEYDQEYFEFDLFMGRREYKMITRRMQRGRHIAAQEGYYVGSIAPYSFSRIKLEKGYSLEIYEEENKVFNIMKKKALEDEGSTNISNHLNELGYKPRKGEYWTKSAVEAILLNETNLGLIKWNSRKEVKVFKDGKIVKTRPRNPNYELYPGKHPAIMTQDEYDRIKFLMKKRSHPVKKDKTLQNPLAGLIVCGFCNHKMARRPYKNGRVETILCTTSRCKNVASDIHVVEQRIIDTLKDTLKNYTNYVNNYSVSVNKTYDDNKKLQLEECDKELERLNKQIIKACEMLELGAYTVELFKERKNTLENKINTVNKRKDILAKETEAMKIEQYKKAIPQLQNAIDLYWKSSTEEKNKILKSIIDKCIYKKEKGGRWDPDAIKQFKLEIYLKV

SEQ ID NO: 5452 - protein, 506 aa, Unknown
  Description of Unknown: Integrase B5453 sequence
  SM00857,G3DSA:1.10.10.2600,IPR036162,PF13408,PS51737, G3DSA:3.40.50.1390,IPR025827,IPR006119,IPR038109,PF07508, SSF53041,IPR011109,PTHR30461,Coil,PS51736, cd00338,PF00239
MAKPEVSELAVVYARYSSHSQGEQSIEGQLSNARDYAAAHGYTIVHEYVDRAKSGRTDNRAEFQQMLKDTAKRQFSVIILWKVDRFGRNREEIAINKMKCRKNGVRVEYVAETIPDSPEGVILESVLEGFAEYYSLQLSQNIRRGRAESAEKCQSLGGNRPLGYKTGPDKKFVIDENTAPTVKMIFTMYADGKTVTEIVDKLNEMGLRTLRGGPFTKNSLHSILKNKKYIGVYEYQGREIKDGVPRIIEDDVFNKVQEMLKINKRAPAKTWSRADYILTDKLFCGKCGALMFGESGTSKTGVKHNYYICSNKKRFRSCDKKAVRQADIEDTVLNATHELLQDDELLDYIVDRTWEYYLAQDNSQEELRNLQRQLAQTDTAISNLIRAIEAGILTEETKKRMDELTQQKADLKASIADREIARGFHLQKSHIAFYLRSLRDADWSDKEAQKRLIQTFVNAVFVYDDHITLTYNFSGDKSTITLHDMQRFEDGEEFGCRASRSTISPP

SEQ ID NO: 5453 - protein, 506 aa, Unknown
  Description of Unknown: Integrase B5454 sequence
  PTHR30461:SF3,SM00857,G3DSA:1.10.10.2600,IPR036162,PF13408, PS51737,G3DSA:3.40.50.1390,IPR025827,IPR006119,IPR038109, PF07508,IPR011109,SSF53041,PF00239,PTHR30461, PS51736,Coil,cd00338
MKNAMYLRKSRQDEGGLEETLRKHKEILLDFAVKNNIQISDDDIYEETISGESLYARPEMLKLLQNIDNGMYNSVLCVDVDRLGRGGMSDQGIIFETFKNNDTKIITPRKVYDLNDEFDEDNIEFESFMARRELKIIKRRLKRGTKKSIEEGCYLANAPYGYKNTVVNKKHTLEIVEDEARIVRTIFDLYVNKGMGCQSIAYAINAMGAKPRRTEQFGRTTVMFILKNNVYIGKIVWDKKTHIRKNTRGNSKHIVIYNDKDKWTVCEGLHPPIIDMETWNKAQQIIAERTHPPTNKGEIKNVLSHLIYCGNCGGLMTRTISRGSRNDTKNKKYYYSCKNKGCIKATQCHYVDDIVINTIRYRFKDMVLDIAEQNNVHYIDYSSQIKGIKSELKRLNTQLNSLHDLLEQGIYDIPTFMDRQKTINMRKSELNNQLDIIDKKTSENKMVDEISMMSRIQSVLDVFDRATPQEKNQLLRTIIDKITYYKKPSDSTDKCRLVITLKPVFF

SEQ ID NO: 5454 - protein, 506 aa, Unknown
  Description of Unknown: Integrase B5455 sequence
  PTHR30461:SF3,IPR036162,PS51737,IPR011109,PTHR30461, PF00239,G3DSA:1.10.10.2600,IPR006119,SSF53041,cd00338, SM00857,IPR025827,IPR038109,PS51736,mobidb-lite, PF13408,G3DSA:3.40.50.1390,PF07508,Coil
MNVVIYARFSSHSQTEQSIEGQLKVCYEYAESNHYTVVGEYIDRAISGTTDNRAEFQRMISDSDRHTFEGVLVYQLDRFARNRYDSAINKAKLKKNGVRVLSAKENIADDASGILVEGVLESMAEYYSVELSQKIHRGMAINAEKCLSNGSNPGLGFKVDAERRFYVDEEEAAIVREIYERYASGETKAEIIRDLKRRRVKTSLGKEFSPNSLSRLLSNKRYIGVYLYKGKETPGGMPRILDDDLFYRVQSMMNKNKSAPARTHGEGEYLLTTKLFCGHCKEMMVGYGGTSKTGRQYHYYMCKNARRKKCGKKIVSKSYIEDRVVNECLKMLTEEKIRFIAKKVAEECTKSPDNLTAKALKKAIREADTAIENLWKAIEQGQAVEMLTDRLNKRMAEKAELEAQLAIEENKKITLTEAQILAFLDYVCEMPADDVNKRRAIINIFVHSIYLYDDHFTLIINASKKPLSIDNIPLDDIETAFEGETGASEGCSSLSTPAPPRYDKSA

SEQ ID NO: 5455 - protein, 506 aa, Unknown
  Description of Unknown: Integrase B5456 sequence
  cd03768,PTHR30461:SF3,SM00857,IPR036162,PF13408, IPR025827,G3DSA:3.40.50.1390,PS51737,IPR006119,PF07508, SSF53041,IPR011109,PTHR30461,PS51736,Coil, PF00239
MAIALYARKSIERENSISCETQIEYCKSVIKPDERSEKTIEFIDNGYSGGNVDRDGFQKMMRQIERGKISKVIVYRLDRISRSLSDFVGILETLKKHNVQFVSSQESFDTSSPYGEMIVKILMVFAEFERKSIIERVKHAYAYRSEMGLYMSGRRPYGFNLKDTVINNVKTKMFEPVTNEIEQIKYIFENYSVPNVTLRRLMDNLIDNNISATTGSWSTAKLSNIIKNPIYVKADNAIYEYYSKRNANIMSDINQFDGLHGIQTYGKSKHTADDMSDIKIVVMPHDGIINSELWLKCQKKIVKNKKLGNSVNNSTSWLGGKIACKQCGRTMTVTKGGKKKDGTQTRYFSCTGKSHNRICNGPKVTLYADSLEDMVYKLIAEKLQSLKGSRKKISTDNSNKINLLKNQLSEIKQSQEKIVNMLLDDSFKSDMKSLLNEKAKKLSEESKAITEKIEDLESEENEIISVINLSQKWKSANTDERKAVCNVLIHKIFICEDGTCEVVWNI

SEQ ID NO: 5456 - protein, 506 aa, Unknown
  Description of Unknown: Integrase B5457 sequence
  PTHR30461:SF3,SM00857,G3DSA:1.10.10.2600,IPR036162,PS51737, G3DSA:3.40.50.1390,IPR006119,IPR038109,PF07508,IPR011109, SSF53041,PF00239,PTHR30461,PS51736,Coil, cd00338
MYCIYLRKSRADMEAERQGIDTLARHEKILTSYAAEHGYSIGKIYREVVSGDTIAARPQVQQMLQDAEAGMWEGVLVMEVERLSRGATIDQGIIAQVFKFSNTKIITPYKVYNPNDEYDEEFFEYGLFQSRREYKAITKRQQRGVLQSCQEGKWVYNKVPYGYERYKLEHEKGYSLRIVPEQGKVVRMIYTLYRDGMGYSSISDYLNNMNIPAPGDHWTYNTVCSILQNPVYNGKIKRGARAVVKTTEGGTLKSSRPRNKHYNIYEGLHEPIIDDILWRTVQDKFATHPSKPVAKALEIRNPLAGLVYCQVCGHKMIRRPQDRCRTMIICPVKSCHNISCYESVLEHTVIDYLCKYLEELKTNTGISIDTTTLEMLKASLQKSNKEIEQLNNQMDNAYDLVEQGVYSADIFMKRQKSINCKLAAEKLKNEGITAQIHKEEKVIRQRDTLIPRIENTLNVYWDLDPAEKNRMLCDIIDHIEYVKKERSKKNGPYNNFQIVVHPRIPV

SEQ ID NO: 5457 - protein, 506 aa, Unknown
  Description of Unknown: Integrase B5458 sequence
  PTHR30461:SF3,SM00857,G3DSA:1.10.10.2600,IPR036162,PF13408, IPR025827,G3DSA:3.40.50.1390,PS51737,IPR006119,IPR038109, PF07508,SSF53041,IPR011109,PTHR30461,Coil, PS51736,cd00338,PF00239
MNAVIYARFSSHNQQEQSIEGQIRYCTEYAKKNDMTIINSYIDRAISGTSDNRPEFLQMIKDSNNHQFNVVLVWKLDRFARNRYDSAIYKNALKKNNVKVVSVTEYLGEGSESVLLEAMLEAMAETYSRQLSENVRRGMRESALKCQVVGGSVPLGFDTVDKKYVINEKEAEIVRFIFDEYVSGTSKKEIVNKLNAKGWRTKNGSTFVFNSLNKILSNRKYIGEYKYEDIVVEHGIPAIIDERTFNLAQKQLAKNKRTAGRKKAKVEYLLSGKIFCGYCGENMLGESATNRHGKKYHYYICNSKKKYKNCKKKRESKETLEKYLVQQTILFFSDKNNIDKVAKKVVKLYNSELHNGHIDSMIANKKELEKQLDNLTNSLIKTSNDRVLNTINEKINSIDTQLSDLEIEIAREKSLASIEMTVSDVVCFINDLINGDINDVIFKKQIIDTLINAIYIYDDKIIVYFNGSEDAKTITYDDLCSDLEKIDNGGEFVFQPLTSTNKLNCT

SEQ ID NO: 5458 - protein, 506 aa, Unknown
  Description of Unknown: Integrase B5459 sequence
  PTHR30461:SF3,cd00338,SM00857,G3DSA:1.10.10.2600,IPR036162, PF13408,IPR025827,PS51737,G3DSA:3.40.50.1390,IPR006119, IPR038109,PF07508,SSF53041,IPR011109,PTHR30461, PS51736,Coil,PF00239
MYEDIKTACLYVRFSSHNQTEQSIEGQTRVCRDFCKRHNIRIVEIYADRATSASKDIEKRVQFLKMIKDSEKGLFDAVIVYKLDRFARSRYDSATYKYRLKRNGVQLISATENISNDPEGIILESVLEGMAEFYSAELSQKINRGMRESAYKHNSIGGAIPLGYKIEDKKLVIDPKTAPIVKEAFEKYADGETVAEICRQFNARGYKTSKGTAFGKSSFTKIFRNERYIGVYTFHDYRAEDAIPAIIDKDLWDRVQLRVGKIKNAPARNKAKVVYLLSGKIFCGHCGSKMNGNCNAGNYCYYQCYGKKNGNVDCKKKNIRKEFIERLVAQDALSLLTDEYIEQIATIACEKNQHEIELDSALPTIRDRIHQVDLSLNHLLKAIESGSAPDMLVKRMGELEKEKKDLQAQAKKESEDIVELDKAQVIYWLEQFRGGSIEDEEFCRMLIDLFVNSVTVWDEDDNTYKVTVAYNLTSLPTKTYRLNKGGTLSDFASNAPAWRGRKTASQ

SEQ ID NO: 5459 - protein, 506 aa, Unknown
  Description of Unknown: Integrase B5460 sequence
  PTHR30461:SF3,SM00857,G3DSA:1.10.10.2600,IPR036162,PF13408, IPR025827,G3DSA:3.40.50.1390,PS51737,IPR006119,IPR038109, PF07508,SSF53041,IPR011109,PTHR30461,Coil, PS51736,cd00338,PF00239
MKAVIYARYSAGSGQTELSIEGQLRECKKYIEKKGYTLGEVYADRHVSGLSTKGREEFKRLMGDAKAHKFDVVVCYDTSRFARDKFDAVVYKTELRKRLGIAIEWATMNVEGPEGVLLEAIMEGWNQYFSEELSRKTKRGMAEAASKGLSLGSKPPLGYTLKDRHFVVDEAGAEAVREVFEAYTGGASFADCARMLNEQGFRTATGKLFNGSAVRYMLTNKKYLGIHGGASGVVPAIVDPEVFQAARDRIGERPPKSVKHDFALVGKLTCGCCGSRMTGTSTLSKGRRYYYYKCSNKCAGQPVRQDKLDSFVAACAQEALSKPETVKEVAARLFAYQKKENPLESKIEALGKSLKSLDMKIDNLTTALAERPASKALLTRLDDLEEQREQVQRAIEAEPEQEPCRILSEQAIADGLAGLLAPLSDPDRIQSQERWILDSLVEAVELTPDEVLITYATDSIVKRDQEGQVSKKVLIGTPDSTFFETIEIYTAPGAVILSCSRSAASF

SEQ ID NO: 5460 - protein, 506 aa, Unknown
  Description of Unknown: Integrase B5461 sequence
  PTHR30461:SF3,SM00857,G3DSA:1.10.10.2600,IPR036162,PF13408, IPR025827,G3DSA:3.40.50.1390,PS51737,IPR006119,IPR038109, PF07508,SSF53041,IPR011109,PTHR30461,PS51736, cd00338,PF00239
MNGVIYARYSSENQREESIDGQLRECTAFAQHNDIQIVGEYIDRAFSAKTDNRPSFQKMIKDSAKGEFDVIIVWKLDRFARNRYDSAHYKNILKKNGVKVVSATEAISSGAEGIILESVLEGMAEYYSAELAEKVSRGMKENALKCKYNGGSVPLGYYIDESKHFQIDSSVAPFVVECFEHYADGMTMKQLRDELNMKGVKNSRGGKLSIDVISRMLTNRKYLGEYTFQDITIKDGIPAIVSTSLFEKVQDRLTKTKKVPSSHKADDDYILTTKLFCGKCKSFMVGESGTNAQGKKYRYYKCVNHKKHQGCDMKSIRKDLIENMTIKYIREFLNDEDLINTLIDLAYDAQHKENEQLPLLRKQLAQTEKGIKNIVDAIEQGISTKSTRERLLDLEQRKNDIEMSISKESIENPMLTKKQFKFWFDQLKKLDISKSEQRQKLVDLFVNSIIIYDDHIKFFFNYKEHTETITFDELNNCSDLPDSPRPKGLPNGSPYFLPKIAKNRII

SEQ ID NO: 5461 - protein, 506 aa, Unknown
  Description of Unknown: Integrase B5462 sequence
  SM00857,G3DSA:1.10.10.2600,IPR036162,PF13408,IPR025827, G3DSA:3.40.50.1390,PS51737,IPR006119,IPR038109,PF07508, SSF53041,IPR011109,PTHR30461,Coil,PS51736, cd00338,PF00239
MAKPEVSELAVVYARYSSHSQGEQSIEGQLSNARDYAAAHGYTIVHEYVDRAKSGRTDNRAEFQQMLKDTAKRQFSVIILWKVDRFGRNREEIAINKMKCRKNGVRVEYVAETIPDSPEGVILESVLEGFAEYYSLQLSQNIRRGRAESAEKCQSLGGNRPLGYKTGPDKKFVIDENTAPTVKMIFTMYADGKTVTEIVDKLNELGLRTLRGGPFTKNSLHSILKNKKYIGIYEYQGREIKDGVPRIIEDDVFNKVQEMLKINKRAPAKTWSRADYILTDKLFCGKCGALMFGESGTSKTGAKHNYYICSNKKRFRSCDKKAVRQADIEDTVLNATHELLQDDELLDYIVDRTWEYYLAQDNSQEELRNLQRQLAQTDTAISNLIRAIEAGILTEETKKRMDELTQQKADLKASIADREIARGFHLQKSHIAFYLRSLRDADWSDKEAQKRLIQTFVNAVFVYDDHITLTYNFSGDKNTITLRDMQRFEDGEEFGCRASRSTISPP

SEQ ID NO: 5462 - protein, 506 aa, Unknown
  Description of Unknown: Integrase B5463 sequence
  PTHR30461:SF3,SM00857,G3DSA:1.10.10.2600,IPR036162,PS51737, G3DSA:3.40.50.1390,IPR006119,IPR038109,PF07508,IPR011109, SSF53041,PTHR30461,Coil,PS51736,cd00338, PF00239
MTHSNDGLFALYLRRSRADIEREKFEKFDTLKSHEQELTKSAKAQGIILDTPYYKELASGEHIADRPVFQELMQKVSDGKYQGIMVHEISRLGRGEPREYGHILFTIKSLGIKIATLYRVFDPSNPDDYRQIKTEMFLSNMEFDNIVWRLDRGSKTKAEMGCFIKPTPPFGYDRYKRPQDGYWSLIPNSDAPLVKQIFDYAAEGRSLGYIARTLNESGIRTPTGKYWTASRIRTIITNPHYKGFIRYGYYKRKEVPSEGYKTKKIYSFNNNCILVKGLHEGIVSDEEWEKANSFLNSSPVKKDRELKNPLAGLLVCKKCGHPMVRFLNKVRSNGNLIEHYRHPQFNGCKMHGSRMSIVIDLLCDALKEVSSDLEVKIQNDHKDNTQELKESLEAQLSIIENKTKKIMELYFSDAIPVEEVKEMRLEADRRKKQLEEELSKLSKPKKTPKEIRLSIHKAIDLLKDENVSAEVKNSFLKSFISKIEYENTAERNDHSPGKIKLTIILK

SEQ ID NO: 5463 - protein, 505 aa, Unknown
  Description of Unknown: Integrase B5464 sequence
  PTHR30461:SF3,IPR036162,PS51737,IPR011109,PTHR30461, PF00239,G3DSA:1.10.10.2600,IPR006119,SSF53041,cd00338, SM00857,IPR025827,IPR038109,PS51736,mobidb-lite, PF13408,G3DSA:3.40.50.1390,PF07508,Coil
MNAVIYARFSSHSQREQSIEGQLRDCYEYAKRYDINIVGEYIDRAISGMTDDRPDFQRMIADAPKKQFERIIVWKLDRFARNRYDSALYKHKLKQYGIRVISAMENVGEGDESILLEALLEASAEYYSLDLKKKILRGQRETIAKGRWCGGPIPYGYKAVDGKLVADEKTAPIIRYVFEQYAQGVPMKEIIDELKRRGVRSSRGGELTYTTFSRALTNPVYIGNFMYKGELVPGVADALIDEDTYNKVQIIVKANAHAPAANKAKVEYLLQGKAFCGHCGSHMVGESGKSRNGDVYYYYSCAARKKAHKCRKKNEKKDFIEWYVVEQTLQYVLTPARMRDIAKAVVAEYDKEFAGSRVEEYEKAIKQYERELDKLVDALVDAPKVAHKRIYEKMETLETQKASMENELVKLRIASEIRFTEEEVRAWLRRFCTGDLFDPEFRRNIIDTFINCIYLYDDRIIIFYNIKGGKQVSFVDLAESLDNESESSGSDLNANAPRMVKVEKP

SEQ ID NO: 5464 - protein, 505 aa, Unknown
  Description of Unknown: Integrase B5465 sequence
  PTHR30461:SF3,SM00857,G3DSA:1.10.10.2600,IPR036162,PF13408, IPR025827,G3DSA:3.40.50.1390,PS51737,IPR006119,IPR038109, PF07508,SSF53041,IPR011109,PTHR30461,Coil, PS51736,cd00338,PF00239
MAKPEVSELAVVYARYSSHSQGEQSIEGQLSNARDYAAAHGYTIVHEYVDRAKSGRTDNRAEFQQMLKDTAKRQFSVIILWKVDRFGRNREEIAINKMKCRKNGVRVEYVAETIPDSPEGVILESVLEGFAEYYSLQLSQNIRRGRAESAEKCQSLGGNRPLGYKTGADKKFVIDENTAPTVKMIFTMYADGKTVTEIVDKLNELGLRTLRGGPFTKNSLHSILKNKKYIGIYEYQGREIKDGVPRIIEDDVFNKVQEMLKINKRAPAKTWSRADYILTDKLFCGKCGALMFGESGTSKTGVKHNYYICSNKKRFRSCDKKAVRQADIEDAVLNATHELLQDDELLDYIVDRTWEYYLAQDNSQEELRNLQRQLAQTDTAISNLIRAIEAGILTEETKKRMDELTQQKADLKASIADREIARGFHLQKSHIAFYLRSLRDADWSDKEAQKRLIQTFVNAVFVYDDHITLTYNFSGDKSTITLHDMQRFEDGEEFGCRASRSTNTI

SEQ ID NO: 5465 - protein, 505 aa, Unknown
  Description of Unknown: Integrase B5466 sequence
  cd00338,SM00857,IPR006118,G3DSA:1.10.10.2600,IPR036162, PS51737,G3DSA:3.40.50.1390,IPR006119,IPR038109,PF07508, IPR011109,SSF53041,PTHR30461,PS00397,PS51736, Coil,PF00239
MMNENVLKTAALYIRVSTDKQEELSPDSQKRLLLEYARNHNMVVPPEHIYMENGISGRRADKRPKFQQMISAAKLSSHPFDVILVWKFSRFARNQEESIVYKSMLRNKCHVDVVSISEPLIEGPFGGLIERIIEWMDEFYSIRLSGDVTRGMTENALRGSYQCRPPLGYRIPYHKATPEIVPEEAEIVRLIFEKYVNGMSIFALTKYLNSHGFKTSHGKLFEKRSLEYILQNPAYAGDIRWNRCNNTTKEIRDPSEWIVRSGHHPAIISKELYEKAQARWKSEYKPRNAKPSEVTKHWLAGLVKCPSCGRSLSSCVMHRKSLPDTFSFQCGGYLKGKCYHNCYVRAESLVPAVLNALEEALACGTVKYDLKQTDSIQDQSQDEIQSLKRRLERVDQKELRAREAYMEGIDTKEDYRKNKELLNREREELTERISQLEDLPQKGYDDTVMLDRISNVLDILHSDKFSVSEKNSALKSIIDKIIYDKEQNHIDVYYYMMKAPENLVK

SEQ ID NO: 5466 - protein, 505 aa, Unknown
  Description of Unknown: Integrase B5467 sequence
  PTHR30461:SF3,cd00338,SM00857,G3DSA:1.10.10.2600,IPR036162, PF13408,PS51737,G3DSA:3.40.50.1390,IPR025827,IPR006119, IPR038109,PF07508,IPR011109,SSF53041,PTHR30461, PS51736,Coil,PF00239
MSSVDKIAVIYARYSSHGQTEQSIEGQIAAAQKYAEQHGYTIIHIYADRAMTGRNDDREQFQKMLSDTAMHQFGVILLWKIDRFGRNREEIAFNRYRCKKNGVRVERVAEDVPDGPEGVILDSVLEGMAEYYSLQLAQNVRRGQRESAKKSMSIGGNKMLGYVVNPETKRYESDPKTASYVTEIFKRYANGETISEIVAWLNAQGIRTTRGSEFTVNSLHRLLKNEKYTGVYIFHDIRNEGGMPALTDRATFDKVQEMLKVNRRAPVRVWSKTEYLLTDKLFCGHCGAIMVGESGHGRNGTKHSYYTCLNRKKKKSCDKKPVRQDVIEPLVLRAIGKLLENPATLENIADQVWAAYERSDTSGDTIKALDKQIADVDRALSNVMKAIEMGIINEMTKTRMDELTNQKQALSQSRAEAGLTGGFKLTRDMILFFLQEMAALDMADRDSQKRLIKTFVNAIYLYDDHFDIAFNYTDNGKVAVRMQEINDAASGEVFGCCAQSPTIRL

SEQ ID NO: 5467 - protein, 505 aa, Unknown
  Description of Unknown: Integrase B5468 sequence
  SM00857,G3DSA:1.10.10.2600,IPR036162,PS51737,G3DSA:3.40.50.1390, IPR006119,IPR038109,PF07508,SSF53041,IPR011109, PTHR30461,Coil,PS51736,cd00338,PF00239
MAYAIYLRKSRADAEMEALGEMETLARHEKILTELAKRQELPIGRIYKEIVSGESIADRPQMKQLLDDVYLKKWEGVLVMEVERLARGDTRDQGDVAEAFKYSNTKIITPIKTYDPNNEYDEEYFEFGLFMSRREYKTIKRRLDRGRKISVQEGNYIGGCAPYGYDIWRRGKKDITLKPNEDAKIVKMIYEWYANDNLGASKIASKLSLMGVTSPSGNKEWNHSCIIDILKNPHYIGKIRWKNREMKKEFVDGKMKKMNVRNKVNFEIYDGKHEAIIDEELYERVQNRIGKNSKTQISRELQNPLAGILCCKSCGKKLVYQGYSTRPNMSPRYVHVHSVFCKMKSSSAKEVIDAVIIGLKAHIEDFELKMTNEFEIENKKKQDDVIEFIEKELIKLKKSRTKLFDYLEDGIYTKEEFIERKGILTVKIEELEKQLEAEKLKVGEEVNYEEKIVTLKQIIESLKDDSIGAKYKNDFLKEVIDHIDYECEDFGRGRGGQIYLDIFLK

SEQ ID NO: 5468 - protein, 505 aa, Unknown
  Description of Unknown: Integrase B5469 sequence
  cd03768,PTHR30461:SF3,SM00857,G3DSA:1.10.10.2600, IPR036162,PF13408,IPR025827,G3DSA:3.40.50.1390, PS51737,IPR006119,IPR038109,PF07508, SSF53041,IPR011109,PTHR30461,PS51736,Coil,PF00239
MCPIDALYARQSLDKKDSISIENQLEFCKYETRGAEYETYIDKGFSGKNTNRPAFAKMMEDIRAGKIKRVIVYKLDRISRSILDFSNMMEIFQQYHVEFVSSTEKFDTSTPIGNAMLNISIVFAQLERETIQKRIADAYATKSQKGYYMGGRVPYGFQLEKTIINGIHTSVFVPEPNEMKQIRLIYQLYSEPDMTLGAVMRELLRQGFTEKRGAPWSTARISEILRNPVYAKADIDIYNFFESQGANMINPASDYVGTNGIFLYKGINGDKTKKKQYDLVDRDVVIAPHLGVIESDVWLKCRLKIMKNRQSARTNKGKRTWLAGKVKCKKCGYAYTVTRSNTKAGRYFQCSGSRYSIKCKGAGHTIYADVFEDYVLHEMKKQLAKFQYLSDELEAVTQPSSQAEKVRIAEIEQEIGNLLAKVPEANKTVMEYINRRIEELDKEKQSLQQKLVEQSTNQTSGKMDKITNYVAKWDELDNDDKQRVADILIDRIDIDEDVIEITWNI

SEQ ID NO: 5469 - protein, 505 aa, Unknown
  Description of Unknown: Integrase B5470 sequence
  cd00338,SM00857,IPR006118,G3DSA:1.10.10.2600,IPR036162, PS51737,G3DSA:3.40.50.1390,IPR006119,IPR038109,PF07508, IPR011109,SSF53041,PTHR30461,PS00397,PS51736, Coil,PF00239
MMHENVLKTAALYIRVSTDKQEELSPDSQKRLLLEYARNHNMVVPPEHIYMENGISGRRADKRPKFQQMISAAKLSSHPFDVILVWKFSRFARNQEESIVYKSMLRNKCHVDVVSISEPLIEGPFGGLIERIIEWMDEFYSIRLSGDVTRGMTENALRGSYQCRPPLGYRIPYHKATPEIVPEEAEIVRLIFEKYVNGMSIFALTKYLNSHGFKTSHGKLFEKRSLEYILQNPAYAGDIRWNRCNNTTKEIRDPSEWIVRSGHHPAIISKELYEKAQARWKSEYKPRNAKPSEVTKHWLAGLVKCPSCGRSLSSCVMHRKSLPDTFSFQCGGYLKGKCYHNCYVRAESLVPAVLNALEEALACGTVKYDLKQTDSIQDQSQDEIQSLKRRLERVDQKELRAREAYMEGIDTKEDYRKNKELLNREREELTERISQLEDLPQKGYDDTVMLDRISNVLDILHSDKFSVSEKNSALKSIIDKIIYDKEQNHIDVYYYMMKAPENLVK

SEQ ID NO: 5470 - protein, 505 aa, Unknown
  Description of Unknown: Integrase B5471 sequence
  SM00857,G3DSA:1.10.10.2600,IPR036162,PS51737,G3DSA:3.40.50.1390, IPR006119,IPR038109,PF07508,IPR011109,SSF53041, PTHR30461,Coil,cd00338,PF00239
MASAVIYARYSSSGQREESIEDQVRVCTEEAHRNGDRIVRVYADRATSGTTTNHRAAFAEMVADSARGWFEKVYVYKTDRFARNRYDSAIYKTKLKRNGVRVVSATERIEDGPDGILLEAVLEGMAEYYSANLAENVKRGLHGNALKCKHNGVMVYGFDRGEDGYYHVNEEQARVVRTMFEMYDAGSGFPEIEDALKPWRTSYGKPFTMKTISKMLRNEKYAGVYKYGGQRVEGGMPSIVPPELFERVQRRLALRTRKRRGTVEYLLSGKLFDIDGNRYQSSSGHGKSGRKYTYYRCPATGHIVPQEKLERAVAEEVQAFLSSDHVAGIIADLVMEEQEVALSDDLDAMDALRKRLADNEREQARMVDLAAKTGATDAVAAKLDELVAERQAVADELAELEKGTPVFDRDHVEFWVHEVVGKKDPLEVIALFVKRVVLDREGERFHVEFIIDGGDDGGNETNPLPDAPDGGSCKSQLAGYVRVSTNTYAYGIRRGFALLVTDVAL

SEQ ID NO: 5471 - protein, 505 aa, Unknown
  Description of Unknown: Integrase B5472 sequence
  PTHR30461:SF3,cd00338,SM00857,G3DSA:1.10.10.2600, IPR036162,PF13408,PS51737,IPR025827, G3DSA:3.40.50.1390,IPR006119,IPR038109,PF07508, IPR011109,SSF53041,PTHR30461,Coil,PF00239
MYEEIKTACLYLRYSSSNQTEQSIEGQMHVCQDFCKRHNIRIVEMYIDRATSASKDIEKRVEFLKMIKDSEKGNFNAVIVYKLDRFARSRYDSATYKYRLKRNGVQLISATENITQDPEGIILESVLEGMAEFYSAELSQKINRGMRESAMKHNSIGGAIPLGYKTVDKKLVIDETTAPIVREAFQMYADGESVAEICRTFNNRGYKTSKGTRFGKSSFTKIFRNEKYIGVYKYHDYRAEDVIPPIIDKDLWDRVQVRVGKIKKAPARNKARHTYLLTGKLFCGHCGSAMNADGNSQGYLYYRCYGKKNLDKQCNKRNMEKNLIERLVAQDAMSFLTDEYIEKIATIACDRNKQEIESDSPIPVIRDRIRQVDVSLNNLLKAIETGSAPDMLVKRMGELETEKKDMEVQLKKEMAHQVYIDKEQVIFWLEKFREGDINDEEFCQTVIDLFVNSVTVWDEPDDKFRITIAYNLTSIPQKTYRLSKDGRLSDYASNTPVEQWQQMNG

SEQ ID NO: 5472 - protein, 505 aa, Unknown
  Description of Unknown: Integrase B5473 sequence
  PTHR30461:SF3,cd00338,SM00857,G3DSA:1.10.10.2600,IPR036162, PF13408,PS51737,G3DSA:3.40.50.1390,IPR025827,IPR006119, IPR038109,PF07508,IPR011109,SSF53041,PTHR30461, PS51736,Coil,PF00239
MTKNAVIYARFSSDKQREESIDGQIRECRTFAEANEITIINTYIDRAMSARTDQRPSFLQMVKDSAKHLFDYVIVYQLDRFSRSRYDSAIYKHRLKKNGVKVLSAKENIKDDPSGILLESVIEGMAEYYSAELSQKVKRGMTENLLEGKWIGGIVPFGYELTSENKLAISPATGHLVPEIYDKYLSGIKTTDILSKLNSLGIKTQRGCNFTRNSLNRILKNQIYTGTFTWAGTSYPDYAPALITQEQYTAMQNLFESRKRKSNTARRVSPQYALTGKIYCGTCGLPMTGYCGKSHTGTTYYYYQCSSKNNKSEKAARSQIACDAKNISRDKLEKLVLDTTISILKNKDAVKCIADQCMAIQKAELEHKPAEQLRLESQIKEIEKRLKNSVKAVENGLISQTITNNIETYEKQLTELNAQLDGLKLETHIIPITEEAVIYYLNQLTERANKKDGYSLDTFDDFIRRVVVTGKRVDIYYNYTAVPNILENPAVKMLRGSSEDCLVTR

SEQ ID NO: 5473 - protein, 505 aa, Unknown
  Description of Unknown: Integrase B5474 sequence
  PTHR30461:SF3,cd00338,SM00857,G3DSA:1.10.10.2600,IPR036162, PF13408,PS51737,IPR025827,G3DSA:3.40.50.1390,IPR006119, IPR038109,PF07508,IPR011109,SSF53041,PTHR30461, PS51736,Coil,PF00239
MPKTEEKQAVKAVIYARYSSDRQREESIEGQLRVCEDYASRNNMTILHTYADRAMTGRSDQRPEFQMMIRDAATMAFDVVLVYKLNRFARNRYDSAKYKHKLKKYGIKVVSAMENIADDPSGILLESVIEGMAEYYSAELAENVMRGMTENALEGKWTGGVVPLGYKLDEQHHLVIDGPKAEVVRLIYQMALEGHNQKYIIDELNRRHYTNSAGGPFSYNTLRTILRNEKYIGVFTWGTVRRENACPAILDKATFEAVQEHLKFRTKHHIRSCNEDFLLTGKLFCGCCHSKMVGVSGTSKTGAIYYYYACAAHLKKKCKTRNIRKDAIEDLVCEVTTRILSSKEAVEAIARQAIEMQKNKKDSLELQAIKNQIADINKKLQNCVKAVENGLISDTITNHINEYEKELTRLKDDAARVKLLDGDIELTQQHIEFFFWSIAQKIKAADKYKSILLSSIVRSVIVYKDYIEIQYNYKNELPILQNPVKVESSYLNQMVIHPGFEPGTP

SEQ ID NO: 5474 - protein, 505 aa, Unknown
  Description of Unknown: Integrase B5475 sequence
  cd03768,PTHR30461:SF3,SM00857,G3DSA:1.10.10.2600,IPR036162, PF13408,IPR025827,G3DSA:3.40.50.1390,PS51737,IPR006119, IPR038109,PF07508,SSF53041,IPR011109,PTHR30461, PS51736,Coil,PF00239
MCPIDALYARQSLDKKDSISIENQLEFCKYETRGAEYETYIDKGFSGKNTNRPAFAKMMEDIRAGKIKRVIVYKLDRISRSILDFSNMMEIFQQYHVEFVSSTEKFDTSTPIGNAMLNISIVFAQLERETIQKRIADAYATKSQKGYYMGGRVPYGFQLEKTIINGIHTSVFVPEPNEMKQIRLIYQLYSEPDMTLGAVMRELLRQGFTEKRGAPWSTARISEILRNPVYAKADIDIYNFFESQGTNMINPASDYVGTNGIFLYKGINGDKTKKKQYDLVDRDVVIAPHLGVIESDVWLKCRLKIMKNRQSARTNKGKRTWLAGKVKCKKCGYAYTVTRSNTKAGRYFQCSGSRYSIKCKGAGHTIYADVFEDYVLEEMKKQLAKFQYLSDELETVTQPSSQAEKVRIAEIEQEIGNLLAKVPEANKTVMEYINRRIEELDKEKQSLQQKLVEQSTNQTSGKMDKITNYVAKWDELDNDDKQRVADILIDRIDIDEDIIEITWNI

SEQ ID NO: 5475 - protein, 505 aa, Unknown
  Description of Unknown: Integrase B5476 sequence
  PTHR30461:SF3,cd00338,SM00857,G3DSA:1.10.10.2600,IPR036162, PF13408,PS51737,G3DSA:3.40.50.1390,IPR025827,IPR006119, IPR038109,PF07508,IPR011109,SSF53041,PTHR30461, PS51736,Coil,PF00239
MNNTDLQTGVIYARYSSDKQRDESIEGQIRECTEYAQREGILITKIYTDRALSARTDNRPEFLQMIRDSANQTFNYVIVYQLDRFSRSREDSAKYKGILRRNGVRVLSAKEHITNEPAGIILESMLEGMAEYYSVELSQKVKRGMTENAIKGKMNGSAIPLGYDLTESHHLAVNAHEAKAVRLIYDLYLKQYSLAKIADILHSKGYTTKRGGKISYSVIRNILSNEKYIGVYQWGDIRIEDSIPPIIARDVFDEVQQVLPTRIKNKGRRSEMYNLCGRLICGQCGGHYMGSTATSRNGEKHRYYVCTNRRKHHTCSAPNIRRDELEDLVINRTLEILKQPQIITRIVDLVMNGYNHTTQEAKTAIQGIQGKIKAIDIELNNCMTAIKQGFINDRLKAEIENLEKERQDLLEQKANHESVISPIKFTAEHIEYFLERMANENPTTKAGRSRILDTFIKSVTIHSDRVEIVFNYKNEMPEFGVQSASGSHFSVLVGPPGIEPGTDRL

SEQ ID NO: 5476 - protein, 505 aa, Unknown
  Description of Unknown: Integrase B5477 sequence
  SM00857,G3DSA:1.10.10.2600,IPR036162,PF13408,PS51737, G3DSA:3.40.50.1390,IPR025827,IPR006119,IPR038109,PF07508, SSF53041,IPR011109,PTHR30461,Coil,PS51736, cd00338,PF00239
MAKPEVSELAVVYARYSSHSQGEQSIEGQLSNARDYAAAHGYTIVHEYVDRAKSGRTDNRAEFQQMLKDTAKRQFSVIILWKVDRFGRNREEIAINKMKCRKNGVRVEYVAETIPDSPEGVILESVLEGFAEYYSLQLSQNIRRGRAESAEKCQSLGGNRPLGYKTGPDKKFVIDENTAPTVKMIFTMYADGKTVTEIVDKLNEMGLRTLRGGPFTKNSLHSILKNKKYIGVYEYQGREIKDGVPRIIEDDVFNKVQEMLKINKRAPAKTWSRADYILTDKLFCGKCGALMFGESGTSKTGVKHNYYICSNKKRFRSCDKKAVRQADIEDTVLNATHELLQDDELLDYIVDRTWEYYLAQDNSQEELRNLQRQLAQTDTAISNLIRAIEAGILTEETKKRMDELTQQKADLKASIADREIARGFHLQKSHIAFYLRSLRDADWSDKEAQKRLIQTFVNAVFVYDDHITLTYNFSGDKSTITLHDMQRFEDGEEFGCRASRSTNAR

SEQ ID NO: 5477 - protein, 505 aa, Unknown
  Description of Unknown: Integrase B5478 sequence
  PTHR30461:SF3,cd00338,SM00857,G3DSA:1.10.10.2600,IPR036162, PF13408,PS51737,G3DSA:3.40.50.1390,IPR025827,IPR006119, IPR038109,PF07508,IPR011109,SSF53041,PTHR30461, PS51736,Coil,PF00239
MSTNAVIYARFSSDKQREESIDGQIRECTKFAEDQGLEVIGTYIDRAMSARSDNRPDFLRMIADSARGQFQYVIVYQLDRFSRSRYDSAIYKNKLKKNGVRVLSAKERIGDDPSSIILESMLEGYAEYYSAELSQKVKRGMTENVLEHKWTGGYVPLGYSLVPDKTLQIDPVGAEAVKIIYDKWLAGCRIMDIIRYLNDHNYVTSRKAKFRYSSLNRILNNPIYTGLYRWGSIEVADYAPAIITQKQFALAQEKIHHIKAHPRAKRRSANYALTGVIYCGVCGSPMTGQSGHSKSGALYHYYRCSTKNNYHDRGKKLNIKCANRNISRDKLEDLVLQTTINILMNPEAVHMIAKQAVAVQQNDPASMELARIREDKKIIQKKLNNSIKAVEAGIISTTLAANISQYEKEITELDIKMEKIKLSSAPVKIDEIAVEFFLKSLLLNKKEHDKYRLDMFQTFIRRVIVYPDKVEIQYNYTATPILENPVTKMMTGNSGCSRCERLVTR

SEQ ID NO: 5478 - protein, 505 aa, Unknown
  Description of Unknown: Integrase B5479 sequence
  SM00857,G3DSA:1.10.10.2600,IPR036162,PF13408,PS51737, G3DSA:3.40.50.1390,IPR025827,IPR006119,IPR038109,PF07508, SSF53041,IPR011109,PTHR30461,Coil,PS51736, cd00338,PF00239
MAKPEVSELAVVYARYSSHSQGEQSIEGQLSNARDYAAAHGYTIVHEYVDRAKSGRTDNRAEFQQMLKDTAKRQFSVIILWKVDRFGRNREEIAINKMKCRKNGVRVEYVAETIPDSPEGVILESVLEGFAEYYSLQLSQNIRRGRAESAEKCQSLGGNRPLGYKTGPDKKFVIDENTAPTVKMIFTMYADGKTVTEIVDKLNEMGLRTLRGGPFTKNSLHSILKNKKYIGVYEYQGREIKDGVPRIIEDDVFNKVQEMLKINKRAPAKTWSRADYILTDKLFCGKCGALMFGESGTSKTGVKHNYYICSNKKRFRSCDKKAVRQADIEDTVLNATHELLQDDELLDYIVDRTWEYYLAQDNSQEELRNLQRQLAQTDTAISNLIRAIEAGILTEETKKRMDELTQQKADLKASIADREIARGFHLQKSHIAFYLRSLRDADWSDKEAQKRLIQTFVNAVFVYDDHITLTYNFSGDKSAITLHDMQRFEDGEEFGCRASRSTNTI

SEQ ID NO: 5479 - protein, 505 aa, Unknown
  Description of Unknown: Integrase B5480 sequence
  PTHR30461:SF3,cd00338,SM00857,G3DSA:1.10.10.2600,IPR036162, PF13408,IPR025827,G3DSA:3.40.50.1390,PS51737,IPR006119, IPR038109,PF07508,IPR011109,SSF53041,PTHR30461, PS51736,Coil,PF00239
MYEEIKTACLYLRYSSSNQTEQSIEGQMHVCQDFCKRHNIKIVEMYIDRATSASKDIEKRVEFLKMIKDSEKENFDAVIVYKLDRFARSRYDSATYKYRLKRNGVQLISATENITQDPEGIILESVLEGMAEFYSAELSQKINRGMRESAMKHNSIGGAIPLGYKTVDKKLIVDETTAPIVREAFQMYADGESVAEICRTFNSRGYKTSKGTRFGKSSFTKIFRNEKYIGVYKYHDYRAEDVIPPIIDKDLWDRVQVRVGKIKKAPARNKAKHTYLLTGKLFCGHCGSSMNADGNSQGYLYYRCYGKKNLDKQCNKRNMEKNLIERLVAQDAMSFLTDEYIEKIATIACDRNKQEIESDSPIPVIRDRIRQVDVSLNNLLKAIETGSAPDMLVKRMGELETEKKDMEVQLKKEMAHQVYIEKEQVIFWLEKFREGDINDEEFCQTVIDLFVNSVTVWDEPDDKFRITIAYNLTSIPQKTYRLSKDGRLSDYASNTPLLNLPHKRS

SEQ ID NO: 5480 - protein, 505 aa, Unknown
  Description of Unknown: Integrase B5481 sequence
  PTHR30461:SF3,cd00338,SM00857,G3DSA:1.10.10.2600,IPR036162, PF13408,IPR025827,G3DSA:3.40.50.1390,PS51737,IPR006119, IPR038109,PF07508,SSF53041,IPR011109,PTHR30461, PS51736,Coil,PF00239
MYEDIKTACLYVRFSSHNQTEQSIEGQTRVCRDFCKRHNIRIVEIYADRATSASKDIEKRVQFLKMIKDSEKGLFDAVIVYKLDRFARSRYDSATYKYRLKRNGVQLISATENISNDPEGIILESVLEGMAEFYSAELSQKINRGMRESAYKHNSIGGAIPLGYKIEDKKLVIDPKTAPIVKEAFEKYADGETVAEICRQFNARGYKTSKGTAFGKSSFTKIFRNERYIGVYTFHDYRAEDAIPAIIDKDLWDRVQLRVGKIKNAPARNKAKVVYLLSGKIFCGHCGSKMNGNCNAGNYYYYQCYGKKNGNVDCKKKNIRKEFIERLVAQDALSLLTDEYIEQIATIACEKNQHEIELDSALPTIRDRIHQVDLSLNNLLKAIESGSAPDMLVKRMGELEKEKKDLQAQAKKESEDIVELDKAQVIYWLEQFRGGSIEDEEFCRMLIDLFVNSVTVWDEDDNTYKVTVAYNLTSLPTKTYRLNKGGTLSDFTSNAPALRRSITVR

SEQ ID NO: 5481 - protein, 505 aa, Unknown
  Description of Unknown: Integrase B5482 sequence
  PTHR30461:SF3,SM00857,G3DSA:1.10.10.2600,IPR036162,PF13408, IPR025827,G3DSA:3.40.50.1390,PS51737,IPR006119,IPR038109, PF07508,IPR011109,SSF53041,PTHR30461,Coil, PS51736,cd00338,PF00239
MTMESKRAVIYARYSSSRQREESIERQIEICNDYAVAHNMLVIGSYVDRKKTGKTDTRPDFQRMIYESSKHLFDVVLVWRYDRFARNLDDHGAYERLLHQNSVDLISATEEIPEGSHSAIIKAVILGGNESYSVELAAKVSDGMHRAAMQGQTSGGPRVFGYRVVDKHYVLDEGEAQIIRQIFTWYDQGKSMTEIVNQLNAQGAVNAAGKPFIISVMRRILTNQMYIGIRLYKGEDIGIRVPAIIDKELFDRVQIQVGKNKCAPARNKPLNDQYLLTTKLFCAQCGSTMSGISGISKNGSKYQYYSCTNRSNKKGCTKHYIGKEVLETAVVDAVKKVLLANNIPELAKAVVKCCNDAQDNGNLLKLESELREVNKGINNLLDLIEAGRNSQAMADRLEQREQQKKLLEQNIAKEKVLHRIPTEDEVIFFFNNFIQGNIDSLEYNRYLIDILVNSIYLSDEEDGTQKMTVLLNTQNGQETVTLNDLTQCSSNVHMVHHRGLEPRTH

SEQ ID NO: 5482 - protein, 505 aa, Unknown
  Description of Unknown: Integrase B5483 sequence
  PTHR30461:SF3,IPR036162,PS51737,IPR011109,PTHR30461, PF00239,G3DSA:1.10.10.2600,IPR006119,SSF53041,cd00338, SM00857,IPR025827,IPR038109,mobidb-lite,PS51736, cd18688,PF13408,G3DSA:3.40.50.1390,PF07508,Coil
MNGEIKNVVLYLRYSSAAQNEQSIEGQRHVCQEYCRRAGYQVMDEYIDRATSASHNVEKRLNFQRMLRDAERGRFDAVVVYKLDRFARNRYDSVNAKYRLKKAGVVLLSATENLSDSPESIILESVLEGMAEFYSAELSQKITRGMKETAQKHLSTGGTVPLGYRIENRRLVIDPTTAPIVKQAFEMYAAGHTVTAIAKQFNASGYRTSKGTAFNRSSFKSMFHNERYIGIYKYGAYKAENAVPAIIDKQLWDAVQSRLSHPAPPSQGKAQVPFLLAGKLFCGHCGAKMNGDSGKGRSGEPYYYYTCYNRKREHTCHKKSVRKEWIEKVVVQDAMHLLTDDYIEELADIAVQENQRQIAATTKIPLLKEKIVETEKSINNIITAIEKGVASDTLMHRITGLERQKKDYENQLAAEETSAIQLDKYMVIYWLDQFKHGDVDDERFRRNLINLLVNSVTIWDDPDGGFRITTAYNLTDAPTKTFRVEALPGSDMGSSSPPQRPVREI

SEQ ID NO: 5483 - protein, 505 aa, Unknown
  Description of Unknown: Integrase B5484 sequence
  PTHR30461:SF3,SM00857,G3DSA:1.10.10.2600,IPR036162,PF13408, PS51737,G3DSA:3.40.50.1390,IPR025827,IPR006119,IPR038109, PF07508,SSF53041,IPR011109,PF00239,PTHR30461, PS51736,Coil,cd00338
MRRAAIYARYSSDLQRSESIDAQIRACKYYAQRFDLEVVRIYADAAKSGKSTKKREDFLDMMEDAARDIFDVLLVHKLSRFSRRGTDTLNNKERLDSLGVELISVTERLDDTPEGRLMLYVITGMNEFYSANLAAETMKGLRENAYNGKHTGGLPPLGYDVDPVTKKLTINPSEEEAVRMIFSMYLSGCGYGEIVDTLNAHGYLTKRGAPFGRNSIHDILVNEKYTGLLTYDKIASKTPDGRMNRRKFKAEYLKIEDGCPQIITKEDFERVKETMAQNKRAPKTTAVENYLLSGKLFCGECGARMCGERHKVRDTAYSYYICNEGKRCKTHRLSVRKEIVENMVFDALNRMVLSEASVDAIAHAAVGSYETQKHAADTLEAEIAECEVKIANLVKAIATGLDEPELREEMARLKQRKAECHAMMETLRDNADQRKSVAEWKAYLRRFCDINALPDEDKKALIAVFVDRILLFLDGGPGPKGTYRIEVELNPNHVEPREGNGLPLP

SEQ ID NO: 5484 - protein, 505 aa, Unknown
  Description of Unknown: Integrase B5485 sequence
  SM00857,G3DSA:1.10.10.2600,IPR036162,PF13408,IPR025827, PS51737,G3DSA:3.40.50.1390,IPR006119,IPR038109,PF07508, IPR011109,SSF53041,PTHR30461,Coil,PS51736, cd00338,PF00239
MAKPEVSELAVVYARYSSHSQGEQSIEGQLSNARDYAAAHGYTIVHEYVDRAKTGRTDNRAEFQQMLKDTAKRQFSVIILWKVDRFGRNREEIAINKMKCRKNGVRVEYVAETIPDSPEGVILESVLEGFAEYYSLQLSQNIRRGRAESAEKCQSLGGNRPLGYKTGPDKKFVIDENTAPTVKMIFTMYADGKTITEIVDKLNEMGLRTLRGGPFTKNSLHSILKNKKYIGIYEYQGREIKDGVPRIIEDDVFNKVQEMLKINKRAPAKTWSRADYILTDKLFCGKCGALMFGESGTSKTGVKHNYYICSNKKRFRSCDKKAVRQADIEDAVLNATHELLQDDELLDYIVDRTWEYYLAQDNSQEELRNLQRQLAQTDTAISNLIRAIEAGILTEETKKRMDELTQQKADLKASIADREIARGFHLQKSHIAFYLRSLRDADWSDKEAQKRLIQTFVNAVFVYDDHITLTYNFSGDKSTITLRDMQRFEDGEEFGCRASRSTKTI

SEQ ID NO: 5485 - protein, 505 aa, Unknown
  Description of Unknown: Integrase B5486 sequence
  PTHR30461:SF3,cd00338,SM00857,G3DSA:1.10.10.2600,IPR036162, PF13408,IPR025827,PS51737,G3DSA:3.40.50.1390,IPR006119, IPR038109,PF07508,IPR011109,SSF53041,PTHR30461, PS51736,Coil,PF00239
MTKNAVIYARFSSDKQREESIDGQIRECRTFAEANEITIINTYIDRAMSARTDQRPSFLQMVKDSAKHLFDYVIVYQLDRFSRSRYDSAIYKHRLKKNGVKVLSAKENIKDDPSGILLESVIEGMAEYYSAELSQKVKRGMTENLLERKWIGGVLPFGYKLNENSQLEIDASTGPLVPKIFDACLHGKKITEIISYMNEHGYHTARGNKFSRNSLSRIINNLIYTGTFTWSNTEYPNYAPALITKEQYTAMQNLLESQKKSHNHARVVSPHYALTGKIYCGECGLPMTGYCGKSHTGATYYYYRCSSKNNKKEKSNRENISCNMKNINRDKLEKLVLDTTVSILKNPDAVKCIAEQCMAVQKAELENKPTEQLRLESQIKDIEKRLKNCVNAVENGLISQTITNNIATYEKQLAELHSQIDTIKLENRIIPITEEAVIYYLNELTKRATKKDGCSLETFDDFIRRVVVKDGQIDIYYNYTPVPNILENPAVKMLRGSSENHLVTR

SEQ ID NO: 5486 - protein, 505 aa, Unknown
  Description of Unknown: Integrase B5487 sequence
  PTHR30461:SF3,cd00338,SM00857,G3DSA:1.10.10.2600,IPR036162, PF13408,IPR025827,G3DSA:3.40.50.1390,PS51737,IPR006119, IPR038109,PF07508,SSF53041,IPR011109,PTHR30461, PS51736,Coil,PF00239
MYEDIKTACLYVRFSSHNQTEQSIEGQTRVCRDFCKRHNIRIVEIYADRATSASKDIEKRVQFLKMIKDSEKGLFDAVIVYKLDRFARSRYDSATYKYRLKRNGVQLISATENISNDPEGIILESVLEGMAEFYSAELSQKINRGMRESAYKHNSIGGAVPLGYKIEDKKLVIDPKTAPIVKEAFEKYADGETVAEICRQFNARGYKTSKGTAFGKSSFTKIFRNERYIGVYTFHDYRAEDAIPAIIDKDLWDRVQLRVGKIKNAPARNKAKVVYLLSGKIFCGHCGSKMNGNCNAGNYYYYQCYGKKNGNVDCKKKNIRKEFIERLVVQDALSLLTDEYIEQIATIACEKNQHEIELDSALPTIRDRIHQVDLSLNNLLKAIESGSTPDMLVKRMGELEKEKKDLQVQAKKESEDIIELDKVQVIYWLEQFRGGNIEDEEFCRMLIDLFVNSVTVWDEDDNTYKVTVAYNLTSLPTKTYRLNKGGTLSDFTSNAPALRRSITAR

SEQ ID NO: 5487 - protein, 505 aa, Unknown
  Description of Unknown: Integrase B5488 sequence
  PTHR30461:SF3,cd00338,SM00857,G3DSA:1.10.10.2600,IPR036162, PF13408,IPR025827,G3DSA:3.40.50.1390,PS51737,IPR006119, IPR038109,PF07508,IPR011109,SSF53041,PTHR30461, PS51736,Coil,PF00239
MKTAVIYARYSSDKQTEQSIEGQLYDCYNYAKANNITVIGEYIDRAMTGRNDDRPDFQRMISDSAKHTFELVLVWKLDRFARSTEDAAYNRGKLKRNGVRLLSVKEDFGDSSAGDLMMHVMESFNEFYSADLREKTVRGMHQSALKCQSTGGQIPIGYKIEGKKYAIDEATRFIPETVFRMYAEGKRLAEIARYLNEKGYRTRMGRKFTTGSFYTMLSNEKYIGVYKYRDVRIEGGYEAMIDPVLFDAVQKKLVENKKRAPKVSERENFYLTGKLFCGHCGEPMNGMSGNSAKGKHLYYRCNGVRKHTGCDKRTERKEELENEIIGAIQRAFANADPEELTRKVIENYEKNSRPADQVKVMKAELQKITNKVDNVVNAIAEMGGNETLYTQLRQLTEQKEQKETEIRIAEHKADDMPTVELVKKILDLIQNADTMTDEGRQLLIDGAVSRIYVYDDSLDIYFKGGKNTEIPLNPANKDDVSDNSFACCKEWGAKAILSTNHREKV

SEQ ID NO: 5488 - protein, 505 aa, Unknown
  Description of Unknown: Integrase B5489 sequence
  cd00338,SM00857,G3DSA:1.10.10.2600,IPR036162,PS51737, G3DSA:3.40.50.1390,IPR006119,IPR038109,PF07508,IPR011109, SSF53041,PTHR30461,PS51736,Coil,PF00239
MTLAFSYVRFSTKHQASGTSLERQVNASKLFCSQNGLTLSNQSYHDLGISGFKNVRRPELEQMLEAIQTGDIPSGSYILIEAIDRLSRKGISHTQDILKKILQYDVKVAFVGEDAKTLQGHILNKDSLNDLSSVILVALAADLAHKESLRKSKLVKASKAIARDKAADGEILPGKSVFYLDYDKKNKKYVFNKRVDLARKIIQMRLEGKGPRKIARLLNEENIPGPTGKQWYQMSVKRLLKSPVLYGAYQTHQIIEEKYIPVSLIENYYPALIDYQTFSQIQFDDKRVSKGRPSRHKFSGVLYCECGAVLCRKVNTYETKQGPKEYQYFNCFGAFEGRCKNNKAIKDLHIPLEKAIDKLQIKTRSVKNIKNEQIIAKREKIDQLNKMLLELEMPPVSVLKTISTLEKELQELLEQPDIQPPKSADVKTLVAIKDAEQYNLYLKRLVKRITIFQLNGPKNIRIKIEKTDGHYQSFIVNNGKIMFNADTKALQEHLRKLKEGTSDED

SEQ ID NO: 5489 - protein, 505 aa, Unknown
  Description of Unknown: Integrase B5490 sequence
  cd03768,PTHR30461:SF3,SM00857,G3DSA:1.10.10.2600, IPR036162,PF13408,IPR025827,G3DSA:3.40.50.1390, PS51737,IPR006119,IPR038109,PF07508, IPR011109,SSF53041,PTHR30461,PS51736,Coil,PF00239
MLKYDAIYARQSVDRMDSISIESQIDFCKFEVRGGEYRVFQDKGYSGKNTDRPNFKMMLEAIRRGDVKRVIVYKLDRISRSILDFATMMAEFQDNGVEFVSCTEKFDTSTPMGRAMFNICIVFAQLERETIQQRVTDAYISRSRKGFYMGGRVPYGYQLETYTIDGKKTSRYTIVPEEAKIVKVIFSMYAVPQTSFGDIVHYLVDNGIPNARGKGQVWDRARISDMIKNPIYVKADLDIYQFYKDQGSIVHDDPCLFIGTNGCYLYSEKGAGRKTIHLEGQHVVLAPHEGIVPSDIWLKARCKCLNNKQVAKPLKAKNTWLAGKIKCGKCGYALTIRKSNTQIGRYFICSRRMQTNFCEGVGGIDATAFETLILSEMKKKVEQFDVLNAPPQMQNNPRIVELGTQIEQIEAEIEKLLDRVSEADSVLMGYINKKVSELHNQSSELKREMNELEQAIIQPKLNVKQIRNCMQHWEKLEFDDKRAVVDQLIAVIKATENTCEITWKV

SEQ ID NO: 5490 - protein, 505 aa, Unknown
  Description of Unknown: Integrase B5491 sequence
  SM00857,G3DSA:1.10.10.2600,IPR036162,PF13408,IPR025827, G3DSA:3.40.50.1390,PS51737,IPR006119,IPR038109,PF07508, IPR011109,SSF53041,PTHR30461,Coil,PS51736, cd00338,PF00239
MAKPEVSELAVVYARYSSHSQGEQSIEGQLSNARDYAAAHGYTIVHEYVDRAKSGRTDNRAEFQQMLKDTAKRQFSVIILWKVDRFGRNREEIAINKMKCRKNGVRVEYVAETIPDSPEGVILESVLEGFAEYYSLQLSQNIRRGRAESAEKCQSLGGNRPLGYKTGADKKFVIDENTAPTVKMIFTMYADGKTVTEIVDKLNELGLRTLRGGPFTKNSLHSILKNKKYIGIYEYQGREIKDGVPRIIEDDVFNKVQEMLKINKRAPAKTWSRADYILTDKLFCGKCGALMFGESGTSHTGAKHNYYICSNKKRFRSCDKKAVRQADIEDTVLNATHELLQDDELLDYIVDRTWEYYLAQDNSQEELRNLQRQLAQTDTAISNLIRAIEAGILTEETKKRMDELTQQKADLKASIADREIARGFHLQKSHIAFYLRSLRDADWSDKEAQKRLIQTFVNAVFVYDDHITLTYNFSGDKSTITLHDMQRFEDGEEFGCRASRSTNAR

SEQ ID NO: 5491 - protein, 505 aa, Unknown
  Description of Unknown: Integrase B5492 sequence
  PTHR30461:SF3,cd00338,SM00857,G3DSA:1.10.10.2600,IPR036162, PF13408,PS51737,IPR025827,G3DSA:3.40.50.1390,IPR006119, IPR038109,PF07508,IPR011109,SSF53041,PTHR30461, PS51736,Coil,PF00239
MSSVDKTAVIYARYSSHGQTEQSIDGQIAAAQKYAEGKGYTIIHIYADRAMTGRNDDREQFQKMLSDTATHQFGVILLWKIDRFGRNREEIAFNRYRCKKNGVRVERVAEDVPDGPEGVILDSVLEGMAEYYSLQLAQNVRRGQRESAKKSQSNGGTRMIGYKVNPDTKRYEIDPDTAPFITEVFRRYAGGQTMAEIAAWLNAQGLRATRGGMFTVNSLHRLLKNEKYTGVYIFRDIRNEGGMPALIDRATFDKVQEMLKVNRRAPSRVWSRAEYLLTDKLFCGHCGAPMAGVSGHGHTGVKHNYYTCLNRKRKKSCTKKSVRQDVLEPLVLKSIRNLLQDDATLKYIADRVWAEYERSDTSGDTIRALDRQIADVDRALSNVMKAIEMGIINEMTKARMDELTEQKQALSAARADAGLARGFKLTRNMILYFLRKMAAMDISDRDSQKRLIKTFVNAIYLYDDHFDIAFNYTENGKVIVKMQEIDDASTGGAFGCCAQCPTITI

SEQ ID NO: 5492 - protein, 505 aa, Unknown
  Description of Unknown: Integrase B5493 sequence
  cd00338,SM00857,G3DSA:1.10.10.2600,IPR036162,PS51737, G3DSA:3.40.50.1390,IPR006119,IPR038109,PF07508,SSF53041, IPR011109,PTHR30461,PS51736,Coil,PF00239
MDKYAIYLRKSRADLEAEKLGEGETLARHKKILTELASRKGLYVEKIYHEIVSGETIANRPEIQKLIADAYEGKYRGIIVVDVDRLSRGNQADMQTIMDCLKYANNRNGLLVVTPTKTYDVSHNYDDEEYIEFVLFMSRREYKTILKRLERGRRQAVVEGNFLGSYRPYGYDILKNRTGRTLIPNAEEAPIVKKIFEWTVDDHMTPGKIAKKLTAMGVPTYRGDTDWNLSTIKTILSNPVYCGKVRWNDRMRIKKMVDGKMVSSRPRSNHTEHYMLHDGKHQALVSEEMFMKTSSRFHADKTKGDLKLKNPLAGLLFCKKCEKAMVYQSYPSRPNTEPRFCHRFGKSCNVKSATYRDVMDALTSALDTYIDDFELKIDNLPDVDENSIQDQITALENEIRKTEKKLSKLFDSWEDGIIDNNEFVQRKEVHNLKIDAIKRQIEDLEKAVPEKEEYQEKIMSMSDALSALKDDALDADIKNEYLKKNIEKIEFSRDNDDEFILDIYF

SEQ ID NO: 5493 - protein, 505 aa, Unknown
  Description of Unknown: Integrase B5494 sequence
  PTHR30461:SF3,SM00857,G3DSA:1.10.10.2600,IPR036162,PF13408, IPR025827,G3DSA:3.40.50.1390,PS51737,IPR006119,IPR038109, PF07508,SSF53041,IPR011109,PTHR30461, Coil,PS51736,cd00338,PF00239
MRCAIYLRKSRADEEAENKGEFETLSRHRSTLLKVAKEQQLNIVEIKEELVSGESIQYRPKMLELLDEVKQGLYDAVLVMDIDRLGRGNMQDQGLILETFKKSKTKIITPRKTYDLTNEFDEEYSEFEAFMARKELKLITRRMQRGRIKSVEDGKFIASKPPYGYKFVFNESGNKSMVIDQDKADVVKLIFNLYINGNGANKVANHLNALGLKTTTGRTWYDKGVRDIIKNKVYCGYVVWNRVERTKEYYRNRPAGEVLESKGIHEPIISEETWNKAQKMLKGNAISPTAVFKEITNPLAGLVVCKCCGHTMIARSASTTKTGYEKFLRCVNCSDNRGIKLDIVEEEIINNLNQFVINYKADFNGIEYSNSNNDNLASLNKILRTFENEASTLVSQKENLHNLLEQGVYDIDTYLDRSKVLSDKIEKNKTNINNIKNEILNEEESSLLIEGTIPLIEHVLELYYTETSFAQRNKLLKSIIDKVIYYRKPGSKKSKVEITIHPKIE

SEQ ID NO: 5494 - protein, 505 aa, Unknown
  Description of Unknown: Integrase B5495 sequence
  PTHR30461:SF3,cd00338,SM00857,G3DSA:1.10.10.2600,IPR036162, PF13408,IPR025827,G3DSA:3.40.50.1390,PS51737,IPR006119, IPR038109,PF07508,IPR011109,SSF53041,PTHR30461, PS51736,Coil,PF00239
MDNVVIYARYSSDKQTEQSIEGQLRYCYQYAEQHDYRVVGEYIDRAISGTSDRRPQFQQMISDAEKKQFKYVLVWKLDRFARNRYDSAIYKTKLKKSGVKVLSVTEGIGDGDESIILEAVLEAMAETYSRQLSQNVKRGMHESALKGLSTGGTVPYGYKLRDGRLVIDEPAAKNVKFIFEQYAAGVGKKAIADALNAKGCKTATGRDFSVVSLAHIFKNRKYIGIYHYNGEVEIEGGCPAIVDKALFDRCTLRAEQNRRAPAKGKGEVDYILTGKLFCGICGSPMVGDSGKGKTGAVYYYYTCSNRKKNGGVKACPKKREDKGFIEWYVVEQTLKYVLDPERIALIAERVVAAYNKDFSADAVADLERQLAAAGREMDKLADSLINAASPRLVESINKKAEQLDAQIAELEDELSKLRICAAARLTVEQVTAWLKSFCNGDPLDLDFRRRIIDVLVNAVYLYDDKVFIFFNVKNGKQISYIDFCADFADDPPEGESSDFNACGSP

SEQ ID NO: 5495 - protein, 505 aa, Unknown
  Description of Unknown: Integrase B5496 sequence
  SM00857,G3DSA:1.10.10.2600,IPR036162,PF13408,PS51737, G3DSA:3.40.50.1390,IPR025827,IPR006119,IPR038109,PF07508, IPR011109,SSF53041,PTHR30461,Coil,PS51736, cd00338,PF00239
MAKPEVSELAVVYARYSSHSQGEQSIEGQLSNARDYAAAHGYTIVHEYVDRAKSGRTDNRAEFQQMLKDTAKRQFSVIILWKVDRFGRNREEIAINKMKCRKNGVRVEYVAETIPDSPEGVILESVLEGFAEYYSLQLSQNIRRGRAESAEKCQSLGGNRPLGYKTGPDKKFVIDENTAPTVKLIFTMYADGKTVTEIVDELNEMGLRTLRGGPFTKNSLHSILKNKKYIGVYEYQGREIKDGVPRIIEDDVFNKVQEMLKINKRAPAKTWSRADYILTDKLFCGKCGALMFGESGTSKTGAKHNYYICSNKKRFRSCDKKAVRQADIEDTVLNATHELLQDDELLDYIVDRTWEYYLAQDNSQEELRNLQRQLAQTDTAISNLIRAIEAGILTEETKKRMDELTQQKADLKASIADREIARGFHLKKSHIAYYLRSLRDADWSDKEAQKRLIQTFVNAVFVYDDHITLTYNFSGDKNTITLRDMQRFEDGEEFGCRASRSTNAR

SEQ ID NO: 5496 - protein, 505 aa, Unknown
  Description of Unknown: Integrase B5497 sequence
  PTHR30461:SF3,cd00338,SM00857,G3DSA:1.10.10.2600,IPR036162, PF13408,IPR025827,G3DSA:3.40.50.1390,PS51737,IPR006119, IPR038109,PF07508,IPR011109,SSF53041,PTHR30461, PS51736,Coil,PF00239
MKKFPIDLSCLTEEEISQFQEDPYTLYNGDQDVALYLRYSSTGQSDQSIEGQLRDCRTFCKANHYRIVAIYVDRATTARKDVEKRVHLMEMVADSAKQNWEYVIVWKLDRFARNRNDSAIMKMRLRKNGVKVLSATEHLTDSPESIILESVLEGMAEFFSAELSQKVTRGMRESALKCHSVGGHIPLGYKVENHKLVVDPDTAHIVQEAFSLYANGESVADICRKFNSAGYKTAKNTEFNRSSFKAMFRNTRYIGTYTYKDIVIENGIPAIIDKELFETVQRRLSKTATAPARGKAKVDYLLSGKLFCGHCGASMNGESGAGRHGKVYHYYSCYTKKRKLGCDKRPLKKDYIEGIVARDALNLLTDQLIDEIADMAIRQSEQDLINDTHIPQLTAQLSEVEKSITNITAAIEKGIASETLMNRLVQLEHEKKTINKEIKAEEKFVYRIDRDQIVFWLSQFKYGNIEDENFRRRLIDLLVNSVTVWDEPDGYKITTAYNLTSCKTE

SEQ ID NO: 5497 - protein, 505 aa, Unknown
  Description of Unknown: Integrase B5498 sequence
  PTHR30461:SF3,cd00338,SM00857,G3DSA:1.10.10.2600,IPR036162, PF13408,IPR025827,G3DSA:3.40.50.1390,PS51737,IPR006119, IPR038109,PF07508,SSF53041,IPR011109,PTHR30461, PS51736,Coil,PF00239
MKIEKIAIYARRSEEKETGESIKNQINICRNYIERIYKNPLIDEYFDDDYSGRNMIRPDFNKMMILVKKGYYKAIVFWKLDRVARNALDFLKLHKELDKLGVNLISVTEGFDPSTPAGKLMMTMLAAVAEMERKNISQRVISNMNEMAKKGKWTGGITPYGYKTITIKKEKYLKEDNDTIKTVKEIFDKYLETESLFQVSKWLKQSYNIKKSPTSIKRILTNLVYVKSDNEISKYLTNRGINLYGQLNGNGLVSYGKANKTNDEGVEFRNISEWIVAIGKHKGIISGLEYIKVQHILKSKNNSGRRGTGDVTFLNGLCRCSYCGSYMRTKQKKKTNGGYYKYFACAKKDTGLEHCKNKMIKISDVEETVLNALYNYKINNIHTNNTPIDTSKLRNDLNKKQKQIKNLVLKLSLDDELEDIFLEQIRELKKEVNELQKNIEEKEKENLLNNVSNYNKDSFIKQLSNFKNIFINCKDIDSKRKLIKNLVKEIRIDGINKKTELETYF

SEQ ID NO: 5498 - protein, 505 aa, Unknown
  Description of Unknown: Integrase B5499 sequence
  PTHR30461:SF3,cd00338,SM00857,G3DSA:1.10.10.2600,IPR036162, PS51737,G3DSA:3.40.50.1390,IPR006119,IPR038109,PF07508, SSF53041,IPR011109,PTHR30461,PS51736,Coil, PF00239
MNNSVLSAMYLRKSRADDPHEAVMETLHRHESILRAVAKRGKYLVPEDCIYREVVSGENIFSRPQMVRLLEDVTNGKFQSVIVVDIDRLGRGDMRDQGLILETFKNSDTLIITPEKVYDLNDEMDEELTEFKGFMARREYKMITKRLKRGREQTVKAGGFVAEPPYGWKRSKINNLPSLEPHEAEGPIMQMIVEMYGNQEPISAIQQRLAAMGVYNRKGVPFCRSSIRHIATNPVNAGLIQWNRYKNVRKGENGSPTGYQIENSPDQVILVKGVHQPQVSVEAYQKCINVCRSRSTPSVKKGIHGIVRNPLAGIVICSNCGNRMQMQHSTTKGSSTLLCTTPRCMAGVDIGRAEIALLDILRAKLEEIRTGQGKKQQDSALAELQKSVQATEKNIQSLKKQQNKLYTLLEQEVYSIEVFKERNQVLTQKLTHTKEQLKTLQDQIDDISNRKAERLAQNIEHVLANYEGSSPKEKNRLLKTVVEKALYFRQSRTSPFAFDVTFINM

SEQ ID NO: 5499 - protein, 505 aa, Unknown
  Description of Unknown: Integrase B5500 sequence
  cd00338,SM00857,IPR036162,PS51737,G3DSA:3.40.50.1390, IPR006119,PF07508,IPR011109,SSF53041,PTHR30461, PS51736,Coil,PF00239
MELAFSYARFSTKSQSTGTSLERQLNASRLFCSERGLTLSPKGYHDLGVSGFKQVKRPELEQMLQAIQSGDIPSGSYILIEAIDRLSRKGISHTQDVLKQILQYKVKVAFVGEDAKTLAGQVLDENSLNDLSSVILVALAADLAHKESVRKSKLVKAAKSIIRKKGTEGHKVRGHTMFWIDWSDKKQDFVLNDRVKDVHKIIQLRREGQGPRKIAKTLNELNIPGPRGNPWNHMTVTVVLRSPVLYGAYQTHQIIDGQKVPDVLLENHYPAVITQEEFVTIQADSSKSNKGRPSKANPFSGVLRCECGQAMLFSKRTNLNKDGEPLEYEYHFCLGYAEGRCKNNKRIRDLVPLLVQLMDKLVINQAPKKNLNVELIKQKEQKIEQLNKMLIELDSPPLSVLKTIQTLEAELDILLNTHVEEPVQADVQTLSSITDAQEYNQHLKRLVKKIVVYQKNGPKNLRIKVYKTDGHYQNFLVKDGTVLFKSDTKALKELIDGFNKERRER

SEQ ID NO: 5500 - protein, 505 aa, Unknown
  Description of Unknown: Integrase B5501 sequence
  cd03768,PTHR30461:SF3,SM00857,G3DSA:1.10.10.2600, IPR036162,PF13408,IPR025827,G3DSA:3.40.50.1390, PS51737,IPR006119,IPR038109,PF07508, IPR011109,SSF53041,PTHR30461,PS51736,Coil,PF00239
MCPIDALYARQSLDKKDSISIENQLEFCKYETRGAEYETYIDKGFSGKNTNRPAFAKMMEDIRAGKIKRVIVYKLDRISRSILDFSNMMEIFQQYHVEFVSSTEKFDTSTPIGNAMLNISIVFAQLERETIQKRIADAYATKSQKGYYMGGRVPYGFQLEKTIINGIHTSVFVPEPNEMKQIRLIYQLYSEPDMTLGAVMRELLRQGFTEKRGAPWSTARISEILRNPVYAKADIDIYNFFESQGANMINPASDYVGTNGIFLYKGINGDKTKKKQYDLVDRDVVIAPHLGVIESNVWLKCRLKIMKNRQSARTNKGKRTWLAGKVKCKKCGYAYTVTRSNTKAGRYFQCSGSRYSIKCKGAGHTIYADVFEDYVLEEMKKQLAKFQYLSDELEAVTQPSSQAEKVRIAEIEQEIGNLLAKVPEANKTVMEYINRRIEELDKEKQSLQQKLVEQSTNQTSGKMDKITNYVAKWDELDNDDKQRVADILIDRIDIDEDIIEITWNI

SEQ ID NO: 5501 - protein, 505 aa, Unknown
  Description of Unknown: Integrase B5502 sequence
  cd03768,PTHR30461:SF3,SM00857,G3DSA:1.10.10.2600,IPR036162, PF13408,IPR025827,G3DSA:3.40.50.1390,PS51737,IPR006119, IPR038109,PF07508,IPR011109,SSF53041,PTHR30461, PS51736,Coil,PF00239
MCPIDALYARQSLDKKDSISIENQLEFCKYETRGAEYETYIDKGFSGKNTNRPAFARMMEDIRTGKIKRVIVYKLDRISRSILDFSNMMEIFQQYHVEFVSSTEKFDTSTPIGNAMLNISIVFAQLERETIQKRIADAYATKSQKGYYMGGRVPYGFQLEKTIINGIHTSVFVPEPNEMKQIRLIYQLYSEPDMTLGAVMRELLRQGFTEKRGAPWSTARISEILRNPVYAKADIDIYNFFESQGANMINPASDYVGTNGIFLYKGINGDKTKKKQYDLVDRDVVIAPHLGVIESDVWLKCRLKIMKNRQSARTNKGKRTWLAGKVKCKKCGYAYTVTRSNTKAGRYFQCSGSRYSIKCKGAGHTIYADVFEDYVLEEMKKQLAKFQYLSDELEAVTQPSSQAEKVRIAEIEQEIGNLLAKVPEANKTVMEYINRRIEELDKEKQSLQQKLVEQSTNQTSGKMDKITNYVAKWDELDNDDKQRVADILIDRIDIDEDVIEITWNI

SEQ ID NO: 5502 - protein, 505 aa, Unknown
  Description of Unknown: Integrase B5503 sequence
  PTHR30461:SF3,SM00857,G3DSA:1.10.10.2600,IPR036162,PF13408, PS51737,G3DSA:3.40.50.1390,IPR025827,IPR006119,IPR038109, PF07508,IPR011109,SSF53041,PTHR30461,PS51736, cd00338,PF00239
MNGVIYARYSSENQREESIDGQLRECTAFAQHNDIQIVGEYIDRAFSAKTDNRPSFQKMIKDSAKGEFDVIIVWKLDRFARNRYDSAHYKNILKKNGVKVVSATEAISSGAEGIILESVLEGMAEYYSAELAEKVSRGMKENALKCKYNGGSVPLGYYIDESKHFQIDSSVAPFVVECFEHYADGMTMKQLRDELNMKGVKNSRGGKLSIDVISRMLTNRKYLGEYTFQDITIKDGIPAIVSTSLFEKVQDRLTKTKKAPSSHKADDDYILTTKLFCGKCKSFMVGESGTNAQGKKYRYYKCVNHKKHQGCDMKSIRKDLIENMTIKYIREFLNDEDLINTLIDLAYDAQHKENEQLPLLRKQLAQTEKGIKNIVDAIEQGISTKSTRERLLDLEQRKNDIEMSISKESIENPMLTKKQFKFWFDQLKKLDISKSEQRQKLVDLFVNSIIIYDDHIKFFFNYKEHTETITFDELNNCSDLPDSPRPKKEIPDERYLFLFISMYKT

SEQ ID NO: 5503 - protein, 505 aa, Unknown
  Description of Unknown: Integrase B5504 sequence
  cd00338,SM00857,G3DSA:1.10.10.2600,IPR036162,PS51737, G3DSA:3.40.50.1390,IPR006119,IPR038109,PF07508,SSF53041, IPR011109,PTHR30461,PS51736,Coil,PF00239
MNNSVLSAMYLRKSRADDPHEAVMETLHRHESILRAVAKRGKYLVPEDCIYREVVSGENIFSRPQMVRLLEDVTNGKFQSVIVVDIDRLGRGDMRDQGLILETFKNSDTLIITPEKVYDLNDEMDEELTEFKGFMARREYKMITKRLKRGREQTVKAGGFVAEPPYGWKRSKINNLPSLEPHETEGPIMQMIVEMYGNQEPISAIQQRLAAMGVYNRKGVPFCRSSIRHIATNPVNAGLIQWNRYKNVRKGENGSPTGYQIENSPDQVILVKGVHQPQVSVEAYQKCINVCRSRSTPSVKKGIHGIVRNPLAGIVICSNCGSRMQMQHSTTKGSSTLLCTTPRCMAGVDISRAEIALLDILRAKLEEIRTGQGKKQQDSALAELQKSVQATEKNIQSLKKQQNKLYTLLEQEVYSIEVFKERNQVLTQKLTHTKEQLKTLQDQIDDISNRKAERLAQNIEHVLANYEGSSPKEKNRLLKTVVEKALYFRQSRTSPFAFDVTFINM

SEQ ID NO: 5504 - protein, 505 aa, Unknown
  Description of Unknown: Integrase B5505 sequence
  PTHR30461:SF3,SM00857,G3DSA:1.10.10.2600,IPR036162,PF13408, IPR025827,PS51737,G3DSA:3.40.50.1390,IPR006119,IPR038109, PF07508,IPR011109,SSF53041,PTHR30461, Coil,PS51736,cd00338,PF00239
MAQKKARAPEVLIPAVIYARYSSSGQREESIEGQLRECHEFARRNGLTVVGEYIDKALTGRTDRRPDFQRMLRDCERGVFKAVICWKMDRFARNRYDSAMYKYKLKKNGVRIFYAKESIPEGPEGIILESVMEGYAEYYSENLSQNVKRGYYDSALELKTLGQTVLGLRKGADGRFELDPATAPVVRRIFEEYAAGDSAKEIYTRLNAEGYRTSRGGLFNKNSLRRILQNEKYVGVYEFKDIRVEGAIPAIVERELFEKCQSMVERHHRAPAALRETSFLLTAKLFCGHCGEPMTGDGGTSRTGRVYYYYTCNGRRAHKCKKERAPKAWIEQLVIDELVALIHSDDFVNEVADKCMEYQQRTKDDSALRGLEARQKENERAIQNMLAAIEAGIITPSTKSRLMELEAERAQIEKGIAQQLISEPELERDQVVYFLERFRSGDVNDEGYRAFLVDTFLNAVYLYDDDKLVLVLNYTGERCKVTLELVEAAVEGDPGGSCFAPSGAS

SEQ ID NO: 5505 - protein, 505 aa, Unknown
  Description of Unknown: Integrase B5506 sequence
  cd00338,SM00857,G3DSA:1.10.10.2600,IPR036162,PF13408, IPR025827,G3DSA:3.40.50.1390,PS51737,IPR006119,IPR038109, PF07508,SSF53041,IPR011109,PTHR30461,PS51736, Coil,PF00239
MNAVIYARYSSDKQTEQSIEGQLREGYAYAERMGITVVGEYIDRAVSGTSDQRPDFQRMISDSIKRQFEAVIVWKLDRFARNRYDSAIYKSKLKKNGVRVFSVTEGIGDGDESIILEAVLEAMAEVYSKQLGQNAARGMRETAMKGLCTGGQIPLGYAVGEDHKLHIDSKTAPAVQLIYTLYADGQSKTQIANELNSRGFRTKTGKPYNCNSFYRILTNPMYYGNYTYKGEVLRECPAIISKALYDKCQERNDAVKRSRGMKISEVEWLLRGKLYCGHCGTQMTGDSGTSRTNEKYYYYTCHKHKRYKDCDKKSEKKEQLERAVCQKTVEYVLREDRIEYIAERVVEQYEKEFDASTIKEKETSLSKLNIELDKCAESLMNTTVRSVVDRINARAEELEAAKSELEHELAQLRITSKARITVDEIMTFLRGFCSGDVDDIQFRRKIIDTFINAVYVFDDKYVIYYNVRDCKQVTYSDMLASIHAPSDMSVHGSDCLLYGEPEKSP

SEQ ID NO: 5506 - protein, 505 aa, Unknown
  Description of Unknown: Integrase B5507 sequence
  PTHR30461:SF3,cd00338,SM00857,G3DSA:1.10.10.2600,IPR036162, PF13408,PS51737,G3DSA:3.40.50.1390,IPR025827,IPR006119, IPR038109,PF07508,IPR011109,SSF53041,PTHR30461, PS51736,Coil,PF00239
MSSVDKIAVIYARYSSHGQTEQSIEGQIAAAQKYAEQHGYTIIHIYADRAMTGRNDDREQFQKMLSDTAMHQFGVILLWKIDRFGRNREEIAFNRYRCKKNGVRVERVAEDVPDGPEGVILDSVLEGMAEYYSLQLAQNVRRGQRESAKKSMSIGGNKMLGYVVNPETKRYESDPKTASYVTEIFKRYANGETISEIVAWLNAQGIRTTRGSEFTVNSLHRLLKNEKYTGVYIFHDIRNEGGMPALTDRATFDKVQEMLKVNRRAPVRIWSKTEYLLTDKLFCGHCGAIMVGESGHGRNGTKHSYYTCLNRKKKKSCDKKPVRQDVIEPLVLRAIGKLLENPATLENIADQVWAAYERSDTSGDTIKALDKQIADVDRALSNVMKAIEMGIINEMTKTRMDELTNQKQALSQSRAEAGLTGGFKLTRDMILFFLQEMAALDMADRDSQKRLIKTFVNAIYLYDDHFDIAFNYTDNGKVAVRMQEINDAASGEVFGCCAQSPTKRL

SEQ ID NO: 5507 - protein, 505 aa, Unknown
  Description of Unknown: Integrase B5508 sequence
  PTHR30461:SF3,SM00857,G3DSA:1.10.10.2600,IPR036162,PF13408, IPR025827,G3DSA:3.40.50.1390,PS51737,IPR006119,IPR038109, PF07508,IPR011109,SSF53041,PF00239,PTHR30461, PS51736,Coil,cd00338
MNPVDKIAVVYARYSSHGQTEQSIEGQIAAAQKYAEQHGYTIIHVYADRAMTGRNDDREQFQKMLSDTAMHQFGVILLWKIDRFGRNREEIAFNRYRCKKNGVRVERVAEDVPDGPEGVILDSVLEGMAEYYSLQLAQNVRRGQRESAKKSMSIGGNKMLGYIVNPETKRYESDPKTASYVTEIFKRYANGETISEIVAWLNAQGIRTTRGSEFTVNSLHRLLKNEKYTGVYIFHDIRNEGGMPALTDRATFDKVQEMLKVNRRAPARVWSKTEYLLTDKLFCGYCGEMMVGESGHGRNGIKHSYYTCLNRKKKKSCDKKPVRQDVIEPLVLRAIGKLLENPATLENITDQVWAAYERSDTSGDTIKALDKQIADVDRALSNVMKAIELGIINEMTKTRMDELTNQKQALSTARAEAGLAEGFKLTRDMILFFLQELSALDMADRDGQKRLIKTFVNAIYLYDDHFDIAFNYTDNGNVVVRIQEINDAARGEVFGHCAQSPTKSL

SEQ ID NO: 5508 - protein, 505 aa, Unknown
  Description of Unknown: Integrase B5509 sequence
  PTHR30461:SF3,SM00857,G3DSA:1.10.10.2600,IPR036162,PF13408, IPR025827,G3DSA:3.40.50.1390,PS51737,IPR006119,IPR038109, PF07508,IPR011109,SSF53041,PF00239,PTHR30461, PS51736,Coil,cd00338
MRVVLYMRYSSDRQTEQSIEGQNRVCTAFCEQQGYEIVDRYIDRATSAFKDTDKRTEFQRMIRDSEKQLWEGIVVYKLDRFARNRYDSATYKARLKKNGVRVISATENISDNPEGVILEAVLEGMAEFYSKELSQKITRGMFESANKCHSIGGHIPLGYKIENKKLVIDEAGAAIVREAFDLYANGATVAEICETFNTKGYRTAKNAEFNKNSFRSMFKNERYIGIYKYKDLRIEGGVPAIVDKDTFAIVQKKLSKNAEAPSRGKAKIDYLLSQKLFCGHCGSLMTGESGTGKGGTTYFYYTCGKRKREHTCDKKPLKKDFIERAVVEDALTLLTPETIDELADIAVNESIREMEENSIIPALKDQLHDTERSINNLVKMVEKGVESDTIADRLKELEKEKRAIEKRLVVAQDDYVLLEKDHIVWWLSEFCNGDIEDEEFRRHIIDLLVNSVTVWDEPDGWYKITSVYNLTSNKTKTFRCSDLSGQAPPKVKIRTLSSMVIRSDF

SEQ ID NO: 5509 - protein, 505 aa, Unknown
  Description of Unknown: Integrase B5510 sequence
  SM00857,G3DSA:1.10.10.2600,IPR036162,PF13408,IPR025827, G3DSA:3.40.50.1390,PS51737,IPR006119,IPR038109,PF07508, IPR011109,SSF53041,PTHR30461,Coil,PS51736, cd00338,PF00239
MAKPEVSELAVVYARYSSHSQGEQSIEGQLSNARDYAAAHGYTIVHEYVDRAKSGRTDNRAEFQQMLKDTAKRQFSVIILWKVDRFGRNREEIAINKMKCRKNGVRVEYVAETIPDSPEGVILESVLEGFAEYYSLQLSQNIRRGRAESAEKCQSLGGNRPLGYKTGADKKFVIDENTAPTVKMIFTMYADGKTVTEIVDKLNELGLRTLRGGPFTKNSLHSILKNKKYIGIYEYQGREIKDGVPRIIEDDVFNKVQEMLKINKRAPAKTWSRADYILTDKLFCGKCGALMFGESGTSHTGAKHNYYICSNKKRFRSCDKKAVRQADIEDTVLNATHELLQDDELLDYIVDRTWEYYLAQDNSQEELRNLQRQLAQTDTAISNLIRAIEAGILTEETKKRMDELTQQKADLKASIADREIARGFHLQKSHIAFYLRSLRDADWSDKEAQKRLIQTFVNAVFVYDDHITLTYNFSGDKSTITLRDMQRFEDGEEFGCRASRSTNTI

SEQ ID NO: 5510 - protein, 505 aa, Unknown
  Description of Unknown: Integrase B5511 sequence
  PTHR30461:SF3,cd00338,SM00857,G3DSA:1.10.10.2600,IPR036162, PF13408,PS51737,G3DSA:3.40.50.1390,IPR025827,IPR006119, IPR038109,PF07508,IPR011109,SSF53041,PTHR30461, PS51736,Coil,PF00239
MTKNAVIYARFSSDKQREESIDGQIRECQAFAEANEINIINTYIDRAMSARTDQRPSFLQMVKDSAKHLFDYVIVYQLDRFSRSRYDSAIYKHRLKKNGVKVLSAKENIKDDPSGILLESVIEGMAEYYSAELSQKVKRGMTENLLEGKWIGGIVPFGYELTSENKLAISPATGHLVPEIYDKYLSGIKTTDILSKLNSLGIKTQRGCNFTRNSLNRILKNQIYTGTFTWAGTSYPDYAPALITQEQYTAMQNLFESRKRKSNTARRVSTQYALTGKIYCGTCGLPMTGYCGKSHTGTTYYYYQCSSKNNKSEKAARSQIACDAKNISRDKLEKLVLDTTISILKNKDAVKCIADQCMTIQKAELEHKPAEQLRLESQIKEIEKRLKNSVKAVENGLISQTITNNIETYEKQLTELNAQLDGLKLETHIIPITEEAVIYYLNQLTERANKKDGYSLDTFDDFIRRVVVTGKRVDIYYNYTAVPNILENPAVKMLRGSSEDYLVTR

SEQ ID NO: 5511 - protein, 504 aa, Unknown
  Description of Unknown: Integrase B5512 sequence
  cd03768,PTHR30461:SF3,SM00857,IPR036162,PF13408, IPR025827,G3DSA:3.40.50.1390,PS51737,IPR006119,PF07508, SSF53041,IPR011109,PTHR30461,PS51736,Coil, PF00239
MEDFIYARQSVDKEDSISIESQIELCLREVGNNPHRVFRDKGYSGKNTERPDFQDMMAAVRAGGARRIIVYRLDRISRSVLDFANVISELQKYGVEFVSITERFDTSTPIGKAMLMIVMVFAQLERETIQQRVMDAYRSRSRKGFYMGGRVPYGFELENTVMEGIKTCMYKPIPEQIQVVQLIFSLYAMPQVSFADVVRYLSQNGIKNPNGKNFSRMRIRDIITNPVYAKADASIYEFFHGQGTEIINDISQFIGTNGAYLYTGNKAAKRKSISLDGHVLVLAPHAGCIDADTWIRCRRKCLNVRQIAKPVKAKNTWLAGKIKCIDCGHALSLKSYPRKRSADARYYICNSKYVSASCDGVGAIQASGIEDIVFDEMSRKLKEFNKLSYKEKHGDPIELTKLKIRAEEIEKEIATLIDKIVSASTATMEYINERIDALDEEKKTVKEKIAQMSAEMYDRQNIGVISDYMSKWNDISIDDKLTVVDTLIESIHVGHGKVKIAWKI

SEQ ID NO: 5512 - protein, 504 aa, Unknown
  Description of Unknown: Integrase B5513 sequence
  PTHR30461:SF3,SM00857,G3DSA:1.10.10.2600,IPR036162,PF13408, IPR025827,G3DSA:3.40.50.1390,PS51737,IPR006119,IPR038109, PF07508,IPR011109,SSF53041,PTHR30461,Coil, PS51736,cd00338,PF00239
MNYNDSKGIYLMYLRKSRADEYNQDVENILKRHEEELQSLAKREFGELIPEKYIFREVVSGGTIKDRPLMKEILKMMESGIIAGVLVVDPQRLSRGDLLDQGHIINAFKYTNTLIITPYKTYDLNDTTGTDMKLLKMELNHGADYLDYYKMVQARGKLASVRAGNFIQPIPPFGYRKVRYGKVTTLEPIEDEARIVRIIFQKYAEGKTICGVTNELNAEGYIPPSKQIWTKGSVKRILSNPVYDGKIRWGFTPNKTVMEDGKLRKYRPERHDYLLFDGKHDAIVNHGLFMSVQERLSKNKSFTNDRSLKNPLYGIMYCKRCGRKISRLNVAESRGGHRYACPNKLCDVQSSRYDLVIEAVIDTIQCAIDDFDITFHNCNSSGSDEKIRELRQELTRLNNKEDTLFELLETKVYSTSVFTQRHAELEKKRQEIIGKINTLSLIPPPESCNDKKMRFKDALLALKDESMPPKEKNHLLKKCIERIDYDIEGVRYHSKVKLDVYFKF

SEQ ID NO: 5513 - protein, 504 aa, Unknown
  Description of Unknown: Integrase B5514 sequence
  cd03768,PTHR30461:SF3,SM00857,IPR036162,PF13408, IPR025827,G3DSA:3.40.50.1390,PS51737,IPR006119,PF07508, IPR011109,SSF53041,PTHR30461,PS51736,Coil, PF00239
MEDFIYARQSVDKEDSISIESQIELCLREVGNNPHRVFRDKGYSGKNTERPDFQDMMAAVRAGGAGRIIVYRLDRISRSVLDFANVISELQKYGVEFVSITERFDTSTPIGKAMLMIVMVFAQLERETIQQRVMDAYRSRSRKGYYMGGRVPYGFELENTVMEGIKTCMYKPIPEQIQVVQLIFSLYAMPQVSFADVVRYLSQNGIKNPNGKNFSRMRIRDIITNPVYAKADASIFEFFHGQGTEIINDISQFIGTNGAYLYTGNKAAKRKSISLDGHVLVLAPHAGCIDADTWIRCRRKCLNVRQIAKPVKAKNTWLAGKIKCIDCGHALSLKSYPRKRSADARYYICNSKYVSASCDGVGAIQASGIEDIVFDEMSHKLKEFNKLSFKEKHGDPIELTKLKIRAEEIEKEIATLIDKIVSASTATMEYINERIDALDEEKKTVKEKIAQMSAEMYDRQNIGVISDYMSKWNDISIDDKLTVVDTLIESIHVGHGKVKIAWKI

SEQ ID NO: 5514 - protein, 504 aa, Unknown
  Description of Unknown: Integrase B5515 sequence
  cd03768,PTHR30461:SF3,SM00857,IPR036162,PF13408, IPR025827,G3DSA:3.40.50.1390,PS51737,IPR006119,PF07508, SSF53041,IPR011109,PTHR30461,PS51736,Coil, PF00239
MEDFIYARQSVDKEDSISIESQIELCLREVGNNPHRVFRDKGYSGKNTERPDFQDMMAAVRAGGARRIIVYRLDRISRSVLDFANVISELQKYGVEFVSITERFDTSTPIGKAMLMIVMVFAQLERETIQQRVMDAYRSRSRKGFYMGGRVPYGFELENTVMEGIKTCMYKPIPEQIQVVQLIFSLYAMPQVSFADVVRYLSQNGIKNPNGKNFSRMRIRDIITNPVYAKADASIFEFFHGQGTEIINDISQFIGTNGAYLYTGNKAAKRKSISLDGHVLVLAPHAGCIDADTWIRCRRKCLNVRQIAKPVKAKNTWLAGKIKCIDCGHALSLKSYPRKRSADARYYICNSKYVSASCDGVGAIQAAGIEDIVFDEMSRKLKEFNKLSYKEKHGDPIELTKLKIRAEEIEKEIATLIDKIVSASTATMEYINERIDALDEEKKTVKEKIAQMSAEMYDRQNIGVISDYMSKWNDISIDDKLTVVDTLIESIHVGHGKIKIAWKI

SEQ ID NO: 5515 - protein, 504 aa, Unknown
  Description of Unknown: Integrase B5516 sequence
  PTHR30461:SF3,SM00857,G3DSA:1.10.10.2600,IPR036162,PF13408, IPR025827,PS51737,G3DSA:3.40.50.1390,IPR006119,IPR038109, PF07508,IPR011109,SSF53041,PTHR30461,Coil, PS51736,cd00338,PF00239
MNYNDSKGIYLMYLRKSRADEYNQDVENILKRHEEELQSLAKREFGELIPEKYIFREVVSGGTIKDRPLMKEILKMMESGIIAGVLVVDPQRLSRGDLLDQGHIINAFKYTNTLIVTPYKTYDLNDTTGTDMKLLKMELNHGADYLDYYKMVQARGKLASVRAGNFIQPIPPFGYRKVRYGKVTTLEPIEDEARIVRIIFQKYAEGKTICGVTNELNAEGYIPPSKQIWTKGSVKRILSNPVYDGKIRWGFTPNKTVMEDGKLKKYRPERHDYLLFDGKHDAIVNHGLFMSVQERLSKNKSFTNDRSLKNPLYGIMYCKRCGRKISRLNVAESRGGHRYACPNKLCDVQSSRYDLVIEAVIDTIQCAIDDFDITFHNCNSSGSDEKIRELRQELTRLNNKEDTLFELLETKVYSTSVFTQRHAELEKKRQEIIGKINTLSLIPPPESCNDKKMRFKDALLALKDESMPPKEKNHLLKKCIERIDYDIEGVRYHSKVKLDVYFKF

SEQ ID NO: 5516 - protein, 504 aa, Unknown
  Description of Unknown: Integrase B5517 sequence
  PTHR30461:SF3,SM00857,G3DSA:1.10.10.2600,IPR036162,PF13408, PS51737,G3DSA:3.40.50.1390,IPR025827,IPR006119,IPR038109, PF07508,IPR011109,SSF53041,PTHR30461,Coil, PS51736,cd00338,PF00239
MTVINEYCDRAISGKTDNRPSFQRLIKDSEKGQFEAVIMYTLDRFARNRYDSAIYKAKLKKHGVRVFYAKQPMPDTPEGIILESVLEGYAEYYSENLSRNIKRGLKENALQCIATGGAGVALGYTVGEDRKYKIDPVGAKIVQEVFEMYADGMSATQIINVCNERGYKTSRGNPFNKNSLRTMLKNDKYIGVYRFMDVVVEGGVPAIISKELFDKVQAKLQHNFTARARNKAKEDYLLTTKLFCGHCGSPMVGESGTSKTGKLHFYYKCIDRKRKHVCTKKVEKKDWIEELVTRFTVQEVLTDENIDRIATKAMEIIEKESADTTYLEGLQNELKEVQKKIKNIMTAIEQGIITSTTKDRLEELESEKNEIEGRISREEIKKPLLTKERIVYWLLSFKSGDINDIEYRRRVIDTLVNSVYIYDDGDKGRRIVLTFNVSGQNTATISCSDIACSAPPNKHRNFDTKRIRIAVLSFCLKALISRAFWLLRYLLLPSRTIAHRQSRP

SEQ ID NO: 5517 - protein, 504 aa, Unknown
  Description of Unknown: Integrase B5518 sequence
  PTHR30461:SF3,SM00857,G3DSA:1.10.10.2600,IPR036162,PF13408, IPR025827,G3DSA:3.40.50.1390,PS51737,IPR006119,IPR038109, PF07508,IPR011109,SSF53041,PTHR30461,Coil, PS51736,cd00338,PF00239
MNYNDSKGIYLMYLRKSRADEYNQDVENILKRHEEELQSLAKREFGELIPEKYIFREVVSGGTIKDRPLMKEILKMMESGIIAGVLVVDPQRLSRGDLLDQGHIINAFKYTNTLIITPYKTYDLNDTTGTDMKLLKMELNHGADYLDYYKMVQARGKLASVRAGNFIQPIPPFGYRKVRYGKVTTLEPIEDEARIVRIIFQKYAEGKTICGVTNELNAEGYIPPSKQIWTKGSVKRILSNPVYDGKIRWGFTPNKTVMEDGKLKKYRPERHDYLLFDGKHDAIVNHVLFMSVQERLSKNKSFTNDRSLKNPLYGIMYCKRCGRKISRLNVAESRGGHRYACPNKLCDVQSSRYDLVIEAVIDTIQCAIDDFDITFHDCNSSGSDEKIRELRQELTRLNNKEDTLFELLETKVYSTSVFTQRHAELEKKRQEIIGKINTLSLIPPPESCNDKKMRFKDALLALKDESMPPKEKNHLLKKCIERIDYDIEGVRYHSKVKLDVYFKF

SEQ ID NO: 5518 - protein, 504 aa, Unknown
  Description of Unknown: Integrase B5519 sequence
  cd03768,PTHR30461:SF3,SM00857,IPR036162,PF13408, PS51737,G3DSA:3.40.50.1390,IPR025827,IPR006119,PF07508, IPR011109,SSF53041,PTHR30461,PS51736,Coil, PF00239
MEDFIYARQSVDKEDSISIESQIELCLREVGNNPYRVFRDKGYSGKNTERPDFQDMMAAVRAGGARRIIVYRLDRISRSVLDFANVISELQKYGVEFVSITERFDTSTPIGKAMLMIVMVFAQLERETIQQRVMDAYRSRSRKGFYMGGRVPYGFELENTVMEGIKTCMYKPIPEQIQVVQLIFSLYAMPQVSFADVVRYLSQNGIKNPNGKNFSRMRIRDIITNPVYAKADASIYEFFHGQGTEIINDISQFIGTNGAYLYTGNKAAKRKSISLDGHVLVLAPHAGCIDADTWIRCRRKCLNVRQIAKPVKAKNTWLAGKIKCIDCGHALSLKSYPRKRSADARYYICNSKYVSASCDGVGAIQASGIEDIVFDEMSRKLKEFNKLSYKEKHGDPIELTKLKIRAEEIEKEIATLIDKIVSASTATMEYINERIDALDEEKKTVKEKIAQMSAEMYDRQNIGVISDYMSKWNDISIDDKLTVVDTLIESIHVGHGKVKIAWKI

SEQ ID NO: 5519 - protein, 504 aa, Unknown
  Description of Unknown: Integrase B5520 sequence
  cd03768,PTHR30461:SF3,SM00857,IPR036162,PF13408, IPR025827,G3DSA:3.40.50.1390,PS51737,IPR006119,PF07508, SSF53041,IPR011109,PTHR30461,PS51736,Coil, PF00239
MEDFIYARQSVDKEDSISIESQIELCLREVGNNPHRVFRDKGYSGKNTERPDFQDMMAAVRAGGARRIIVYRLDRISRSVLDFANVISELQKYGVEFVSITERFDTSTPIGKAMLMIVMVFAQLERETIQQRVMDAYRSRSRKGFYMGGRVPYGFELENTVMEGIKTCMYKPIPEQIQVVQLIFSLYAMPQVSFADVVRYLSQNGIKNPNGKNFSRMRIRDIITNPVYAKADASIYEFFHGQGTEIINDISQFIGTNGAYLYTGNKATKRKSISLDGHVLVLAPHAGCIDADTWVRCRRKCLNVRQIAKPVKAKNTWLAGKIKCIDCGHALSLKSYPRKRSADARYYICNSKYVSASCDGVGAIQASGIEDIVFDEMSRKLKEFNKLSYKEKHGDPIELTKLKIRAEEIEKEIATLIDKIVSASTATMEYINERIDALDEEKKTVKEKIAQMSAEMYDRQNIGVISDYMSKWNDISIDDKLTVVDTLIESIHVGHGKVKIAWKI

SEQ ID NO: 5520 - protein, 504 aa, Unknown
  Description of Unknown: Integrase B5521 sequence
  cd03768,PTHR30461:SF3,SM00857,IPR036162,PF13408, IPR025827,G3DSA:3.40.50.1390,PS51737,IPR006119,PF07508, SSF53041,IPR011109,PTHR30461,PS51736,Coil, PF00239
MEDFIYARQSVDKEDSISIESQIELCLREVGNNPHRVFRDKGYSGKNTERPDFQDMMAAVRAGGARRIIVYRLDRISRSVLDFANVISELQKYGVEFVSITERFDTSTPIGKAMLMIVMVFAQLERETIQQRVMDAYRSRSRKGFYMGGRVPYGFELENTVMEGIKTCMYKPIPEQIQVVQLIFSLYAMPQVSFADVVRYLSQNGIKNPNGKNFSRMRIRDIITNPVYAKADASIFEFFHGQGTEIINDISQFIGTNGAYLYTGNKAAKRKSISLDGHVLVLAPHAGCIDADTWIRCRRKCLNVRQIAKPVKAKNTWLAGKIKCIDCGHALSLKSYPRKRSADARYYICNSKYVSASCDGVGAIQAAGIEDIVFDEMSRKLKEFNKLSYKEKHGDPIELTKLKIRAEEIEKEIATLIDKIVSASTATMEYINERIDALDEEKKTVKEKIAQMSAEMYDRQNIGVISDYMSKWNDISIDDKLTVVDTLIESIHVGHGKVKIAWKI

SEQ ID NO: 5521 - protein, 504 aa, Unknown
  Description of Unknown: Integrase B5522 sequence
  PTHR30461:SF3,SM00857,IPR036162,PF13408,IPR025827, G3DSA:3.40.50.1390,IPR006119,PF07508,IPR011109,SSF53041, PF00239,PTHR30461,PS51736,Coil,cd00338
MKRIAIYSRKSKETDTGESIKNQINICKEYFLRQYDECNFEIFEDEGFSGGNTNRPAFKRMMQLAEHKQFDIIAAYKIDRISRNTLDFLTMFEKLKLNDIELVSVTEGFDANTPAGRMMMSMISSIAEMERANIAQRVKDNMFELAKLGRWSGGTPPTGYRSVKTIEGGKSAVYLEVIEEYVPLIKKIFYMASKGYTTYQIANEVNMSSKTISNILKNPTYMISDEQGSLFLKSIGYNIFGVENGNGYLTYNRRPRKNGKKLTKSTSMIASISLHKGIVTSNEWIEAYTKVNSRFTEAKPRVSQLTFLSHLVKCKCGSGMFVAPGHKRKDGTRTLYFRCSNKKNGGKCDCGFLKILDVEDTLLNTFYDISLDKSLINNYLKSQDPLEYDSEINILKKNIENNNKSINSLTEKLILIEGAAINIISEKINALHFENENLNKQLFDLERKKLLSRNNSNIDLIYNSIVFLLSNWDNLDISDKQLYVRKIVDSITWDGADGIDINLK

SEQ ID NO: 5522 - protein, 504 aa, Unknown
  Description of Unknown: Integrase B5523 sequence
  cd03768,PTHR30461:SF3,SM00857,IPR036162, PF13408,IPR025827,G3DSA:3.40.50.1390,IPR006119, PF07508,SSF53041,IPR011109,PTHR30461, PS51736,Coil,PF00239
MKRIAIYSRKSKETDTGESIKNQINICKEYFLRQYDQCTFEIFEDEGFSGGNTNRPAFKRMMQLADYKQFDIIAAYKVDRISRNTLDFLTMFEKLKLNDIELVSVTEGFDANTPAGRMMMSMISSIAEMERANIAQRVKDNMFELAKLGRWSGGTPPTGYKSVKITDNGKSIVYLEIIKEYIPIIKNIFHMAGKGYTSYQIANEMNMSSKTINNILKNPTYMISDEKGSLFLKSIGYNIFGIENGNGYLAYNRRPRKNGKKLTKSSNMIASVSLHKGIVTSNEWIEAYIKVNSRFTEAKPRVSQLTFLSHLVKCKCGSGMFVSPGRRRKDGTRTLYFRCSNKKNGGNCNSGFLKILDVEESLLNTFYDISLDKSLINNYIKVNDQFKYDTEINILKKTIENNTKSINSLTEKLILIEGAAINIISEKINLLHFENEDLNKQLFDLERKKLLSLNTSNIDAIYDSIIFILSKWDKLNITDKQIYMQKIIDCIVWDGADGLNINLK

SEQ ID NO: 5523 - protein, 504 aa, Unknown
  Description of Unknown: Integrase B5524 sequence
  PTHR30461:SF3,IPR036162,PS51737,IPR011109,PTHR30461, PS00397,PF00239,G3DSA:1.10.10.2600,IPR006119,SSF53041, SM00857,IPR025827,IPR038109,PS51736,cd03768, IPR006118,PF13408,G3DSA:3.40.50.1390,PF07508,Coil
MYKASNGSGELMENKVIRVGGYIRVSTQEQAKEGYSIPAQTKCLKSYCSARNWILHELYIDPGYSGAKMERPALQKMLSDIKKGLVDLVLVYKLDRLSRSQKDTLYLIEDVFLKNEVAFVSINENFDTSSAFGRAMIGILSVFAQLEREQIKERTQMGLAERAKNGMWHGSGITPIGYDYDPASNQLIVNEYEAMQIREAFDLFVNQNYAFTKIVKTFRNKGYSHKHGVWAHSSKLRYILSNKTYIGRINWNGEDYPGKHDPIIPSSLFEAAQKKLAEKDWKLTDKPAKSPFDATQLLSGVLFCGNCGGRYYGAGCYRGSHDPNSPKRRYEHIYSCYSRTKTKLEMIKDPSCKNKNWKTETLDNYVITRIKNLRLEGEIENLIAKERPKNPGIDQRKALEKQIDDIDRQISRLLTLYQLEDVPTAEIGLRLSDLTRKKKTVEEAIENIPLYEPELSVAKAKSLLADAEEIFNCGTTEEKRSLIHALIRKIILTRNDVVIEWAFI

SEQ ID NO: 5524 - protein, 504 aa, Unknown
  Description of Unknown: Integrase B5525 sequence
  PTHR30461:SF3,SM00857,G3DSA:1.10.10.2600,IPR036162,PF13408, PS51737,IPR025827,G3DSA:3.40.50.1390,IPR006119,IPR038109, PF07508,IPR011109,SSF53041,PTHR30461,Coil, PS51736,cd00338,PF00239
MDRAVIYARYSSDNQREESIDAQVRACREYCKRKDYFVTHIYKDEAKSGTKLAGRDAYKQMLADVKENLFDVIIFHKIDRNARNELDYYLTKDMLEKNNVRYEYAVQNIDGSPEGQMMENMLVGFAAYYSRNLSKETKKGLNENAHKCLFNGGVPPLGYDIDQNQRYVINTKEAEIVKLIFKLYIEGIGYKKIAEKLDELGYKTKTGGDFGKNSLFDIIGNEKYCGIYSYNKHPRAKNGKGRNMHAKSFPEDYITIDNAIPAIISMELYEAAQARRRQNKSRPGIYNGKRQYLLTGKIFCGHCGSAMGGHTNTPRKKSYSYYGCLDKDRTPAHKCTQKQINTEIVDTAVINKIKHTFLNSEALLRIADKMRQQYATLKDDVEDEIHSKTSQMAGAIKRRNNLYCLVEQGINDDYTLSRISAVNAEVEKLKAQIDNLKDKKNLKVLTDEAIIKAFKLFESKICSLDTNSAKKLLVELFLIKVIVTDKNIDIILDADKITNMVMGQ

SEQ ID NO: 5525 - protein, 504 aa, Unknown
  Description of Unknown: Integrase B5526 sequence
  cd03768,PTHR30461:SF3,SM00857,IPR036162,PF13408, IPR025827,G3DSA:3.40.50.1390,PS51737,IPR006119,PF07508, SSF53041,IPR011109,PTHR30461,PS51736,Coil, PF00239
MEDFIYARQSVDKEDSISIESQIELCLREVGNNPHRVFRDKGYSGKNTERPDFQDMMAAVRAGGARRIIVYRLDRISRSVLDFANVISELQKYGVEFVSITERFDTSTPIGKAMLMIVMVFAQLERETIQQRVMDAYRSRSRKGFYMGGRVPYGFELENTVMEGIKTCMYKPIPEQIQVVQLIFSLYAMPQVSFADVVRYLSQNGIKNPNGKNFSRMRIRDIITNPVYAKADASIFEFFHGQGTEIINDISQFIGTNGAYLYTGNKAAKRKSVSLDGHVLVLAPHAGCIDADTWIRCRRKCLNVRQIAKPVKAKNTWLAGKIKCIDCGHALSLKSYPRKRSADARYYICNSKYVSASCDGVGAIQAAGIEDIVFDEMSRKLKEFNKLSYKEKHGDPIELTKLKIRAEEIEKEIATLIDKIVSASTATMEYINERIDALDEEKKTVKEKIAQMSAEMYDRQNIGVISDYMSKWNDISIDDKLTVVDTLIESIHVGHGKVKIAWKI

SEQ ID NO: 5526 - protein, 504 aa, Unknown
  Description of Unknown: Integrase B5527 sequence
  cd03768,PTHR30461:SF3,SM00857,IPR036162,PF13408, PS51737,G3DSA:3.40.50.1390,IPR025827,IPR006119,PF07508, IPR011109,SSF53041,PTHR30461,PS51736,Coil, PF00239
MEDFIYARQSVDKEDSISIESQIELCLREVGNNPYRVFRDKGYSGKNTERPDFQDMMAAVRAGGARRIIVYRLDRISRSVLDFANVISELQKYGVEFVSITERFDTSTPIGKAMLMIVMVFAQLERETIQQRVMDAYRSRSRKGFYMGGRVPYGFELENTVMEGIKTCMYKPIPEQIQVVQLIFSLYAMPQVSFADVVRYLSQNGIKNPNGKNFSRMRIRDIITNPVYAKADASIFEFFHGQGTEIINDISQFIGTNGAYLYTGNKAAKRKSISLDGHVLVLAPHAGCIDSDTWIRCRRKCLNVRQIAKPVKAKNTWLAGKIKCIDCGHALSLKSYPRKRSADARYYICNSKYVSASCDGVGAIQASGIEDIVFDEMSRKLKEFNKLSFKEKHGDPIELTKLKIRAEEIEKEIATLIDKIVSASTATMEYINERIDALDEEKKTVKEKIAQMSAEMYDRQNIGVISDYMSKWNDISIDDKLTVVDTLIESIHVGHGKVKIAWKI

SEQ ID NO: 5527 - protein, 504 aa, Unknown
  Description of Unknown: Integrase B5528 sequence
  cd03768,PTHR30461:SF3,SM00857,IPR036162,PF13408, IPR025827,PS51737,G3DSA:3.40.50.1390,IPR006119,PF07508, IPR011109,SSF53041,PTHR30461,PS51736,Coil, PF00239
MEDFIYARQSVDKEDSISIESQIELCLREVGSNPHRVFRDKGYSGKNTERPDFQDMMAAVRAGGARRIIVYRLDRISRSVLDFANVISELQKYGVEFVSITERFDTSTPIGKAMLMIVMVFAQLERETIQQRVMDAYRSRSRKGFYMGGRVPYGFELENTVMEGIKTCMYKPIPEQIQVVQLIFSLYAMPQVSFADVVRYLSQNGIKNPNGKNFSRMRIRDIITNPVYAKADASIFEFFHGQGTEIINDISQFIGTNGAYLYTGNKAAKRKSISLDGHVLVLAPHAGCIDADTWIRCRRKCLNVRQIAKPVKAKNTWLAGKIKCIDCGHALSLKSYPRKRSADARYYICNSKYVSASCDGVGAIQAAGIEDIVFDEMSRKLKEFNKLSYKEKHGDPIELTKLKIRAEEIEKEIATLIDKIVSASTATMEYINERIDALDEEKKTVKEKIAQMSAEMYDRQNIGVISDYMSKWNDISIDDKLTVVDTLIESIHVGHGKVKIAWKI

SEQ ID NO: 5528 - protein, 504 aa, Unknown
  Description of Unknown: Integrase B5529 sequence
  cd03768,PTHR30461:SF3,SM00857,IPR036162,PF13408, IPR025827,G3DSA:3.40.50.1390,PS51737,IPR006119,PF07508, SSF53041,IPR011109,PTHR30461,PS51736,Coil, PF00239
MEDFIYARQSVDKEDSISIESQIELCLREVGNNPHRVFRDKGYSGKNTERPDFQDMMAAVRAGGARRIIVYRLDRISRSVLDFANVISELQKYGVEFVSITERFDTSTPIGKAMLMIVMVFAQLERETIQQRVMDAYRSRSRKGFYMGGRVPYGFELENTVMEGIKTCMYKPIPEQIQVVQLIFSLYAMPQVSFADVVRYLSQNGIKNPNGKNFSRMRIRDIITNPVYAKADASIYEFFHGQGTEIINDISQFIGTNGAYLYTGSKAAKRKSISLDGHVLVLAPHAGCIDADTWIRCRRKCLNVRQIAKPVKAKNTWLAGKIKCIDCGHALSLKSYPRKRSADARYYICNSKYVSASCDGVGAIQASGIEDIVFDEMSRKLKEFNKLSYKEKHGDPIELTKLKIRAEEIEKEIATLIDKIVSASTATMEYINERIDALDEEKKTVKEKIAQMSAEMYDRQNIGVISDYMSKWNDISIDDKLTVVDTLIESIHVGHGKVKIAWKI

SEQ ID NO: 5529 - protein, 504 aa, Unknown
  Description of Unknown: Integrase B5530 sequence
  PTHR30461:SF3,cd00338,SM00857,G3DSA:1.10.10.2600,IPR036162, PS51737,G3DSA:3.40.50.1390,IPR006119,IPR038109,PF07508, IPR011109,SSF53041,PTHR30461,PS51736,Coil, PF00239
MAYAMYLRKSRKDDDTGIEDTLARHEKMLQELADRMGILVCEQDVYREVVSGESIEARPQMQRLLKHVELGEYDGVLCVELERLSRGNGEDQSRILKAFQFSDTKIITLNKTYDLAGEDEFDEEFFEFGLFMSRREYKMIKRRLLRGRMQSQQDGYFIGATPPFGYDKMKNPDGKGWILVPNEQTPIVQMIFERYASGESAASIMHELNRMGIQPSKVYDTAWTSHRVRDIIKNRVYLGEINVKIKRTEKRIEDGKIIESRVRNLNHGTVKGKHEPIVSVETFNKCQELLAMRSTRQAVSKQLSNPLASFLHCSKCGKVMRRTTYTWKGVTTEHLQCSTFKCETRNSSLPMVENMILDALKDELSRQLTVLAEYGGVEADDTDEKALEIVESEIEKKDKMLDRVDELYELGDYSRAKYLDRSQKLQSQKADLLRQKSMLEDKIAQRESKQKKAVPILTKVLDEYHSLDTADKNRLLKMIIERVDYTKTESGSHIEPQLEYTLRI

SEQ ID NO: 5530 - protein, 504 aa, Unknown
  Description of Unknown: Integrase B5531 sequence
  PTHR30461:SF3,SM00857,G3DSA:1.10.10.2600,IPR036162,PF13408, PS51737,G3DSA:3.40.50.1390,IPR025827,IPR006119,IPR038109, PF07508,IPR011109,SSF53041,PTHR30461,Coil, PS51736,cd00338,PF00239
MNAVIYARYSCDRQTEQSIEGQLRECKAFAASEGIHIIGEYIDRAISGTTANRPEFQRMIADSRYKTFQAVIVYKLDRFARNRYDSAMYKSKLKANGVRVLSAKEHITDSPEGIILEGLLEAMNEYYSAELSQKIKRGMRENAIKGKTTGGNVALGYRIGADKQMEIDPAGASLVRRIFTGYDSGMTFTEICDDLNHAGYTTSRGKQFRIDTISRILANQRYTGTFQCAGEDAHCPPIIEPELFRSVQERLTESRHKHRHTQSPHEYVLTGKAICGTCGRRLTGRAGTSKTDKRYYYYCCPNKCCGWLPAAELEHAVLDAIAQYTTPEACEQIANATYALYQQSTHENADLTAAQRRLQETEKKLENAVNAVLNGITSAALQATMQQLEQQKAALETEVRLLQTDAPELKLEHFQYFAHRLLEVQAEDTEKILQLLVNQVIVYKEQITVLVNLTDKTKTPPLEQVTAALRESSCSVACGGGSATKCELTILTPSLLAISNIFKK

SEQ ID NO: 5531 - protein, 504 aa, Unknown
  Description of Unknown: Integrase B5532 sequence
  PTHR30461:SF3,SM00857,G3DSA:1.10.10.2600,IPR036162,PF13408, IPR025827,PS51737,G3DSA:3.40.50.1390,IPR006119,IPR038109, PF07508,IPR011109,SSF53041,PTHR30461,Coil, PS51736,cd00338,PF00239
MNYNDSKGIYLMYLRKSRADEYNQDVENILKRHEEELQSLAKREFGELIPEKYIFREVVSGGTIKDRPLMKEILKMMESGIIAGVLVVDPQRLSRGDLLDQGHIINAFKYTNTLIITPYKTYDLNDTTGTDMKLLKMELNHGADYLDYYKMVQARGKLASVRAGNFIQPIPPFGYRKVRYGKVTTLEPIEDEARIVRIIFQKYAEGKTICGVTNELNAEGYIPPSKQIWTKGSVKRILSNPVYDGKIRWGFTPNKTVMEDGKLKKYRPERHDYLLFDGKHDAIVNHGLFMSVQERLSKNKSFTNDRSLKNPLYGIMYCKRCGRKISRLNVSESRGGHRYACPNKLCDVQSSRYDLVIEAVIDTIQCAIDDFDITFHDCNSSGSDEKIRELRQELTRLNNKEDTLFELLETKVYSTSVFTQRHAELEKKRQEIIGKINTLSLIPPPESCNDKKMRFKDALLALKDESMPPKEKNHLLKKCIERIDYDIEGVRYHSKVKLDVYFKF

SEQ ID NO: 5532 - protein, 504 aa, Unknown
  Description of Unknown: Integrase B5533 sequence
  cd03768,PTHR30461:SF3,SM00857,G3DSA:1.10.10.2600,IPR036162, PF13408,PS51737,IPR025827,G3DSA:3.40.50.1390,IPR006119, IPR038109,PF07508,IPR011109,SSF53041,PTHR30461, PS51736,Coil,PF00239
MEDLIYARQSVDKEDSISIESQIELCLREVGGYPHKVFRDKGYSGKNTERPDFQEMMATVRSGGVRRIIVYRLDRISRSVLDFANVISELQKYGVEFVSITERFDTSTPIGKAMLMIVMVFAQLERETIQQRVVDAYRSRSRKGFFMGGRIPYGFELENIVIDGIKTCMYKPVPEQIRIVRLIYQLYSAPQTSFSDIMKYLSQNKIKNQIGKNFSRMRIRDIVTNPVYAKADAALFEFFRGQGTEIVNDVSQFIGTNGAYLYTGSKAEKRKSICLNGQVLVLAPHEGIIDSDTWIQCRRKCLNVRQIAKPVKAKNTWLAGKIKCIKCGRALSLKTYPRKRSGDARYYICNSKYISASCDGVGAIQADEVEDIVFDEMLRKLGEFNELSYQEKQGDPIELTKLKLRAEEIDKEIASLIDKIISANEATMEYINKRVEILDEEKKELKEKIAQLSAEMYDRKNIGVISGYMNKWEEISIEDKLTVVDTLIESIKVGQGNVQIAWKI

SEQ ID NO: 5533 - protein, 504 aa, Unknown
  Description of Unknown: Integrase B5534 sequence
  cd03768,PTHR30461:SF3,SM00857,IPR036162,PF13408, PS51737,G3DSA:3.40.50.1390,IPR025827,IPR006119,PF07508, SSF53041,IPR011109,PTHR30461,PS51736,Coil, PF00239
MEDFIYARQSVDKEDSISIESQIELCLREVGNNPHRVFRDKGYSGKNTERPDFQDMMAAVRAGGARRIIVYRLDRISRSVLDFANVISELQKYGVEFVSITERFDTSTPIGKAMLMIVMVFAQLERETIQQRVMDAYRSRSRKGFYMGGRVPYGFELENTVMEGIKTCMYKPIPEQIQVVQLIFSLYAMPQVSFADVVRYLSQNGIKNPNGKNFSRMRIRDIITNPVYAKADASIYEFFHGQGTEIINDISQFIGTNGAYLYTGNKAAKRKSISLDGHVLVLAPHAGCIDADTWIRCRRKCLNVRQIAKPVKAKNTWLAGKIKCIDCGHALSLKSYPRKRSADARYYICNSKYVSASCDGVGAIQANGIEDIVFDEMSRKLKEFNKLSYKEKHGDPIELTKLKIRAEEIEKEIATLIDKIVSASTATMEYINERIDALDEEKKTVKEKIAQMSAEMYDRQNIGVISDYMSKWNDISIDDKLTVVDTLIESIHVGHGKVKIAWKI

SEQ ID NO: 5534 - protein, 504 aa, Unknown
  Description of Unknown: Integrase B5535 sequence
  PTHR30461:SF3,SM00857,G3DSA:1.10.10.2600,IPR036162,PF13408, IPR025827,G3DSA:3.40.50.1390,PS51737,IPR006119,IPR038109, PF07508,SSF53041,IPR011109,PTHR30461,Coil, PS51736,cd00338,PF00239
MAKPEVSELAVVYARYSSHSQGEQSIEGQLSNARDYAAAHGYTIVHEYVDRAKSGRTDNRAEFQQMLKDTAKRQFSVIILWKVDRFGRNREEIAINKMKCRKNGVRVEYVAETIPDSPEGVILESVLEGFAEYYSLQLSQNIRRGRAESAEKCQSLGGNRPLGYKTGADKKFVIDENTAPTVKMIFTMYADGKTVTEIVDKLNELGLRTLRGGPFTKNSLHSILKNKKYIGIYEYQGREIKDGVPRIIEDDVFNKVQEMLKINKRAPAKTWSRADYILTDKLFCGKCGALMFGESGTSKTGAKHNYYICSNKKRFRSCDKKAVRQADIEDTVLNATHELLQDDELLDYIVDRTWEYYLAQDNSQEELRNLQRQLAQTDTAISNLIRAIEAGILTEETKKRMDELTQQKADLKASIADREIARGFHLQKSHIAFYLRSLRDADWSDKEAQKRLIQTFVNAVFVYDDHITLTYNFSGDKNTITLRDMQRFEDGEEFGCRASRSTRT

SEQ ID NO: 5535 - protein, 504 aa, Unknown
  Description of Unknown: Integrase B5536 sequence
  PTHR30461:SF3,SM00857,G3DSA:1.10.10.2600,IPR036162,PF13408, PS51737,IPR025827,G3DSA:3.40.50.1390,IPR006119,IPR038109, PF07508,IPR011109,SSF53041,PTHR30461,Coil, PS51736,cd00338,PF00239
MNYNDSKGIYLMYLRKSRADEYNQDVENILKRHEEELQSLAKREFCELIPEKYIFREVVSGGTIKDRPLMKEILKMMESGIIAGVLVVDPQRLSRGDLLDQGHIINAFKYTNTLIITPYKTYDLNDTTGTDMKLLKMELNHGADYLDYYKMVQARGKLASVRAGNFIQPIPPFGYRKVRYGKVTTLEPIEDEARIVRIIFQKYAEGKTICGVTNELNAEGYIPPSKQIWTKGSVKRILSNPVYDGKIRWGFTPNKTVMEDGKLKKYRPERHDYLLFDGKHDAIVNHGLFMSVQERLSKNKSFTNDRSLKNPLYGIMYCKRCGRKISRLNVSESRGGHRYACPNKLCDVQSSRYDLVIEAVIDTIQCAIDDFDITFHNCNSSGSDEKIRELRQELTRLNNKEDTLFELLETKVYSTSVFTQRHAELEKKRQEIIGKINTLSLIPPPESCNDKKMRFKDALLALKDESMPPKEKNHLLKKCIERIDYDIEGVRYHSKVKLDVYFKF

SEQ ID NO: 5536 - protein, 504 aa, Unknown
  Description of Unknown: Integrase B5537 sequence
  PTHR30461:SF3,IPR036162,PS51737,IPR011109,PTHR30461, PS00397,PF00239,G3DSA:1.10.10.2600,IPR006119,SSF53041, SM00857,IPR025827,IPR038109,PS51736,cd03768, IPR006118,PF13408,G3DSA:3.40.50.1390,PF07508,Coil
MYKASNGSGELMENKVIRVGGYIRVSTQEQAKEGYSIPAQTKCLKSYCSARNWILHELYIDPGYSGAKMERPALQKMLSDIKKGFVDLVLVYKLDRLSRSQKDTLYLIEDVFLKNEVAFVSINENFDTSSAFGRAMIGILSVFAQLEREQIKERTQMGLAERAKNGMWHGSGITPIGYDYDPASNQLVVNEYEAMQIREAFDLFVNQNYAFTKIVKTFRNKGYSHKHGVWAHSSKLRYILSNKTYIGRINWNGEDYPGKHDPIIPSSLFEAAQKKLAEKDWKLTDKPAKSPFDATQLLSGVLFCGNCGGRYYGAGCYRGSHDPNSPKRRYEHIYSCYSRTKTKLEMIKDPSCKNKNWKTETLDNYVITRIKNLRLEGEIENLIAKERPKNPGIDQRKALEKQIDDIDRQISRLLTLYQLEDVPTAEIGLRLSDLTRKKKTVEEAIENIPLYEPELSVAKAKSLLADAEEIFNCGTTEEKRSLIHALIRKIILTGNDVVIEWAFI

SEQ ID NO: 5537 - protein, 504 aa, Unknown
  Description of Unknown: Integrase B5538 sequence
  cd03768,PTHR30461:SF3,SM00857,IPR036162,PF13408, IPR025827,G3DSA:3.40.50.1390,PS51737,IPR006119,PF07508, SSF53041,IPR011109,PTHR30461,PS51736,Coil, PF00239
MEDFIYARQSVDKEDSISIESQIELCLREVGNNPHRVFRDKGYSGKNTERPDFQDMMAAVRAGGARRIIVYRLDRISRSVLDFANVISELQKYGVEFVSITERFDTSTPIGKAMLMIVMVFAQLERETIQQRVMDAYRSRSRKGFYMGGRVPYGFELENTVMEGIKTCMYKPIPEQIQVVQLIFSLYAMPQVSFADVVRYLSQNGIKSPNGKNFSRMRIRDIITNPVYAKADASIFEFFHGQGTEIINDISQFIGTNGAYLYTGNKAAKRKSISLDGHVLVLAPHAGCIDADTWIRCRRKCLNVRQIAKPVKAKNTWLAGKIKCIDCGHALSLKSYPRKRSADARYYICNSKYVSASCDGVGAIQAAGIEDIVFDEMSRKLKEFNKLSYKEKHGDPIELTKLKIRAEEIEKEIATLIDKIVSASTATMEYINERIDALDEEKKTVKEKIAQMSAEMYDRQNIGVISDYMSKWNDISIDDKLTVVDTLIESIHVGHGKVKIAWKI

SEQ ID NO: 5538 - protein, 504 aa, Unknown
  Description of Unknown: Integrase B5539 sequence
  cd03768,PTHR30461:SF3,SM00857,IPR036162,PF13408, PS51737,G3DSA:3.40.50.1390,IPR025827,IPR006119,PF07508, SSF53041,IPR011109,PTHR30461,PS51736,Coil, PF00239
MEDFIYARQSVDKEDSISIESQIELCLREVGNNPHRVFRDKGYSGKNTERPDFQDMMAAVRAGGASRIIVYRLDRISRSVLDFANVISELQKYGVEFVSITERFDTSTPIGKAMLMIVMVFAQLERETIQQRVMDAYRSRSRKGFYMGGRVPYGFELENTVMEGIKTCMYKPIPEQIQVVQLIFSLYAMPQVSFADVVRYLSQNGIKNPNGKNFSRMRIRDIITNPVYAKADASIFEFFHGQGTEIINDISQFIGTNGAYLYTGNKAAKRKSISLDGHVLVLAPHAGCIDADTWIRCRRKCLNVRQIAKPVKAKNTWLAGKIKCIDCGHALSLKSYPRKRSADARYYICNSKYVSASCDGVGAIQASGIEDIVFDEMSRKLKEFNKLSYKEKHGDPIELTKLKIRAEEIEKEIATLIDKIVSASTATMEYINERIDALDEEKKTVKEKIAQMSAEMYDRQNIGVISDYMSKWNDISIDDKLTVVDTLIESIHVGHGKVKIAWKI

SEQ ID NO: 5539 - protein, 504 aa, Unknown
  Description of Unknown: Integrase B5540 sequence
  cd03768,PTHR30461:SF3,SM00857,IPR036162,PF13408, IPR025827,G3DSA:3.40.50.1390,PS51737,IPR006119,PF07508, SSF53041,IPR011109,PTHR30461,PS51736,Coil, PF00239
MEDFIYARQSVDKEDSISIESQIELCLREVGNNPHRVFRDKGYSGKNTERPDFQDMMAAVRAGGARRIIVYRLDRISRSVLDFANVISELQKYGVEFVSITERFDTSTPIGKAMLMIVMVFAQLERETIQQRVMDAYRSRSRKGFYMGGRVPYGFELENTVMEGIKTCMYKPIPEQIQVVQLIFSLYAMPQVSFADVVRYLSQNGIKNPNGKNFSRMRIRDIITNPVYAKVDASIFEFFHGQGTEIINDISQFIGTNGAYLYTGNKAAKRKSISLDGHVLVLAPHAGCIDADTWIRCRRKCLNVRQIAKPVKAKNTWLAGKIKCIDCGHALSLKSYPRKRSADARYYICNSKYVSASCDGVGAIQASGIEDIVFDEMSRKLKEFNKLSYKEKHGDPIELTKLKIRAEEIEKEIATLIDKIVSASTATMEYINERIDALDEEKKTVKEKIAQLSAEMYDRQNIGVISDYMSKWNDISIDDKLTVVDTLIESIHVGHGKVKIAWKI

SEQ ID NO: 5540 - protein, 504 aa, Unknown
  Description of Unknown: Integrase B5541 sequence
  cd03768,PTHR30461:SF3,SM00857,IPR036162,PF13408, IPR025827,G3DSA:3.40.50.1390,IPR006119,PF07508,SSF53041, IPR011109,PTHR30461,PS51736,Coil,PF00239
MKRIAIYSRKSKETDTGESIKNQINICKEYFLRQYDQCTFEIFEDEGFSGGNTNRPAFKRMMQLADYKQFDIIAAYKIDRISRNTLDFLTMFEKLKLNDIELISVTEGFDANTPAGRMMMSMISSIAEMERANIAQRVKDNMFELAKLGRWSGGTPPTGYKSVKITDGGKSIVYLEIIEEYIPIIKNIFHMAGKGYTSYQIANEMNMSSKTINNILKNPTYMISDEKGSLFLKSIGYNIFGIENGNGYLAYNRRPRKNGKKLTKSSNMIASVSLHKGIVTSNEWIEAYIKVNSRFTEAKPRVSQLTFLSHLVKCTCGSGMFVSPGRRRKDGTRTLYFRCSNKKNGGNCNSGFLKILDVEESLLNTFYDISLDKSLINNYIKVNDQFKYDTEINILKKTIENNTKSINSLTEKLILIEGAAINIISEKINLLHFENEDLNKQLFDLERKKLLSLNTSNIDSIYDSIIFILSKWDKLNITDKQIYMQKIIDCIVWDGADGLNINLK

SEQ ID NO: 5541 - protein, 504 aa, Unknown
  Description of Unknown: Integrase B5542 sequence
  cd03768,PTHR30461:SF3,SM00857,IPR036162, PF13408,IPR025827,G3DSA:3.40.50.1390,PS51737, IPR006119,PF07508,SSF53041,IPR011109, PTHR30461,PS51736,Coil,PF00239
MEDFIYARQSVDKEDSISIESQIELCLREVGNNPHRVFRDKGYSGKNTERPDFQDMMAAVRAGGARRIIVYRLDRISRSVLDFANVISELQKYGVEFVSITERFDTSTPIGKAMLMIVMVFAQLERETIQQRVMDAYRSRSRKGFYMGGRVPYGFELENTVMEGIKTCMYKPIPEQIQVVQLIFSLYAMPQVSFADVVRYLSQNGIKNPNGKNFSRMRIRDIITNPVYAKADASIFEFFHGQGTEIINDISQFIGTNGAYLYTGNKAAKRKSISLDGHVLVLAPHAGCIDADTWIRCRRKCLNVRQIAKPVKAKNTWLAGKIKCIDCGHALSLKSYPRKRSADARYYICNSKYVSASCDGVGAIQASGIEDIVFDEMSRKLKEFNKLSYKEKHGDPIELTKLKIRAEEIEKEIATLIDKIVSASTATMEYINERIDALDEEKKTVKEKIAQMSAEMYDRQNIGVISDYMSKWNDISIDDKLTVVDTLIESIHVGHGKVKIAWKI

SEQ ID NO: 5542 - protein, 504 aa, Unknown
  Description of Unknown: Integrase B5543 sequence
  cd03768,PTHR30461:SF3,SM00857,IPR036162,PF13408, IPR025827,G3DSA:3.40.50.1390,PS51737,IPR006119,PF07508, SSF53041,IPR011109,PTHR30461,PS51736,Coil, PF00239
MEDFIYARQSVDKEDSISIESQIELCLREVGNNPHRVFRDKGYSGKNTERPDFQDMMAAVRAGGARRIIVYRLDRISRSVLDFANVISELQKYGVEFVSITERFDTSTPIGKAMLMIVMVFAQLERETIQQRVMDAYRSRSRKGFYMGGRVPYGFELENTVMEGIKTCMYKPIPEQIQVVQLIFSLYAMPQVSFADVVRYLSQNGIKNPNGKNFSRMRIRDIITNPVYAKADASIYEFFHGQGTEIINDISQFIGTNGAYLYTGNKAAKRKSISLDGHVLVLAPHAGCIDADTWIRCRRKCLNVRQIAKPVKAKNTWLAGKIKCIDCGHALSLKSYPRKRSADARYYICNSKYVSASCDGVGAIQASGIEDIVFDEMSRKLKEFNKLSYKEKHGDPIELTKLKIRAEEIEKEIATLIDKIASASTATMEYINERIDALDEEKKTVKEKIAQMSAEMYDRQNIGVISDYMSKWNDISIDDKLTVVDTLIESIHVGHGKVKIAWKI

SEQ ID NO: 5543 - protein, 504 aa, Unknown
  Description of Unknown: Integrase B5544 sequence
  SM00857,G3DSA:1.10.10.2600,IPR036162,PS51737,G3DSA:3.40.50.1390, IPR006119,IPR038109,PF07508,IPR011109,SSF53041, PF00239,PTHR30461,PS51736,Coil,cd00338
MTYAIYLRKSRKDDETGYADTLSRHEKMLMDLADRMGIVIHEHDIYREIVSGESIEARPQMQRLLKAVEMRTYTAVLCIELERLSRGNGADQARILKAFQFSNTKIITLNKTYDLASDDEFDEEFFEFGLFMSRREYKTIKRRLLRGRLQSQQEGYFTGSTLPFGYGKMKNPEGKGYILIPNEQTPILQMIFRRYASGDLLADIVQDLNTAGVKTASSLNAEWSTNRVRDMLRNRVYIGEINVNKYAKNRRMEDGRIIETKRRNPDMKTVPGKHEPIIDRETWDKVQARFARFTPRTNIDRSLKNPLASIMRCAECGKMMARRTYTHKGVSIPIIVCQSNRCVTRQSNLEMVENMVIEALKKELERQQTILASYNTEKQDNSDDKTLEFLQAEIAKKDKMMERVDELYELGDYSRSKYLERSQKLQAQKADLMKQLEEVEKRISERDNNRKNAVPILTKVLDEYHTLDVKGKNDLLKMIIETITYRKHESGSDIEPELCFKLLI

SEQ ID NO: 5544 - protein, 504 aa, Unknown
  Description of Unknown: Integrase B5545 sequence
  cd00338,SM00857,G3DSA:1.10.10.2600,IPR036162, PS51737,G3DSA:3.40.50.1390,IPR006119,IPR038109, PF07508,IPR011109,SSF53041,PTHR30461, PS51736,Coil,PF00239
MTYAIYLRKSRKDDETGYADTLSRHEKMLRDLADRMGIMVSEHDIYREIVSGESIEARPQMQRLLKAVEMRTYTGVLCIELERLSRGNGADQARILKAFQFSNTKIITLNKTYDLASDDEFDEEFFEFGLFMSRREYKTIKRRLLRGRLQSQQEGYFTGSTLPFGYGKVKNPEGKGYILVPNEQTPILQMIFKRYAEGDLLADIVQDLNTAGVKTASSLNAEWTTNRVRDMLRNRVYIGEINVNKYAKNRRMEDGRIIETKRRNPDMKTVPGKHEPIIDRETWDKVQARFARFTPRTNIDRSLKNPLASIMRCAECGKMMARRTYTHKGVSIPIIVCQSNRCVTRQSNLEMVENMVIEALKKELERQQTILASYNTEKQDNSDDKTLEFLQAEIAKKDKMMERVDELYELGDYSRSKYLERSQKLQAQKADLMKQLEEVEKRISERDNNRKNAVPILTKVLDEYHTLDVKGKNDLLKMIIETITYRKHESGSDIEPELCFKLLI

SEQ ID NO: 5545 - protein, 504 aa, Unknown
  Description of Unknown: Integrase B5546 sequence
  cd03768,PTHR30461:SF3,SM00857,IPR036162,PF13408, PS51737,IPR025827,G3DSA:3.40.50.1390,IPR006119,PF07508, SSF53041,IPR011109,PTHR30461,PS51736,Coil, PF00239
MEDLIYARQSVDKEDSISIESQIELCLREVGNNPHRVFRDKGYSGKNTERPDFQDMMAAVRAGGVRRIIVYRLDRISRSVLDFANVISELQKYGVEFVSITERFDTSTPIGKAMLMIVMVFAQLERETIQQRVIDAYRSRSRKGFYMGGRVPYGFELENTVMEGIKTCMYKPIPEQIQVVQLIFSLYAMPQVSFADVVRYLSQNGIKNPDGKNFSRMRIRDIITNPVYAKADASIFEFFHGQGTEIINDISQFIGTNGAYLYTGNKAAKRKSISLDGHVLVLAPHAGCIDADTWIRCRRKCLNVRQIAKPVKAKNTWLAGKIKCIDCGHALSLKSYPRKRSADARYYICNSKYVSASCDGVGAIQASGIEDIVFDEMSRKLEEFNKLSYKEKHGDPIELTKLKIRAEEIEKEIATLIDKIVSASTATMEYINERIDALDEEKKTVKEKIAQMSAEMYDRQNIGVISDYMNKWNDISIDDKLTVVDTLIESIHVGHGKVKIAWKI

SEQ ID NO: 5546 - protein, 504 aa, Unknown
  Description of Unknown: Integrase B5547 sequence
  PTHR30461:SF3,SM00857,G3DSA:1.10.10.2600,IPR036162,PF13408, PS51737,G3DSA:3.40.50.1390,IPR025827,IPR006119,IPR038109, PF07508,IPR011109,SSF53041,PF00239,PTHR30461, PS51736,Coil,cd00338
MNYNDSKGIYLMYLRKSRADEYNQDVENILKRHEEELQSLAKREFGELIPEKYIFREVVSGGTIKDRPLMKEILKMMESGIIAGVLVVDPQRLSRGDLLDQGHIINAFKYTNTLIITPYKTYDLNDTTGTDMKLLKMELNHGADYLDYYKMVQARGKLASVRAGNFIQPIPPFGYRKVRYGKVTTLEPIEDEARIVRIIFQKYAEGKTICGVTNELNAEGYIPPSKQIWTKGSVKRILSNPVYDGKIRWGFTPNKTVMEDGKLKKYRPERHDYLLFDGKHDAIVNHGLFMSVQERLSKNKSFTNDRSLKNPLYGIMYCKRCGRKISRLNVAESRGGHRYACPNKLCDVQSSRYDLVIEAVIDTIQCAIDDFDITFHDCNSSGSDEKIRELRQELTRLNNKEDTLFELLETKVYSTSVFTQRHAELEKKRQEIIGKINTLSLIPPPESCNNKKMRFKDALLALKDESMPPKEKNHLLKKCIERIDYDIEGVRYHSKVKLDVYFKF

SEQ ID NO: 5547 - protein, 504 aa, Unknown
  Description of Unknown: Integrase B5548 sequence
  cd03768,PTHR30461:SF3,SM00857,IPR036162,PF13408, IPR025827,G3DSA:3.40.50.1390,PS51737,IPR006119,PF07508, SSF53041,IPR011109,PTHR30461,PS51736,Coil, PF00239
MEDFIYARQSVDKEDSISIESQIELCLREVGNNPHRVFRDKGYSGKNTERPDFQDMMAAVRAGGARRIIVYRLDRISRSVLDFANVISELQKYGVEFVSITERFDTSTPIGKAMLMIVMVFAQLERETIQQRVMDAYRSRSRKGFYMGGRVPYGFELENTVMEGIKTCMYKPIPEQIQVVQLIFSLYAMPQVSFADVVRYLSQNGIKNPNGKNFSRMRIRDIITNPVYAKADASIYEFFHGQGTEIINDISQFIGTNGAYLYTGNKAAKRKSISLDGHVLVLAPHAGCIDADTWIRCRRKCLNVRQIAKPVKAKNTWLAGKIKCIDCGHALSLKSYPRKRSADARYYICNSKYVSASCDGVGAIQASGIEDIVFDEMSRKLKEFNKLSYKEKHGDPIELTKLKIRAEEIEKEIATLIDKIVSASAATMEYINERIDALDEEKKTVKEKIAQMSAEMYDRQNIGVISDYMSKWNDISIDDKLTVVDTLIESIHVGHGKVKIAWKI

SEQ ID NO: 5548 - protein, 504 aa, Unknown
  Description of Unknown: Integrase B5549 sequence
  cd00338,SM00857,G3DSA:1.10.10.2600,IPR036162,PS51737, G3DSA:3.40.50.1390,IPR006119,IPR038109,PF07508,IPR011109, SSF53041,PTHR30461,PS51736,Coil,PF00239
MQKYLMYLRKSRADGEHETIEEILARHEKILQEYAEKNIGKAVPEEDIFREIVSGETIKDRPLMNKLLKCIQNEQITGVLVIEPQRLSRGDLHDCGTIIRAFQYTNTLVYTPTKTYDLSEKYDRKFFEMELMRGNDYLEYVKEILMRGRLASVSDGNYIGSIPPFGYSKEKIDKNYVLVENDESNVVRLIFDLFVNQNMGTSKIANHLNSIGIKPRKNNYWSDSTIRDILRNPVYIGKIRWNWRKTVKTYKDGEIVCSRPKSTPDSWIIIDGKHNGLISEEVFNAAQKRFGQNPRVKKEYEIVNPFAGLVKCECGKSMVYKKFNKSSPRIICPNQPRCENRSVLYSEFESEVIIALKKYINDFKIKISNGDNQSESIQNGILESLIKELKTIENQQDKLYELLEQGIYTNAIFIKRNTALAEKRKKITSEIENLKTSIPNSINYEEKIVQLSNALNTLQNPDIHPKIKNEFLKVIINNIYYTRKNDNRTRNDDSPFTIKIILNL

SEQ ID NO: 5549 - protein, 504 aa, Unknown
  Description of Unknown: Integrase B5550 sequence
  PTHR30461:SF3,SM00857,G3DSA:1.10.10.2600,IPR036162,PF13408, IPR025827,G3DSA:3.40.50.1390,PS51737,IPR006119,IPR038109, PF07508,SSF53041,IPR011109,PTHR30461, Coil,PS51736,cd00338,PF00239
MNAVIYARYSCDRQTEQSIEGQLRECKAFAASEGINVIGEYIDRAISGTTANRPEFQRMIADSKYKTFQAVIVYKLDRFARNRYDSAMYKSKLKANGVRVLSAKEHITDSPEGIILEGLLEAMNEYYSAELSQKIKRGMRENAIKGKTTGGNVALGYRIGADKQMEIDPAGAALVRRIFTSYDSGMTFTEICDDLNHAGYTTSRGKQFRIDTISRILANQRYTGTFQCAGEDAHCPPIIEPELFRSVQERLTESRHKHRHTQSPHEYVLTGKAICGTCGRRLTGRAGTSKTDKRYYYYCCPNKCCGWLPAAELEHAVLDAIAQYTTPEACEQIANATYALYQQSTHENADLTAAQRRLQETEKKLENAVNAVLNGITSAALQATMQQLEQQKAALETEVRLLQTDAPELKLEHFQYFAHRLLEVQAEGTEKILQLLVNQVIVYKEQITVLVNLTDKTKTPPLEQVTAALRESSCSIACGGGNATKCELTILTPSLLAISNIFKK

SEQ ID NO: 5550 - protein, 504 aa, Unknown
  Description of Unknown: Integrase B5551 sequence
  PTHR30461:SF3,IPR036162,PS51737,IPR011109,PTHR30461, PF00239,G3DSA:1.10.10.2600,IPR006119,SSF53041,cd00338, SM00857,IPR025827,IPR038109,PS51736,mobidb-lite, PF13408,G3DSA:3.40.50.1390,PF07508,Coil
MRAFIYCRFSSHKQQELSIEGQRDICQEYADKHNITVIGQYADRARSGKTENRADFRRLMRDAATGVVDCVLVWRYDRFFRNRAESALYRKQLEAAGVHLISVTEYIPEGSAGIITQGMIETVAEYFSAKLSEDVSRGMNKAAQHCQIVGRAPLGYRAGPNKRWQIDPVGAELVRRIFEWYASGKAMGQLAAQLNEEGHRTTNGTLYTRSSFNSILRNEKYIGVYSYGGEVRIEGGCPRIIEDELFFTVQRRLSANRHRPGAYKAEVPYLLSGKLFCGLCGAPMTGTAGTSHTGARHYYYICNNRRAKTCKKKNVRLDLIEEAVLQSALDILTDENIAYISTEVERRCAENSDSAALLASLNAQLEEVQRRLKNIGNAIAQGIITETTKELLEEAETDRTALRQQIDRAKVQAALVVKAEAVACWLDGFRRGDRTDPDFRRQVFGALVHSVFVYDDYLKIIFNVDSAGAAVVPYEAAQAATPSEAPPGSYLDTLGAPKNSLTET

SEQ ID NO: 5551 - protein, 504 aa, Unknown
  Description of Unknown: Integrase B5552 sequence
  PTHR30461:SF3,SM00857,G3DSA:1.10.10.2600,IPR036162,PF13408, PS51737,G3DSA:3.40.50.1390,IPR025827,IPR006119,IPR038109, PF07508,IPR011109,SSF53041,PF00239,PTHR30461, PS51736,Coil,cd00338
MNYNDSKGIYLMYLRKSRADEYNQDVENILKRHEEELQSLAKREFGELIPEKYIFREVVSGGTIKDRPLMKEILKMMESGIIAGVLVVDPQRLSRGDLLDQGHIINAFKYTNTLIITPYKTYDLNDTTGTDMKLLKMELNHGADYLDYYKMVQARGKLASVRAGNFIQPIPPFGYRKVRYGKVTTLEPIEDEARIVRIIFQKYAEGKTICGVTNELNAEGYIPPSKQIWTKGSVKRILSNPVYDGKIRWGFTPNKTVMEDGKLKKYRPERHDYLLFDGKHDAIVNHGLFMSVQERLSKNKSFTNDRSLKNPLYGIMYCKRCGRKISRLNVAESRGGHRYACPNKLCDVQSSRYDLVIEAVIDTIQCAIDDFDITFHDCNSSGSDEKIRELRQELTRLNNKEDTLFELLETKVYSTSVFTQRHAELEKKRQEIIGKINALSLIPPPESCNNKKMRFKDALLALKDESMPPKEKNHLLKKCIKRIDYDIEGVRYHSKVKLDVYFKF

SEQ ID NO: 5552 - protein, 504 aa, Unknown
  Description of Unknown: Integrase B5553 sequence
  cd03768,PTHR30461:SF3,SM00857,IPR036162,PF13408, IPR025827,PS51737,G3DSA:3.40.50.1390,IPR006119,PF07508, SSF53041,IPR011109,PTHR30461,PS51736,Coil, PF00239
MEDFIYARQSVDKEDSISIESQIELCLREVGNNPHRVFRDKGYSGKNTERPDFQDMMAAVRAGGARRIIVYRLDRISRSVLDFANVISELQKYGVEFLSITERFDTSTPIGKAMLMIVMVFAQLERETIQQRVMDAYRSRSRKGFYMGGRVPYGFELENTVMEGIKTCMYKPIPEQIQVVQLIFSLYAMPQVSFADVVRYLSQNGIKNPNGKNFSRMRIRDIITNPVYAKADASIYEFFHGQGTEIINDISQFIGTNGAYLYTGNKAAKRKSISLDGHVLVLAPHAGCIDADTWIRCRRKCLNVRQIAKPVKAKNTWLAGKIKCIDCGHALSLKSYPRKRSADARYYICNSKYVSASCDGVGAIQASGIEDIVFDEMSRKLKEFNKLSYKEKHGDPIELTKLKIRAEEIEKEIATLIDKIVSASTATMEYINERIDALDEEKKTVKEKIAQMSAEMYDRQNIGVISDYMSKWNDISIDDKLTVVDTLIESIHVGHGKVKIAWKI

SEQ ID NO: 5553 - protein, 504 aa, Unknown
  Description of Unknown: Integrase B5554 sequence
  PTHR30461:SF3,cd00338,SM00857,G3DSA:1.10.10.2600,IPR036162, PS51737,G3DSA:3.40.50.1390,IPR006119,IPR038109,PF07508, IPR011109,SSF53041,PTHR30461,PS51736,Coil, PF00239
MAYAMYLRKSRKDDDTGIEDTLARHEKMLQDLADRMGILVCEQDVYREVVSGESIEARPQMQRLLKHVELGEYDGVLCVELERLSRGNGEDQSRILKAFQFSDTKIITLNKTYDLAGEDEFDEEFFEFGLFMSRREYKMIKRRLLRGRMQSQQDGYFIGATPPFGYDKMKNPDGKGWILIPNEQTPIVQMIFERYASGESAASIMHELNRMGIQPSKVYDTAWTSHRVRDIIKNRVYLGEINVKIKRTEKRIEDGKIIESRVRNLNHGTVKGKHEPIVSVETFNKCQELLAMRSTRQAVSKQLSNPLASFLHCSKCGKVMRRTTYTWKGVTTEHLQCSTFKCETRNSSLPMVENMILDALKDELSRQLTVLAEYGGVEADDTDEKALEIVESEIEKKDKMLDRVDELYELGDYSRAKYLDRSQKLQSQKADLLRQKSMLEDKIAQRESKQKKAVPILTKVLDEYHSLDTAYKNRLLKMIIERVDYTKTESGSQIEPQLEYTLRI

SEQ ID NO: 5554 - protein, 504 aa, Unknown
  Description of Unknown: Integrase B5555 sequence
  cd03768,PTHR30461:SF3,SM00857,IPR036162,PF13408, PS51737,G3DSA:3.40.50.1390,IPR025827,IPR006119,PF07508, SSF53041,IPR011109,PTHR30461,PS51736,Coil, PF00239
MEDLIYARQSVDKEDSISIESQIELCLREVGNNPHRVFRDKGYSGKNTERPDFQDMMAAVRAGGVRRIIVYRLDRISRSVLDFANVISELQKYGVEFVSITERFDTSTPIGKAMLMIVMVFAQLERETIQQRVIDAYRSRSRKGFYMGGRVPYGFELENTVMEGIKTCMYKPIPEQIQVVQLIFSLYAMPQVSFADVVRYLSQNGIKNPNGKNFSRMRIRDIITNPVYAKADASIFEFFHGQGTEIINDISQFIGTNGAYLYTGNKAAKRKSISLDGHVLVLAPHAGCIDADTWIRCRRKCLNVRQIAKPVKAKNTWLAGKIKCIDCGHALSLKSYPRKRSADARYYICNSKYVSASCDGVGAIQAAGIEDIVFDEMSRKLKEFNKLSYKEKHGDPIELTKLKIRAEEIEKEIATLIDKIVSASTATMEYINERIDALDEEKKTVKEKIAQMSAEMYDRQNIGVISDYMSKWNDISIDDKLTVVDTLIESIHVGHGKVKIAWKI

SEQ ID NO: 5555 - protein, 504 aa, Unknown
  Description of Unknown: Integrase B5556 sequence
  PTHR30461:SF3,SM00857,IPR036162,PF13408,IPR025827, G3DSA:3.40.50.1390,IPR006119,PF07508,SSF53041,IPR011109, PTHR30461,G3DSA:1.10.10.60,Coil,PS51736,cd00338, PF00239
MKRIAIYSRKSKETDTGESIKNQINICKEYFLRQYDKCNFEIFEDEGFSGGNTNRPAFKRMMQLADHNQFDIIAAYKIDRISRNTLDFLTMFEKLKLNDIELVSVTEGFDANTPAGRMMMSMISSIAEMERANIAQRVKDNMFELAKLGRWSGGTPPTGYRSVKVIEGGKSAVYLEVIEEYVPIIKKIFYMASKGYTTYQIANEVNMSAKTVNNILKNPTYMRSDKQGSLFLKSIGYNIFGDENGNGYLTYNRRPRKNDKKLTHSTSMIASISLHRGIVTSNEWIESYTKINSRFTEAKPRVSQLTFLSHLVKCKCGSGMFVAPGHKRKDGTRTLYFRCSNKKNGGKCDSGFLKILDVEDILLNTFYDISLDKSLINNYLKSQDPLEYDAEINILKKNIDNNNKSINSLTEKLILIEGAAINIISEKINALHFENEKLNKKLFDLERQKLLSRNNSNIDLIYDSIIFILSNWDNLDITDKQLYIRKIIDSITWDGTDGIDINLK

SEQ ID NO: 5556 - protein, 504 aa, Unknown
  Description of Unknown: Integrase B5557 sequence
  PTHR30461:SF3,SM00857,G3DSA:1.10.10.2600,IPR036162,PF13408, PS51737,G3DSA:3.40.50.1390,IPR025827,IPR006119,IPR038109, PF07508,SSF53041,IPR011109,PTHR30461,Coil, PS51736,cd00338,PF00239
MNVVIYARFSSSGQREESIEGQVKVCTEYAENNDYTVIGTYVDRALTGRNDKRPDLQRLLSDSNNNNFQAVIVYSIDRFGRNLQQCLTNENKLKQNGVALFSATEHFTNDPAGIFYRNLMMAHSQYYCDELSQKIRRGMDINAEKCLSTGGNIALGFKVDDKKNFQIDPDTAPIVQYIFESYASGKTVTEIINQLNSQGLKTSRGVPFNKNSLHSMLKNKRYIGIYTYKGTEKIGGMPRIISDELFNKVAEIMDKNRKAPARARAKVEYLLTTKIFCGYCKEMMTGFSGTGKSGKVYRYYVCNGTKKKACKKKKVNKEYIEDLVVNECRKLLTNENIKKIANSISKISESEKDTAHLKFLKKALSENERKHKNALNAIIECDLESVRKSLYEQIPILEKEHSELQKQIALEEKNFPVLTVPMVHFFLRKLKDGNVDDIKYRKTLINVFINKIYLYDDKLTIIFNSGDNPVTINDLLLSEIEDNSKKAEGLFLDGVASPTKYAYF

SEQ ID NO: 5557 - protein, 504 aa, Unknown
  Description of Unknown: Integrase B5558 sequence
  cd03768,PTHR30461:SF3,SM00857,IPR036162,PF13408, IPR025827,G3DSA:3.40.50.1390,PS51737,IPR006119,PF07508, SSF53041,IPR011109,PTHR30461,PS51736,Coil, PF00239
MEDFIYARQSVDKEDSISIESQIELCLREVGNNPHRVFRDKGYSGKNTERPDFQDMMAAVRAGGARRIIVYRLDRISRSVLDFANVISELQKYGVEFVSITERFDTSTPIGKAMLMIVMVFAQLERETIQQRVMDAYRSRSRKGFYMGGRVPYGFELENTVMEGIKTCMYKPIPEQIQVVQLIFSLYAMPQVSFADVVRYLSQNGIKNPNGKNFSRMRIRDIITNPVYAKADASIFEFFHGQGTEIINDISQFIGTNGAYLYTGNKAAKRKSISLDGHVLVLAPHAGCIDADTWIRCRRKCLNVRQIAKPVKAKNTWLAGKIKCIDCGHALSLKSYPRKRSADARYYICNSKYVSASCDGVGAIQASGIEDIVFDEMSRKLKEFNKLSYKEKHGDPIELTKLKIRAEEIEKEIATLIDKIVSASTATMEYINERIDALDEEKKTVKEKIAQLSAEMYDRQNIGVISDYMSKWNDISIDDKLTVVDTLIESIHVGHGKVKIAWKI

SEQ ID NO: 5558 - protein, 504 aa, Unknown
  Description of Unknown: Integrase B5559 sequence
  PTHR30461:SF3,cd00338,SM00857,G3DSA:1.10.10.2600,IPR036162, PF13408,IPR025827,G3DSA:3.40.50.1390,PS51737,IPR006119, IPR038109,PF07508,SSF53041,IPR011109,PTHR30461, PS51736,Coil,PF00239
MKVCMYLRKSRQDEELEKKENTDTLSRHRSALLALARKQHLDIIEVHEEIVSGGSIVSRPKMMKLLEEVRNNMYDAVLCMDLDRLGRGGMQDQGLILDTFKETNTLIITPDKTYDLNNELDEEMTEFKAFFARRELKIITKRMQRGRIKSVEEGKFIASTAPYGYKFEYDKEGKKSLVIDEEKAAIVRNIFDMYINGNGAYKIKVWLDNIGIKTNTGIPFSQQAIGRILRNNIYCGYVTWNNYRRKGTITKKQPKENIIIAKGIHEPIISEEIWNKADEIRQNNQIAPSGNNKNLTNPLAGLVKCACCGHTMTNKLSNYKGEGYVKFMCCKSCNENRGVKMYVLEETILEYLEDILQEFENQILSNKVENKENDRIENLRCTLSLLKKKAVELNKQKNNLHDLLEKGVYDVDTYLERTQVLSKKTDENKNAIDSTLELIESEKNININYNELAISIKLVLENYKKTDDIKLKNFLLKSVIDEIIYFKEKNKRNAKFELDIKLKI

SEQ ID NO: 5559 - protein, 504 aa, Unknown
  Description of Unknown: Integrase B5560 sequence
  PTHR30461:SF3,SM00857,G3DSA:1.10.10.2600,IPR036162,PS51737, G3DSA:3.40.50.1390,IPR006119,IPR038109,PF07508,IPR011109, SSF53041,PTHR30461,PS51736,cd00338,PF00239
MAYAMYLRKSRKDDDTGIEDTLARHEKMLQDLADRMGILVCEQDVYREVVSGESIEARPQMQRLLKHVELGEYDGVLCVELERLSRGNGEDQSRTLKAFQFSDTKIITLNKTYDLAGEDEFDEEFFEFGLFMSRREYKMIKRRLLRGRMQSQQDGYFIGATPPFGYDKMKNPDGKGWILVPNEQTPIVQMIFERYASGESAASIMHELNRMGIQPSKVYDTAWTSHRVQDIIKNRVYLGEINVKIKRTEKRIEDGKIIESRVRNLNHGTVKGKHEPIVSVETFNKCQELLAMRSTRQAVSKQLSNPLASFLHCSKCGKVMRRTTYTWKGVTTERLQCSTFKCETRNSSLPMVENMILDALKDELSRQLTVLAEYGGVEADDTDEKALEIVESEIEKKDKMLDRVDELYELGDYSRAKYLDRSQKLQSQKAYLLRQKSMLEDKIAQRESKQKKAVPILTKVLDEYHSLDTADKNRLLKMIIERVDYTKTESGSHIEPQLEYTLRI

SEQ ID NO: 5560 - protein, 504 aa, Unknown
  Description of Unknown: Integrase B5561 sequence
  cd03768,PTHR30461:SF3,SM00857,IPR036162, PF13408,IPR025827,G3DSA:3.40.50.1390,IPR006119, PF07508,IPR011109,SSF53041,PTHR30461, PS51736,Coil,PF00239
MKKIAIYSRKSKETDTGESIKNQINICKEYFLRQYDQCTFEIFEDEGFSGGNTNRPAFKRMMQLAEHKQFDIIAAYKIDRISRNTLDFLTMFEKLKLNDIELVSVTEGFDANTPAGRMMMSMISSIAEMERANIAQRVKDNMFELAKLGRWSGGTPPTGYRSVKVIEGGKSAVYLEVIEEYVPLIKNVFYMASKGYTTYQIANEVNISSKTISNILKNPTYMISDEQGSLFLKSIGYNIFGVENGNGYLTYNRRPRKNGKKLTNSTSMIASISLHKGIVTSNEWIEAYTKINSRFTEAKPRVSQLTFLSHLVKCKCGSGMYVAPGHKRKDGRRTLYFRCSNKKNGGKCDCGFLKILDVENTLLNTFYDISLDKSLINNYIKSQDPLEYDTEINILKKTIDNNNKSINSLTEKLILIEGPAINIISEKINKLHFENENLNKNLFDLERKKLLSRNTSNIDLIYNSITFLLSKWDDLNITDKQLYIKKIIGSITWDGADGIDINLK

SEQ ID NO: 5561 - protein, 504 aa, Unknown
  Description of Unknown: Integrase B5562 sequence
  PTHR30461:SF3,SM00857,IPR036162,PF13408,IPR025827, G3DSA:3.40.50.1390,IPR006119,PF07508,SSF53041,IPR011109, PF00239,PTHR30461,PS51736,Coil,cd00338
MKKIAIYSRKSKETDTGESIKNQINICKEYFLRQYDQCTFEIFEDEGFSGGNTNRPAFKRMIQLAEHKQFDIIAAYKIDRISRNTLDFLTMFEKLKLNDIELVSVTEGFDANTPAGRMMMSMISSIAEMERANIAQRVKDNMFELAKLGRWSGGTPPTGYRSVKVIEGGKSAVYLEVIEEYVPLIKNIFYMASKGYTTYQIANEVNISSKTISNILKNPTYMISDEQGSLFLKSIGYNIFGVENGNGYLTYNRRPRKNGKKLTNSTSMIASISLHKGIVTSNEWIEAYTKINSRFTEAKPRVSQLTFLSHLVKCKCGSGMYVAPGHKRKDGRRTLYFRCSNKKNGGKCDCGFLKILDVENTLLNTFYDISLDKSLINNYIKSQAPLEYDTEINILKKTIDNNNKSINSLTEKLILIEGPAINIISEKINKLHFENENLNKNLFDLERKKLLSRNTSNIDLIYNSITFLLSKWDDLNITDKQLYIKKIIGSITWDGADGIDINLK

SEQ ID NO: 5562 - protein, 504 aa, Unknown
  Description of Unknown: Integrase B5563 sequence
  cd03768,PTHR30461:SF3,SM00857,IPR036162, PF13408,IPR025827,G3DSA:3.40.50.1390,PS51737, IPR006119,PF07508,SSF53041,IPR011109, PTHR30461,PS51736,Coil,PF00239
MEDFIYARQSVDKEDSISIESQIELCLREVGNNPYRVFRDKGYSGKNTERPDFQDMMAAVRAGGARRIIVYRLDRISRSVLDFANVISELQKYGVEFVSITERFDTSTPIGKAMLMIVMVFAQLERETIQQRVMDAYRSRSRKGFYMGGRVPYGFELENTVMEGIKTCMYKPIPEQIQVVQLIFSLYAMPQVSFADVVRYLSQNGIKNPNGKNFSRMRIRDIITNPVYAKADASIFEFFHGQGTEIINDISQFIGTNGAYLYTGNKAAKRKSISLDGHVLVLAPHAGCIDADTWIRCRRKCLNVRQIAKPVKAKNTWLAGKIKCIDCGHALSLKSYPRKRSADARYYICNSKYVSASCDGVGAIQASGIEDIVFDEMSRKLKEFNKLSFKEKHGDPIELTKLKIRAEEIEKEIATLIDKIVSASTATMEYINERIDALDEEKKTVKEKIAQMSAEMYDRQNIGVISDYMSKWNDISIDDKLTVVDTLIESIHVGHGKVKIAWKI

SEQ ID NO: 5563 - protein, 504 aa, Unknown
  Description of Unknown: Integrase B5564 sequence
  PTHR30461:SF3,SM00857,G3DSA:1.10.10.2600,IPR036162,PF13408, IPR025827,G3DSA:3.40.50.1390,PS51737,IPR006119,IPR038109, PF07508,IPR011109,SSF53041,PF00239,PTHR30461, PS51736,Coil,cd00338
MQRAVIYARYSPGPNQTEQSIEGQVRECTKYAEQHDLRIVGTYVDRKISGKTDNRREFQRMIDDSEKHIFDVIILYHTDRFARNRYDSAIYKHKLKENGVELRYATTDIPKGPEGIILESIMEGWAEYYSAELSRKIKRGMRESALKCHSTGAGRCLGYRTAEDKSLVIEPEDAKAVQTVFDMYIKGKSHADICRYLNDCGFRTAQGKLFNKNSVTHIIRNKRYIGVYTYDDITIEDGIPAIISKDTFHLAQLEAVRRKTVKRPKEPKAEYLLSGKAFCGHCQKPLVGVSGTGKSGNKWYYYYCQESRAKRGCTKRPVKRDWLEREVVKRTIAEVLQPEVIQHIAKKCYDLQMEYRQDNSDVLFYELKLKDVRKAIKNTMHAIESGVKTKTLPARLQELENEEEALEAELAIAKASDFVITADQIEFLLTQFAEPWECESEEEYHRRIIKCFVHKVFLFDDKLLIYYNVSRDGKTREQSEAELLEEALGEGFDKRSSGSTISPP

SEQ ID NO: 5564 - protein, 504 aa, Unknown
  Description of Unknown: Integrase B5565 sequence
  cd03768,PTHR30461:SF3,SM00857,IPR036162,PF13408, IPR025827,G3DSA:3.40.50.1390,PS51737,IPR006119,PF07508, SSF53041,IPR011109,PTHR30461,PS51736,Coil, PF00239
MEDFIYARQSVDKEDSISIESQIELCLREVGNNPHRVFRDKGYSGKNTERPDFQDMMAAVRAGGARRIIVYRLDRISRSVLDFANVISELQKYGVEFVSITERFDTSTPIGKAMLMIVMVFAQLERETIQQRVMDAYRSRSRKGFYMGGRVPYGFELENTVMEGIKTCMYKPIPEQIQVVQLIFSLYAMPQVSFADVVRYLSQNGIKNPNGKNFSRMRIRDIITNPVYAKADASIYEFFHGQGTEIINDISQFIGTNGAYLYTGNKAAKRKSISLDGHVLVLAPHAGCIDADTWIRCRRKCLNVRQIAKPVKAKNTWLAGKIKCIDCGHALSLKSYPRKRSADARYYICNSKYVSASCDGVGAIQASGIEDIVFDEMSRKLKEFNKLSYKEKHGEPIELTKLKIRAEEIEKEIATLIDKIVSASTATMEYINERIDALDEEKKTVKEKIAQMSAEMYDRQNIGVISDYMSKWNDISIDDKLTVVDTLIASIHVGHGKVKIAWKI

SEQ ID NO: 5565 - protein, 504 aa, Unknown
  Description of Unknown: Integrase B5566 sequence
  cd03768,PTHR30461:SF3,SM00857,IPR036162,PF13408, PS51737,G3DSA:3.40.50.1390,IPR025827,IPR006119,PF07508, SSF53041,IPR011109,PTHR30461,PS51736,Coil, PF00239
MEDFIYARQSVDKEDSISIESQIELCLREVGNNPHRVFRDKGYSGKNTERPDFQDMMAAVRAGGARRIIVYRLDRISRSVLDFANVISELQKYGVEFVSITERFDTSTPIGKAMLMIVMVFAQLERETIQQRVMDAYRSRSRKGFYMGGRVPYGFELENTVMEGIKTCMYKPIPEQIQVVQLIFSLYAMPQVSFADVVRYLSQNGIKNPNGKNFSRMRIRDIITNPVYAKADASIFEFFHGQGTEIINDISQFIGTNGAYLYTGNKAAKRKSISLDGHVLVLAPHAGCIDADTWIRCRRKCLNVRQIAKPVKAKNTWLAGKIKCIDCGHALSLKSYPRKRSADARYYICNSKYVSASCDGVGAIQASGIEDIVFDEMSRKLKEFNKLSYKEKHRDPIELTKLKIRAEEIEKEIATLIDKIVSASTATMEYINERIDALDEEKKTVKEKIAQMSAEMYDRQNIGVISDYMSKWNDISIDDKLTVVDTLIESIHVGHGKVKIAWKI

SEQ ID NO: 5566 - protein, 504 aa, Unknown
  Description of Unknown: Integrase B5567 sequence
  cd03768,PTHR30461:SF3,SM00857,IPR036162,PF13408, PS51737,G3DSA:3.40.50.1390,IPR025827,IPR006119,PF07508, SSF53041,IPR011109,PTHR30461,PS51736,Coil, PF00239
MEDFIYARQSVDKEDSISIESQIELCLREVGNNPHRVFRDKGYSGKNTERPDFQDMMAAVRAGGARRIIVYRLDRISRSVLDFANVISELQKYGVEFVSITERFDTSTPIGKAMLMIVMVFAQLERETIQQRVMDAYRSRSRKGFYMGGRVPYGFELENTVMEGIKTCMYKPIPEQIQVVQLIFSLYAMPQVSFADVVRYLSQNGIKNPNGKNFSRMRIRDIITNPVYAKADASIYEFFHGQGTEIINDISQFIGTNGAYLYTGSKATKRKSISLDGHVLVLAPHAGCIDADTWIRCRRKCLNVRQIAKPVKAKNTWLAGKIKCIDCGHALSLKSYPRKRSADARYYICNSKYVSASCDGVGAIQASGIEDIVFDEMSRKLKEFNKLSYKEKHGDPIELTKLKIRAEEIEKEIATLIDKIVSASTATMEYINERIDALDEEKKTVKEKIAQMSAEMYDRQNIGVISDYMSKWNDISIDDKLTVVDTLIESIHVGHGKVKIAWKI

SEQ ID NO: 5567 - protein, 504 aa, Unknown
  Description of Unknown: Integrase B5568 sequence
  PTHR30461:SF3,cd00338,SM00857,G3DSA:1.10.10.2600,IPR036162, PF13408,PS51737,G3DSA:3.40.50.1390,IPR025827,IPR006119, IPR038109,PF07508,SSF53041,IPR011109,PTHR30461, PS51736,Coil,PF00239
MRAKKKPAVIYTRYSSHNQRDCSIEQQVADCEIFARQNNLRVVKVYADRHLSGTTDNRPQFQQMLKDAAHGHWAYVICWKIDRFARNRYDSATYKFRLKKAGVRVLYAKESIPDGPEGILLESVLEGSAEYYSAALAQNIRRGMKYNAEQCKVNSGSIPFGYCKGPDGRFAIHEANAEVVREIFRKAAAGMPFVDIANDLNSRGLKTSRGGRWNKGSFRLLMNEAYIGVYHFSDTRIEGGMPALIDQGTFWAANERLKANSSVRGRHQDGGDYLLTGKLKCAHCGSYMIGFSGTGKSGELHYYYGCQKRRRERACKKANVPREWIERVVVKAALDYVLRPDVMEWIADAVMEYQEREAASAQLAALTAELEENQKATDNVMKAIEAGIITSTTKQRLLDLEAKAQDLKRAIELEKLSHVRLERDQVLFWLDRFRGGSLQSQEFRRKVIDAFVSVVYLSDDHLRIAFNYSGGSNAEADFDLVMDAEAAAGELSKKFAQGHVASTK

SEQ ID NO: 5568 - protein, 504 aa, Unknown
  Description of Unknown: Integrase B5569 sequence
  PTHR30461:SF3,cd00338,SM00857,G3DSA:1.10.10.2600,IPR036162, PS51737,G3DSA:3.40.50.1390,IPR006119,IPR038109,PF07508, IPR011109,SSF53041,PTHR30461,PS51736,Coil, PF00239
MGGRAAIYARFSSHNQRGESIEIQVEKSRAYCAENDLRVVATYCDFAQTGTNTDRAEFQRMMADAKRGLFDFVVIYKVTRIMRNRDEMAMARIMLRRCRVEILYAGEDISDGSAGVLQLGMLEVLAEYESALDGERIRDGIQKNAERCMANGCVRYGWDIVGGRYVVNEEEAAAIRLGVRMVLSGKSVADVVRAWEPYRTKRGGKWRFQTVRRILMRRENGGEYRYAGVVVPGGMPAIVPMDDEERVIRMLEDSHRPRAKTEAWDFPLTGKLYDGRDGGLMTGTSGTGKSGRPYHYYRCRSCGRTVRRDAVEKRVADAVREALGSADSRERIARMLADAEEERADEKPLSETIKGELAKIETAFSNIWAAIESGIAPPGGKERIDALKQRQALLKDELRTAEALEAARLDYDRALFWLEGMAAAEVDDAQLLRTFVARVVLGGPDDDDGLRVAFTFADSAGLGDNPSLPGAIGPGGEVFDRMNASSTNSYKQVEKCLYLLFYYI

SEQ ID NO: 5569 - protein, 504 aa, Unknown
  Description of Unknown: Integrase B5570 sequence
  PTHR30461:SF3,cd00338,SM00857,G3DSA:1.10.10.2600,IPR036162, PF13408,PS51737,G3DSA:3.40.50.1390,IPR025827,IPR006119, IPR038109,PF07508,SSF53041,IPR011109,PTHR30461, PS51736,Coil,PF00239
MSTIAVIYARYSSSNQREESLEGQLRECNAYAKQNDFVVVGEYCDRALSGRTDKRPEFQRLLRDSAKGKFEAVIMYSLDRFSRNRYDSAIYKAKLKRNGVKIYYVTQPIPEGPEGIIFESIMEGYAEYYSVNLARNIKRGLKENALHAQVIGRPCLGYKAGENKQYEIEPIGAKTVHEIFDLYASGLPVSKIIKRLNAKGYTTVNGTAFTNNSLYNILRNRKYTGTYIYDDVVIEDAIPPIVTKEVFDKVQEMLHHNSKCRARAKAKEEYLLTTKLFCGKCGSPMIGDSGTSHTGATHRYYKCNHRKRQRVCDMGAVRKDPIEELVVKTTVERVLTPENIDRIAQSAVEIAAKEAAESEVLAALKQKHKEVSKRIANLMEAIEQGIITSTTKERLEVLEQEQRDLDLQIIKEEMERPTLTVERVKYWLESFRFGNIDSLDYKRKIIDTLVNSVFVYENDGGGKRIVITYNISGSKADVLLSSDIEAIAPVFYGIRVSDSIFCCR

SEQ ID NO: 5570 - protein, 504 aa, Unknown
  Description of Unknown: Integrase B5571 sequence
  SM00857,G3DSA:1.10.10.2600,IPR036162,PS51737,G3DSA:3.40.50.1390, IPR006119,IPR038109,PF07508,IPR011109,SSF53041, PTHR30461,Coil,PS51736,cd00338,PF00239
MTYAIYLRKSRKDDDAGFADTLSRHEKMLTDYADRMGLTVHEQDIYREIVSGESIEARPQMQRLLKAVEMRTYTAVLCIELERLSRGNGADQARILKAFQFSNTKIITLNKTYDLASDDEFDEEFFEFGLFMSRREYKTIKRRLLRGRMQSQQEGYFIGSTLPFGYGKIKNPEGKGHILVPNEQTPILQMIFRRYAAGDLLADIVEDLNAAGVQTASSLNAKWTTNRVRDMLRNRVYIGEINVKKYAKNQRIEDGRIIETKRRNPDMQTVPGKHEPIIDMETWEKVQARFARFEPRTNVDRSLKNPLASIMRCAECGKMMARRTYTHKGVPIPIIVCQSNRCITRQSNLEMVESMVISELKKELARQQTILASYNTEKQDSADEETLSFLQAEISKKDKMLERVDELYELGDYSRTKYLERSQKLQAQKAELMKQLEEVEKRISERDSNRKNAVPILTKVLDEYHTLDVKGKNDLLKMIVDCITYRKHESGSDIEPELDFRLLI

SEQ ID NO: 5571 - protein, 504 aa, Unknown
  Description of Unknown: Integrase B5572 sequence
  SM00857,G3DSA:1.10.10.2600,IPR036162,PF13408, IPR025827,G3DSA:3.40.50.1390,PS51737,IPR006119, IPR038109,PF07508,SSF53041,IPR011109, PTHR30461,Coil,PS51736,cd00338,PF00239
MVKNRAAIYARFSSHNQRSESIEIQVENSRAYCEREGLQVVREYCDYAQTGRNVNRAEFQRMMNDAKLGLFDFVVIYKVTRIMRNRDEMALARIMLRKAGVEILYAGEEIASGSSGVLQLGMLEVLAEWESAIDSERIRDGIQKNAARCLANGHSLYGWDIVDGRYSVNEREAALMRKMKNMLFSGHSVADIVRALEGEKTRNGKPFNQDKVTKLLRRVQNGGTYSYAGHVVEGGMPGLWPQVEQDMIESVLNDRHRPRRKVDSSKEFPLSGKLYCTKCGMPMAGMSGTSKTGKAYHYYRCRKCRRTVRRDLIEDAVVDMTLQAVARDDVRQRIAQGMALYQSEQEETKPKSYYLKKELRRIDAAFERIWQAIEDGIAPPGGKERTDELKCRKAEIEAQLRIAERDESMSFGVDELMLWLDEIATELTPLDILNKFVRFAEIDGKSNRIRVYFAFDKHGDGFSPNSADKGEHLYEERCSPNSTLVELPSTTCLLPERSIHMWIW

SEQ ID NO: 5572 - protein, 504 aa, Unknown
  Description of Unknown: Integrase B5573 sequence
  cd03768,PTHR30461:SF3,SM00857,IPR036162,PF13408, IPR025827,G3DSA:3.40.50.1390,PS51737,IPR006119,PF07508, SSF53041,IPR011109,PTHR30461,PS51736,Coil, PF00239
MEDFIYARQSVDKEDSISIESQIELCLREVGNNPHRVFRDKGYSGKNTERPDFQDMMAAVRAGGARRIIVYRLDRISRSVLDFANVISELQKYGVEFVSITERFDTSTPIGKAMLMIVMVFAQLERETIQQRVMDAYRSRSRKGFYMGGRVPYGFELENTVMEGIKTCMYKPIPEQIQVVQLIFSLYAMPQVSFADVVRYLSQNGIKNPNGKNFNRMRIRDIITNPVYAKADASIYEFFHGQGTEIINDISQFIGTNGAYLYTGNKAAKRKSISLDGHVLVLAPHAGCIDADTWIRCRRKCLNVRQIAKPVKAKNTWLAGKIKCIDCGHALSLKSYPRKRSADARYYICNSKYVSASCDGVGAIQASGIEDIVFDEMSRKLKEFNKLSYKEKHGDPIELTKLKIRAEEIEKEIATLIDKIVSASTATMEYINERIDALDEEKKTVKEKIAQMSAEMYDRQNIGVISDYMSKWNDISIDDKLTVVDTLIESIHVGHGKVKIAWKI

SEQ ID NO: 5573 - protein, 504 aa, Unknown
  Description of Unknown: Integrase B5574 sequence
  SM00857,G3DSA:1.10.10.2600,IPR036162,PS51737,G3DSA:3.40.50.1390, IPR006119,IPR038109,PF07508,IPR011109,SSF53041, PF00239,PTHR30461,PS51736,Coil,cd00338
MQKYLMYLRKSRADGEHETIEEILARHEKILQEYAEKNIRKAVPEENIFREIVSGETIKDRPLMNKLLKCIQNEQITGVLVIEPQRLSRGDLHDCGTIIRAFQYTNTLVYTPTKTYDLSEKYDRKFFEMELMRGNDYLEYVKEILMRGRLASVSDGNYIGSIPPFGYSKEKIDKNYVLVENDESNVVRLIFDLFVNQNMGTSKIANHLNSIGIKPRKNNYWSDSTIRDILRNPVYIGKIRWNWRKTVKTYKDGEIVCSRPKSTPDSWIIIDGKHNGLISEEVFNAAQKRFGQNPRVKKEYEIVNPFAGLVKCECGKSMVYKKFNKSSPRIICPNQPRCENRSVLYSEFESEVIIALKKYINDFKIKISNGDNQSESIQNGILECLIKELKTIENQQDKLYELLEQGIYTNAIFIKRNTALAEKRKKITSEIENLKTSIPNSINYEEKIVQLSNALNTLQNPDIHPKIKNEFLKVIINNIYYTRKNDNRTRNDDSPFTIKIILNL

SEQ ID NO: 5574 - protein, 504 aa, Unknown
  Description of Unknown: Integrase B5575 sequence
  PTHR30461:SF3,cd00338,SM00857,G3DSA:1.10.10.2600,IPR036162, PF13408,IPR025827,PS51737,G3DSA:3.40.50.1390,IPR006119, IPR038109,PF07508,SSF53041,IPR011109, PTHR30461,PS51736,Coil,PF00239
MKVCMYLRKSRQDEELEKKENTDTLSRHRSALLELARKQHLDIIEVHEEIVSGGSIVSRPKMMKLLEEVRNNMYDAVLCMDLDRLGRGGMQDQGLILDTFKETNTLIITPDKTYDLNNELDEEMTEFKAFFARRELKIITKRMQRGRIKSVEEGKFIASTAPYGYKFEYDKEGKKSLVIDEEKAAIVRNIFDMYINGNGAYKIKVWLDNIGIKTNTGIPFSQQAIGRILRNNIYCGYVTWNNYRRKGTITKKQPKENIIIAKGIHEPIISEEIWNKADEIRQNNQIAPSGNNKNLTNPLAGLVKCACCGHTMTNKLSNYKGEGYVKFMCCKSCNENRGVKMYVLEETILEYLEDILQEFENQILSNKVENKGNDRIENLRCTLSLLKKKAVELNKQKNNLHDLLEKGVYDVDTYLERTQVLSKKTDENKNAIDSTLELIESEKNININYNELAISIKLVLENYKKTDDIKLKNFLLKSVIDEIIYFKEKDKRNAKFELDIKLKI

SEQ ID NO: 5575 - protein, 504 aa, Unknown
  Description of Unknown: Integrase B5576 sequence
  PTHR30461:SF3,cd00338,SM00857,G3DSA:1.10.10.2600,IPR036162, PF13408,IPR025827,G3DSA:3.40.50.1390,PS51737,IPR006119, IPR038109,PF07508,IPR011109,SSF53041,PTHR30461, PS51736,Coil,PF00239
MQTAVIYARYSSDKQTEQSIEGQLYDCYNYAKQHGITVVQEYIDRAMTGKNDDRPAFQQMLHDSAQHKWDSVLVWKLDRFARNTIDSAVNRQILAKNGVKLLSVMESFGDDASGQMMTHIIEAINEYYSADLREKTIRGMRQSAMKAQTTGHIPLGYKVVDKKLVIDDETRIIPETVFRMYAEGERLTDIAEYLNAHGYRNRRGRPFTTNSFYNMLANEKYIGIYKYDDIVIEGGIPQMIPNEVFEAVREKLITNRKRAAKNTAKADYYLSGKLYCGHCGEPMSGLSGTGRNGVKHYYYRCNGVQKKSGCHKKLENKYLIEDEVCRAARSAFEQMDKAETAETIYQMYLQTVRNEYAPAELEKELTECTKQAENVVNAIAQTGGNQLLYDKVRELEERKEQLSSALRLSQAMTDNVPSVEQITVFIDDILATDINTTEGKKAIADIMISKVYVYDDKLTVIFKDKDGKSVDIPLSAVSDSSSADCAPSALGSQAILSTNHREKV

SEQ ID NO: 5576 - protein, 504 aa, Unknown
  Description of Unknown: Integrase B5577 sequence
  cd03768,PTHR30461:SF3,SM00857,IPR036162,PF13408, PS51737,G3DSA:3.40.50.1390,IPR025827,IPR006119,PF07508, SSF53041,IPR011109,PTHR30461,PS51736,Coil, PF00239
MEDFIYARQSVDKEDSISIESQIELCLREVGNNPHRVFRDKGYSGKNTERPDFQDMMAAVRAGGARRIIVYRLDRISRSVLDFANVISELQKYGVEFVSITERFDTSTPIGKAMLMIVMVFAQLERETIQQRVMDAYRSRSRKGFYMGGRVPYGFELENTVMEGIKTCMYKPIPEQIQVVQLIFSLYAMPQVSFADVVRYLSQNGIKNPNGKNFSRMRIRDIITNPVYAKADASIFEFFHGQGTEIINDISQFIGTNGAYLYTGNKAAKRKSISLDGHVLVLAPHAGCIDADTWIRCRRKCLNVRQIAKPVKAKNTWLAGKIKCIDCGHALSLKSYPRKRSADARYYICNSKYVSASCDGVGAIQAAGIEDIVFDEMSRKLKEFNKLSYKEKHGDPIELTKLKIRAKEIEKEIATLIDKIVSASTATMEYINERIDALDEEKKTVKEKIAQMSAEMYDRQNIGVISDYMSKWNDISIDDKLTVVDTLIESIHVGHGKVKIAWKI

SEQ ID NO: 5577 - protein, 504 aa, Unknown
  Description of Unknown: Integrase B5578 sequence
  cd03768,PTHR30461:SF3,SM00857,IPR036162,PF13408, IPR025827,G3DSA:3.40.50.1390,IPR006119,PF07508,IPR011109, SSF53041,PTHR30461,PS51736,Coil,PF00239
MKRIAIYSRKSKETDTGESIKNQINICKEYFLRQYDQCTFEIFEDEGFSGGNTNRPAFKRMMQLADYKQFDIIAAYKVDRISRNTLDFLTMFEQLKLNDIELVSVTEGFDANTPAGRMMMSMISSIAEMERANIAQRVKDNMFELAKLGRWSGGTPPTGYKSVKITDNGKSIVYLEIIKEYIPIIKNIFHMAGKGYTSYQIANEMNMSSKTINNILKNPTYMISDEKGSLFLKSIGYNIFGIENGNGYLAYNRRPRKNGKKLTKSSNMIASVSLHKGIVTSNEWIEAYIKVNSRFTEAKPRVSQLTFLSHLVKCKCGSGMFVSPGRRRKDGTRTLYFRCSNKKNGGNCNSGFLKILDVEESLLNTFYDISLDKSLINNYIKVNDQFKYDTEINILKKTIENNTKSINSLTEKLILIEGAAINIISEKINLLHFENEDLNKQLFDLERKKLLSLNTSNIDAIYDSIIFILSKWDKLNITDKQIYMQKIIDCIVWDGADGLNINLK

SEQ ID NO: 5578 - protein, 504 aa, Unknown
  Description of Unknown: Integrase B5579 sequence
  PTHR30461:SF3,SM00857,G3DSA:1.10.10.2600,IPR036162,PF13408, PS51737,G3DSA:3.40.50.1390,IPR025827,IPR006119,IPR038109, PF07508,IPR011109,SSF53041,PTHR30461, PS51736,cd00338,PF00239
MNGVIYARYSSENQREESIDGQLRECTAFAQHNDIQIVGEYIDRAFSAKTDNRPSFQKMIKDSAKGEFDVIIVWKLDRFARNRYDSAHYKNILKKNGVKVVSATEAISSGAEGIILESVLEGMAEYYSAELAEKVSRGMKENALKCKYNGGSVPLGYYIDESKHFQIDSSVAPFVVECFEHYADGMTMKQLRDELNMKGVKNSRGGKLSIDVISRMLTNRKYLGEYTFQDITIKDGIPAIVSTSLFEKVQDRLTKTKKAPSSHKADDDYILTTKLFCGKCKSFMVGESGTNAQGKKYRYYKCVNHKKHQGCDMKSIRKDLIENMTIKYIREFLNDEDLINTLIDLAYDAQHKENEQLPLLRKQLAQTEKGIKNIVDAIEQGISTKSTRERLLDLEQRKNDIEMSISKESIENPMLTKKQFKFWFDQLKKLDISKSEQRQKLVDLFVNSIIIYDDHIKFFFNYKEHTETITFDELNNCSDLPDSPRPKKEIPNERYLFLFSMHKT

SEQ ID NO: 5579 - protein, 504 aa, Unknown
  Description of Unknown: Integrase B5580 sequence
  cd03768,PTHR30461:SF3,SM00857,IPR036162,PF13408, IPR025827,G3DSA:3.40.50.1390,PS51737,IPR006119,PF07508, SSF53041,IPR011109,PTHR30461,PS51736,Coil, PF00239
MEDFIYARQSVDKEDSISIESQIELCLREVGNNPHRVFRDKGYSGKNTERPDFQDMMAAVRAGGARRIIVYRLDRISRSVLDFANVISELQKYGVEFVSITERFDTSTPIGKAMLMIVMVFAQLERETIQQRVMDAYRSRSRKGFYMGGRVPYGFELENTVMEGIKTCMYKPIPEQIQVVQLIFSLYAMPQVSFADVVRYLSQNGIKNPNGKNFSRMRIRDIITNPVYAKADASIYEFFHGQGTEIINDISQFIGTNGAYLYTGNKAAKRKSISLDGHVLVLAPHAGCIDADTWIRCRRKCLNVRQIAKPVKAKNTWLAGKIKCIDCGHALSLKSYPRKRSADARYYICNSKYVSASCDGVGAIQAAGIEDIVFDEMSRKLKEFNKLSYKEKHGDPIELTKLKIRAEEIEKEIATLIDKIVSASTATMEYINERIDALDEEKKTVKEKIAQMSAEMYDRQNIGVISDYMSKWNDISIDDKLTVVDTLIESIHVGHGKVKIAWKI

SEQ ID NO: 5580 - protein, 504 aa, Unknown
  Description of Unknown: Integrase B5581 sequence
  PTHR30461:SF3,SM00857,G3DSA:1.10.10.2600,IPR036162,PF13408, PS51737,IPR025827,G3DSA:3.40.50.1390,IPR006119,IPR038109, PF07508,IPR011109,SSF53041,PF00239,PTHR30461, PS51736,Coil,cd00338
MNYNDSKSIYLMYLRKSRADEYNQDVENILKRHEEELQSLAKREFGELIPEKYIFREVVSGGTIKDRPLMKEILKMMESGIIAGVLVVDPQRLSRGDLLDQGHIINAFKYTNTLIITPYKTYDLNDTTGTDMKLLKMELNHGADYLDYYKMVQARGKLASVRAGNFIQPIPPFGYRKVRYGKVTTLEPIEDEARIVRIIFQKYAEGKTICGVTNELNAEGYIPPSKQIWTKGSVKRILSNPVYDGKIRWGFTPNKTVMEDGKLKKYRPERHDYLLFDGKHDAIVNHGLFMSVQERLSKNKSFTNDRSLKNPLYGIMYCKRCGRKISRLNVAESRGGHRYACPNKLCDVQSSRYDLVIEAVIDTIQCAIDDFDITFHDCNSSGSDEKIRELRQELTRLNNKEDTLFELLETKVYSTSVFTQRHAELEKKRQEIIGKINTLSLIPPPESCNNKKMRFKDALLALKDESMPPKEKNHLLKKCIERIDYDIEGVRYHSKVKLDVYFKF

SEQ ID NO: 5581 - protein, 504 aa, Unknown
  Description of Unknown: Integrase B5582 sequence
  PTHR30461:SF3,SM00857,IPR036162,PF13408,IPR025827, G3DSA:3.40.50.1390,IPR006119,PF07508,IPR011109,SSF53041, PTHR30461,Coil,PS51736,cd00338,PF00239
MKIAIYSRKSKETDTGESIQNQINICKDYFNRQYNNCVFEIFYDEGFSGGNINRPDFQRFMQSIKLKKFDILGVYKIDRVSRNTLEFLTVFEELKQYNIKLVSVTEGFDPSTPGGKMMMDVLASMAEMERANIAQRVKDNMLGLAKMGRWSGGTPPTGYKPKAYINEFGKKEMYLELDEVESDIIYKIFNLSAAGCTTYAIGKEVNKNPKTILNILRNPVYCESNETSKKFLENMGYTIMGELNGNGYMTYNKRPRSNGKKIVSDYMLAVVSKHKAIVTAEMFIKANKNLTDRAPTKRPRKSQGTFLSHLVKCGKCGGGMFVASGNKLKDGSKKLYFRCTNQKYNKTCDAKWIRVDEIERFVLSELYKFSLDKNKLNEYINSNINLDCYDNDIKKLKSQVNKLNIDINNLTEKLLLLDGAAVKIVNDKINQISNERELKKEMLFELESKKIELTVNSINVDELYNNIKKLLVIFDLIPIDEQQILINQLITSIEISDNDKTLIF

SEQ ID NO: 5582 - protein, 504 aa, Unknown
  Description of Unknown: Integrase B5583 sequence
  cd03768,PTHR30461:SF3,SM00857,IPR036162, PF13408,IPR025827,G3DSA:3.40.50.1390,PS51737, IPR006119,PF07508,SSF53041,IPR011109, PTHR30461,PS51736,Coil,PF00239
MEDFIYARQSVDKEDSISIESQIELCLREVGNNPHRVFRDKGYSGKNTERPDFQDMMAAVRAGGARRIIVYRLDRISRSVLDFANVISELQKYGVEFVSITERFDTSTPIGKAMLMIVMVFAQLERETIQQRVMDAYRSRSRKGFYMGGRVPYGFELENTVMEGIKTCMYKPIPEQIQVVQLIFSLYAMPQVSFADVVRYLSQNGIKNPNGKNFSRMRIRDIITNPVYAKADASIYEFFHGQGTEIINDISQFIGTNGAYLYTGNKAAKRKNISLDGHVLVLAPHAGCIDADTWIRCRRKCLNVRQIAKPVKAKNTWLAGKIKCIDCGHALSLKSYSRKRSADARYYICNSKYVSASCDGVGAIQASGIEDIVFDEMSRKLKEFNKLSYKEKHGDPIELTKLKIRAEEIEKEIATLIDKIVSASTATMEYINERIDALDEEKKTVKEKIAQMSAEMYDRQNIGVISDYMSKWNDISIDDKLTVVDTLIESIHVGHGKVKIAWKI

SEQ ID NO: 5583 - protein, 504 aa, Unknown
  Description of Unknown: Integrase B5584 sequence
  PTHR30461:SF3,SM00857,G3DSA:1.10.10.2600,IPR036162,PF13408, PS51737,IPR025827,G3DSA:3.40.50.1390,IPR006119,IPR038109, PF07508,SSF53041,IPR011109,PF00239,PTHR30461, PS51736,Coil,cd00338
MTAVIYARYSSDNQREESIEGQIRECTAYAEKNDITIVKHYIDRAISAKTDNRPQFQQMIKDSDKKLFDIVLVWKLDRFARNRYDSARYKTQLKKNGVKLMSATEIISEGPEGIILESVLEGYAEYYSADLAEKVVRGQTENILKGRCNGGRGTFGYTLDSERKFHIDPLASPFVLESFTKYRDGLTMKEIRDWLNENGIKNPVGGEFTYNSVEHMLKNRRYIGELKFRDVVVPDAIPPIVPLELFDDVQEKIAKNKKAPARRKAEDDYLLTTKLHCGCCGALMFGESGTSRTGEVHRYYKCATAKKKKGCKKKTVRKQWLEDLVVNQTMQLVRDDAAMESIIAKVMELQDRENTNLPLYEKQLRDAESGIQNMLNAIQAGILTSSTKERLEQLEETKRELEARIAEEKLAKPKIKEEFIRFWLMRFRKLDMSLKDQRQALVDTFINSIYLYDDKVLITFNYKEGTQTITFEEAAQAASKENGSDLDCFTAPSKIPRLTVENAV

SEQ ID NO: 5584 - protein, 504 aa, Unknown
  Description of Unknown: Integrase B5585 sequence
  PTHR30461:SF3,cd00338,SM00857,G3DSA:1.10.10.2600,IPR036162, PF13408,PS51737,G3DSA:3.40.50.1390,IPR025827,IPR006119, IPR038109,PF07508,IPR011109,SSF53041,PTHR30461, PS51736,Coil,PF00239
MKIAVIYARYSSDKQTEQSIEGQLYDCYNYAKQHGITVVQEYIDRAMTGKNDDRPAFQQMLHESAMHKWDSVIVWKLDRFARNTIDSAVNRQILAKNGVKLLSVMESFGDDASGQMMTHIIEAINEYYSADLREKTIRGMRQSAMKAQTTGHIPLGYKVVDKKLVIDDETRIIPETVFRMYAEGERLTDIAEHLNAQGYRNRRGRPFTTNSFYNMLANEKYIGIYKYDDIVIEGGIPQMIPNEVFEAVREKLIINRKRAAKNTAKADYYLSGKLYCGHCGEPMSGLSGTGRNGVKHYYYRCNGVQKKSGCHKNLENKYLIEDEVCRAARSAFEQMDKAETAETIYQMYLQTVKNEYAPAELEKELTECTKQAENVVNAIAQTGGNQLLFDKVRELEERKEQLGSALRLSQAMTDNVPSVEQITVFIDDILATDINTIEGKKAIADIMISKVYVYDDKLTVIFKDKDGKSVDIPLSAVSDSSSADCAPSALGSQAILSTNHREKV

SEQ ID NO: 5585 - protein, 504 aa, Unknown
  Description of Unknown: Integrase B5586 sequence
  cd03768,PTHR30461:SF3,SM00857,IPR036162,PF13408, IPR025827,PS51737,G3DSA:3.40.50.1390,IPR006119,PF07508, SSF53041,IPR011109,PTHR30461,PS51736,Coil, PF00239
MEDFIYARQSVDKEDSISIESQIELCLREVGNNPHRVFRDKGYSGKNTERPDFQDMMAAVRAGGARRIIVYRLDRISRSVLDFANVISELQKYGVEFVSITERFDTSTPIGKAMLMIAMVFAQLERETIQQRVMDAYRSRSRKGFYMGGRVPYGFELENTVMEGIKTCMYKPIPEQIQVVQLIFSLYAMPQVSFADVVRYLSQNGIKNPNGKNFSRMRIRDIITNPVYAKADASIYEFFHGQGTEIINDISQFIGTNGAYLYTGNKAAKRKSISLDGHVLVLAPHAGCIDADTWIRCRRKCLNVRQIAKPVKAKNTWLAGKIKCIDCGHALSLKSYPRKRSADARYYICNSKYVSASCDGVGAIQASGIEDIVFDEMSRKLKEFNKLSYKEKHGDPIELTKLKIRAEEIEKEIATLIDKIVSASTATMEYINERIDALDEEKKTVKEKIAQMSAEMYDRQNIGVISDYMSKWNDISIDDKLTVVDTLIASIHVGHGKVKIAWKI

SEQ ID NO: 5586 - protein, 504 aa, Unknown
  Description of Unknown: Integrase B5587 sequence
  cd03768,PTHR30461:SF3,SM00857,IPR036162,PF13408, PS51737,G3DSA:3.40.50.1390,IPR025827,IPR006119,PF07508, SSF53041,IPR011109,PTHR30461,PS51736,Coil, PF00239
MEDFIYARQSVDKEDSISIESQIELCLREVGNNPHRVFRDKGYSGKNTERPDFQDMMAAVRAGGARRIIVYRLDRISRSVLDFANVISELQKYGVEFVSITERFDTSTPIGKAMLMIVMVFAQLERETIQQRVMDAYRSRSRKGFYMGGRVPYGFELENTVMEGIKTCMYKPIPEQIQVVQLIFSLYAMPQVSFADVVRYLSQNGIKNPNGKNFSRMRIRDIITNPVYAKADASIFEFFHGQGTEIINDISQFIGTNGAYLYTGNKAAKRKSISLDGHVLVLAPHAGCIDADTWIRCRRKCLNVRQIAKPVKAKNTWLAGKIKCIDCGHALSLKSYPRKRSADARYYICNSKYISASCDGVGAIQAAGIEDIVFDEMSRKLKEFNKLSYKEKHGDPIELTKLKIRAEEIEKEIATLIDKIVSASTATMEYINERIDALDEEKKTVKEKIAQMSAEMYDRQNIGVISDYMSKWNDISIDDKLTVVDTLIESIHVGHGKVKIAWKI

SEQ ID NO: 5587 - protein, 504 aa, Unknown
  Description of Unknown: Integrase B5588 sequence
  cd03768,PTHR30461:SF3,SM00857,IPR036162,PF13408, PS51737,IPR025827,G3DSA:3.40.50.1390,IPR006119,PF07508, SSF53041,IPR011109,PTHR30461,PS51736,Coil, PF00239
MEDFIYARQSVDKEDSISIESQIELCLREVGNNPHRVFRDKGYSGKNTERPDFQDMMAAVRGGGARRIIVYRLDRISRSVLDFANVISELQKYGVEFVSITERFDTSTPIGKAMLMIVMVFAQLERETIQQRVMDAYRSRSRKGFYMGGRVPYGFELENTVMEGIKTCMYKPIPEQIQVVQLIFSLYAMPQVSFADVVRYLSQNGIKNPNGKNFSRMRIRDIITNPVYAKADASIYEFFHGQGTEIINDISQFIGTNGAYLYTGNKATKRKSISLDGHVLVLAPHAGCIDADTWIRCRRKCLNVRQIAKPVKAKNTWLAGKIKCIDCGHALSLKSYPRKRSADARYYICNSKYVSASCDGVGAIQASGIEDIVFDEMSRKLKEFNKLSYKEKHGDPIELTKLKIRAEEIEKEIATLIDKIVSASTATMEYINERIDALDEEKKTVKEKIAQMSAEMYDRQNIGVISDYMSKWNDISIDDKLTVVDTLIESIHVGHGKVKIAWKI

SEQ ID NO: 5588 - protein, 504 aa, Unknown
  Description of Unknown: Integrase B5589 sequence
  cd03768,PTHR30461:SF3,SM00857,IPR036162,PF13408, IPR025827,G3DSA:3.40.50.1390,PS51737,IPR006119,PF07508, SSF53041,IPR011109,PTHR30461,PS51736,Coil, PF00239
MEDFIYARQSVDKEDSISIESQIELCLREVGNNPHRVFRDKGYSGKNTERPDFQDMMAAVRAGGARRIIVYRLDRISRSVLDFANVISELQKYGVEFVSITERFDTSTPIGKAMLMIVMVFAQLERETIQQRVMDAYRSRSRKGFYMGGRVPYGFELENTVMEGIKTCMYKPIPEQIQVVQLIFSLYAMPQVSFADVVRYLSQNGIKNPNGKNFSRMRIRDIITNPVYAKADASIYEFFHGQGTEIINDISQFIGTNGAYLYTGNKAAKRKSISLDGHVLVLAPHAGCIDADTWIRCRRKCLNVRQIAKPVKAKNTWLAGKIKCIDCGHALSLKSYPRKRSADARYYICNSKYVSASCDGVGAIQASGIEDIVFDEMSRKLKEFNKLSYKEKHGDPIELTKLKIRAEEIEKEIATLIDKIVSASTATMEYINERIDALDEEKKTVKEKIAQMSAEMYDRQNIGVISDYMSKWNDISIDDKLTVVDTLIESVHVGHGKVKIAWKI

SEQ ID NO: 5589 - protein, 504 aa, Unknown
  Description of Unknown: Integrase B5590 sequence
  PTHR30461:SF3,IPR036162,PS51737,IPR011109,PTHR30461, PS00397,PF00239,G3DSA:1.10.10.2600,IPR006119,SSF53041, SM00857,IPR025827,IPR038109,PS51736,cd03768, IPR006118,PF13408,G3DSA:3.40.50.1390,PF07508,Coil
MYKASNGSGELMENKVIRVGGYIRVSTQEQAKEGYSIPAQTKCLKSYCSARNWILHELYIDPGYSGAKMERPALQKMLSDIKKGLVDLVLVYKLDRLSRSQKDTLYLIEDVFLKNEVAFVSINENFDTSSAFGRAMIGILSVFAQLEREQIKERTQMGLAERAKNGMWHGSGITPIGYDYDPASNQLVVNEYEAMQIREAFDLFVNQNYAFTKIVKTFRNKGYSHKHGVWAHSSKLRYILSNKTYIGRINWNGEDYPGKHDPIIPSSLFEAAQKKLAEKDWKLTDKPAKSPFDATQLLSGVLFCGNCGGRYYGAGCYRGSHDPNSPKRRYEHIYSCYSRTKTKLEMIKDPSCKNKNWKTETLDNYVITRIKNLRLEGEIENLIAKERPRNPGIDQRKALEKQIDDIDRQISRLLTLYQLEDVPTAEIGLRLSDLTRKKKTVEEAIENIPLYEPELSVAKAKSLLADAEEIFNCGTTEEKRSLIHALIRKIILTGNDVVIEWAFI

SEQ ID NO: 5590 - protein, 504 aa, Unknown
  Description of Unknown: Integrase B5591 sequence
  PTHR30461:SF3,SM00857,G3DSA:1.10.10.2600,IPR036162,PF13408, PS51737,G3DSA:3.40.50.1390,IPR025827,IPR006119,IPR038109, PF07508,SSF53041,IPR011109,PTHR30461,Coil, cd00338,PF00239
MQRVACREFIDRQKDWTLVDEVLEKGVSGYKTKTADRDALTEIKAKAMAKKFDILLVFMFDRLGRREDETPFVVQWFVENGIEVWSVKEGQQRFDTHVDKLLNYIRFWQASGESEKTSLRIRTKHLQMIQEGLYRGGLVPFGYRLEHLGRTNKKNQPVRDLVIDEAESAIVKEIYYKIISEGWGTNRIANWLNERGIQTKRGKPGAFWRATSIRAIVRNPIYIGKIRFGDELSESFEHLRIIDDFSFNLCEQILEERIPAASRDRTRSLRSTSPALLTGILFCGSCGGRMCFNHNSTVKYLADGTKRAYERDVYRCYRKVSHHGGCSGRSTYPLEKIEEAVLKIVHQYFENIRSVPTVQMLAAARQRSDSMDEIALANAEEALQKAQAEMSALEDEAVKALTGESKLDISFINGLIPKRRAALEKATEELARLRGVIAETEKKNALINQELKIILSWADAFDSASTDVKRSIISALIDRITVYNDCSLDIHFRISAEQFLGKAA

SEQ ID NO: 5591 - protein, 504 aa, Unknown
  Description of Unknown: Integrase B5592 sequence
  cd03768,PTHR30461:SF3,SM00857,IPR036162,PF13408, IPR025827,G3DSA:3.40.50.1390,PS51737,IPR006119,PF07508, SSF53041,IPR011109,PTHR30461,PS51736,Coil, PF00239
MEDFIYARQSVDKEDSISIESQIELCLREVGNNPHRVFRDKGYSGKNTERPDFQDMMAAVRAGGARRIIVYRLDRISRSVLDFANVISELQKYGVEFVSITERFDTSTPIGKAMLMIVMVFAQLERETIQQRVMDAYRSRSRKGFYMGGRVPYGFELENTVMEGIKTCMYKPIPEQIQVVQLIFSLYAMPQVSFADVVRYLSQNGIKNPNGKNFSRMRIRDIITNPVYAKADASIYEFFHGQGTEIINDISQFIGTNGAYLYTGNKAAKRKSISLDGHVLVLAPHAGCIDADTWIRCRRKCLNVRQIAKPVKAKNTWLAGKIKCIDCGHALSLKSYPRKRSADARYYICNSKYVSASCDGVGAIQASGIEDIVFDEMSRKLKEFNKLSYKEKHGDPIELTKLKIRAEEIEKEIATLIDKIVSASTATMEYINERIDALDEEKKTVKEKIAQMSAEMYDRQNIGVISDYMSKWNDISIDDKLTVVDTLIASIHVGHGKVKIAWKI

SEQ ID NO: 5592 - protein, 504 aa, Unknown
  Description of Unknown: Integrase B5593 sequence
  PTHR30461:SF3,SM00857,G3DSA:1.10.10.2600,IPR036162,PF13408, PS51737,G3DSA:3.40.50.1390,IPR025827,IPR006119,IPR038109, PF07508,IPR011109,SSF53041,PTHR30461,Coil, PS51736,cd00338,PF00239
MNAVIYARYSCDRQTEQSIEGQLRECKAFAASEGIHIIGEYIDRAISGTTANRPEFQRMIADSRYKTFQAVIVYKLDRFARNRYDSAMYKSKLKANGVRVLSAKEHITDSPEGIILEGLLEAMNEYYSAELSQKIKRGMRENAIKGKTTGGNVALGYRIGADKQMEIDPAGASLVRRIFTGYDSGMTFTEICDDLNHAGYTTSRGKQFRIDTISRILANQRYTGTFQCAGEDAHCPPIIEPELFRSVQERLTESRHKHRHTQSPHEYVLTGKAICGTCGRRLTGRAGTSKTDKRYYYYCCPNKCCGWLPAAELEHAVLDAIAQYTTPEACEQIANATYALYQQSTHENADLTAAQRRLQETEKKLENAVNAVLNGITSAALQATMQQLEQQKAALEMEVRLLQTDAPELKLEHFQYFAHRLLEVQAEGTEKILQLLVNQVIVYKEQITVLVNLTDKTKTPPLEQVTAALRESSCSVACGGGGATKCELTILTPSLLAISNIFKK

SEQ ID NO: 5593 - protein, 504 aa, Unknown
  Description of Unknown: Integrase B5594 sequence
  PTHR30461:SF3,cd00338,SM00857,G3DSA:1.10.10.2600,IPR036162, PF13408,IPR025827,G3DSA:3.40.50.1390,PS51737,IPR006119, IPR038109,PF07508,SSF53041,IPR011109,PTHR30461, PS51736,Coil,PF00239
MKVCMYLRKSRQDEELEKKENTDTLSRHRSALLALARKQHLDIIEVHEEIVSGGSIVSRPKMMKLLEEVRNNMYDAVLCMDLDRLGRGGMQDQGLILDTFKETNTLIITPDKTYDLNNELDEEMTEFKAFFARRELKIITKRMQRGRIKSVEEGKFIASTAPYGYKFEYDKEGKKSLVIDEEKAAIVRNIFDMYINGNGAYKIKVWLDNIGIKTNTGIPFSQQAIGRILRNNIYCGYVTWNNYRRKGTITKKQPKENIIIAKGIHEPIISEEIWNKADEIRQNNQIVPSGNNKNLTNPLAGLVKCACCGHTMTNKLSNYKGEGYVKFMCCKSCNENRGVKMYVLEETILEYLEDILQEFENQILSNKVENKENDRIENLRCTLSLLKKKAVELNKQKNNLHDLLEKGVYDVDTYLERTQVLSKKTDENKNAIDSTLELIESEKNININYNELAISIKLVLENYKKTDDIKLKNFLLKSVIDEIIYFKEKNKRNAKFELDIKLKI

SEQ ID NO: 5594 - protein, 504 aa, Unknown
  Description of Unknown: Integrase B5595 sequence
  cd03768,PTHR30461:SF3,SM00857,IPR036162,PF13408, IPR025827,G3DSA:3.40.50.1390,PS51737,IPR006119,PF07508, SSF53041,IPR011109,PTHR30461,PS51736,Coil, PF00239
MEDFIYARQSVDKEDSISIESQIELCLREVGNNPHRVFRDKGYSGKNTERPDFQDMMAAVRAGGARRIIVYRLDRISRSVLDFANVISELQKYGVEFVSITERFDTSTPIGKAMLMIVMVFAQLERETIQQRVMDAYRSRSRKGFYMGGRVPYGFELENTVMEGIKTCMYKPIPEQIQVVQLIFSLYAMPQVSFADVVRYLSQNGIKNPNGKNFSRMRIRDIITNPVYAKADASIFEFFHGQGTEIINDISQFIGTNGAYLYTGSKAAKRKSISLDGHVLVLAPHAGCIDADTWIRCRRKCLNVRQIAKPVKAKNTWLAGKIKCIDCGHALSLKSYPRKRSADARYYICNSKYVSASCDGVGAIQAAGIEDIVFDEMSRKLKEFNKLSYKEKHGDPIELTKLKIRAEEIEKEIATLIDKIVSASTATMEYINERIDALDEEKKTVKEKIAQMSAEMYDRQNIGVISDYMSKWNDISIDDKLTVVDTLIESIHVGHGKVKIAWKI

SEQ ID NO: 5595 - protein, 504 aa, Unknown
  Description of Unknown: Integrase B5596 sequence
  cd03768,PTHR30461:SF3,SM00857,G3DSA:1.10.10.2600,IPR036162, PF13408,IPR025827,PS51737,G3DSA:3.40.50.1390,IPR006119, IPR038109,PF07508,SSF53041,IPR011109,PTHR30461, PS51736,Coil,PF00239
MEDFIYARQSVDKEDSISIESQIELCLREVGNNPHRVFRDKGYSGKNTERPDFQDMMAAVRAGGARRIIVYRLDRISRSVLDFANVISELQKYGVEFVSITERFDTSTPIGKAMLMIVMVFAQLERETIQQRVMDAYRSRSRKGFYMGGRVPYGFELENTVMEGIKTCMYKPIPEQIQVVQLIFSLYAMPQVSFTDVVRYLSQNGIKNPNGKNFSRMRIRDIITNPVYAKADASIFEFFHGQGTEIINDISQFIGTNGAYLYTGNKAAKRKSISLDGHVLVLAPHAGCIDADTWIRCRRKCLNVRQIAKPVKAKNTWLAGKIKCIDCGHALSLKSYPRKRSADARYYICNSKYVSASCDGVGAIQAAGIEDIVFDEMSRKLKEFNKLSYKEKHGDPIELTKLKIRAEEIEKEIATLIDKIVSASTATMEYINERIYALDEEKKTVKEKIAQMSAEMYDRQNIGVISDYMSKWNDISIDDKLTVVDTLIESIHVGHGKVKIAWKI

SEQ ID NO: 5596 - protein, 504 aa, Unknown
  Description of Unknown: Integrase B5597 sequence
  PTHR30461:SF3,cd00338,SM00857,G3DSA:1.10.10.2600,IPR036162, PF13408,PS51737,G3DSA:3.40.50.1390,IPR025827,IPR006119, IPR038109,PF07508,SSF53041,IPR011109,PTHR30461, PS51736,Coil,PF00239
MKVCMYLRKSRQDEELEKKENTDTLSRHRSALLALARKQHLDIIEVHEEIVSGGSIVSRPKMMKLLEEVRNNMYDAVLCMDLDRLGRGGMQDQGLILDTFKETNTLIITPDKTYDLNNELDEEMTEFKAFFARRELKIITKRMQRGRIKSVEEGKFIASTAPYGYKFEYDKEGKKSLVIDEEKAAIVRNIFDMYINGNGAYKIKVWLDNIGIKTNTGIPFSQQAIGRILRNNIYCGYVTWNNYRRKGTITKKQPKENIIIAKGIHEPIISEEIWNKADEIRRNNQIAPSGNNKNLTNPLAGLVKCACCGHTMTNKLSNYKGEGYVKFMCCKSCNENRGVKMYILEETILEYLEDILQEFENQILSNKVENKENDRIENLRCTLSLLEKKAVELNKQKNNLHDLLEKGVYDVDTYLERTQVLSKKTDENKNAIDSTLELIESEKNININYNELAISIKLVLENYKKTDDIKLKNFLLKSIIDEIIYFKEKNKRNAKFELDIKLKI

SEQ ID NO: 5597 - protein, 503 aa, Unknown
  Description of Unknown: Integrase B5598 sequence
  PTHR30461:SF3,cd00338,SM00857,G3DSA:1.10.10.2600,IPR036162, PF13408,PS51737,IPR025827,G3DSA:3.40.50.1390,IPR006119, IPR038109,PF07508,IPR011109,SSF53041,PTHR30461, Coil,PF00239
MYEEIKTACLYLRYSSSNQTEQSIEGQMHVCQDFCKRHNIRIVEMYIDRATSASKDIEKRVEFLKMIKDSEKGNFNAVIVYKLDRFARSRYDSATYKYRLKRNGVQLISATENITQDPEGIILESVLEGMAEFYSAELSQKINRGMRESAMKHNSIGGAIPLGYKTVDKKLVIDETTAPIVREAFQMYADGESVAEICRTFNNRGYKTSKGTRFGKSSFTKIFRNEKYIGVYKYHDYRAEDVIPPIIDKDLWDRVQVRVGKIKKAPARNKARHTYLLTGKLFCGHCGSAMNADGNSQGYLYYRCYGKKNLDKQCNKRNMEKNLIERLVAQDAMSFLTDEYIEKIATIACDRNKQEIESDSPIPVIRDRIRQVDVSLNNLLKAIETGSAPDMLVKRMGELETEKKDMEVQLKKEMAHQVYIDKEQVIFWLEKFREGDINDEEFCQTVIDLFVNSVTVWDEPDDKFKITIAYNLTSIPQKTYRLSKDGRLSDYASNTPQWKNRRP

SEQ ID NO: 5598 - protein, 503 aa, Unknown
  Description of Unknown: Integrase B5599 sequence
  PTHR30461:SF3,cd00338,SM00857,G3DSA:1.10.10.2600,IPR036162, PS51737,G3DSA:3.40.50.1390,IPR006119,IPR038109,PF07508, SSF53041,IPR011109,PTHR30461,PS51736,Coil, PF00239
MGGRAAIYARFSSHNQRGESIEIQVEKSRAYCAENDLRVVATYCDFAQTGTNTDRAEFQRMMADAKRGLFDFVVIYKVTRIMRNRDEMAMARIMLRRCRVEILYAGEDISDGSAGVLQLGMLEVLAEYESALDGERIRDGIQKNAERCMANGCVRYGWDIVDGRYVVNEEEAAAIRLGVRMVLSGKSVADVVRAWEPYRTKRGGKWRFQTVRRILMRRENGGEYRYAGVVVPGGMPAIVPMDDEERVIRMLEDSHRPRAKTEAWDFPLTGKLYDGRDGGLMTGTSGTGKSGRPYHYYRCRSCGRTVRRDVMEKRVADAVREALGSADSRERIARMLADAEEERADEKPLSETIKGELAKIETAFSNIWAAIESGIAPPGGKERIDALKQRQALLKDELRTAEALEAARLDYDRALFWLEGMAAAEVDDAQLLRTFVARVVLGGPDDDDGLRVAFTFDDSAGLGDNPSLPGAIGPGGEVFDRMNASSTISNRQVDTHIYLPFYF

SEQ ID NO: 5599 - protein, 503 aa, Unknown
  Description of Unknown: Integrase B5600 sequence
  cd03768,PTHR30461:SF3,SM00857,IPR036162,G3DSA:3.40.50.1390, IPR006119,SSF53041,PTHR30461,PS51736,Coil, PF00239
MVKIRVAIYCRKSVYVEGSVSIETQINLCKDYINRKYSNATFQIFEDEGFSGGNTKRPAFQKMLKLIELNQLDIVICYKIDRIARNTLDFLNTLEKFKKSNVELISVNEGFDPNTQMGKMMLTLLASFAEMERSNIQQRVSDNMLSIAKKGKWTGGSAPTGFINGKNGGLEISNAELIYDLFNMKYNNNLNSEIISYIKDKHNHTFIGTTLASSWRKPIYVQSSKEVTLYLKHKGYTVLGEENLINSYLTYTDKNSKYAVVSDIPGLIAPNIWISVNKKMDKNISREGNRFSSKYWLTKTLRCNCCGKTYCGQTKKTKTKYYKKDGSEKIYESVIDYYMCRDMLQGKLKSCPNTKRIKKAYIEERISNYIYKLKDKKFFRSSYSNNTVNNKKIISSLEKKLKTIDKNINNLTDKLAILSNEASMYIINRIEMLSTEKSKIKDEIIELEMQELNSLSNNYDFVFYNIQSFNRNMNVDEKRSSIMNIFKKIVYDPKTDTFEYYFK

SEQ ID NO: 5600 - protein, 503 aa, Unknown
  Description of Unknown: Integrase B5601 sequence
  cd03768,SM00857,G3DSA:1.10.10.2600,IPR036162, PF13408,PS51737,IPR025827,G3DSA:3.40.50.1390, IPR006119,IPR038109,PF07508,IPR011109, SSF53041,PTHR30461,PS51736,Coil,PF00239
MNNRIDAIYARQSVDKKDSISIESQIEFCKYELKGGNCKEYTDKGYSGKNTDRPKFQELVRDIKRGLIAKVVVYKLDRISRSILDFANMMELFQQYNVEFVSSTEKFDTSTPMGRAMLNICIVFAQLERETIQKRVTDAYYSRSQRGFKMGGKAPYGFHTEPIKMDGINTKKLVVNPDEAANIRLIFEMYAQPTTSYGDITRYFAEQGILFHGKELIRPTLAQMLRNPVYVQADLDVYEFFKSQGTVIVNDAADFTGMNGCYLYQGRDVKPSKKNDLKDQMLVLAPHEGIVPSDIWLTCRKKLMNNMKIQSARKATHTWLAGKIKCGNCGYALMSINNPVRKQYLRCTKRLDNKSCAGCGKIITSELEAVVYQQMVKKLASYKTLTGRKKAAKANPKIAALQVELAHVDSEIEKLVDSLTGANNVLLSYVNVKIAELDGRKQELLARIAELTVEAISPEQVSQISGYLDTWDNVSFDDKRRVVDLMITTIAATSDSLNITWKI

SEQ ID NO: 5601 - protein, 503 aa, Unknown
  Description of Unknown: Integrase B5602 sequence
  cd03768,PTHR30461:SF3,SM00857,IPR036162,G3DSA:3.40.50.1390, IPR006119,PF07508,IPR011109,SSF53041,PTHR30461, PS51736,Coil,PF00239
MIKIRVAIYCRKSVFVEGSVSIETQINLCKDYINKKYSNSTFEIFEDEGFSGGNTNRPAFQKMLKLIELNQLDIVICYKIDRIARNTLDFLNTLEKFKNKNVELISVSEGFDPNTQIGKMMLTLLASFAEMERSNIQQRVSDNMLSIAKKGRWTGGSAPTGFMHGENGGIEISNGELILDIFDMKYHNTLNSKIITHAEEKHNHKFTGVTLANAFRKPIYVKSSESVSLYLKHKGYTVLGEENLTNSYLTYTDKDNKYAVVSNIPGLINPEVWLDINKRMDENITRTGNRFSEKYWLTKTLHCKCCGKTYCGHTKSTKTRYYKKDGTEKIYESTTYYYMCRDMLRGKLKTCTNTKRVKKDYLEVRVSELIYSLKDIDNFNAAYNVNSVDNKKLIASLERKIKSIDKNINNLTDKLSLLSNEASIIFINKIETLVKEKSNIKNEILSLEMHELENINNNHDFVFYNISNFNDNMTVDEKRACCMNIFKEITYDPKEDTFEFSFK

SEQ ID NO: 5602 - protein, 503 aa, Unknown
  Description of Unknown: Integrase B5603 sequence
  cd03768,SM00857,G3DSA:1.10.10.2600,IPR036162, PF13408,PS51737,G3DSA:3.40.50.1390,IPR025827, IPR006119,IPR038109,PF07508,IPR011109, SSF53041,PTHR30461,PS51736,Coil,PF00239
MNNRIDAIYARQSVDKKDSISIESQIEFCKYELKGGNCKEYTDKGYSGKNTDRPKFQELVRDIKRGLIAKVIVYKLDRISRSILDFANMMELFQQYNVEFVSSTEKFDTSTPMGRAMLNICIVFAQLERETIQKRVTDAYYSRSQRGFKMGGKAPYGFHTEPIKMDGINTKKLVVNPEEAANIRLMFEMYAEPTTSYGDITRHFAEQGILFNGKKLIRPTLAQMLRNPVYVQADLDVYEFFKSQGTVIVNDAADFTGMNGCYLYQGRDVKPDKAQNLKDQMLVLAPHEGIVPSDVWLTCRKKLMNNMKIQSARKATHTWLAGKIKCGNCGYALMSIFNPSGKQYLRCTKRLDNKSCPGCGKIITSELEAVTYQQMVKKLDSYKTLTGRKKAAKANPKIAALQVELAHVDSEIEKLVDSLTGANNVLLSYVNVKIAELDGRKQELLAQIAELTVEAISPEQVSQISGYLDTWENVAFDDKRRVVDLMLTTIAATSDSLNITWKI

SEQ ID NO: 5603 - protein, 503 aa, Unknown
  Description of Unknown: Integrase B5604 sequence
  PTHR30461:SF3,SM00857,G3DSA:1.10.10.2600,IPR036162,PF13408, PS51737,G3DSA:3.40.50.1390,IPR025827,IPR006119,IPR038109, PF07508,IPR011109,SSF53041,PF00239,PTHR30461, PS51736,Coil,cd00338
MQRAVIYARYSPGPNQTEQSIEGQVRECTKYAELHDLRIVGTYIDRKISGKTDNRREFQRMIDDSEKHIFDVIILYHTDRFARNRYDSAIYKHKLKENGVELRYATTDIPKGPEGIILESIMEGWAEYYSAELSRKIKRGMRESALKCHSTGAGRCLGYRTAEDKSLVIEPEGAKAVQTVFDMYIKGKSHADICRYLNDCGFRTAQGKLFNKNSVTHIIRNKRYIGVYTYDDITIEDGIPAIISKDTFHLAQLEAARRKTAKRPKEPKAEYLLSGKAFCGHCQKPLVGVSGTGKSGNKWYYYYCQESRAKRGCTKRPVKRDWLEREVVERTVAEVLQPEVIQHIAKKCYDLQMEYRQDNSDVLFYELKLKDVRKAIKNTMHAIESGVKTKTLPARLQELENEEEALEAELAIAKASDFVITTDQIEFLLTQFAEPWECESEEEYHRRIIKCFVHKVFLFDDKLLIYYNVSRDGKTREQSEAELLEEALGEGFDKRSSGSTKTI

SEQ ID NO: 5604 - protein, 503 aa, Unknown
  Description of Unknown: Integrase B5605 sequence
  IPR036162,PS51737,IPR011109,PTHR30461,PS00397, PF00239,G3DSA:1.10.10.2600,IPR006119,SSF53041,cd00338, SM00857,IPR025827,IPR038109,PS51736,IPR006118, PF13408,G3DSA:3.40.50.1390,PF07508,Coil
MQAEHLFYFWLLFLYSFLHTTKQEGDIMAKLRNGALYIRVSTADQTELSPDAQQRLLLDYAKKNGIIISKDYVFEESVSGRHADKRPKFQEMIGIAKQESHPLDVILVWKYSRFARNQEESIVYKSLLKKSDVDVISISEPLIDGPFGTLIERIIEWMDEYYSIRLSGEVIRGMKEKALKHGYQTTPCLGYDAVGGGKPFVINEEEYKIVQYIMDQYDLYDQDATAIARKCNDLGFRSKRGNLFEQRNVDLILKNPFYTGTVVWNGISFEGSHETRLSKERFEKRIALMRARRRPAKARNISTCKHWLSGLLRCSVCGATLSLAGSGSYRYFQCWKYSKGFHTGSQSLSAAKAEAAVCDYFDRILAGADFTYAVRNIPDQKESDELDLLRQELDQIAVKEARVKLAYENGIDTLEEYKENRRRLKESREELLEKIDTATAATQPEDSDSHARETLLKEIQSVSEILKDPAESYERKGLLLRSIVDGITYDKEKNRLYFNFFIS

SEQ ID NO: 5605 - protein, 503 aa, Unknown
  Description of Unknown: Integrase B5606 sequence
  PTHR30461:SF3,cd00338,SM00857,G3DSA:1.10.10.2600,IPR036162, PF13408,PS51737,IPR025827,G3DSA:3.40.50.1390,IPR006119, IPR038109,PF07508,SSF53041,IPR011109,PTHR30461, PS51736,Coil,PF00239
MSKLAVIYARFSSDKQREESIEGQIRECTAFADANDIKIVGTYIDRAMSARTDKRPDFLRMIADSAKGVFEYVLVYQLDRFSRNRYDSAVYKNKLKKNGVRVLSAKENIRDDPSGIILESVIEGYAEYYSAELSQKVTRGMTDNLLEKKWTGGLVPLGYRTKKDGTLAIDPAGAAAVTSSYKQFIAGRTVPQIIDHLNEHNYRTTMGTRFNRNSLSRVLRNKIYTGTFSWGGTEYPDFAPRIISDATYQAAQDIFNARKKKSGQEVVWRRRPDAYALTGKIYCGVCGMAMTGMAGRSRSGEMYHYYRCSSKNNSKEKARREKIVCSSRSVNRDKLESLILDTTVQILSSPEALHCIAEQAVKAQENAPQAEEVKRLELLIGDIEKRLQNSIRAIESGIISDTIARNIRQYEDELAELKTQLETAKLDTGFKITAEAVEYFLKEMVKKNDRYKLDTFQAFIRRIVITGDKVEIYYNYHAVPNILKNPVNKMLTGCSSSIAMVTR

SEQ ID NO: 5606 - protein, 503 aa, Unknown
  Description of Unknown: Integrase B5607 sequence
  cd03768,PTHR30461:SF3,SM00857,IPR036162,PF13408, IPR025827,PS51737,G3DSA:3.40.50.1390,IPR006119,PF07508, IPR011109,SSF53041,PTHR30461,PS51736,Coil, PF00239
MDLIYARQSVDKEDSISIESQIELCLRENTSGEHKIFKDKGYSGKNTERPAFQEMMSWIRRGGVERVIVYRLDRISRSVLDFAGLINEFQRYGVEFVSITERFDTSTPIGKAMLMIVMIFAQLERETIQQRVIDAYKSRSRKGFYMGGRVPYAFKLKGIVMDGIKTSMYEAIPEEIEVVKLIYSLYSEPQTSFSDVMKYLKDNNIKNSSGKAFSRNRIRDIVINPIYVKADDRIFEFFQEQGAEIVNDISQFIGTNGAYFYTGDKTLKRKAISILGHVLVLAPSEGCVDSDTWLKCRTKCLNVRQMAKPVKAKNTWLAGKIKCMNCGYSLSLRENKRKRKESSRYYVCSRKYVAMDCDGIGAVSAEKVEDIVFFEMREKLKEFGELQLHEKPESTLQLTKLKVRADQIEKEIDTLVEKIPTASKATMGYINKKIDELDEEHSRLKKEIADMSADIYGKKDVGVIKNYLNNWESISISDKITVVDALIESVRVNQDTVDIVWKI

SEQ ID NO: 5607 - protein, 503 aa, Unknown
  Description of Unknown: Integrase B5608 sequence
  PTHR30461:SF3,cd00338,SM00857,G3DSA:1.10.10.2600,IPR036162, PF13408,IPR025827,PS51737,G3DSA:3.40.50.1390,IPR006119, IPR038109,PF07508,SSF53041,IPR011109,PTHR30461, PS51736,Coil,PF00239
MLRAALYGRFSSDNQREESIMAQFRDSEEYCKKKNYCIVARYADEAKSGTTTVGRDRYNQMLDDARRGLFDVIVFHKVDRNARNEFDYYMTKHKLQQVGVRYEYSKQDINATTPEGQMMESMLVGMAAYYSRNLSNEIKKGLRENVLQGKHAGGPVPYGFLTDENKKYIINEKEAPAVRMIFNLYVAGVHYGTIRKKLFNAGYRNRAGREFTTAGIYEILRNRKYVGDLYLGKTLFRKGKRNSHRTSADVRYYENVIPAIIPRSLFMEVQEKMNRNRRRTGSGNAKTVYALSGLIFCGRCGSAMVAHSTKNSRGVKNYYYRCPKGRLVGDEKCHQKFVNRDKIEAAVYNLIRDTFTSPNAHDRIKEVISKNKIKINPEDYTEQIKRLKQQEAADVRSLDRLYDIYMAEQEDEFTISKMKKLKEGILRLRNQIEELETRQKIVQSEKFDIDRVIDTFQKQLKQKQSPEFIQTLFQLAIKSVTIYPDKIQVALLVTQERFELPTP

SEQ ID NO: 5608 - protein, 503 aa, Unknown
  Description of Unknown: Integrase B5609 sequence
  PTHR30461:SF3,cd00338,SM00857,G3DSA:1.10.10.2600,IPR036162, PS51737,G3DSA:3.40.50.1390,IPR006119,IPR038109,PF07508, SSF53041,IPR011109,PTHR30461,PS51736,Coil, PF00239
MGGRAAIYARFSSHNQRGESIEIQVEKSRAYCAENDLRVVATYCDFAQTGTNTDRAEFQRMMADAKRGLFDFVVIYKVTRIMRNRDEMAMARIMLRRCRVEILYAGEDISDGSAGVLQLGMLEVLAEYESALDGERIRDGIQKNAERCMANGCVRYGWDIVDGRYVVNEEEAAAIRLGVRMVLSGKSVADVVRAWEPYRTKRGGKWRFQTVRRILMRRENGGEYRYAGVVVPGGMPAIVPMDDEERVIRMLEDSHRPRAKTETWDFPLTGRLYDGRDGGLMTGTSGTGKSGRPYHYYRCRSCGRTVRRDVVEKRVADAVREALGSADSRERIARMLADAEEERADEKPLSETVKGELAKIETAFSNIWAAIESGIAPPGGKERIDALKQRQALLKDELRTAEALEAARLDYDRALFWLEGMAAAEVDDAQLLRTFVARVVLGGPDDDDGLRVAFTFDDSAGLGDNPSLPGAIGPGGEVFDRMNASSTISNRQVDIRIYLSFYF

SEQ ID NO: 5609 - protein, 503 aa, Unknown
  Description of Unknown: Integrase B5610 sequence
  SM00857,G3DSA:1.10.10.2600,IPR036162,PF13408,IPR025827, G3DSA:3.40.50.1390,PS51737,IPR006119,IPR038109,PF07508, IPR011109,SSF53041,PF00239,PTHR30461,PS51736, Coil,cd00338
MYAMYLRKSRADDPHESIEETLRKHEKILFDLANKLNIKRSEIVQFKEVVSGENLKNRPEAQKMLKLVMENAFEGVLVVDSQRLARGDTLDQGTIIRAFSLNNTKIITPGKTINPGDEIDQDYFEFDLFMGRREYKMINKRMQRGRNISVQEGNYVGSIAPYGYKKTKIGKCHTLKINEDEIDCFNKMKELALNGLGCTSISNELNRLGFKPRKSKLWTTNAVRDILLNKTNLGLIKWNTRKSVKLYKNDEIIKSRPRNEEAEYYPGKHPAIITQVEYDAIVENIKNRARPVKKDKKLQNPLAGVVYCGKCGKAMIRRSYNNGYRDGLICTNTHCNNVSSVLEVVEKRVLESLEDTLKEYRQFIDNYHNDKTKTNNDSLIIKTEKEINKIDSQINKACEMLEVGAYSVELFKERKTLLDNQKKALIDKIEALKKEDTDFKLQNYINAVPILENAIKLYWNSSVEEKNKLLKQIVKRCDYLKSERGKRNGKGVYNFKLNIYLKI

SEQ ID NO: 5610 - protein, 503 aa, Unknown
  Description of Unknown: Integrase B5611 sequence
  PTHR30461:SF3,cd00338,SM00857,G3DSA:1.10.10.2600,IPR036162, PS51737,G3DSA:3.40.50.1390,IPR006119,IPR038109,PF07508, IPR011109,SSF53041,PTHR30461,PS51736,Coil, PF00239
MGGRAAIYARFSSHNQRGESIEIQVQKSRAYCAENDLRVVATYCDFAQTGTNTDRAEFQRMMADAKRGLFDFVVIYKVTRIMRNRDEMAMARIMLRRCRVEILYAGEDISDGSAGVLQLGMLEVLAEYESALDGERIRDGIQKNAERCMANGCVRYGWDIVDGRYVVNEEEAAAIRLGVRMVLSGKSVADVVRAWEPYRTKRGGKWRFQTVRRILMRRENGGEYRYAGVVVPGGMPAIVPMDDEERVIRMLEDSHRPRAKTEAWDFPLTGKLYDGRDGGLMTGTSGTGKSGRPYHYYRCRSCGRTVRRDVVEKRVADAVREALGSADSRERIARMLADAEEERADEKPLSETIKGELAKIETAFSNIWAAIESGIAPPGGKERIDALKQRQALLKDELRTAEALEAARLDYDRALFWLEGMAAAEVDDAQLLRTFVARVVLGGPDDDDGLRVAFTFDDSAGLGDNPSLPGAIGPGGEVFDRMNASSTIGNRQVEKCLYLPFYF

SEQ ID NO: 5611 - protein, 503 aa, Unknown
  Description of Unknown: Integrase B5612 sequence
  PTHR30461:SF3,SM00857,G3DSA:1.10.10.2600,IPR036162,PF13408, IPR025827,G3DSA:3.40.50.1390,PS51737,IPR006119,IPR038109, PF07508,IPR011109,SSF53041,PTHR30461,Coil, PS51736,cd00338,PF00239
MNKKINAVGYARYSTEFQTDNSIAYQTTAIQEYCEKHDINLLKVYADEAMTGTNTNRPAFQQMLAAAEQHLFDAVIIYDISRGSRNVVDWFSFRQEMARIDIQVISCNQHLGDILDPNTYLTELITAGIGQHMVLDTRKKSIDGKNERAKKGIFCGGNPPLGYDINDGNYIINPKEAKIVQTIFTMYADGHSYNEILKELDEAVGKAGRPLGKNSLYSILKNERYIGVYTWNKRKIKIMGKWAGGRPNPDIVRIENAIPPIIDETIWRKVEERMKDNSRRATSKSCRHNYLLSGLIQCDKCGATFVGHTSTNQKKISTPYYICGNKYRTHTCYTKNINADRLETFVVMQIKHYLKTADFETLADEICKQVNSAAPDVSAEKKELSEIETKITNGINAILGGVNIPELKDEVDKLRIRKSELEDVITYKEKNKTRTLNRDKLVEMLKESAENIDSTDSNTLIRNFVTKIYAHADGTVTVNLGVHINGCGDTQLIICTLKFFIKK

SEQ ID NO: 5612 - protein, 503 aa, Unknown
  Description of Unknown: Integrase B5613 sequence
  PTHR30461:SF3,cd00338,SM00857,G3DSA:1.10.10.2600,IPR036162, PF13408,IPR025827,G3DSA:3.40.50.1390,PS51737,IPR006119, IPR038109,PF07508,IPR011109,SSF53041,PTHR30461, PS51736,Coil,PF00239
MNEYIDRAISGKTDNRPSFQRLIKDSDKGHFDAVIMYTLDRFARNRYDSAIYKAKLKKNGVRVFYAKQPMPDTPEGIILESVLEGYAEYYSENLARSIKRGMKENALHTIAMGSLGLGYKIGEDRKYEIDPVGAKAVRAIFTMYAEGKSKTEIVNWLNEHGFKTSQGNQFNKNSLSRILRNDKYIGVYRYADVVVENAIPPIIDKRLFDKVQALLKHNFASRARNKAKEDYLLSTKLFCGHCGSPMIGESGTSKLGRVYHYYKCSKRKRERDCSKKVEKKDWLEELVVRYTVHHVLTDENIELIATKAMELVEKDLQDTSVLVGLQGMLKDVNKKIKNLMSAIEQGIITSSTKERLEELELERLNIEGQIAREEMKKPLLSKERIVYWLTSFKSGDIQDIEYQRRIIDTLVNSVFVYDDDGNGRRIVLTFNISGNNTLTIECSDIEGIAPPYIEDVVITVAHLPREQEERFESGIFYHFWGTYSNFQKLFMGKRTTVFRILRR

SEQ ID NO: 5613 - protein, 503 aa, Unknown
  Description of Unknown: Integrase B5614 sequence
  PTHR30461:SF3,cd00338,SM00857,G3DSA:1.10.10.2600,IPR036162, PF13408,PS51737,IPR025827,G3DSA:3.40.50.1390,IPR006119, IPR038109,PF07508,SSF53041,IPR011109,PTHR30461, PS51736,Coil,PF00239
MYNDSKGIYLMYLRKSRADEYNQDVENILKRHEKELQSLAKREFGELIPEKYIFREVVSGGTIKDRPLMKEILKMMESGIIAGVLVVDPQRLSRGDLLDQGHIINAFKYTNTLIITPYKTYDLNDTTGTDMKLLKMELNHGADYLDYYKMVQARGKLASVRAGNFIQPIPPFGYRKVRYGKVSTLEPIEDEARIVQIIFQKYAEGKTICGVTNELNAEGYIPPSKQIWTKGSVKRILSNPVYDGKIRWGFTPNKTVMEDGKLKKYRPERHDYLLFDGKHDAIVNHGLFMSVQERLSKNKSFTNDRSLKNPLYGIMYCKRCGRKISRLNVTESRGGHRYACPNKLCDVQSSRYDLVINAVIDAVQCAIDDFDITVHECNVSDSSEKIRGLRQELTKLNSKEETLFELLETKVYSTSIFTQRHAELEKKRQEILGKINTLSLIPPPESCNDKKMRFKDALLALKDESMPPKEKNHLLKKCIERIDYDIEGVRYHSKVKLDVYFKF

SEQ ID NO: 5614 - protein, 503 aa, Unknown
  Description of Unknown: Integrase B5615 sequence
  PTHR30461:SF3,cd00338,SM00857,G3DSA:1.10.10.2600,IPR036162, PF13408,IPR025827,PS51737,G3DSA:3.40.50.1390,IPR006119, IPR038109,PF07508,SSF53041,IPR011109,PTHR30461, PS51736,Coil,PF00239
MLRAALYARFSSENQREESILAQFRDSTEYCKKHGYAIVAKYADEAKSGTTTIGRDQYKLMLKDAQKGKFDIVVFHKIDRNARNELDYYITKHKLEEAGVKYAYSRQDIDSTSPEGQMMESMLVGMAAYYSRNLSNEIKKGLRENAIQGKCTGGRPPYGFSVDSGKKLIINESEASAVRMIFDWYAAGVHYGVIRERLFNAGYRNRSGKEFTIASMYEILRNRKYVGDLYLGKTLFRKGKRNTHRTSANVQYFENVIPAIVSKEIFWEVQDKLDQNKRRSGTGNAKAIYALSGLIHCGQCGSAMVAHSTKNSRGIKNYYYRCPKGRLIGEEKCPQKFINRDDIESTVYQLIRKLFTAPDAHDQIKRIIAKNNMSVKAPDYIEQIKRLKKQESDASKRLDKLYNLYMTDNEDEFTLQKMTQLKEEILKLRVRIKEAEDRQIIAQSATFDIDKIIDTFQKQLKQKQSPEFIKTLFELAVKNVTVYPDKIKVVLLVTQERFELPTP

SEQ ID NO: 5615 - protein, 503 aa, Unknown
  Description of Unknown: Integrase B5616 sequence
  PTHR30461:SF3,SM00857,G3DSA:1.10.10.2600,IPR036162,PF13408, PS51737,G3DSA:3.40.50.1390,IPR025827,IPR006119,IPR038109, PF07508,IPR011109,SSF53041,PF00239,PTHR30461, PS51736,Coil,cd00338
MIAALYARYSSDSQRAESIVAQIRAGREYCRRKGYHIIKEYADEAYTGTNDNRPAYREMLRDAAAGLFEVVIFHKVDRNGRNEFDYYKNKQELARHNVRVEYSGQAFDSTSPEGALMENQLVGLAAYYSRNLSREVKKGLKENVLAGKITGGRPLFGYSVDKNKKYVINEEEAVAVRYIFERYAAGASYIDILREVNARGYRTRRGAEFGKATLHDMLNNRRYIGTCILGKNQPYLDGRRNSHRPDHDGMIIVPNGCPAIISPELFQAVHERMQENRRRGGRRTAKYPYLLSGLVYCGECGASMSGTRTRTRKKEVREYYRCCQKSNHGDAKCPNRYIYAPALENFIIGRLAAVIDNESLLFRLAQKVQEKYDALVGNAQAQIAALQEQEAKASKSLERLYEVIADGDTFDDFDRAQMKHLKQKILDIRAQREKLEQQPGKTIAPAEIVHYIRDRFLPAIRQRTAPGLTELLQYFVHTVTVFRDKIRVEYWFAACRYASERTI

SEQ ID NO: 5616 - protein, 503 aa, Unknown
  Description of Unknown: Integrase B5617 sequence
  PTHR30461:SF3,cd00338,SM00857,G3DSA:1.10.10.2600,IPR036162, PS51737,G3DSA:3.40.50.1390,IPR006119,IPR038109,PF07508, SSF53041,IPR011109,PTHR30461,PS51736,Coil, PF00239
MGGRAAIYARFSSHNQRGESIEIQVEKSRAYCAENDLRVVATYCDFAQTGTNTDRAEFQRMMADAKRGLFDFVVIYKVTRIMRNRDEMAMARIMLRRCRVEILYAGEDISDGSAGVLQLGMLEVLAEYESALDGERIRDGIQKNAERCMANGCVRYGWDIVDGRYVVNEEEAAAIRLGVRMVLSGKSVADVVRAWEPYRTKRGGKWRFQTVRRILMRRENGGEYRYAGVVVPGGMPAIVPMDDEERVIRMLEDSHRPRAKTEAWDFPLTGKLYDGRDGGLMTGTSGTGKSGRPYHYYRCRSCGRTVRRDVVEKRVADAVREALGSADSRERIARMLADAEEERADEKPLSETIKGELAKIETAFSNIWAAIESGIAPPGGKERIDALKQRQALLKDELRTAEALEAARLDYDRALFWLEGMAAAEVDDAQLLRTFVARVVLGGPDDDDGLRVAFTFDDSAGLGDNPSLPGAIGPGGEVFDRMNASSTIRNRQVDIRIYLPFYF

SEQ ID NO: 5617 - protein, 503 aa, Unknown
  Description of Unknown: Integrase B5618 sequence
  PTHR30461:SF3,SM00857,G3DSA:1.10.10.2600,IPR036162,PF13408, IPR025827,G3DSA:3.40.50.1390,PS51737,IPR006119,IPR038109, PF07508,IPR011109,SSF53041,PTHR30461,Coil, PS51736,cd00338,PF00239
MIAALYARYSSDSQRAESIVAQIRAGREYCRRKGYHIIKEYADEAYTGTNDNRPAYREMLRDAAAGLFEVVIFHKVDRNGRNEFDYYKNKQELARHNVRVEYSGQAFDSTSPEGALMENQLVGLAAYYSRNLSREVKKGLKENVLAGKITGGRPLFGYSVDKNKKYVINEEEAVAVRYIFERYAAGASYIDILREVNARGYRTRRGAEFGKATLHDMLNNRRYIGTCILGKNQPHLDGRRNSHRPDHDGMIIVPNGCPAIISPELFQAVHERMQENRRRGGRRTAKYPYLLSGLVYCGECGASMSGTRTRTRKKEIREYYRCCQKSNHGDAKCPNRYIYAPALENFIIERLAAVIDNENLLFRLAQKVQEKYDALVGNARVQIAALQEQETKASKSLERLYEVIADGDTFDDFDRAQMKHLKQKILDIRAQREKLEQQPGKTISSAEIVRYIRDRFLPAIRQRTASGITELLQYFVHTVTVFRDKIRVEYWFASCRYSSERTT

SEQ ID NO: 5618 - protein, 503 aa, Unknown
  Description of Unknown: Integrase B5619 sequence
  PTHR30461:SF3,cd00338,SM00857,G3DSA:1.10.10.2600,IPR036162, PS51737,G3DSA:3.40.50.1390,IPR006119,IPR038109,PF07508, SSF53041,IPR011109,PTHR30461,PS51736,Coil, PF00239
MVGRAAIYARFSSHNQRGESIEIQVEKSRAYCAENDLRVVATYCDFAQTGTNTDRAEFQRMMADAKRGLFDFVVIYKVTRIMRNRDEMAMARIMLRRCRVEILYAGEDISDGSAGVLQLGMLEVLAEYESALDGERIRDGIQKNAERCMANGCVRYGWDIVDGRYVVNEEEAAAIRLGVRMVLSGKSVADVVRAWEPYRTKRGGKWRFQTVRRILMRRENGGEYRYAGVVVPGGMPAIVPMDDEERVIRMLEDSHRPRAKTEAWDFSLTGKLYDGRDGGLMTGTSGTGKSGRPYHYYRCRSCGRTVRRDAVEKRVADAVREALGSADSRERIARMLADAEEERADEKPLSETIKGELAKIETAFSNIWAAIESGIAPPGGKERIDALKQRQALLKDELRTAEALEAARLDYDRALFWLEGMAAAEVDDAQLLRTFVARVVLGGPDDDDGLRVAFTFDDSAGLGDNPSLPGAIGPGGEVFDRMNASSTISTRQVDTYIYLPFYF

SEQ ID NO: 5619 - protein, 503 aa, Unknown
  Description of Unknown: Integrase B5620 sequence
  PTHR30461:SF3,cd00338,SM00857,G3DSA:1.10.10.2600,IPR036162, PF13408,IPR025827,PS51737,G3DSA:3.40.50.1390,IPR006119, IPR038109,PF07508,SSF53041,IPR011109,PTHR30461, PS51736,Coil,PF00239
MSKLAVIYARFSSDKQREESIEGQIRECTAFADANDIKIVGTYIDRAMSARTDKRPDFLRMIADSAKGVFEYVLVYQLDRFSRNRYDSAVYKNKLKKNGVRVLSAKENIRDDPSGIILESVIEGYAEYYSAELSQKVTRGMTDNLLEKKWTGGLVPLGYRTKKDGTLAIDPAGAAAVTSSYKQFIAGRTVPQIIDYLNEHNYRTTMGTRFNRNSLSRVLRNKIYTGTFSWGGTEYPDFAPRIISDTTYQAAQAIFNARKKNSGKEVVQRRRPDAYALTGKIYCGICGMAMTGMAGRSRSGEMYHYYRCSSKNNSKEKARREKIVCSSRSVNRDKLESLILDTTVQILSSPEALHCIAEQAVKAQENAPQAAEVKRLELLIGDIEKRLQNSIRAVESGIISDTIVRNIRQYEDELAELKTQLETAKLDTGFKITAEAVEYFLKEMVKKNDRYKLDTFQAFIRRIVITGDKVEIYYNYHSVPNILKNPVNKMLTGCSSSIAMVTR

SEQ ID NO: 5620 - protein, 503 aa, Unknown
  Description of Unknown: Integrase B5621 sequence
  PTHR30461:SF3,cd00338,SM00857,G3DSA:1.10.10.2600,IPR036162, PF13408,PS51737,IPR025827,G3DSA:3.40.50.1390,IPR006119, IPR038109,PF07508,IPR011109,SSF53041,PTHR30461, PS51736,Coil,PF00239
MSKLAVIYARFSSDKQREESIEGQIRECTAFADANDIKIVGTYIDRAMSARTDKRPDFLRMITDSAKGVFEYVLVYQLDRFSRNRYDSAVYKNKLKKNGVRVLSAKENIRDDPSGIILESVIEGYAEYYSAELSQKVTRGMTDNLLEKKWTGGLVPLGYRTKKDGTLAIDPAGAEAVTSSYKQFIAGKTVPQIIDYLNEHNYRTTMGTRFNRNSLSRVLKNKIYTGTFSWGGTEYPEFAPRIISDATYQAAQAIFNARKKNSGKEVVHRRCPDVYALTGKIYCGICGMAMTGMVGRSRSGEMYHYYRCSSKNNSKEKARREKIVCSSRSVNRNKLESLVLDTTIQILNTPEALHCIAEQAVKAQENAPQAEEIKRLELIISDTEKRLQNSIRAVESGIISDTIARNINQYEEDLESLKKQLETAKLDTGFKITADAVEYFLKEMVKKNDRYKLDTFQAFIRRIVITGDKVEIYYNYHAVPNILKNPVNKMLTGCSSSIAMVTR

SEQ ID NO: 5621 - protein, 503 aa, Unknown
  Description of Unknown: Integrase B5622 sequence
  PTHR30461:SF3,cd00338,SM00857,G3DSA:1.10.10.2600,IPR036162, PS51737,G3DSA:3.40.50.1390,IPR006119,IPR038109,PF07508, SSF53041,IPR011109,PTHR30461,PS51736,Coil, PF00239
MSKKQKLICAMYLRKSRADSDVDTVEETLTRHEEILKEFLTHHPELELKRTYKDVVSGDSIYARPQMLELMQDIESGLYNAVLCMDIDRLGRGATSEQGFILETFKINNIKIITPRKVYDLNNELDEEYAEFESFMARRELKLIKRRLHTGTLKSISEGCHLCVPPYGYARDYKDKKSTLKIVEEEAKFVRIIFDMYCSGIGAATIAETISNMGAVPHRSDKFCRTSIIKIIKNPNYIGKIVWNTKKSIKKGQNGAKKNYVIYNPQDQWKIVDGLHPPIISEDVFYKANEILKSRYRKPYQDGKLLNPLSQILRCRVCGEFMQRRPYKDRKEPEHLLCPTKGCCCSSRLDRVEMAVIDAVEKKLNELKSNKYNPPKHKDYSAMISSLEHELNTLKNQSERLHDFLEKGVYDIDTFLERRDKLQNRIEQVQDQLIMLKEKNKENNNIDIAEIIKQFENVLNLYWDSTPDSQNKLLNSIIDGGTYYKEKGWKPNQFIIKLRFKNC

SEQ ID NO: 5622 - protein, 503 aa, Unknown
  Description of Unknown: Integrase B5623 sequence
  PTHR30461:SF3,cd00338,SM00857,G3DSA:1.10.10.2600,IPR036162, PF13408,IPR025827,PS51737,G3DSA:3.40.50.1390,IPR006119, IPR038109,PF07508,IPR011109,SSF53041,PTHR30461, PS51736,Coil,PF00239
MLRAALYARFSSENQREESILAQFRDSTEYCKKHNYAIVAKYADEAKSGTTTIGREQYKLMLKDAQKGKFDIVVFHKIDRNARNELDYYITKHKLEEAGVKYAYSRQDIDSTSPEGQMMESMLVGMAAYYSRNLSNEIKKGLRENAIQGKCTGGRPPYGFSIDANKKLIINENEAPAVRVIFDWYSAGVHYGVIRKRLFNAGYRNRAGKEFTIASIYEILRNRKYVGDLYLGKTLFRKGKRNTHQTSANVQYFENVIPAIVSREIFEEVQVKLDRNKRRSGAGKAKAIYALSGLIYCGKCGSAMVAHSTKNSRGIKNYYYRCPKGRLVGDEKCPQKFINRDDIEETVYQLIRKLFTAPDAHDQIKRIIAKNNMGVKVPDYTDQVKRLKKQESDASKRLDKLYDLYMTDREDEFTSAKMAQIKEEILRLRTQIKEAEDRQAIAQSTTFDIDKIIDTFQKQLKQKQSPEFIKTLFELAVKNVTVYPDKIKVVLLVTQERFELPTP

SEQ ID NO: 5623 - protein, 503 aa, Unknown
  Description of Unknown: Integrase B5624 sequence
  cd00338,SM00857,G3DSA:1.10.10.2600,IPR036162,PF13408, IPR025827,G3DSA:3.40.50.1390,PS51737,IPR006119,IPR038109, PF07508,IPR011109,SSF53041,PTHR30461,PS51736, Coil,PF00239
MYAMYLRKSRADDPHESIEETLRKHEKILFDLANKLNIKRSEIVQFKEVVSGENLKNRPEAQKMLKLVMENAFEGVLVVDSQRLARGDTLDQGTIIRAFSLNNTKIITPGKTINPGDEIDQDYFEFDLFMGRREYKMINKRMQRGRNISVQEGNYVGSIAPYGYKKTKIGKCHTLKINEDEIDCFNKMKELALNGLGCTSIANELNRLGFKPRKSKLWTTNAVRDILLNKTNLGLIKWNTRKSVKLYKNDEIIKSRPRNEEAEYYPGKHPAIITQVEYDAIVENIKNRARPVKKDKKLQNPLAGVVYCGKCGKAMIRRSYNNGYRDGLICTNTHCNNVSSVLEVVEKRVLESLEDTLKEYRQFIDNYHNDKTKTNNDSLIIKTEKEINKIDSQINKACEMLEVGTYSVELFKERKTLLDNQKKALIDKIEALKKEDTDFKLQNYINAVPILENAIKLYWNSSVEEKNKLLKQIVKRCDYLKSERGKRNGKGMYNFKLNIYLKI

SEQ ID NO: 5624 - protein, 503 aa, Unknown
  Description of Unknown: Integrase B5625 sequence
  PTHR30461:SF3,SM00857,G3DSA:1.10.10.2600,IPR036162,PF13408, IPR025827,G3DSA:3.40.50.1390,PS51737,IPR006119,IPR038109, PF07508,IPR011109,SSF53041,PF00239,PTHR30461, PS51736,Coil,cd00338
MNGVIYARYSSDRQTEQSIEGQLRECQEYADANNIKIVGTYIDRAKTGRNDNRAGFQKMLRDSKQKFFDAVIVWKIDRFGRNREDIAKNKAILRRNGVSVLYAKEHIPEGAEGIILEGLLESLAEYYSAELREKITRGMRESAYKCQFNGSGLSIGYSVDKEHKFHIDPDGAKIVHLLFDMYDDGKTVAEILRHIKSCGIKTRRGKEFTHFGITRILRNRQYIGEYRWHDIVIPGGMPRIISDEQFERVNREMDKNKKAPARARGEDVSFLLTGKIFCGLCKGTMIGDSGTGKSGNKYYYYSCRAKKTRHTCKKKSVQKEWLEREVVRLTSSVVLQDDVIEYIADRVVDIQQKEREDKSIIDYLNNRLSETESAIRNIMKAIEAGIITETTGARLRELEAEREDLKIEIEREKIARPVISREQAIYFLERFKGGDVDDKEYQRQIIDMFVNKIFLYDDKIIITYNYNGDNNEITSEIVEKSAEEALSSASDRCSDKRTSRPPL

SEQ ID NO: 5625 - protein, 503 aa, Unknown
  Description of Unknown: Integrase B5626 sequence
  SM00857,G3DSA:1.10.10.2600,IPR036162,PF13408,IPR025827, G3DSA:3.40.50.1390,PS51737,IPR006119,IPR038109,PF07508, IPR011109,SSF53041,PF00239,PTHR30461,PS51736, Coil,cd00338
MYAMYLRKSRADDPHESIEETLRKHEKILFDLANKLNIKRSEIVQFKEVVSGENLKNRPEAQKMLKLVMENAFEGVLVVDSQRLARGDTLDQGTIIRAFSLNNTKIITPGKTINPGDEIDQDYFEFDLFMGRREYKMINKRMQRGRNISVQEGNYVGSIAPYGYKKTKIGKCHTLKINEDEIDCFNKMKELALNGLGCTSISNELNRLGFKPRKSKLWTTNAVRDILLNKTNLGLIKWNTRKSVKLYKNDEIIKSRPRNEEAEYYPGKHPAIITQVEYDAIVENIKNRARPVKKDKKLQNPLAGVVYCGKCGKAMIRRSYNNGYRDGLICTNTHCNNVSSVLEVVEKRVLESLEDTLKEYRQFIDNYHNDKTKTNNDSLIIKTEKEINKIDSQINKACEMLEVGAYSVELFKERKTLLDNQKKALIDKIEALKKEDTDFKLQNYINAVPILENAIKLYWNSSVEEKNKLLKQIVKRCDYLKSERGKRNGKGMYNFKLNIYLKI

SEQ ID NO: 5626 - protein, 503 aa, Unknown
  Description of Unknown: Integrase B5627 sequence
  PTHR30461:SF3,SM00857,G3DSA:1.10.10.2600,IPR036162,PF13408, PS51737,G3DSA:3.40.50.1390,IPR025827,IPR006119,IPR038109, PF07508,IPR011109,SSF53041,PF00239,PTHR30461, PS51736,Coil,cd00338
MQQAVIYARYSPGPNQTEQSIEGQVRECTKYAELHDLRIVGTYIDRKISGKTDNRREFQRMIDDSEKHIFDVIILYHTDRFARNRYDSAIYKHKLKENGVELRYATTDIPKGPEGIILESIMEGWAEYYSAELSRKIKRGMRESALKCHSTGAGRCLGYRTAEDKSLVIEPEGAKAVQTVFDMYIKGKSHADICRYLNDCGFRTAQGKLFNKNSVTHIIRNKRYIGVYTYDDITIEDGIPAIISKDTFHLAQLEAARRKTAKRPKEPKAEYLLSGKAFCGHCQKPLVGVSGTGKSGNKWYYYYCQESRAKRGCTKKPVKRDWLEREVVKRTIAEVLQPEVIQHIAKKCYDLQMEYRQDNSDVLFYELKLKDVRKAIKNTMHAIESGVKTKTLPARLQELENEEEALEAELAIAKASDFVITADQIEFLLTQFAEPWECESEEEYHRRIIKCFVHKVFLFDDKLLIYYNVSRDGKTREQSEAELLEEALGEGFDKRSSGSTKTI

SEQ ID NO: 5627 - protein, 503 aa, Unknown
  Description of Unknown: Integrase B5628 sequence
  PTHR30461:SF3,SM00857,G3DSA:1.10.10.2600,IPR036162,PS51737, G3DSA:3.40.50.1390,IPR006119,IPR038109,PF07508,IPR011109, SSF53041,PTHR30461,Coil,PS51736,cd00338, PF00239
MKTCIYLRKSRADEELEKKEDVDTLARHRSTLLEIAKKQDLNVVEIKEEIVSGDSIAKRPKMTQLLEEVKENMYDAVLCMDIDRLGRGDMQDQGKIINTFKESKTLIITPDKTYDLNNDLDEEMTEFKTFFARRELKVITKRMQRGRVKSIEEGNFIGSTAPLGYKFRYDEYGKRHMIIDEETAPAIKLIFDMYLNGEGSFKIMKKLNTLGYRTATGQEFTENAVRRIIKNRTYCGYVTWFEYKRKGTKTRKNKESDMLVCKGKHKPIISEEDWNKAQEIRKNHSIPATKNSRKLVNPLAGIVKCSQCKRTMVNTLSTYKSGNYANFIACKKCYGVGASKLEVVEGEILNALELKLQEIKKELNSTNLEVEKNESLNILEKTLTSLKNEEKELDKQKNKLHDLLERGVYDVDTFLERQQTLAGKKEEIQTAIKGTEKLINTERNNNIDYETLAKNIECALKDYKETDNIELKNKALKSVIKEVIYYKPKERLAQITLEVKFKI

SEQ ID NO: 5628 - protein, 503 aa, Unknown
  Description of Unknown: Integrase B5629 sequence
  SM00857,G3DSA:1.10.10.2600,IPR036162,PF13408,IPR025827, G3DSA:3.40.50.1390,PS51737,IPR006119,IPR038109,PF07508, IPR011109,SSF53041,PTHR30461,Coil,PS51736, cd00338,PF00239
MAKPEVSELAVVYARYSSHSQGEQSIEGQLSNARDYAAAHGYTIVHEYVDRAKSGRTDNRAEFQQMLKDTAKRQFSVIILWKVDRFGRNREEIAINKMKCRKNGVRVEYVAETIPDSPEGVILESVLEGFAEYYSLQLSQNIRRGRAESAEKCQSLGGNRPLGYKTGPDKKFIIDENTAPTVKMIFTMYADGKTVTEIVDKLNEMGLRTLRGGPFTKNSLHSILKNKKYIGIYEYQGREIKNGVPRIIEDDVFNKVQEMLKINKRAPAKTWSRADYILTDKLFCGKCGALMFGESGTSKTGAKHNYYICSNKKRFRSCDKKAMRQADIEDTVLNATHELLQDDELLDYIVDRTWEYYLAQDNSQEELRNLQRQLAQTDTAISNLIRAIEAGILTEETKKRMDELTQQKADLKASIADREIARGFHLQKSHIAFYLRSLRDADWSDKEAQKRLIQTFVNAVFVYDDHITLTYNFSGDKSTVTLRDMQRFEDGEEFGCRASRSTK

SEQ ID NO: 5629 - protein, 503 aa, Unknown
  Description of Unknown: Integrase B5630 sequence
  cd03768,PTHR30461:SF3,SM00857,G3DSA:1.10.10.2600,IPR036162, PF13408,PS51737,G3DSA:3.40.50.1390,IPR025827,IPR006119, IPR038109,PF07508,IPR011109,SSF53041,PTHR30461, PS51736,Coil,PF00239
MNAVYTRQSLDVKDSLSIESQLDACLNENGSAEYQHYNDKGYSGKNTERPAFRQLMADVRKGTIERVIVYRLDRLSRSLLDFAEMIDVFKKKDVEFVSCREKFDTSTPIGNAMLSIIMVFAQLERETIQMRVKDNYATRMERGAYDGVAPYGFDKAITKVGDKQVHTLDVNEVSDTVRSMFNEYAYTGDSLGAIAKKLNAQGIPSPGEAPWDGGKISRILSNPIYVRANADIYAYYNALGMTITNPIEDFLAVNGCITYGGWERSRRKFSQYDRLKLSIGLHPGLVDSDTFLRCQTKLKANRQICNAGKGKHSWLTGMVKCGYCGHSLKVMVDQKGRGIKRFVCSGNTNCGICSQFGSQRVDELEAGVEHELMQMVERRKYIEAKIEMERDTEESRIKIEQTKISEKLNRLVDALAEGEPSSASAVMKKIAELEEKKKLLEVELRSHRAKLPSQQELLQFRDTARLWPHMTIQQKHDVAKLLIDKIEVKCGEIQIYWKYNFEL

SEQ ID NO: 5630 - protein, 503 aa, Unknown
  Description of Unknown: Integrase B5631 sequence
  cd00338,SM00857,G3DSA:1.10.10.2600,IPR036162,PF13408, IPR025827,PS51737,G3DSA:3.40.50.1390,IPR006119,IPR038109, PF07508,IPR011109,SSF53041,PTHR30461,PS51736, Coil,PF00239
MYAMYLRKSRADDPHESIEDTLRKHEKILFDLANKLNIKKDEIVQFKEVVSGENLKNRPQAQKMLKLVMENAFEGVLVVDSQRLARGDTLDQGTIIRAFSLNNTKIITPGKTINPGDEIDQDYFEFDLFMGRREYKMINKRMQRGRNISVQEGNYVGSIAPYGYKKTKIGKCHTLKINEDEIDCFNKMKELALNGLGCTSIANELNRLGFKPRKSKLWTTNAVRDILLNKTNLGLIKWNTRKSVKLYKNDEIIKSRPRNEEAEYYPGKHPAIITQVEYDAIVENIKNRARPVKKDKKLQNPLAGIVYCGKCGKAMIRRSYNNGYRDGLICTNTHCNNVSSVLEVVEKRVLESLEDTLKEYRQFIDNYHNDKTKTNNDSLIIKTEKEINKIDSQINKACEMLEVGAYSVELFKERKTLLDNQKKALIDKIEALKKEDTDFKLQNYINAVPILENAIKLYWNSSVEEKNKLLKQIVKRCDYLKSERGKRNGKGMYNFKLNIYLKI

SEQ ID NO: 5631 - protein, 503 aa, Unknown
  Description of Unknown: Integrase B5632 sequence
  PTHR30461:SF3,SM00857,G3DSA:1.10.10.2600,IPR036162,PF13408, IPR025827,G3DSA:3.40.50.1390,PS51737,IPR006119,IPR038109, PF07508,SSF53041,IPR011109,PTHR30461,Coil, PS51736,cd00338,PF00239
MAKPEVSELAVVYARYSSHSQGEQSIEGQLSNARDYAAAHGYTIVHEYVDRAKSGRTDNRAEFQQMLKDTAKRQFSVIILWKVDRFGRNREEIAINKMKCRKNGVRVEYVAETIPDSPEGVILESVLEGFAEYYSLQLSQNIRRGRAESAEKCQSLGGNRPLGYKTGADKKFVIDENTAPTVKMIFTMYADGKTVTEIVDKLNELGLRTLRGGPFTKNSLHSILKNKKYIGIYEYQGREIKDGVPRIIEDDVFNKVQEMLKINKRAPAKTWSRADYILTDKLFCGKCGALMFGESGTSKTGVKHNYYICSNKKRFRSCDKKAVRQADIEDAVLNATHELLQDDELLDYIVDRTWEYYLAQDNSQEELRNLQRQLAQTDTAISNLIRAIEAGILTEETKKRMDELTQQKADLKASIADREIARGFHLQKSHIAFYLRSLRDADWSDKEAQKRLIQTFVNAVFVYDDHITLTYNFSGDKSTITLHDMQRFEDGEEFGCRASRSTR

SEQ ID NO: 5632 - protein, 503 aa, Unknown
  Description of Unknown: Integrase B5633 sequence
  PTHR30461:SF3,SM00857,G3DSA:1.10.10.2600,IPR036162,PF13408, PS51737,G3DSA:3.40.50.1390,IPR025827,IPR006119,IPR038109, PF07508,IPR011109,SSF53041,PF00239,PTHR30461, PS51736,Coil,cd00338
MQRAVIYARYSPGPNQTEQSIEGQVRECTKYAELHDLRIVGTYIDRKISGKTDNRREFQRMIDDSEKHIFDVIILYHTDRFARNRYDSAIYKHKLKENGVELRYATTDIPKGPEGIILESIMEGWAEYYSAELSRKIKRGMRESALKCHSTGAGRCLGYRTAEDKSLVIEPEGAKAVQTVFDMYIKGKSHADICRYLNDCGFRTAQGKLFNKNSVTHIIRNKRYIGVYTYDDITIEDGIPAIISKDTFHLAQLEAARRKTAKRPKEPKAEYLLSGKAFCGHCQKPLVGVSGTGKSGNKWYYYYCQESRAKRGCTKKPVKRDWLEREVVKRTVAEVLQPEVIQHITKKCYDLQMEYRQDNSDVLFYELKLKDVRKAIKNTMHAIESGVKTKTLPARLQELENEEEALEAELAIAKASDFVITADQIEFLLTQFTEPWECESEEEYHRRIIKCFVHKVFLFDDKLLIYYNVSRDGKTREQSEAELLEDALGEGFDKRSSGSTKTI

SEQ ID NO: 5633 - protein, 503 aa, Unknown
  Description of Unknown: Integrase B5634 sequence
  PTHR30461:SF3,SM00857,G3DSA:1.10.10.2600,IPR036162,PS51737, G3DSA:3.40.50.1390,IPR006119,IPR038109,PF07508,IPR011109, SSF53041,PF00239,PTHR30461,PS51736,Coil, cd00338
MANAVIYARYSSAGQREESIEDQVRVCRQAAERDGAAIARVYHDAATTGRTAEGRDGFLRMVADARRGLFDVVYVYKLDRFARNRYDAAVYKAKLRRCGVELRSATEAVGDGPESILLESMLEGLAEYYSVALAENVKRGQLGNAMKCKHNGVRTYGYDLGEDGYYHVNEEEAAVVRRMFRMYADGASMPEIAAAMPEARTKMGKPLSVGFISKSLRLEKYRGVYSYGQTRVEGGMPAIVDGELFEGVQGMLAARARRRRSTMEYLLSGKLFDAEGHRYQSSSGHGKSGRKYTYYRCPATGHQVPQHVLEDAVAKAAADVIAADDDAVEAIVAMVMAAQAEEMADSIAAADATRKRLEQNAREQSRVVDLAAKTGAVDAVAAKLGQLADEREELEASLAEMELSCAMVDEERAEFWVRRLMGRSDPLEAVRLFVDRVVLDREAGEMRVAFSFDGIKKNPHQAESDGGSRNCRLAGHSLLIANTMVHVTAWGFVAAVRLPMLGA

SEQ ID NO: 5634 - protein, 503 aa, Unknown
  Description of Unknown: Integrase B5635 sequence
  PTHR30461:SF3,SM00857,G3DSA:1.10.10.2600,IPR036162,PF13408, IPR025827,PS51737,G3DSA:3.40.50.1390,IPR006119,IPR038109, PF07508,IPR011109,SSF53041,PF00239,PTHR30461, PS51736,Coil,cd00338
MNNICIYLRKSRADEELEKTLGNGETLIKHRKALLKFAKQKNLNIVEIKEELVSADSIFHRPKMVELLQEVENNQYSGVLVMDIQRLGRGDTEDQGVITRIFKESHTKVITPNKTYDLDDDYDEDYFEFESFMGRKEYKMIKKRMQGGRIRSIEDGNYIATNPPLGYDIHFINRSRTLKINENEAEIIKTIFNMYINGNGASSISNYLNSLGYKTKIGNSFSPSSVLMIIKNPVYIGKVTWKKKEIKKSKDPNKVKDTRTRDKSEWLVADGKHEAIIDIDIWNRTQEILNNRYHIPYQLTNAPVNPFAGLITCGICGKKMTMRKLRGIDRLMCTYKCGNRSIRFEHVEKEVLKSLRSYLEEYKMEVNRKPKKNDIDLYVKQITLLNKELNTLNNQKLKLFDFLERGIYSEDVFLERSKNIESRITTLSNEIENLEKLIKKEEKTISQNSIVVFENIIDAYEKTNDISLKNRLLKQIVYKIEYFKRPDQRNNDFKVVISPKLLR

SEQ ID NO: 5635 - protein, 503 aa, Unknown
  Description of Unknown: Integrase B5636 sequence
  PTHR30461:SF3,SM00857,G3DSA:1.10.10.2600,IPR036162,PF13408, PS51737,G3DSA:3.40.50.1390,IPR025827,IPR006119,IPR038109, PF07508,IPR011109,SSF53041,PF00239,PTHR30461, PS51736,Coil,cd00338
MQQAVIYARYSPGPNQTEQSIEGQVRECTKYAELHDLRIVGTYIDRKISGKTDNRREFQRMIDDSEKHIFDVIILYHTDRFARNRYDSAIYKHKLKENGVELRYATTDIPKGPEGIILESIMEGWAEYYSAELSRKIKRGMRESALKCHSTGAGRCLGYRTAEDKSLVIEPEGAKAVQTVFDMYIKGKSHADICRYLNDCGFRTAQGKLFNKNSVTHIIRNKRYIGVYTYDDITIEDGIPAIISKDTFHLAQLEAARRKTAKRPKEPKAEYLLSGKAFCGHCQKPLVGVSGTGKSGNKWYYYYCQESRAKRGCTKKPVKRDWLEREVVKRTVAEVLQPEVIQHIAKKCYDLQMEYRQDNSDVLFYELKLKDVRKAIKNTMHAIESGVKTKTLPARLQELENEEEALEAELAIAKASDFVITADQIEFLLTQFAEPWECESEEEYHRRIIKCFVHKVFLFDDKLLIYYNVSRDGKTREQSEAELLEEALGEGFDKRSSGSTKTI

SEQ ID NO: 5636 - protein, 503 aa, Unknown
  Description of Unknown: Integrase B5637 sequence
  PTHR30461:SF3,cd00338,SM00857,G3DSA:1.10.10.2600,IPR036162, PF13408,IPR025827,G3DSA:3.40.50.1390,PS51737,IPR006119, IPR038109,PF07508,IPR011109,SSF53041,PTHR30461, Coil,PF00239
MKNGFTIINEYCDRAISGKTDNRPSFQRLIKDSEKGQFEAVIMYTLDRFARNRYDSAIYKAKLKKNGVRVFYAKQPMPDTPEGIILESVLEGYAEYYSENLSRNIKRGMKENALQCVANGGAGMALGYTVGEDRRYVIEPVGAKIVQEIFQMYADGMSATQIINYCNERGYKTSRGNAFNKNSLRTMLKNDKYIGVYRFMDVVVPDGVPPIIDKALFEKVQTMLSHNAKARARTKAKEDYLLTTKLFCGHCGSAMVGESGTSKSGKLHYYYKCIDRKRNRKCTKKVEKKEWIEELVTRFTVERVLTDENIELIATRAMEIIEKESADMSYVDGLREQVKDIKKKIRNLMTAIEQGIITSTTKERLEELETQKNEVEGQIAREEMKKPLLTKERIMYWLLSFKSGDVTNREYQRRVIDTLVNSVYVYDEGDKSRRIVFTFNISGQNTATLSCSDIACSAPPKSANPNVERCSDFAYSAPPKGANPNTLFFVKHCFGFVMIIEEV

SEQ ID NO: 5637 - protein, 503 aa, Unknown
  Description of Unknown: Integrase B5638 sequence
  PTHR30461:SF3,cd00338,SM00857,G3DSA:1.10.10.2600,IPR036162, PS51737,G3DSA:3.40.50.1390,IPR006119,IPR038109,PF07508, SSF53041,IPR011109,PTHR30461,PS51736,Coil, PF00239
MGGRAAIYARFSSHNQRGESIEIQVEKSRAYCAENDLRVVATYCDFAQTGTNTDRAEFQRMMADAKRGLFDFVVIYKVTRIMRNRDEMAMARIMLRRCRVEILYAGEDISDGSAGVLQLGMLEVLAEYESALDGERIRDGIQKNAERCMANGCVRYGWDIVDGRYVVNEEEAAAIRLGVRMVLSGKSVADVVRAWEPYRTKRGGKWRFQTVRRILMRRENGGEYRYAGVVVPGGMPAIVPMDDEERVIRMLEDSHRPRAKTEAWDFPLTGKLYDGRDGGLMTGTSGTGKSGRPYHYYRCRSCGRTVRRDVVEKRVADAVREALGSADSRERIARMLADAEEERADEKPLSETIKGELAKIETAFSNIWAAIESGIAPPGGKERIDALKQRQALLKDELRTAEALEAARLDYDRALFWLEGMAAAEVDDAQLLRTFVARVVLGGPDDDDGLRVAFTFDDSAGLGDNPSLPGAIGPGGEVFDRMNASSTISNRQVDIRIYLPFYF

SEQ ID NO: 5638 - protein, 503 aa, Unknown
  Description of Unknown: Integrase B5639 sequence
  PTHR30461:SF3,cd00338,SM00857,G3DSA:1.10.10.2600,IPR036162, PF13408,IPR025827,G3DSA:3.40.50.1390,PS51737,IPR006119, IPR038109,PF07508,IPR011109,SSF53041,PTHR30461, Coil,PF00239
MYNDSKGIYLMYLRKSRADEYNQDVENILKRHEKELQSLAKREFGELIPEKYIFREVVSGGTIKDRPLMKEILKMMESGIIAGVLVVDPQRLSRGDLLDQGHIINAFKYTNTLIITPYKTYDLNDTTGTDVKLLKMELNHGADYLDYYKMIQARGKLASVRAGNFIQPIPPFGYRKVRYGKVTTLEPIEDEAKIVRIIFQKYAEGKTICGVTNELNAEGYIPPSKQIWTKGSVKRILSNPVYDGKIRWGFTPNETVMEDGKLKKCRPERHDYLLFDGKHDAIVKHGLFMSVQERLSKNKSFTNDRSLKNPLYGIMYCKRCGRKISRQNVTESRGGHRYACPNKLCDVQSSRYDLVINAVIDAVQHAIDDFDITIYDCNTSDSSEKIRDLRQELTKLNNKEETLFELLETKVYSTSVFTQRHAELEKKRQEIIGEINTLSLVVPPESCNDKKMRFKDALLALKDESMPPKEKNRLLKNCIERIDYDIEGVRYHSKVKLDVYFKF

SEQ ID NO: 5639 - protein, 503 aa, Unknown
  Description of Unknown: Integrase B5640 sequence
  PTHR30461:SF3,SM00857,G3DSA:1.10.10.2600,IPR036162,PF13408, IPR025827,G3DSA:3.40.50.1390,PS51737,IPR006119,IPR038109, PF07508,SSF53041,IPR011109,PTHR30461,Coil, PS51736,cd00338,PF00239
MVKLRAAAYCRVSTDRAEQAGSLVSQRAFFREYIDNSDTMTLVKVFYDEGASGTTTAHRRGFNEMIRLALSGEIDIILTKEVSRFARNTVDTLKITRILRDKGIGVIFINDNIDTRDSDGELRLSIMATIAQEESRKISERVKWGQQRKMEQGVVFGRSCLGYDVTGGKIKINERSAATVKRIFTEYTVLHKGADSIANELNSENIPAVNGGKWSGAFIRKVLRNEKYAGDLEQKKTCTPDFLTHKKKCNKDGRIYIRDHHEPIIDRLLWEKTQEELKRRAPTAANRHSDRYLYSGKVYCGVCGNVMVSRIKKLKDGSIYHALRCSGRMNGTKCNNETLNVKAMKICIKRILDSIPCDKARIIKEVTERLSCHEKRPDNAETERRIKALTDKKQRAVDLMLDGLITADELLGQKALYDRQIAQLKATIKAESDVSANDGIIRRTRELLCFTDEFIWCFISRVIYSHGTLTVYFEGIEKPFSTAFRTYGRGETYSVVTGDVVRI

SEQ ID NO: 5640 - protein, 503 aa, Unknown
  Description of Unknown: Integrase B5641 sequence
  PTHR30461:SF3,SM00857,G3DSA:1.10.10.2600,IPR036162,PF13408, PS51737,G3DSA:3.40.50.1390,IPR025827,IPR006119,IPR038109, PF07508,IPR011109,SSF53041,PF00239,PTHR30461, PS51736,Coil,cd00338
MQRAVIYARYSPGPNQTEQSIEGQVRECTKYAELHDLRVVGTYIDRKISGKTDNRREFQRMIDDSEKHIFDVIILYHTDRFARNRYDSAIYKHKLKENGVELRYATTDIPKGPEGIILESIMEGWAEYYSAELSRKIKRGMRESALKCHSTGAGRCLGYRTAEDKSLVIEPEGAKAVQTVFDMYIKGKSHADICRYLNDCGFRTAQGKRFNKNSVTHIIRNKRYIGVYTYDDITIEDGIPAIISKDTFHLAQLEAARRKTAKRPKEPKAEYLLSGKAFCGHCQKPLVGVSGTGKSGNKWYYYYCQESRAKRNCTKKPVKRDWLEREVVKRTVAEVLQPEVIQHIAKKCHNLQMEYRQDNSDVLFYELKLKDVRKAIKNTMHAIESGVKTKTLPARLQELENEEEALEAELAIAKASDFVITADQIEFLLTQFAEPWECESEEEYHRRIIKCFVHKVFLFDDKLLIYYNVSRDGKTREQSEAELLEEALGEGFDKRSSGSTIEV

SEQ ID NO: 5641 - protein, 503 aa, Unknown
  Description of Unknown: Integrase B5642 sequence
  PTHR30461:SF3,cd00338,SM00857,G3DSA:1.10.10.2600,IPR036162, PF13408,PS51737,G3DSA:3.40.50.1390,IPR025827,IPR006119, IPR038109,PF07508,IPR011109,SSF53041,PTHR30461, PS51736,Coil,PF00239
MLRAALYARFSSENQREESILAQFRDSTEYCKKHNYAIVAKYADEAKSGTTTIGREQYKLMLKDAQKGKFDVVVFHKIDRNARNELDYYITKHKLEEAGVKYAYSRQDIDSTSPEGQMMESMLVGMAAYYSRNLSNEIKKGLRENAIQGKCTGGRPPYGFSVDADKKLIINEDEAPAVRMIFDLYAAGVHYGVIRKRLFNAGYRNRAGKEFTLASIYEILRNRKYVGDLYLGKTLFHKGKRNTHQTSANVQYFENVIPAIVSRDIFEEVQVKLDQNKRRSGAGKAKAIYALSGLIHCGQCGSAMVAHSTKNSRGIKNYYYRCPKGRLIGEEKCPQKFINRDDIESAVYQLIRKLFTAPDAHNQIKRIIAKNNMTVKVPDYTDQVKRLKKQESDASKRLDKLYDLYMTDRDDEFTSAKMAQIKEEILRLRTQIKEAEDRQAIAQSTTFDIDKIIDTFQKQLKQKQSPEFIKTLFELAVKNVTVYPDKIKVVLLVTQERFELPTP

SEQ ID NO: 5642 - protein, 503 aa, Unknown
  Description of Unknown: Integrase B5643 sequence
  cd03768,PTHR30461:SF3,SM00857,IPR036162,G3DSA:3.40.50.1390, IPR006119,PF07508,SSF53041,IPR011109,PTHR30461, PS51736,Coil,PF00239
MIKIRVAIYCRKSVFVEGSVSIETQINLCKDYINKKYSNSTFEIFEDEGFSGGNTNRPAFQKMLKLIELNQLDIVICYKIDRIARNTLDFLNTLEKFKNKNVELISVSEGFDPNTQIGKMMLTLLASFAEMERSNIQQRVSDNMLSIAKKGRWTGGSAPTGFMHGENGGLEISNGELILDIFDMKYHNTLNSKIITHAEEKHNHKFTGVTLANAFRKPIYVKSSESVSLYLKHKGYTVLGEENLTNSYLTYTDKDNKYAVVSNIPGLINPEVWLDINKRMDENITRTGNRFSEKYWLTKTLHCKCCGKTYCGHTKNTKTRYYKKDGTEKIYESTTDYYMCRDMLRGKLKTCTNTKRVKKDYLEVRVSELIYSLKDIDNFNAAYNVNSVDNKKLIASLERKIKSIDKNINNLTDKLSLLSNEASIIFINKIETLVKEKSNIKNEILSLEMHELENINNNHDFVFYNISNFNDNMTVDEKRACCMNIFKEITYDPKEDTFEFSFK

SEQ ID NO: 5643 - protein, 503 aa, Unknown
  Description of Unknown: Integrase B5644 sequence
  SM00857,G3DSA:1.10.10.2600,IPR036162,PS51737, G3DSA:3.40.50.1390,IPR006119,IPR038109,PF07508, IPR011109,SSF53041,PF00239,PTHR30461, PS51736,Coil,cd00338
MDRVCIYLRKSRADEELEKTIGKNETLSKHRKALLKFAKEKNLNIVGIKEEVVSGENLLFRPQMLELLKEVENNQYSGVLVMDIQRLGRGDMKDQGIILETFKNSKTKIITPQKTYDLNNDFDEEYTEFEAFMSRKELKMINRRMQGGRIRSVEDGNYIATNAPYGYDISYIGRCRTLKVNNSEASIVKMIFNLYNSGLGASAICNKLNELGFRTKFGNKFTPTSVLFILKNQIYIGKITWKKKEIKKSKIIGKVKDTKTRNVEEWIISEGKHEPLIDLDTWNKTKEILNKRYHIPYQLTNAPVNPLAGLLTCGICGKKMTMRKLRGITRLLCTNKCGNKSARFDFIEKRLLDALEIALQEYKFNIESNPPQTTDDSYKVHLSLLKKENLTLNNQKLKLFDLLEREIYTEDLFLERSKAIDDRINILEKEIQELEKFLNKANDISPKEIVVLFENVIEAYKRSNNITNKNELLKSVLDKIVYKKLPEQRNDEFELIIYSKLLT

SEQ ID NO: 5644 - protein, 503 aa, Unknown
  Description of Unknown: Integrase B5645 sequence
  PTHR30461:SF3,cd00338,SM00857,G3DSA:1.10.10.2600,IPR036162, PS51737,G3DSA:3.40.50.1390,IPR006119,IPR038109,PF07508, SSF53041,IPR011109,PTHR30461,PS51736,Coil, PF00239
MGGRAAIYARFSSHNQRGESIEIQVEKSRAYCEANDLRVVATYCDFAQTGTNTDRAEFQRMMADAKRGLFDFVVIYKVTRIMRNRDEMALARIMLRRCRVEILYAGEDISGGSSGVLQLGMLEVLAEYESALDGERIRDGIQKNAERCMANGCVRYGWDIVDGRYVVNEEEAAAIRLGVRMVLSGKSVADVVRAWEPYRTKRGGKWRFQTVRRILMRRENGGEYRYAGVVVPGGMPAIVPMDDEERVIRMLEDSHRPRAKTEAWDFPLTGKLYDGRDGGLMTGTSGTGKSGRPYHYYRCRSCGRTVRRDAVEKRVADAVREALGSADSRERIARMLADAEEERADEKPLSETIKGELAKIETAFSNIWTAIESGIAPPGGKERIDALKQRQALLKDELRTAEALEAARLDYDRALFWLEGMAAAEVDDAQLLRTFVARVVLGGPDDDDGLRVAFTFDDSAGLGDNPSLPGSIGPGGEVFDRMNASSTNSYRQVDTYIYLPFYF

SEQ ID NO: 5645 - protein, 503 aa, Unknown
  Description of Unknown: Integrase B5646 sequence
  PTHR30461:SF3,cd00338,SM00857,G3DSA:1.10.10.2600,IPR036162, PF13408,PS51737,G3DSA:3.40.50.1390,IPR025827,IPR006119, IPR038109,PF07508,IPR011109,SSF53041,PTHR30461, PS51736,Coil,PF00239
MLRAALYARFSSENQREESILAQFRDSTEYCKKHNYAIVAKYADEAKSGTTTIGREQYKLMLKDAQKGKFDVVVFHKIDRNARNELDYYITKHKLEEAGVKYAYSRQDIDSTSPEGQMMESMLVGMAAYYSRNLSNEIKKGLRENAIQGKCTGGRPPYGFSIDANKKLIINENEAPAVRMIFDWYSAGVHYGVIRKRLFNAGYRNRAGKEFTIASIYEILRNRKYVGDLYLGKTLFRKGKRNTHQTSANVQYFENVIPAIVSRDIFEEVQVKLDQNKRRSGAGKAKAIYALSGLIYCGKCGSAMVAHSTKNSRGIKNYYYRCPKGRLVGDEKCPQKFINRDGIEETVYQLIRRLFTAPDAHDQMKRIIAKNNMSVKVPDYTEQVKRLKKQESDASKRLDKLYDLYMTDREDEFTSAKMAQIKEEILRLRTQIKEAEDRQAIAQSTTFDIDKIIDTFQKQLKQKQSPEFIKTLFELAVKNVTVYPDKIKVVLLVTQERFELPTP

SEQ ID NO: 5646 - protein, 503 aa, Unknown
  Description of Unknown: Integrase B5647 sequence
  SM00857,G3DSA:1.10.10.2600,IPR036162,PF13408,PS51737, IPR025827,G3DSA:3.40.50.1390,IPR006119,IPR038109,PF07508, IPR011109,SSF53041,PTHR30461,Coil,PS51736, cd00338,PF00239
MAKPEVSELAVVYARYSSHSQGEQSIEGQLSNARDYAAAHGYTIVHEYVDRAKSGRTDNRAEFQQMLKDTAKRQFSVIILWKVDRFGRNREEIAINKMKCRKNGVRVEYVAETIPDSPEGVILESVLEGFAEYYSLQLSQNIRRGRAESAEKCQSLGGNRPLGYKTGPDKKFIIDENTAPTVKMIFTMYADGKTVTEIVDKLNEMGLRTLRGGPFTKNSLHSILKNKKYIGVYEYQGREIKDGVPRIIEDDVFNKVQEMLKINKRAPAKTWSRADYILTDKLFCGKCGALMFGESGTSKTGAKHNYYICSNKKRFRSCDKKAVRQADIEDTVLNATHELLQDDELLDYIVDRTWEYYLAQDNSQEELRNLQRQLAQTDTAISNLIRAIEAGILTEETKKRMDELTQQKADLKASIADREIARGFHLQKSHIAFYLRSLRDADWSDKEAQKRLIQTFVNAVFVYDDHITLTYNFSGDKSTITLRDMQRFEDGEEFGCRASRSTR

SEQ ID NO: 5647 - protein, 503 aa, Unknown
  Description of Unknown: Integrase B5648 sequence
  cd00338,SM00857,G3DSA:1.10.10.2600,IPR036162,PF13408, IPR025827,G3DSA:3.40.50.1390,PS51737,IPR006119,IPR038109, PF07508,SSF53041,IPR011109,PTHR30461,PS51736, Coil,PF00239
MSTDSSDQLESYKAQVAYYTDAIAKNPKWRFAGVYADEGLSGTQAAKRDDFLRMIKDCEKGKIDYIITKSVARFARNTVDALKYVRKLKALGIGVYFEEQCLDSLKSESELALGIYSVLAQAESENISANVRWGIQRRMQSGTFKFRYNLIGYRKGEDGQPEIVPEEAKYVKDVFDMYLDGNSVDQIKEYLDSAPIKTATGNDIWSRNAIRNILTNERYVGDMLLQKTYIENCITKRARKNRGEMPKYLVSNNHPAIIDRDTFKQVQAEMAKRRSRPRVSDKTITAKGKFSGKYPFSDLLVCDSCGNRYRRCMWISGGKKKIVWRCITRIEHGGKECESISVGDELIHKAVYRSINRYIQNNSGALDIVLSELSKQFGGNDYTDDLFNIERSINELNKQMEDAAMIEVTTQGNKERIREEIIELSQRIVALRNEKSIIEEKKATAKTRNEELGRFSEELSLYNADCSEITDNKLRRIIQEVRIKKDHTIIIELKNGMLLEEAL

SEQ ID NO: 5648 - protein, 503 aa, Unknown
  Description of Unknown: Integrase B5649 sequence
  PTHR30461:SF3,SM00857,G3DSA:1.10.10.2600,IPR036162,PF13408, IPR025827,PS51737,G3DSA:3.40.50.1390,IPR006119,IPR038109, PF07508,SSF53041,IPR011109,PTHR30461,Coil, PS51736,cd00338,PF00239
MIGAIYARYSNGPNQTDQSIEGQVADCRAYAERNGIQIVEIYADRHISGKSIVGRNEFQRMLHDAEQHRFECVIVWKIDRFGRDRQDIAISKMKLKKAGVRLMYAEEAVPEGPEGIILESVLEGLAEYYSADLRQKILRGMRETAKKGQYCGQPLPIGYAVDEDRHIIIDEEKAAVVREAFRMHIAGAQTKELIELFRKNGITGRRGRPISQAVIYRMLRNEKYLGRFEIQGVEIPAEPIIDQATFDEAARHFKTSRNNAAGRAKVDYLLSCKCFCGYCGAMLNAESGTSKTGKVYHYYKCGAKKRGAKCELKPIQRDHFEDRVIEATVQDMLTDDMIGKLTTRILEIQEQDDAADPAAAYRKQLDSNRKKQRNILDAIEEGTGAKGLAGRLAQLEAEEEELVLEIERAEIKKPRLTEEVVGAWLRSFRDGDVDDAAFRQRLVDTFIARIEVRNGQAMIFYNIKENGPHSKVRVRSEWWSPRSRTRTREPFVADGYIILPIAI

SEQ ID NO: 5649 - protein, 502 aa, Unknown
  Description of Unknown: Integrase B5650 sequence
  cd03768,PTHR30461:SF3,SM00857,G3DSA:1.10.10.2600,IPR036162, PF13408,PS51737,G3DSA:3.40.50.1390,IPR025827,IPR006119, IPR038109,PF07508,IPR011109,SSF53041,PTHR30461, PS51736,PF00239
MMYDALYGRQSIEKKDSISVESQLEYCKYETHGAPYIEYADRGYSGKNTNRPDFERMMTDIKDGKIKRVIVYKLDRISRSILDFANMMETFQDYSVEFVSSTEKFDTSTPIGRAMLNICIVFAQLERETIQKRVTDAYYARCKHGFYMGGRIPYGFRLVDTVIDNVRTSMYEEIPEESEQLKLIYSMYADPSYSLGEIMRYLNNHNIKHLRGKNWNTARLSEMLRNPIYVEADIDVYNFYKSQGANIYNPATDFTGYNACYLYKGTASKTRKQCDLTDKEIVLAPHKGFIPSKTWIACRLRCLNNRQSTRTCKAKNSWLVGKVKCGNCGYALVVRKSKTKHGRYFVCSCVGNSGACKGTGCTIYADVLENYMIDAIRCKLSEFERLSNGNDNGQTPKESKIKIRLTQIDEEINDLLSKVGSANAILMKYINDKISELDTERQTLHKEIVSLTCSQTENKMGQITDHVTKWDNISFEDKQAVVDALIKVIKVANGNIEIVWKI

SEQ ID NO: 5650 - protein, 502 aa, Unknown
  Description of Unknown: Integrase B5651 sequence
  PTHR30461:SF3,SM00857,G3DSA:1.10.10.2600,IPR036162,PF13408, IPR025827,G3DSA:3.40.50.1390,PS51737,IPR006119,IPR038109, PF07508,SSF53041,IPR011109,PTHR30461,PS51736, cd00338,PF00239
MKIAAYCRVSTDKDEQLDSLEHQKQFFSEYAEKNGHRLIRLYADEGISGTSLKKRNEFLRLMKDAKLGLFEAVVVKDISRFARNTVDFLQSIRELRALGINTLFITANMESLGESEFVLTIFGAMAQEESANLSKRVKFGKKINAQKGRVPQRIFGYDRIDNFTLKINYQEAQTVREIYRLYLKEGLGCRTISLRLNQQQRKTKFHCDWNPRGVRRVLTNPIYCGHYVNHKYEIEDYLTGKQIHIPQEEHFHHERPEWAIITPEVFAKAQKQLEERRTKYDCGEPFKGARYSTKHLFSTLIKCEHCGRSFCRKDYTYVKTRVYWKCTTNDQFTAERCDNTIKLEEADLLAEIRAYFGALIHDKDSFIAGILAAVERQAGGEKNPYDKARIERRQGELLAKKERYQEMYANDVMTMAELKEKTALIAEELEELDYDLRQYEHSLEVRQNAGHFVEQYMQEIERFLELETVTNMDLRRIIDHISVNKDGNVRIILKKLDDLDIL

SEQ ID NO: 5651 - protein, 502 aa, Unknown
  Description of Unknown: Integrase B5652 sequence
  cd03768,PTHR30461:SF3,SM00857,IPR036162,PF13408, IPR025827,G3DSA:3.40.50.1390,PS51737,IPR006119,PF07508, IPR011109,SSF53041,PTHR30461,PS51736,Coil, PF00239
MIAIYARQSVDKKDSISIESQIDFCKKEVEEEDYKVYKDKGYSGKNIDRPAFKEMMRDIKKNAITKVVAYKLDRISRSILDFNNLLEEFKKHNIEFVSVTEKFDTSTPMGKAMVNIVVTFAQLEREQIAQRVKDNYYERGKTGRFLGGKVPLGYTNTKVEIQGKKVPTLVINKEEALLIEKMFNMYAYEDISLSKISDYLNEQGLKSAKGTAWDSGKISRIIKNALYVKADVNVYNYYKNLGVEINNPIEDFIGTNGCFVYGKRDRNENRYTNLKDHKLSIGLHEGIVDADTFLKCQYKLSQNQQITRSGSGKHTWLTGLTKCGYCGYSMSAVVNSSGKYFNCRGKTNMKICNGHSRTIKVEEIENIVETEILNRLEELSKVKIKMENSNSKKIKSIETEIKILDENIEKLLDKILESNDITIKYINKKVEELDNKKTELRNELNRITLEGSNNSSLEEVLKDVDKIKNLNFDKKKSIAKSLIDKILIRDDEIDIQWKVFNQ

SEQ ID NO: 5652 - protein, 502 aa, Unknown
  Description of Unknown: Integrase B5653 sequence
  cd03768,PTHR30461:SF3,SM00857,IPR036162,PF13408, IPR025827,G3DSA:3.40.50.1390,IPR006119,SSF53041,PTHR30461, PS51736,Coil,PF00239
MKKVAIYSRKSVYIEGSVSIETQINMCKEYILKKFTNSTFEVFEDEGFSGGNTNRPAFQKLLRLAELKQIDIVVCYKIDRIARNTLDFLNILEMFKENNVELISITEGFDPNTQMGKVMLTLLASFAEMERSNIQQRVKDNLLSIAKKGKWTGGSPPTGFKNNPNGGIEWDNKDMILDVFNMKYEKSKNTDLIQFIQHKYNHKFLGGTLATTLRKPIYVKSSSSVSLYLKSKGYIVQGTEDNIHSYLTYTDKDTKYAIVSNIVGLIEPSIWISVNKDMDKNISREGNRFSEKFWLTKTIRCKCCGQTYCGQTKTTKTKYYNKKGEEKIYVSTYSYYSCRDAVRGKLKTCTNTKRVKQDVLEAKVSALIYSLKDEKIFNSSYSINKVDNSFKIASLNKKVIEIDKTISNLTDKIALLSNDASLIFIDKIENLIKEKSSIKSNIVELELQELNSKIKTDKALIYNNIKAFNNNLSVDDKRKITMSIFKKIVYDPETNDLDVTFM

SEQ ID NO: 5653 - protein, 502 aa, Unknown
  Description of Unknown: Integrase B5654 sequence
  PTHR30461:SF3,IPR036162,PS51737,IPR011109, PTHR30461,PS00397,PF00239,G3DSA:1.10.10.2600, IPR006119,SSF53041,cd00338,SM00857,IPR025827,IPR038109, PS51736,IPR006118,PF13408,G3DSA:3.40.50.1390,PF07508,Coil
MKKKILMAALYIRVSTEKQEELSPDSQKRLLLDYAKSHDMIVSEKHIYIENGISGRKADKRPKFQQMIATAKSSDHPFDVILLWKFSRFARNQEESIVYKSMLRNKYSVDVVSISEPLVDGPFGSLIERIIEWMDEFYSIRLSGDVTRGMTQKALNGGYQCRPPLGYRIPYHKATPEIVPDEAKIVRLIFEKYVYENMSIFAIVKHLNSLGHKTSHGKPFEKRSIEYILQNPGYAGDIRWNRTINETNEIRDPSEWIIRPGHHPAIIEKELFEKAQERYHSEYKRRNAKPSEISKHWLSGLLKCSKCGRSLSSCVVHRKTLPDSFYFQCYGYLKGKCNNDCYVREEEIGPTVIKALEEALRKGTVSYTIKKSSQNQSRGSELEVLYKNLDRLSFKEERAKEAYIDGIDTKEEYKANKLRLQKERQELQEMIDTIEHNSSDTVSNDSRMLSSISNVLDIVQSDKFTMQEKNAALKSIVDQITYDKKINHIDVDYYLIETPEAL

SEQ ID NO: 5654 - protein, 502 aa, Unknown
  Description of Unknown: Integrase B5655 sequence
  PTHR30461:SF3,IPR036162,PS51737,IPR011109,PTHR30461, PS00397,PF00239,G3DSA:1.10.10.2600,IPR006119,SSF53041, cd00338,SM00857,IPR025827,IPR038109,PS51736, IPR006118,PF13408,G3DSA:3.40.50.1390,PF07508,Coil
MTDNTSMRTGALYIRVSTGKQEELSPDAQRRLLLDYASKNNIIISNQYIYEEDGISGRKADKRPQFQDMIAHAKSKEHPFDVILVWKYSRFARNQEESIVYKSMLRKDHVEVISVSEPLVDGPFGSLIERIIEWMDEYYSIRLSGEVVRGMTENALRGRNQARPPLGYKVPHAKETPVIVPEEALIIHTIFDMYTEDGASMFAIAKHLNDLGYLTSHKKPFERRSIGYILSNPTYIGKSVWNRHSNDNKALKDESEWIIRDGSHEPIISTEQYEKAQQRIKAEYTPKYAKPPELHRHWLSGMVKCHTCGRSLSTSIHKDKRYGRTYTNFQCYGYLKGKCNVSHQISARKLEPAVLEGLQEIMEGVRPLQFKIIKSEEPTAQSAHEILTERLHDIEKKEERIRQAYRDGIDTIEEYRDNKAILFKERAEIESRLEELTPAPVPSESDTRELMRNRLKNVYEILSSEDVSTVTKSNALKSIVDKIVYDSEKKELSIYLYCSDTL

SEQ ID NO: 5655 - protein, 502 aa, Unknown
  Description of Unknown: Integrase B5656 sequence
  PTHR30461:SF3,IPR036162,PS51737,IPR011109,PTHR30461, PF00239,PS00430,G3DSA:1.10.10.2600,IPR006119,SSF53041, cd00338,SM00857,IPR025827,IPR038109,IPR010916, PS51736,PF13408,G3DSA:3.40.50.1390,PF07508,Coil
MEKYAMYLRKSRADQDKTLEDTLRRHKETLIAYAISHDLSVQDVYEEVVSGESLYARPQMLKLLEAVSCRAYTGILCMDIDRLGRGGMSDQGVIIETLKQNDTLIVTPQRTYDLNDETDESNVEFSAFFARYEYKQITKRMKAGTRKSVQEGCYLACAPYGYRNTKVNKHSTLEIYEPEAKYVRMMFDLYNNGYGCQTIADRLNAMGVSPHRTDKWGRTSVMSILKNYAYNGKVVWDKITHIKKGTRGNAKHIRIYNPPEKWTITEGLHDAIISDEQWETTQGIIKDRTHPPSFTGDIKNALSGLVYCGNCGSLMSRTPERHRNGKTESARYLCLKRSCIAGTKYELLEKAVINSLQEKLKKYDSLKQTNRIQENNFEEQLKSIAGSISVIKKQQSKLHELLEREIYSVTTFLDRQQTLQLQLDTLNSEYAAVKKQADSIKIVDIEQTKQNISDVLNCYWQADISTRNRLLKTVIEKVVYFKDKKTKPADFTLEIKLKQAFL

SEQ ID NO: 5656 - protein, 502 aa, Unknown
  Description of Unknown: Integrase B5657 sequence
  SM00857,G3DSA:1.10.10.2600,IPR036162,PS51737,G3DSA:3.40.50.1390, IPR006119,IPR038109,PF07508,SSF53041,IPR011109, PF00239,PTHR30461,PS51736,Coil,cd00338
MKTCIYLRKSRADEELEKKEDIDTLARHRSTLLEVAKKQDLNVVEIKEEIVSGDSIAKRPKMTQLLEEVKENMYDAVLCMDIDRLGRGDMQDQGKIINTFKESKTLIITPDKTYDLNNDLDEEMTEFKTFFARRELKVITKRMQRGRVKSIEEGNFIGSTAPLGYKFKYDEYGKRHMIIDEETAPAIKLIFDMYLNGEGAYKIMNHLNALGYKTTAGKCFTECAVRRIIRNRTYCGYVTWFEYKRKGTKTRKNKGNDMIVCKGKHKPIISEDDWEKAQEIRINNQIPAKKSDRKLINPLAGIVKCSNCRHTMVASYNTGKEGPVLYLRCKQCYEVGSSRLDLIEEEIINILKIKLKEIKDELDNTEIEDRENKQLEMLQNTLTTLDKEKTELDKQKDRLHDLLERGIYDVDTFLERQQTLANKKEEIEIAIKGTKKLLEVEISKDIDYKELAQNIECAIESYENTDNIELKNKALKTVIKEILYYKEKKRFAQFTLEVKFKI

SEQ ID NO: 5657 - protein, 502 aa, Unknown
  Description of Unknown: Integrase B5658 sequence
  cd03768,PTHR30461:SF3,SM00857,IPR036162, PF13408,IPR025827,G3DSA:3.40.50.1390,IPR006119, SSF53041,PTHR30461,PS51736,Coil, PF00239
MKRIAIYSRKSVYIEGSISIETQINMCKEYMLKKFKDCEFKIFEDEGFSGGNTNRPAFKKLLRLAELKQIDIVVCYKIDRIARNTLDFLNILEMFKENNVELISITEGFDPNTQMGKVMLTLLASFAEMERSNIQQRVKDNLLSIAKKGKWTGGSPPTGFKNNPNGGIEWDNKDMILDVFNMKYEKSKNTDLIQFIQHKYNHKFLGGTLATTLRKPIYVKSSSSVSLYLKSKGYIVQGTEDNIHSYLTYTDKDTKYAIVSNIVGLVEPSIWISVNKDMDKNISREGNRFSEKFWLTKTIRCKCCGQTYCGQTKTTKTKYYNKKGEEKIYVSTYSYYSCRDAVRGKLKTCNNTKRIKQDVLEAKVSALIYSLKDEKIFNSSYSINKVDNSFKIASLNKKVIEIDKTISNLTDKIALLSNDASLIFIDKIENLVKEKSSIKSNIVELELQELNSKIKTDKALIYNNIKAFNNNLSVDDKRKITMSIFKKIVYDPETTDLDVTFM

SEQ ID NO: 5658 - protein, 502 aa, Unknown
  Description of Unknown: Integrase B5659 sequence
  PTHR30461:SF3,IPR036162,PS51737,IPR011109,PTHR30461, PS00397,PF00239,G3DSA:1.10.10.2600,IPR006119,SSF53041, cd00338,SM00857,IPR025827,IPR038109,PS51736, IPR006118,PF13408,G3DSA:3.40.50.1390,PF07508,Coil
MKKKILMAALYIRVSTEKQEELSPDSQKRLLLDYAKSHDMIVSEKHIYIENGISGRKADKRPKFQQMIATAKSSDHPFDVILLWKFSRFARNQEESIVYKSMLRNKYSVDVVSISEPLVDGPFGSLIERIIEWMDEFYSIRLSGDVTRGMTQKALNGGYQCRPPLGYRIPYHKATPEIVPDEAKIVRLIFEKYVYENMSIFAIVKHLNSLGHKTSHGKPFEKRSIEYILQNPGYAGDIRWNRTINETNEIRDPSEWIIRPGHHPAIIEKELFEKAQERYHSEYKRRNAKPSEISKHWLSGLLKCSKCGRSLSSCVVHRKTLPDSFYFQCYGYLKGKCNNDCYVREEEIGPTVIKALEEALRKGTVSYTIKKSYQNQSRGGELEVLYKNLDRLSFKEERAKEAYMDGIDTKEEYKANKLRLQKERQELQEMIDTIEHNSSDTVSNDSRMLISISNVLDIVQSDKFTMQEKNAALKSIVDQITYDKKTNHIDVDYYLIETPEAL

SEQ ID NO: 5659 - protein, 502 aa, Unknown
  Description of Unknown: Integrase B5660 sequence
  cd03768,SM00857,IPR036162,PF13408,IPR025827, G3DSA:3.40.50.1390,IPR006119,SSF53041,PTHR30461,PS51736, Coil,PF00239
MKKVAIYSRKSVLVEGSVSIETQINMCKDYINNKFPNAKFRVFEDEGFSGGNTNRPAFQKMLRMAQLNEIDIVVCYKVDRIARNTLDFLKILELFKENNVELISISEGFDPNTQMGKVMLTLLASFAEMERTNIQQRVKDNLLSIAKKGKWTGGSPPTGFKNGLNGGLEWNKQDMILDVFNMKYEKEKNSNIIKYIKEKYNHNFLGGTLATTLRKPIYVKSSPSVSLYLKTKGYIVQGDEDNIHSYLTYTDKETKYAIVSDIVGLIEPSVWISINKDMDKNISREGNRFSEKFWLTKTVRCKYCGQTFCGQTKTTKTKHYNKHGEEKIYISTYSYYSCRDAVRGKLKTCTNTKRVKQDILESKVSELIHLLKDKKTFNSSYFSNKIDNSSKIDTIKKQIKSIDKTINNLTDKIALLSNEASLIFISKLEELVKEKSILKDNLLQLELQELNSNTKKDSSLVYNNILTFNDDLSVDDKRKIAMSLFKEIIYDPETDSLDVTFM

SEQ ID NO: 5660 - protein, 502 aa, Unknown
  Description of Unknown: Integrase B5661 sequence
  cd00338,SM00857,G3DSA:1.10.10.2600,IPR036162, PS51737,G3DSA:3.40.50.1390,IPR006119,IPR038109, PF07508,IPR011109,SSF53041,PTHR30461, PS51736,Coil,PF00239
MKTCIYLRKSRADEELEKKEDVDTLARHRSTLLEVAKNQDLNVIEIKEEIKTGDSIAKRPKMIKLLEEIEKNMYDAVLCMDIDRLGRGDMQDQGRIINTFKKTNTLIITPDKTYNLNNDLDEEMTEFKTFFARRELKVITKRMQRGRVKSIEEGNFIGSTAPLGYKFRYDEYGKRHMIIDEETAPAIKLIFDMYLNGEGSFRIMKRLNTLGYKTTAGKDFTECAVRRIIRNQTYCGYVTWFEYRRKGTKTKKNKESDVLIYKGKHKPIISEEDWNKAQEIRKGNQIPSKKNDRKLVNPLAGIVKCSYCKHTMVASYNTVKEGPVLYLRCKNCYEVGSSRLDLVEEEILNTLKVKLKEIKDELNNTEIEDKENKQLEMLQNTLISLDREKTELDKQKNKLHDLLERGIYDVDTFLERQQTLAAKKEEIETAIKGTKKLLEAEVSKDIDYKELAKNIECAIGDYENTDNIELKNKALKTVIKEILYYKEKKRFAQFTLEVKFKI

SEQ ID NO: 5661 - protein, 502 aa, Unknown
  Description of Unknown: Integrase B5662 sequence
  PTHR30461:SF3,SM00857,G3DSA:1.10.10.2600,IPR036162,PF13408, IPR025827,G3DSA:3.40.50.1390,PS51737,IPR006119,IPR038109, PF07508,SSF53041,IPR011109,PTHR30461,Coil, PS51736,cd00338,PF00239
MNVVIYARFSSHSQTEQSIKGQLKVCYEYAESHNYTVVGEYIDRAQSGKFDNRAEFQRMIADSDKHTFDGILVYQLDRFARNRYDSAIYKAKLKKNGVRVLSAKENITDDASGILIEGVLESMAEYYSVELAQKIHRGMSINGEKCLSNGSNPGLGFKVSKADRTFYVDEEEAAIVREIFERYASCETKAEIAKDLQRRKVKTSIGNEFTYNSLSRLLKNKRYIGIYLYKGVETPGGMPRILDDDLFYRVQSLMYKNKSAPARTRGENEYLLTTKLFCGHCKEMMIGYGGTGKTGKQYHYYMCKKARKKKCDNKIIGKQYIEDRVVSECLKMLTYDKIRYIAKRVAEECNKSPDNISVREIKKAIKEVDAAIENLWKGIEQGQSVDMLTERLHKRQAEKEELETQLAIENNKKICLSEAQILAFLDYVCEMPLDDFNKRRAIINIFVQSIYLYDDHFTLIINASKKPLSIDNIPLDDIEEAFEGENTETEGCSSLMTPAPPL

SEQ ID NO: 5662 - protein, 502 aa, Unknown
  Description of Unknown: Integrase B5663 sequence
  PTHR30461:SF3,IPR036162,PS51737,IPR011109,PTHR30461, PS00397,PF00239,G3DSA:1.10.10.2600,IPR006119,SSF53041, cd00338,SM00857,IPR025827,IPR038109,PS51736, IPR006118,PF13408,G3DSA:3.40.50.1390,PF07508,Coil
MTDNTSMRTGALYIRVSTGKQEELSPDAQRRLLLDYASKNNIIISNQYIYEEDGISGRKADKRPQFQDMIAHAKSKEHPFDVILVWKYSRFARNQEESIVYKSMLRKDHVEVISVSEPLVDGPFGSLIERIIEWMDEYYSIRLSGEVVRGMTENALRGRNQARPPLGYKVPHAKETPVIVPEEALIIHTIFDMYTEDGASMFAIAKHLNDLGYLTSHKKPFERRSIGYILSNPTYIGKSVWNRHSNDNKALKDESEWIIRDGSHEPIISTEQYEKAQQRIKAEYTPKYAKPPELHRHWLSGMVKCHTCGRSLSTSIHKDKRYGRTYTNFQCYGYLKGKCNVSHQISARKLEPAVLEGLQEIMEGVRPLQFKIIKSEEPATQSAHEILTERLHDIEKKEERIRQAYRDGIDTIEEYRDNKAILFKERTEIESRLAELTPAPVPSETDTRELMRNRLKNVYEILSSEDVSTVTKSNALKSIVDKIVYDSEKKELSIYLYCSDTL

SEQ ID NO: 5663 - protein, 502 aa, Unknown
  Description of Unknown: Integrase B5664 sequence
  PTHR30461:SF3,SM00857,G3DSA:1.10.10.2600,IPR036162,PF13408, IPR025827,G3DSA:3.40.50.1390,PS51737,IPR006119,IPR038109, PF07508,IPR011109,SSF53041,PF00239,PTHR30461, PS51736,Coil,cd00338
MRGVIYARYSPGPRQTEQSIEGQVADCQQYAEEHGIDIIEIYADRKVSGKSVVGRDEFQRMLRDAEKGRFDCVLVWKIDRFGRDRQDIAMGKMTLKRAGVKLMYARESVPEGPEGIILESVLEGLAEYYSADLRQKVIRGMRETAKKGQYCGQSLPIGYKVDAERHIVVDEREAAVVREAFKLHIAGGQIRDIVQLFADRGIMGRRGKPVSNAVVYRMLRNEKYLGEFYIQDVKLNVEPIIDQATFLEAARHFKTSRNNAAGRAKVNYLLSCKMFCGYCGSMINAETGTGKLGKVYRYYKCGDKKRGKACELKPFPKDQLEDAIILATVNDMLTDDMIEKLTVRILEVQEQENADDPVVGLRRRLDSNKKRQRNLLDAIEEGGARGLVSRLAALEEEEEQLVLEIQRAEIKRPRLTREVVEAWLRSFRVGDVTDDDFRARLVDTFIARVELRNDEALIFYNIREKGPHSRVRVRPEWWSPRDGTRTPKIIVLRDYVVLRIAV

SEQ ID NO: 5664 - protein, 502 aa, Unknown
  Description of Unknown: Integrase B5665 sequence
  PTHR30461:SF3,SM00857,G3DSA:1.10.10.2600,IPR036162,PF13408, IPR025827,G3DSA:3.40.50.1390,PS51737,IPR006119,IPR038109, PF07508,IPR011109,SSF53041,PF00239,PTHR30461, PS51736,Coil,cd00338
MSETTQIGVIYARYSSDKQRDESIDGQIRECMAYAEREGITITNTYIDRALSAKTDDRPEFRQMILDSNKQAFNYVLVYQLDRFSRNRYDSAIYKAKLRKNGIRVISVKENIKDDPSGIILESVLEGMAEYYSAELSQKVMRGMTDNVLQGKWVGTVVPYGYKLSNNRQLEINEHEANVVRKLFDMYLQRHTLSEMASYMNANGHLTHKGKPFNTNSIKAIISNEKYIGVYSWGSERIENAIPPIIDKSIFEKAQHKRNLRAKKKGNRSELYQLCGKLECGRCGGNYVGSTGTSKTGALHHYYVCSNRRRKNACQAQNIRRDALDDIVISQTLAILNKPNVVNKIAKYAASSGKNLQSETVAQIDIIDAHIRDLKKSLDNYMTAIANGFISDVLKHRIEATEQELKDQIEIKTNLENTIIPVELTEDHIRFFLLKMAKENPSTLRGRARIIEAFVHHVTIYEDHIEIVFNYKNELSEFHDKTLESSLLNDLVTQKGFEPLAF

SEQ ID NO: 5665 - protein, 502 aa, Unknown
  Description of Unknown: Integrase B5666 sequence
  PTHR30461:SF3,cd00338,SM00857,G3DSA:1.10.10.2600,IPR036162, PF13408,PS51737,G3DSA:3.40.50.1390,IPR025827,IPR006119, IPR038109,PF07508,IPR011109,SSF53041,PTHR30461, PS51736,Coil,PF00239
MRGVIYARYSPGPHQTEQSIEGQVADCQQYAEEHGIDIIEIYADRHVSGKSVVGRDEFQRMLRDAEKGRFDCVLVWKIDRFGRDRQDIAMGKMALKRAGVKLMYARESVPEGPEGIILESVLEGLAEYYSADLRQKVIRGMKETAKKGQYCGQSLPIGYKVDAERHIVVDEREAAVVREAFKLHIAGGQTRDIVQLFADRGIMGRRGKPVSNAVVYRMLRNEKYLGEFYIQDVKLNVEPIIDQATFMEAAQHFKTSRNNAAGRAKVNYLLSCKMFCGYCGSMISAEAGTGKLGKVYRYYKCGDKKRGKKCELKPFPKDHLEDAIILATVNDMLTDEMIEKLTVRILEVQEQENADDPVVGLRRRLDSNKKRQRNLLDAIEEGGARGLVSRLAALEEEEEQLVLEIQRAEIKRPRLTHEVVEAWLRSFRVGDVTDDDFRARLVDTFIARVELRNDEALIFYNIREKGPHSRVRVRPEWWSPRDGTRTPKIIVLRDYVVLRIAV

SEQ ID NO: 5666 - protein, 502 aa, Unknown
  Description of Unknown: Integrase B5667 sequence
  cd03768,SM00857,G3DSA:1.10.10.2600,IPR036162,PF13408, PS51737,IPR025827,G3DSA:3.40.50.1390,IPR006119,IPR038109, PF07508,IPR011109,SSF53041,PTHR30461,PS51736, Coil,PF00239
MDIIREDCIYARQSVDRKDSISIESQIDFCKYELKGGSCKVFKDKGYSGKNTDRPEFQKLLGEIRKGRVRRVIVYKLDRISRSILDFANMMELFQEYDVEFVSSTEKFDTSTPMGRAMLNICIVFAQLERETIQKRVTDAYYSRCLKGFHMSGQAPYGYQLEPTVVEGIRTKKMVADPETSQYVKLMFEMYSEPETSFGDITRYFEEQNIKVYGKSLFRTFISQLLRNPVYAQADLELYEFFKSQGAAIVNDASDFAGTNGCYLYQGRDVKEDKDRSLKDQILVIAPHEALIPSDVWLKCRKKLMTNKSFQQGRKPKNTWLAGKVKCGCCGYALKATHVPNSEGYFRCSKRTENKGCPGCGKIRKSEFEEFIFSAMRARFKNFQVRHSREEKVNPKLTAHQIELAQVEAEIEKLLDTLTGANATLLAYANKKIEELDTRRQTISKEIAEMSIETMSPQKEQELSYYLDHWDSIEFDDKRKAVDGLIISISATSDHVQVEWKI

SEQ ID NO: 5667 - protein, 502 aa, Unknown
  Description of Unknown: Integrase B5668 sequence
  SM00857,G3DSA:1.10.10.2600,IPR036162,PF13408,PS51737, IPR025827,G3DSA:3.40.50.1390,IPR006119,IPR038109,PF07508, IPR011109,SSF53041,PTHR30461,Coil,PS51736, cd00338,PF00239
MRGVIYARYSPGPRQTEQSIEGQVADCKYYAEEHGIDIIEVYADRKVSGKSVVGRDEFQRMLRDAEKGRFDCVIVWKIDRFGRDRQDIALGKLTLKRAGVKLLYAKESVPEGPEGIILESVLEGLAEYYSADLRQKVIRGMKETAKKGQYCGQSLPIGYKVDAERHIVVDEREAAVVREAFKMHIAGAQIRDLVQLFADRGIMGRRGKPVSNAVIYRMLRNEKYLGEFYIQDVKLNVEPIIDQATFLEAARHFKTSRNNAAGRAKVNYLLSCKMFCGYCGSMINAETGTGKLGKVYRYYKCGDKKRGKKCELKPFPKEQLEDAIILATVNDMLTDDMIEKLTVRILEVQEQETADDPVAGLRRRLDSNRKRQRNLLDAIEEGGARGLVSRLTALEDEEEQLVVEIQRAEIKRPRLTHEVVEAWLRSFRVGDVTDEDFRARLVDTFIARVELRNDEALIFYNIREKGPHSCVRVRPEWWSPRDGTRTPKIIVLRDYVVLRIAV

SEQ ID NO: 5668 - protein, 502 aa, Unknown
  Description of Unknown: Integrase B5669 sequence
  cd03768,PTHR30461:SF3,SM00857,IPR036162,PF13408, IPR025827,G3DSA:3.40.50.1390,PS51737,IPR006119,PF07508, SSF53041,IPR011109,PTHR30461,PS51736,Coil, PF00239
MIAIYARQSVDKKDSISIESQIDFCKKEVGEEDYKVYKDKGYSGKNIDRPAFKEMMRDIKKNAITKVVAYKLDRISRSILDFNNLLEEFKKHNIEFVSVTEKFDTSTPMGKAMVNIVVTFAQLEREQIAQRVKDNYYERGKTGRFLGGKVPLGYTNTKVEIQGKKVPTLVINKEEALLIEKMFNMYAYEDISLSKISDYLNEQGLKSAKGTAWDSGKISRIIKNALYVKADVNVYNYYKNLGVEINNPIEDFIGTNGCFVYGKRDRNENRYTNLKDHKLSIGLHEGIIDADTFLKCQYKLSQNQQITRSGSGKHTWLTGLTKCGYCGYSMSAVVNSSGKYFNCRGKTNMKICNGHSRTIKVEEIENIVETEILNRLEELSKVKVKMENSNSKKIKSIETEIKIIDENIEKLLDKILESNDITIKYINKKVEELDNKKTELRNELNRITLEGSNNSSLEEVLKDANKIKNLSFDKKKSIAKSLIDKVLIRDNEIDIQWKVFNQ

SEQ ID NO: 5669 - protein, 502 aa, Unknown
  Description of Unknown: Integrase B5670 sequence
  PTHR30461:SF3,cd00338,SM00857,G3DSA:1.10.10.2600,IPR036162, PF13408,IPR025827,G3DSA:3.40.50.1390,PS51737,IPR006119, IPR038109,PF07508,IPR011109,SSF53041,PTHR30461, PS51736,Coil,PF00239
MTAVIYARYSSDSQREASIEGQLRDCKDYAEKNGITVVGTYIDRAYSAKTDDRPDFQRMIKDSGKKIFDVVLVWKLDRFARNRFDAVNYKYQLEKNGVHLVSAMEPISQGPEGIMVESMLIGMAEYYSAELALKVARGERENALQCKYNGGVVPLGFTIGKEDRLYHIDPETAPIVQEIFTRYADGEPAEKIAASLNERGLRTRTGKPFVKNSFFQIFRNRRYIGEYRYKDIVTPGGIPAIVDQDLFDRVQQRFEQNRIAHGRPAKEDVSYLLTTKLFCGKCGTLMGGESGTSHMGNTYYYYKCGNAKRHGKAHCDLKAIRKEPLERFVVDTAIKVIFSDEIIERLIDLVMEAQQQENTRLPVLKEQLRDTEKRLANLLEAIEQGILTSTTKQRLDELEARKEALNTSILEEELKKPVLTREWIRFWLEKFRKGDVGSTEHQRQIIDTFVNSVYVFDDRVVLNFNFTDDAKTISREEVLGSSAVDNAPPTKGISSGWCLFCG

SEQ ID NO: 5670 - protein, 502 aa, Unknown
  Description of Unknown: Integrase B5671 sequence
  PTHR30461:SF3,IPR036162,PS51737,IPR011109,PTHR30461, PS00397,PF00239,G3DSA:1.10.10.2600,IPR006119,SSF53041, cd00338,SM00857,IPR025827,IPR038109,PS51736, IPR006118,PF13408,G3DSA:3.40.50.1390,PF07508,Coil
MTDNTSMRTGALYIRVSTGKQEELSPDAQRRLLLDYASKNNIIISNQYIYEEDGISGRKADKRPQFQDMIAHAKSKEHPFDVILVWKYSRFARNQEESIVYKSMLRKDHVEVISVSEPLVDGPFGSLIERIIEWMDEYYSIRLSGEVVRGMTENALRGRNQARPPLGYKVPHAKETPVIVPEEALIIHTIFDMYTENGASMFAIAKHLNDLGYLTSHKKPFERRSIGYILSNPTYIGKSVWNRHSNDNKALKDESEWIIRDGSHEPIISAEQYEKAQQRIKAEYTPKYAKPPELHRHWLSGMVKCHTCGRSLSTSIHKDKRYGRTYTNFQCYGYLKGKCSVSHQISARKLEPAVLEGLKEIMEGVRPLQFKIIKSEEPTAQSAHEILTERLHDIEKKEERIRQAYRDGIDTIEEYRDNKAILFKERAEIESRLEELTPAPVPSETDTRELMRNRLKNVYEILSSEDVSTVTKSNALKSIVDKIVYDSEKKELSIYLYCSDAL

SEQ ID NO: 5671 - protein, 502 aa, Unknown
  Description of Unknown: Integrase B5672 sequence
  PTHR30461:SF3,SM00857,G3DSA:1.10.10.2600,IPR036162,PS51737, G3DSA:3.40.50.1390,IPR006119,IPR038109,PF07508,IPR011109, SSF53041,PTHR30461,Coil,PS51736,cd00338, PF00239
MTNKICIYLRKSRADEELEKTLGEGETLYKHRNALLKFAKEKKLNIVEIKEEIVSGESLFFRPQMLELLKEVEANKYDGVLVMDMQRLGRGDMKDQGIILETFKNSNTKIITPQKTYDLNNDFDEEYTEFEAFMSRKELKMINRRMQGGRVRSIEEGNYIATNPPFGYDISFIKKSRTLKINEHESKAVKLIFKLYIKGNGASFIANELNNLGYKTKLGNNFSSSSVLTIIKNPVYAGKIAWKRKDIKKSRTPGKIKDTKLRDKSEWIISDGKHEAIIDMETWNLAEEILKGRYHIPYQLANAPVNPFAGLITCGVCGKKMVMRKARGINRLMCIYKCGNKSTRFDNVESDCLDALKEYLVNYSAEIKNSTKKEDVDVYSNQISMLKKELSLLNNQKLKLFDLLERNIYDETTFLERSKNINDRIFSINNSLCNLEKLLKKKSIRSYEEDIKLFKSVLDAYNETEDVSKRNTLLKSILYKIEYTKTEKGKDYEIKLFPKLRK

SEQ ID NO: 5672 - protein, 502 aa, Unknown
  Description of Unknown: Integrase B5673 sequence
  cd03768,PTHR30461:SF3,SM00857,IPR036162,PF13408, IPR025827,G3DSA:3.40.50.1390,PS51737,IPR006119,PF07508, SSF53041,IPR011109,PTHR30461,PS51736,PF00239
MIAIYARQSVEKKDSISIESQIEYAKREVFTEDFKIYQDSGYSGKNTNRPAFHEMMADVQSGRIEKVVVYRLDRISRSILDFADFINILESNRISFVSATEKFDTSTPMGRAMLYIIVVFAQLERETIAERVRDNYYARVKKGAWGGGPAAFGFDLVKTTIDGKKATICQPNEQISVVQRIFELYALPYSSLADVQRQLIQDGSVSSGGVNFDNAKLSSILKNPAYVRADTAVYNFYKAKGAILANLPEEFDGVHGCILVGKRDANERKYKDVSDHLLAMGHHEGIVDSTTFLFCQQKLSRNRQIKNTYKGKHSWLTGLVKCAHCGYAFSIRFSRTKEGQVPYFCCSGKYLHKVCTAKQTHRVREIEAEVQASLIQHAASYNLIHRQNTAAAAKEFQSRISEIDAKIENLILSLESVSHVSAQYINQRIEALHHEKQLLLHRYNETISEYNINEVTPFSATDWEQMDIEQKRQLARSLIRTVYLSENGLSVSFNIKNGGHKP

SEQ ID NO: 5673 - protein, 502 aa, Unknown
  Description of Unknown: Integrase B5674 sequence
  PTHR30461:SF3,SM00857,G3DSA:1.10.10.2600,IPR036162,PF13408, PS51737,G3DSA:3.40.50.1390,IPR025827,IPR006119,IPR038109, PF07508,IPR011109,SSF53041,PF00239, PTHR30461,PS51736,Coil,cd00338
MSDTTQIGVIYARYSSDKQRDESIDGQIRECMAYAEREGITITNTYIDRALSAKTDDRPEFRQMILDSNKQAFNYVLVYQLDRFSRNRYDSAIYKAKLRKNGIRVISVKENIKDDPSGIILESVLEGMAEYYSAELSQKVMRGMTDNVLQGKWVGTVVPYGYKLSNNRQLEINEHEANVVRKLFDMYLQRHTLSEMASYMNANGHLTHKGKPFNTNSIKAIISNEKYIGVYSWGSERIENAIPPIIDKNIFEKAQHKRNLRAKKKGNRSELYQLCGKLECGRCGGNYVGSTGTSKTGTLHHYYVCSNRRRKNACQAQNIRRDALDDIVISQTLAILNKPNVVNKIAKYAASSGKNLQSETVAQIDIIDAHIRDLKKSLDNYMTAIANGFISDVLKHRIEATEQELKDQIEIKTNLENTIIPVELTEDHIRFFLLKMAKENPSTLRGRARIIEAFVHHVTIYEDHIEIVFNYKNELSEFHDKTLESSLLNDLVTQKGFEPLAF

SEQ ID NO: 5674 - protein, 502 aa, Unknown
  Description of Unknown: Integrase B5675 sequence
  PTHR30461:SF3,IPR036162,PS51737,IPR011109,PTHR30461, PS00397,PF00239,G3DSA:1.10.10.2600,IPR006119,SSF53041, cd00338,SM00857,IPR025827,IPR038109,PS51736, IPR006118,PF13408,G3DSA:3.40.50.1390,PF07508,Coil
MTDNTSMRTGALYIRVSTGKQEELSPDAQKRLLLDYASKNNIIISNQYIYEEDGISGRKADKRPQFQDMIAHAKSKEHPFDVILVWKYSRFARNQEESIVYKSMLRKDHVEVISVSEPLVDGPFGSLIERIIEWMDEYYSIRLSGEVVRGMTENALRGRNQARPPLGYKVPHAKETPVIVPEEALIIHTIFDMYTENGASMFAIAKHLNNLGYLTSHKKPFERRSIGYILSNPTYIGKSVWNRHSNDNKALKDESEWIIRDGSHEPIISAEQYEKAQQRIKAEYTPKYAKPPELHRHWLSGMVKCHTCGRSLSTSIHKDKRYGRTYTNFQCYGYLKGKCSVSHQISARKLEPAVLEGLKEIMEGVRPLQFKIIKSEEPTAQSAHEILTERLHDIEKKEERIRQAYRDGIDTIEEYRDNKAILFKERAEIESRLEELTPAPVPSETDTRELMRNRLKNVYEILSSEDVSTVTKSNALKSIVDKIVYDSEKKELSIYLYCSDTL

SEQ ID NO: 5675 - protein, 502 aa, Unknown
  Description of Unknown: Integrase B5676 sequence
  PTHR30461:SF3,SM00857,G3DSA:1.10.10.2600,IPR036162,PF13408, PS51737,G3DSA:3.40.50.1390,IPR025827,IPR006119,IPR038109, PF07508,IPR011109,SSF53041,PTHR30461,Coil, PS51736,cd00338,PF00239
MNAVIYARFSSDNQSEESITAQIRACTEYAERNGYEIINTYIDRAFSARSDQRPEFQRMICDSSEKSFNAVIVHKIDRFSRDRYDHAIYRKELKKNGVRLISVLENLDDSPESVVLESVLEGFSEYYSRNLARETRKGLKEVALQAKLTGGRPPFGYDVDENNNYIINKLEADAVRQIFQACLNGQGYTQLIRDFEKRGIKSKMGKPFGKNSFNAILKNEKYMGRYVYYPIGTYREKISEPIIIEDAIPAIIDKKTFMEVQRIMESRKNTGRTIAVEPYLLSGILFCGECGAPMSGHRSKKSERITYAYECSQNSRKKNCEMRSFSRDKLEGIICDYVEKIISPEQLGGIKQYLKENQNIINRQNEGRIANLKKEITALDTKINNTIDLLIETKSDKLKEKLSGLEKRQKDLVYECEKLSVSELEDEKIEKYLIHISDFKTLPRKEKQLFVKKIIKKVTIHKNGDLDVLTTYSDVAAKLGGTTPYQSLAVPFWVRAKLHYFS

SEQ ID NO: 5676 - protein, 502 aa, Unknown
  Description of Unknown: Integrase B5677 sequence
  SM00857,G3DSA:1.10.10.2600,IPR036162,PF13408,PS51737, G3DSA:3.40.50.1390,IPR025827,IPR006119,IPR038109,PF07508, IPR011109,SSF53041,PTHR30461,Coil,PS51736, cd00338,PF00239
MRGVIYARYSPGPHQTEQSIEGQVADCQQYAEEHGIDIIEIYADRHVSGKSVVGRDEFQRMLRDAEKGRFDCVLVWKIDRFGRDRQDIAMGKMTLKRAGVKLMYARESVPEGPEGIILESVLEGLAEYYSADLRQKVIRGMKETAKKGQYCGQPLPIGYKVDSQRHVVIDEREAAVVREAFKLHIAGAQLRDIVQLFADRGVMGRRGKPVSNAVVYRMLRNEKYLGEFYIQDVKLNVEPIIDQATFLEAAQHFKTSRNNAAGRAKVNYLLSCKMFCGYCGSMISAEAGTGKLGKVYRYYKCGDKKRGKKCELKPFPKDHLEDAIILATVNDMLTDEMIEKLTVRILEVQEQENADDPVVGLRRRLDSNKKRQRNLLDAIEEGGARGLVSRLAALEEEEEQLVLEIQRAEIKRPRLTHEVVEAWLRSFRVGDVTDDDFRARLVDTFIARVELRNDEALIFYNIREKGPHSRVRVRPEWWSPRDGTRTPKIIVLRDYVVLRIAV

SEQ ID NO: 5677 - protein, 502 aa, Unknown
  Description of Unknown: Integrase B5678 sequence
  cd03768,SM00857,IPR036162,G3DSA:3.40.50.1390,IPR006119, SSF53041,PTHR30461,PS51736,Coil,PF00239
MKKVAIYSRKSVLVEGSVSIETQINMCKDYINNKFPNAKFKVFEDEGFSGGNTNRPAFQKMLRMAQLNEIDIVVCYKVDRIARNTLDFLKILELFKENNVELISISEGFDPNTQMGKVMLTLLASFAEMERTNIQQRVKDNLLSIAKKGKWTGGSPPTGFKNGLNGGLEWNKQDMILDVFNMKYEKEKNTNIIKYIKEKYNHNFLGGTLATTLRKPIYVKSSPSVSLYLKTKEYIVQGNEDNIHSYLTYTDKETKYAIVSDIVGLIEPSVWISINKDMDKNISREGNRFSEKFWLTKTVRCKYCGQTFCGQTKTTKTKHYNKHGEEKIYISTYSYYSCRDAVRGKLKTCTNTKRVKQEILESKVSELIHLLKDKKTFNSSYFSNKIDNSSKIDTIKKQIKNIDKTINNLTDKIALLSNEASLIFISKLEELVKEKSMLKDNLLQLELQELNSNTKKDSSLVYNNILAFNDDLSVDDKRKIAMSLFKEIIYDPETDSLDVTFM

SEQ ID NO: 5678 - protein, 502 aa, Unknown
  Description of Unknown: Integrase B5679 sequence
  PTHR30461:SF3,SM00857,G3DSA:1.10.10.2600,IPR036162,PF13408, IPR025827,PS51737,G3DSA:3.40.50.1390,IPR006119,IPR038109, PF07508,IPR011109,SSF53041,PF00239, PTHR30461,PS51736,Coil,cd00338
MQRAVIYARYSPGPNQTEQSIEGQVRECTKYAELHDLRIVGTYIDRKISGKTDNRREFQRMIDDSEKHIFDVIILYHTDRFARNRYDSAIYKHKLKENGVELRYATTDIPKGPEGIILESIMEGWAEYYSAELSRKIKRGMRESALKCHSTGAGRCLGYRTAEDKSLVIEPEGAKAVQTVFDMYIKGKSHADICRYLNDCGFRTAQGKLFNKNSVTHIIRNKRYIGVYTYDDIMIEDGIPAIISKDTFHLAQLEAARRKTAKRPKEPKAEYLLSGKAFCGHCQKPLVGVSGTGKSGNKWYYYYCQESRAKRGCTKKPVKRDWLEREVVERTVAEVLQPEVIQHIAKKCYDLQMEYRQDNSDVLFYELKLKDVRKAIKNTMHAIESGVKTKTLPARLQELENEEEALEAELAIAKASDFVITTDQIEFLLTQFAEPWECESEEEYHRRIIKCFVHKVFLFDDKLLIYYNVSRDGKTREQSEAELLEEALGEGFDKRSSGSTKK

SEQ ID NO: 5679 - protein, 502 aa, Unknown
  Description of Unknown: Integrase B5680 sequence
  PTHR30461:SF3,SM00857,G3DSA:1.10.10.2600,IPR036162,PF13408, IPR025827,G3DSA:3.40.50.1390,PS51737,IPR006119,IPR038109, PF07508,SSF53041,IPR011109,PTHR30461,Coil, PS51736,cd00338,PF00239
MANNAVLYTRVSSDEQKKTGFSLDYQEKQGREYAKKNGLNIVKIFSESYTAKKPGRPQFNEMMSYVQKHKVEHLIFLKSDRASRNGVDSAALVYMAERDIYNIHLIQDCICLNRRSRPTDFLVFEMNNIIANFYPRNLSVDVTTKLLEKAEQGYYPERPPIGYMRKPNLKKAYLQINPEKAPFIKRTFELYSTGNYSYQSLAKQLREEGFLISPSTKCGKSNVEDILNNPIYMGDFVFKGKRYYNAKHEPIISRELYSACQKIIEERTGARTTKYDFAFSNLLKCSKCGCYLVAELKKKKYVYYHCTGNRGGTCKSKSYIREEKIEKAVLETFKKFHLDENTLPLAKRAFINQLKEQNGYVEERIESLDSEIAKVKKRSEKLFELLLDGKVSNEIFEKKTAEIETTLDNLILQRSACSKAGLELLRYSENLFELLSMTTMLYFAMSNEKKRQILKMLCSNFYYDGENVIITIKKAFQPLVEIANLKMVGMKRLELPRFRTSS

SEQ ID NO: 5680 - protein, 502 aa, Unknown
  Description of Unknown: Integrase B5681 sequence
  PTHR30461:SF3,cd00338,SM00857,G3DSA:1.10.10.2600,IPR036162, PS51737,G3DSA:3.40.50.1390,IPR006119,IPR038109,PF07508, IPR011109,SSF53041,PTHR30461,PS51736,Coil, PF00239
MNNKICMYLRKSRADEELEKTLGEGETLSKHRNALLKFAKEKNLNIVEIKEEIVSGESLFFRPKMLELLKEVEAQKYDGVLVMDMQRLGRGDMKDQGIILETFKNSNTKIITPQKTYDLNNDFDEEYTEFEAFMSRKELKMINRRMQGGRVRSVEEGNYIATNPPFGYDIDFIKKSRTLKINEDEAPAINLIFKLYIEGNGASAIADELNVLGYKTKLGNKFSQSSVLTIIKNPVYIGKIAWKRKDIKKSKTPGKVKDTRLRDVSEWIIADGKHKAIINTETWEAAQKILKSRYHIPYQLSNSPVNVFAGLITCGICGKKMVMRKARGINRLMCIYKCGNKSTRFDNVESDCLKYLKDYLTDYTAEIKNKIKESDNNIYISQISQLKKELTALNNQRLKLFDLLERNLYDEDTFLERSKNINDRIETVSSTLRSIEKLLNKKSKASYEEDIKFFKSVLDAYDETEDISKKNSLLKSILFKIEYTKTKKGKDYEIKLFPKLRK

SEQ ID NO: 5681 - protein, 502 aa, Unknown
  Description of Unknown: Integrase B5682 sequence
  PTHR30461:SF3,IPR036162,PS51737,IPR011109,PTHR30461, PS00397,PF00239,G3DSA:1.10.10.2600,IPR006119,SSF53041, cd00338,SM00857,IPR025827,IPR038109,PS51736, IPR006118,PF13408,G3DSA:3.40.50.1390,PF07508,Coil
MPDNTSMRTGALYIRVSTGKQEELSPDAQRRLLLDYASKNNIIISNQYIYEEDGISGRKADKRPQFQNMIAHAKSKEHPFDVILVWKYSRFARNQEESIVYKSMLRKDHVEVISVSEPLVDGPFGSLIERIIEWMDEYYSIRLSGEVVRGMTENALRGRNQARPPLGYKVPHAKETPVIVPEEALIIHTIFDMYTENGASMFAIAKHLNNLGYLTSHKKPFERRSIGYILSNPTYIGKSVWNRHSNDNKALKDESEWIIRDGSHEPIISAEQYEKAQQRIKAEYAPKYAKPPELHRHWLSGMVKCHTCGRSLSTSIHKDKRYGRTYTNFQCYGYLKGKCNVSHQISARKLEPAVLEGLQEIMEGVRPLQFKIIKSEEPATQSAHEILTERLHDIEKKEERIRQAYRDGIDTIEEYRDNKAILFKERTEIESRLAELTPAPVPSETDTRELMRNRLKNVYEILSSEDVSTVTKSNALKSIVDKIVYDSEKKELSIYLYCSDTL

SEQ ID NO: 5682 - protein, 502 aa, Unknown
  Description of Unknown: Integrase B5683 sequence
  SM00857,G3DSA:1.10.10.2600,IPR036162,PF13408,IPR025827, G3DSA:3.40.50.1390,PS51737,IPR006119,IPR038109,PF07508, SSF53041,IPR011109,PF00239,PTHR30461,PS51736, Coil,cd00338
MRGVIYARYSPGPRQTEQSIEGQVADCKYYAEENGIDIIEVYADRKVSGKSVVGRDEFQRMLRDAERGLFDCVLVWKIDRFGRDRQDIALGKLTLKRAGVKLMYAKESVPEGPEGIILESVLEGLAEYYSADLRQKVIRGMKETAKKGQYCGQPLPIGYKVDADRHVVIDEERATLVRQAFQMHIAGATMKDLMEHFRSHGVVGQRGRPISHNVIYRMLRNRKYLGEFEVQGVRLPVEPIIDEATFQEAAQHFKTSRNNAAGRAKVDYLLSCKCFCGYCGAMLNAEAGTSKTGKVYHYYKCGDKKRGKKCEMKAIPQDRLEDAVILATVHDMLTDDMIDKLAVRVLEVQEQELADDPVAALRRRLDSVRKRQRNLLDAIEEGGARGLVSRLSALEDEEEALVIEIERAEIKRPRLTREVVEAWLRSFRDGDVTDDDFRARLIDTFVARIEVRNDVALIFYNIREKGPHSKVRVRSEWWSPRSGTRTPEIFVLRDYIVLKIAV

SEQ ID NO: 5683 - protein, 502 aa, Unknown
  Description of Unknown: Integrase B5684 sequence
  PTHR30461:SF3,SM00857,G3DSA:1.10.10.2600,IPR036162,PF13408, IPR025827,G3DSA:3.40.50.1390,PS51737,IPR006119,IPR038109, PF07508,IPR011109,SSF53041,PF00239,PTHR30461, PS51736,Coil,cd00338
MRGVIYARYSPGPRQTEQSIEGQVADCQQYAEEHGIDIIEIYADRKVSGKSVVGRDEFQRMLRDAEKGRFDCVLVWKIDRFGRDRQDIALGKMTLKRAGVKLMYARESVPEGPEGIILESVLEGLAEYYSADLRQKVIRGMRETAKKGQYCGQSLPIGYKVDAERHIVVDEREAAVVREAFKLHIAGGQIRDIVQLFADRGIMGRRGKPVSNAVVYRMLRNEKYLGEFYIQDVKLNVEPIIDQATFLEAARHFKTSRNNAAGRAKVNYLLSCKMFCGYCGSMINAETGTGKLGKVYRYYKCGDKKRGKACELKPFPKDHLEDAIILATVNDMLTDDMIEKLTVRILEVQEQENADDPVVGLRRRLDSNKKRQRNLLDAIEEGGARGLVSRLAALEEEEEQLVLEIQRAEIKRPRLTREVVEAWLRSFRVGDVTDDDFRARLVDTFIARVELRNDEALIFYNIREKGPHSRVRVRPEWWSPRDGTRTPKIIVLRDYVVLRIAV

SEQ ID NO: 5684 - protein, 502 aa, Unknown
  Description of Unknown: Integrase B5685 sequence
  PTHR30461:SF3,IPR036162,PS51737,IPR011109,PTHR30461, PS00397,PF00239,G3DSA:1.10.10.2600,IPR006119,SSF53041, cd00338,SM00857,IPR025827,IPR038109,PS51736, IPR006118,PF13408,G3DSA:3.40.50.1390,PF07508,Coil
MTNNTSMRTGALYIRVSTGKQEELSPDAQRRLLLDYASKNNIIISNQYIYEEDGISGRKADKRPQFQDMIAHAKSKEHPFDVILVWKYSRFARNQEESIVYKSMLRKDHVEVISVSEPLVDGPFGSLIERIIEWMDEYYSIRLSGEVVRGMTENALRGRNQARPPLGYKVPHAKETPVIVPEEALIIHTIFDMYTEDGASMFAIAKRLNNLGYLTSHKKPFERRSIGYILSNPTYIGKSVWNRHSNDNKALKDESEWIIRDGSHEPIISVEQYEKAQQRIKAEYAPKYAKPPELHRHWLSGMVKCHTCGRSLSTSIHKDKRYGRTYTNFQCYGYLKGKCSVSHQISARKLEPAVLEGLKEIMEGVRPLQFKIIKSEEPTAQSAHAILTERLHDIEKKEERIRQAYRDGIDTIEEYRDNKAILFKERAEIESRLEELTPAPVPSETDTRELMRNRLKNVYEILSSEDVSTVTKSNALKSIVDKIVYDSEKKELSIYLYCSDTL

SEQ ID NO: 5685 - protein, 502 aa, Unknown
  Description of Unknown: Integrase B5686 sequence
  cd03768,PTHR30461:SF3,SM00857,IPR036162,PF13408, IPR025827,G3DSA:3.40.50.1390,IPR006119,SSF53041,PTHR30461, PS51736,Coil,PF00239
MKRIAIYSRKSVYIEGSISIETQINMCKEYMLKKFKDCEFKIFEDEGFSGGNTNRPAFQKMLRLAELKQIDIVVCYKIDRIARNTLDFLNILEMFKENNVELISITEGFDPNTQMGKVMLTLLASFAEMERSNIQQRVKDNLLSIAKKGKWTGGSPPTGFKNNPNGGIEWDNKDMILDVFNMKYEKSKNTDLIQFIQHKYNHKFLGGTLATTLRKPIYVKSSSSVSLYLKSKGYIVQGTEDNIHSYLTYTDKDTKYAIVSNIVGLVEPSIWISVNKDMDKNISREGNRFSEKFWLTKTIRCKCCGQTYCGQTKTTKTKYYNKKGEEKIYVSTYSYYSCRDAVRGKLKTCNNTKRIKQDVLEAKVSALIYSLKDEKIFNSSYSINKVDNSFKIASLNKKVIEIDKTISNLTDKIALLSNDASLIFIDKIENLIKEKSSIKSNIVELELQELNSKIKTDKALIYNNIKAFNNNLSVDDKRKITMSIFKKIVYDPETNDLDVTFM

SEQ ID NO: 5686 - protein, 502 aa, Unknown
  Description of Unknown: Integrase B5687 sequence
  cd03768,PTHR30461:SF3,SM00857,IPR036162, G3DSA:3.40.50.1390,IPR006119,SSF53041,PTHR30461, PS51736,Coil,PF00239
MKKVAIYSRKSVLVEGSVSIETQINMCKDYINNKFPNAKFKVFEDEGFSGGNTNRPAFQKMLRMAQLNEIDIVVCYKVDRIARNTLDFLKILELFKENNVELISISEGFDPNTQMGKVMLTLLASFAEMERSNIQQRVKDNLLSVAKKGKWTGGSPPTGFKNGLNGGLEWDKKDMILDTFNIKYEKETNSKILEYIYERYNHRFLDGTLATTLRKPIYVKSSASVSLYLKTKGYIIHGEEDNIHSYLTYTDNDKKYAIVSDIKGLIEPSTWISINKDMDKNICREGNRFSKRFWLTKTIRCKYCGKTFCGQTRTTKTKHYNKYGEEKVYISTHNYYACRNAVSGKFKTCNKIKRIRQEILEGKVSELIYLLKDKDFFNSSYFANKIDNSSKINNINKQIKSIDKTINNLTDKIALLSNEASLIFISKLEELVKEKSILKDNLLQLELQELNSNTKKDSSLVYNNILAFNDDLNVDDKRKIAMSLFKEIIYDPETDSLDVTFM

SEQ ID NO: 5687 - protein, 502 aa, Unknown
  Description of Unknown: Integrase B5688 sequence
  SM00857,G3DSA:1.10.10.2600,IPR036162,PS51737,G3DSA:3.40.50.1390, IPR006119,IPR038109,PF07508,SSF53041,IPR011109, PF00239,PTHR30461,PS51736,Coil,cd00338
MKTCIYLRKSRADEELEKKEDVDTLARHRSTLLEVAKKQDLNIVEIKEEVVSGDSIAKRPKMIQLLEEVEQNTYDAVLCMDIDRLGRGDMQDQGKIINTFKESNTLIVTPDKIYNLNNDLDEEMTEFKTFFARRELKVITKRMQRGRVKSIEEGNFIGSVAPLGYKFEYDKFGKRHMVIDEETAPAIRIIFDMYLNGEGSFRIMKRLNTLGYKTTAGKDFTECAVRRIVRNQTYCGYVTWFEYKRKGTKTRKNKESDVLVCKGKHQAIISEDDWNKAQEIRKGNQITAKKSDRKLINPLAGLIKCSCCKHTMVASYNTVKEGPVLYLRCKQCYEVGSSRLDLIEEEIINILKIKLKEIKDELDNTEIEDRENKQLEMLQNTLTTLDKEKTELDKQKDRLHDLLERGIYDVDTFLERQQTLANKKEEIETAIKGTKKLLEVEVSRDIDYKELAQNIECAIESYENTDNIELKNKALKTVIKEILYYKEKKRFAQFTLEVKFKI

SEQ ID NO: 5688 - protein, 502 aa, Unknown
  Description of Unknown: Integrase B5689 sequence
  PTHR30461:SF3,SM00857,G3DSA:1.10.10.2600,IPR036162,PF13408, IPR025827,G3DSA:3.40.50.1390,PS51737,IPR006119,IPR038109, PF07508,IPR011109,SSF53041,PF00239, PTHR30461,PS51736,Coil,cd00338
MRGVIYARYSPGPRQTEQSIEGQVADCQQYAEEHGIDIIEIYADRKVSGKSVVGRDEFQRMLRDAEKGRFDCVLVWKIDRFGRDRQDIALGKMTLKRAGVKLMYARESVPEGPEGIILESVLEGLAEYYSADLRQKVIRGMRETAKKGQYCGQSLPIGYKVDAERHIVVDEREAAVVREAFKLHIAGGQIRDIVQLFADRGIMGRRGKPVSNAVVYRMLRNEKYLGEFYIQDVKLNVEPIIDQATFLEAARHFKTSRNNAAGRAKVNYLLSCKMFCGYCGSMINAETGTGKLGKVYRYYKCGDKKRGKACELKPFPKDHLEDAIILATVNDMLTDDMIEKLTIRILEVQEQENADDPVVGLRRRLDSNKKRQRNLLDAIEEGGARGLVSRLAALEEEEEQLVLEIQRAEIKRPRLTREVVEAWLRSFRVGDVTDDDFRARLVDTFIARVELRNDEALIFYNIREKGPHSRVRVRPEWWSPRDGTRTPKIIVLRDYVVLRIAV

SEQ ID NO: 5689 - protein, 502 aa, Unknown
  Description of Unknown: Integrase B5690 sequence
  PTHR30461:SF3,cd00338,SM00857,G3DSA:1.10.10.2600,IPR036162, PF13408,PS51737,G3DSA:3.40.50.1390,IPR025827,IPR006119, IPR038109,PF07508,SSF53041,IPR011109,PTHR30461, PS51736,Coil,PF00239
MYEDIKTACLYVRFSSHNQTEQSIEGQTRVCRDFCKRHNIKIVEIYADRATSASKDIEKRVQFLKMIKDSEKGLFDAVIVYKLDRFARSRYDSATYKYRLKRNGVQLISATENISNDPEGIILESVLEGMAEFYSAELSQKINRGMRESAYKHNSIGGAIPLGYKIEDKKLVIDPKTAPIVKEAFEKYADGETVAEICRQFNARGYKTSKGTAFGKSSFTKIFRNERYIGVYSFHDYRAEDAIPAIIDKDLWDRVQLRVGKIKNAPARNKAKVVYLLSGKIFCGHCGSKMNGNCNAGNYYYYQCYGKKNGNVDCKKKNIRKEFIERLVAQDALSLLTDEYIEQIATIACEKNQHEIELDSALPTIRDRIHQVDLSLNNLLKAIESGSAPDMLVKRMGELEKEKKDLQVQAKKESEDIVELDKAQVIYWLEQFRGGSIEDEEFCRMLIDLFVNSVTVWDEDDNTYKVTVAYNLTSLPTKTYRLNKGGTLSDFASNAPAFTRRI

SEQ ID NO: 5690 - protein, 502 aa, Unknown
  Description of Unknown: Integrase B5691 sequence
  PTHR30461:SF3,cd00338,SM00857,G3DSA:1.10.10.2600,IPR036162, PS51737,G3DSA:3.40.50.1390,IPR006119,IPR038109,PF07508, IPR011109,SSF53041,PTHR30461,PS51736,Coil, PF00239
MKTCIYLRKSRADEELEKKEKVDTLSRHRSTLLEVAKKQNLDIVEIKEEIVSGDSIAKRPKMIQLLEEVENNLYDAVLCMDIDRLGRGDMQDQGKIINTFKQSNTYIVTPDKTYNLNNELDEEMTEFKTFFARRELKVITKRMQRGRVKSIEEGNFIGSIAPLGYKFEYDKLGKRHMMIDEETAPAIKLVFDMYLKGEGAYKIMNHLNTLGYKTTAGKCFTECAVRRIIRNKTYCGYVTWFEYKRKGTKTRKNRESDMIACKGKHQAIISEDDWNQAQEIRINNQIPAKKSGRKLINPLAGIVKCSNCKHTMVASYNTGKEGPVLYLRCKQCYEVGSSRLDLIEEEIINVLKIKLKEIKDELDNTEIEDRENKQLEMLQNTLTTLEKEEKELDKQKNKLHDLLERGIYDVDTFLERQQTLANKKEEIEIAIKGTKKLLEAEVSKDIDYKELAENIECAIESYENTDNIELKNKALKTIIKEILYNKEKKRFAQFTLEVKFKI

SEQ ID NO: 5691 - protein, 502 aa, Unknown
  Description of Unknown: Integrase B5692 sequence
  PTHR30461:SF3,cd00338,SM00857,G3DSA:1.10.10.2600,IPR036162, PF13408,PS51737,IPR025827,G3DSA:3.40.50.1390,IPR006119, IPR038109,PF07508,SSF53041,IPR011109,PTHR30461, PS51736,Coil,PF00239
MYEDIKTACLYVRFSSHNQTEQSIEGQTRVCRDFCKRHNIRIVEIYADRATSASKDIEKRVQFLKMIKDSEKGLFDAVIVYKLDRFARSRYDSATYKYRLKRNGVQLISATENISNDPEGIILESVLEGMAEFYSAELSQKINRGMRESAYKHNSIGGAIPLGYKIEDKKLVIDPKTAPIVKEAFEKYADGETVAEICRQFNARGYKTSKGTAFGKSSFTKIFRNERYIGVYTFHDYRAEDAIPAIIDKDLWDRVQLRVGKIKNAPARNKAKVVYLLSGKLFCGHCGSKMNGNCNAGNYCYYQCYGKKNGNVDCKKKNIRKEFIERLVAQDALSLLTDEYIEQIATIACEKNQHEIELDSALPTIRDRIHQVDLSLNHLLKAIESGSAPDMLVKRMGELEKEKKDLQAQAKKESEDIVELDKAQVIYWLEQFRGGSIEDEEFCRMLIDLFVNSVTVWDEDDNTYKVTVAYNLTSLPTKTYRLNKGGTLSDFASNAPPMNPLV

SEQ ID NO: 5692 - protein, 502 aa, Unknown
  Description of Unknown: Integrase B5693 sequence
  PTHR30461:SF3,IPR036162,PS51737,IPR011109,PTHR30461, PS00397,PF00239,G3DSA:1.10.10.2600,IPR006119,SSF53041, cd00338,SM00857,IPR025827,IPR038109,PS51736, IPR006118,PF13408,G3DSA:3.40.50.1390,PF07508,Coil
MTDNTSMRTGALYIRVSTGKQEELSPDAQRRLLLDYASKNNIIISNQYIYEEDGISGRKADKRPQFQNMIAHAKSKEHPFDVILVWKYSRFARNQEESIVYKSMLRKDHVEVISVSEPLVDGPFGSLIERIIEWMDEYYSIRLSGEVVRGMTENALRGRNQARPPLGYKVPHAKETPVIVPEEALIIHTIFDMYTENGASMFAIAKHLNDLGYLTSHKKPFERRSIGYILSNPTYIGKSVWNRHSNDNKALKDESEWIIRDGSHEPIISTEQYEKAQQRIKAEYTPKYAKPPELHRHWLSGMVKCHTCGRSLSTSIHKDKRYGRTYTNFQCYGYLKGKCSVSHQISARKLEPAVLEGLKEIMEGVRPLQFKIIKSEEPTAQSAHEILTERLHDIEKKEERIRQAYRDGIDTIEEYRDNKAILFKERTEIESRLAELTPAPAPSETDTRELMRNRLKNVYEILSSEDVSTVTKSNALKSIVDKIVYDSEKKELSIYLYCSDTL

SEQ ID NO: 5693 - protein, 502 aa, Unknown
  Description of Unknown: Integrase B5694 sequence
  PTHR30461:SF3,SM00857,G3DSA:1.10.10.2600,IPR036162,PF13408, IPR025827,PS51737,G3DSA:3.40.50.1390,IPR006119,IPR038109, PF07508,IPR011109,SSF53041,PF00239,PTHR30461, PS51736,Coil,cd00338
MKTAVIYARYSSDKQTEQSIEGQLYDCYNYAKANNITVIGEYIDRAMTGRNDDRPDFQRMISDSTKHTFELVLVWKLDRFARSTEDAAYNRGKLKRNGVRLLSIKEDFGDSSAGDLMMHVMESFNEFYSADLREKTVRGMHQSALKCQSTGGQIPIGYKIEGKKYVIDESARFIPETVFRMYAEGKRLAEIARYLNEKGYRTRMGRKFTTGSFYTMLSNEKYIGVYKYGDVRIEGGYEAMIDPVLFEAVQKKLVENKKRAPKISERENFYLTGKLFCGHCGEPMNGMSGNSTKGKHLYYRCNGVRKHTGCDKCTERKEEIENEIIGAIQRAFANADPEELTRKVIENYEKNSRPADQVKVMKAELQKITNKVDNVVNAIAEMGGNETLYTQLRQLTEQKEQKEAEIRIAEHKADDMPTVELVKKILDLIQNADTMTDEGRQLLIDGAVSRIYVYDDSLDIYFKGGKNTEIPLNPANKDDVSDNSFACCKEWGAKTKTYKPFR

SEQ ID NO: 5694 - protein, 502 aa, Unknown
  Description of Unknown: Integrase B5695 sequence
  cd03768,PTHR30461:SF3,SM00857,G3DSA:1.10.10.2600,IPR036162, PF13408,IPR025827,PS51737,G3DSA:3.40.50.1390,IPR006119, IPR038109,PF07508,IPR011109,SSF53041,PTHR30461, PS51736,Coil,PF00239
MEFIREDCIYARQSVDRKDSISIESQIDFCKYELKGGSCRVFKDKGYSGKNTDRPEFQKLLGEIRKGKVRRVIVYKLDRISRSILDFATMMELFQEYDVEFVSSTEKFDTSTPMGRAMLNICIVFAQLERETIQKRVTDAYYSRCLKGFHMSGQAPYGYQLEPTVVEGIRTKKMVADPVAADHVRLMFEMYAEPETSFGDITRYFEEHDIKIYGKSMFRTFLSQLLRNPVYAQADLELYEFFKSQGAAIVNDASDFAGTNGCYLYQGRDVKEDKDRCLKDQILVIAPHEALISSDTWLKCRKKLMANTTFQQGRKPKNTWLAGKIKCGHCGYALKATHVPNSTGYFRCTKRTENKGCPGCGKIRKEEFEQFIFSAMQEKFKDFQILHGREEKVNPKLTAYQVELAQVEAEIEKLLDTLTGANATLLAYANKKIEELDTRRQTISKAIAELSVETISPQQIKKLSYYLDNWDSIDFDDKRKAADGLISTIKATSDRVQIEWKI

SEQ ID NO: 5695 - protein, 502 aa, Unknown
  Description of Unknown: Integrase B5696 sequence
  PTHR30461:SF3,cd00338,SM00857,G3DSA:1.10.10.2600,IPR036162, PF13408,IPR025827,G3DSA:3.40.50.1390,PS51737,IPR006119, IPR038109,PF07508,SSF53041,IPR011109,PTHR30461, PS51736,Coil,PF00239
MSETTQIGVIYARYSSDKQRDESIDGQIRECMAYAEREGITITNTYIDRALSAKTDDRPEFRQMILDSNKQAFNYVLVYQLDRFSRNRYDSAIYKAKLRKNGIRVISVKENIKDDPSGIILESVLEGMAEYYSAELSQKVMRGMTDNVLQGKWVGTVVPYGYKLSNNRQLEINEHEANVVRKLFDMYLQRHTLSEMASYMNAHGHLTHKGKPFNTNSIKAIISNKKYIGVYSWGTERIENAIPPIIDKNIFEKAQHKRNLRAKKKGNRSELYQLCGKLECGRCGGNYVGSTGTSKTGTLHHYYVCSNRRRKNACQAQNIRRDALDDIVISQTLAILNKPNVVNKIAKYAASSGKNLQSETVAQIDIIDAHIRDLKKSLDNYMTAIANGFISDVLKHRIEATEQELKDQIEIKTNLENTIIPVELTEDHIRFFLLKMAKENPSTLRGRARIIEAFVHHVTIYEDHIEIVFNYKNELSEFHDKTLESSLLNDLVTQKGFEPLAF

SEQ ID NO: 5696 - protein, 502 aa, Unknown
  Description of Unknown: Integrase B5697 sequence
  PTHR30461:SF3,cd00338,SM00857,G3DSA:1.10.10.2600,IPR036162, PF13408,PS51737,IPR025827,G3DSA:3.40.50.1390,IPR006119, IPR038109,PF07508,SSF53041,IPR011109,PTHR30461, PS51736,Coil,PF00239
MSETTQTGVIYARYSSDKQRDESIDGQIRECMAYAEREGITITNTYIDRALSAKTDDRPEFRQMILDSNKQAFNYVLVYQLDRFSRNRYDSAIYKAKLRKNGIRVISVKENIKDDPSGIILESVLEGMAEYYSAELSQKVMRGMTDNVLQGKWVGTVVPYGYKLSNNRQLEINKHEANVVRKLFDMYLQRHTLSEMASYMNANGHLTHKGKPFNTNSIKAIISNEKYIGVYSWGAERIENAIPPIIDKSIFEKAQHKRNLRAKKKGNRSELYQLCGKLKCGRCGGNYVGSTGTSKTGALHYYYVCSNRRRKNACQAQNIRRDALDDIVISQTLAILNKPNVVNKIAKYAASSGKNLQSETVVQIDIIDAHIRDLKKSLDNYMTAIANGFISDVLKHRIEATEQELKDQIEIKTNLENTIIPVELTEDHIRFFLLKMAKENPSTLRGRARIIEAFVHHVTIYEDHIEIVFNYKNELSEFHNKTLESSLLNDLVTQKGFEPLAF

SEQ ID NO: 5697 - protein, 502 aa, Unknown
  Description of Unknown: Integrase B5698 sequence
  PTHR30461:SF3,cd00338,SM00857,G3DSA:1.10.10.2600,IPR036162, PF13408,IPR025827,PS51737,G3DSA:3.40.50.1390,IPR006119, IPR038109,PF07508,SSF53041,IPR011109,PTHR30461, PS51736,Coil,PF00239
MRGVIYARYSPGPHQTEQSIEGQVADCQQYAEEHGIDIIEIYADRHVSGKSVVGRDEFQRMLRDAEKGRFDCVLVWKIDRFGRDRQDIAMGKMALKRAGVKLMYARESVPEGPEGIILESVLEGLAEYYSADLRQKVIRGMKETAKKGQYCGQSLPIGYKVDAERHIVVDEREAAVVREAFKLHIAGGQIRDIVQLFADRGIMGRRGKPVSNAVVYRMLRNEKYLGEFYIQDVKLNVEPIIDQATFLEAARHFKTSRNNAAGRAKVNYLLSCKMFCGYCGSMISAEAGTGKLGKVYRYYKCGDKKRGKKCELKPFPKDHLEDAIILATVNDMLTDEMIEKLTVRILEVQEQENADDPVVGLRRRLDSNKKRQRNLLDAIEEGGARGLVSRLAALEEEEEQLVLEIQRAEIKRPRLTHEVVEAWLRSFRVGDVTDDDFRARLVDTFIARVELRNDEALIFYNIREKGPHSRVRVRPEWWSPRDGTRTPKIIVLRDYVVLRIAV

SEQ ID NO: 5698 - protein, 502 aa, Unknown
  Description of Unknown: Integrase B5699 sequence
  cd03768,PTHR30461:SF3,SM00857,IPR036162,PF13408, IPR025827,G3DSA:3.40.50.1390,PS51737,IPR006119,PF07508, IPR011109,SSF53041,PTHR30461,PS51736,PF00239
MIAIYARQSVEKKDSISIESQIEYAKREVFSEDFKIYQDSGYSGKNTNRPAFHEMMADVQSGRIEKVVVYRLDRISRSILDFADFINILESNQISFVSATEKFDTSTPMGRAMLYIIVVFAQLERETIAERVRDNYYARVKKGAWGGGPAAFGFDLVKTTIDGKKATICQPNEQISVVQRIFELYALPYSSLADVQRQLIQDGTVSAGGVNFDNAKLSSILKNPAYVRADTAVYNFYKAKGAILANPPEDFDGVHGCILVGKRDANERKYKDVSNHLLAMGHHEGIVDSTAFLFCQQKLSRNRQIKNTYKGKHSWLTGLVKCAHCGYAFTIRFSKTKDGQIPYFCCSGKYLHKACTAKQTHRVREIEAEVQASLIQHAASYNLIHRQNTDAAAKEFQSRISEIDAKIENLILSLESVSHVSAQYINQRIEALHREKQLLLHRYNETISEYNINEVTPFSATDWEQMDIEQKRQLARSLIRTVYLSEDGLSVSFNIKNGGHKP

SEQ ID NO: 5699 - protein, 502 aa, Unknown
  Description of Unknown: Integrase B5700 sequence
  PTHR30461:SF3,cd00338,SM00857,G3DSA:1.10.10.2600,IPR036162, PF13408,IPR025827,G3DSA:3.40.50.1390,IPR006119,IPR038109, PF07508,IPR011109,SSF53041,PTHR30461, PS51736,Coil,PF00239
MKKAYSYIRFSSEAQRQGDSVHRQDKLIREWLISNPDYTLDETLSFRDLGLSGYDSSNISKGGLGVFLEAVKSGLIKEGSVLLVESLDRLTRVSIDHAQELLRSLLKAGINVVTLSDGTTYDKSSLNDPLSLIKSILIAERAHEESLTKSKRVKAAWDSKRDKLRSGNDKKILTRNCPMWLEVSEDRSSFKVRESIAALIREIFKMRIEGSPIQEIARKFSKEFSPSFVNTVLYNVAVIGTLKTRAVQEPIEGYYPAIIDESTFYQVQLLKQSSKGKKPLNRYPNRVYLFKGLLVCGECHKSISVIGATETVYGAYRCRDFNSGRCSQRSISRGQVDKSLFELFRYMDRLPIATSIDNVLDSLQLKKKDCEERIQRLVEALEVSPNTKPLVERIKALQSDLDAIEISIEEESYKVKSFNRDRLVDSCDMNTVEGRNEFHLIVKRLVKRIYLDTLNRRVTVELVNGKVIEGYPASKDIDKEPPINILEILERDYLNLDKISLD

SEQ ID NO: 5700 - protein, 502 aa, Unknown
  Description of Unknown: Integrase B5701 sequence
  cd03768,PTHR30461:SF3,SM00857,G3DSA:1.10.10.2600,IPR036162, PF13408,IPR025827,PS51737,G3DSA:3.40.50.1390,IPR006119, IPR038109,PF07508,IPR011109,SSF53041,PTHR30461, PS51736,Coil,PF00239
MEFIREDCIYARQSVDRKDSISIESQIDFCKYELKGGSCRVFKDKGYSGKNTDRPEFQKLLGEIRKGKVRRVIVYKLDRISRSILDFATMMELFQEYDVEFVSSTEKFDTSTPMGRAMLNICIVFAQLERETIQKRVTDAYYSRCLKGFHMSGQAPYGYQLEPTVVEGIRTKKMVADPIAADHVRLMFEMYAEPETSFGDITRYFEEHDIKIYGKSMFRTFLSQLLRNPVYAQADLELYEFFKSQGAAIVNDASDFAGTNGCYLYQGRDVKEDKDRCLKDQILVIAPHEALISSDTWLKCRKKLMANTTFQQGRKPKNTWLAGKIKCGHCGYALKATHVPNSTGYFRCTKRTENKGCPGCGKIRKEEFEQFIFSTMQEKFKDFQILHGREEKVNPKLTAYQVELAQVEAEIEKLLDTLTGANATLLAYANKKIEELDTRRQTISKAIAELSVETISPQQIKKLSYYLDNWDSIDFDDKRKAADGLISTIKATSDHVQIEWKI

SEQ ID NO: 5701 - protein, 502 aa, Unknown
  Description of Unknown: Integrase B5702 sequence
  PTHR30461:SF3,IPR036162,PS51737,IPR011109,PTHR30461, PS00397,PF00239,G3DSA:1.10.10.2600,IPR006119,SSF53041, cd00338,SM00857,IPR025827,IPR038109,PS51736, IPR006118,PF13408,G3DSA:3.40.50.1390,PF07508,Coil
MKKKILMAALYIRVSTEKQEELSPDSQKRLLLDYAKSHDMIVSEKHIYIENGISGRKADKRPKFQQMIATAKSSDHPFDVILLWKFSRFARNQEESIVYKSMLRNKYSVDVVSISEPLVDGPFGSLIERIIEWMDEFYSIRLSGDVTRGMTQKALNGGYQCRPPLGYRIPYHKATPEIVPDEAKIVRLIFEKYVYENMSIFAIVKHLNSLGHKTSHGKPFEKRSIEYILQNPGYAGDIRWNRTINETNEIRDPSEWIIRPGHHPAIIEKELFEKAQERYHSEYKRRNAKPSEISKHWLSGLLKCSKCGRSLSSCVVHRKTLPDSFYFQCYGYLKGKCNNDCYVREEEIGPTVIKALEEALRKGTVSYTIKKSYQNQSRGSELEVLYKNLDRLSFKEERAKEAYIDGIDTKEEYKANKLRLQKERQELQEMIDTIEHNSSDTVSNDSRMLSSISNVLDIVQSDKFTMQEKNAALKSIVDQITYDKKINHIDVDYYLIETPEAL

SEQ ID NO: 5702 - protein, 502 aa, Unknown
  Description of Unknown: Integrase B5703 sequence
  cd03768,SM00857,G3DSA:1.10.10.2600,IPR036162,PF13408, IPR025827,G3DSA:3.40.50.1390,PS51737,IPR006119,IPR038109, PF07508,IPR011109,SSF53041,PTHR30461,PS51736, Coil,PF00239
MKTDSNKELRCAIYTRKSVAEGLDKDFNTLDAQREAGESYIASQKHEGWIVIPKHYDDGGFTGGNMERPALQELFDDIKNGKIDIVVVYKVDRLSRSIMDFAKIVELFESHNVSFVSVTQHFNTKDSMGRLTLNILLSFAQFERELISERIKDKMSASRKKGRWTGGLPVLGYDILPEGRAIAVNHKEAQIVRRIFAYYLENRSIRSVLEWLQSENMRTKTWKSRKGKILGGNGFSLSVLAHLLKNKIYIGKIEYEGEIYEAECDAIIDPDTFEKVQVLLAANNVDKSPQVRNKYNALLSGKVFCKHCGTPMTHSYTKKTQNKVYRYYICSNATKTGWKNCPHPSVSAEELESLVVSELEKISDDTKLADDVIESYFTINEVELDTLIKNESFAKRSIEKLRRKISENENASNIAELRRKETDTESAMEDIRAEIKRLRNRLETSKGKLRNMFADFRKVWSNLNFKEQYELTDLLIERIVFDGTNGEVFINFRETGIKTFKE

SEQ ID NO: 5703 - protein, 502 aa, Unknown
  Description of Unknown: Integrase B5704 sequence
  PTHR30461:SF3,IPR036162,PS51737,IPR011109,PTHR30461, PS00397,PF00239,G3DSA:1.10.10.2600,IPR006119,SSF53041, cd00338,SM00857,IPR025827,IPR038109,PS51736, IPR006118,PF13408,G3DSA:3.40.50.1390,PF07508,Coil
MTNNTSMRTGALYIRVSTGKQEELSPDAQRRLLLDYASKNNIIISNQYIYEEDGISGRKADKRPQFQDMIAHAKSKEHPFDVILVWKYSRFARNQEESIVYKSMLRKDHVEVISVSEPLVDGPFGSLIERIIEWMDEYYSIRLSGEVVRGMTENALRGRNQARPPLGYKVPHAKETPVIVPEEALIIHTIFDMYTEDGASMFAIAKHLNNLGYLTSHKKPFERRSIGYILSNPTYIGKSVWNRHSNDNKALKDESEWIIRDGSHEPIISVDQYEKAQQRIKAEYAPKYAKPPELHRHWLSGMVKCHTCGRSLSTSVHKDKRYGRTYTNFQCYGYLKGKCSVSHQISVRKLEPAILEGLKEIMEGVRPLQFKIIKSEEPAAQSAHEILTERLHDIEKKEERIRQAYRDGIDTIEEYRDNKAILFKERTEIESRLEELTPAPVPSETDTRELMRNRLKNVYEILSSEDVSTVTKSNALKSIVDKVVYDSEKKELSIYLYCSDTL

SEQ ID NO: 5704 - protein, 502 aa, Unknown
  Description of Unknown: Integrase B5705 sequence
  PTHR30461:SF3,SM00857,G3DSA:1.10.10.2600,IPR036162,PS51737, G3DSA:3.40.50.1390,IPR006119,IPR038109,PF07508,IPR011109, SSF53041,PTHR30461,Coil,PS51736,cd00338, PF00239
MNKVCIYLRKSRADEEIEKALGQGETLRKHRKSLLKFAKENNLNIVDIKEEIVSGDSLFFRPKMLELLKEVEEKKYTGVLVMDIDRLGRGGMKDQGIILDAFKESNTEIITPTKTYNLNNEFDEEMTEFKTFFARRELKSITKRMQGGRVRSVEEGNYIGTNPPLGYEIFYIQKSRTLKIVQEEAEIIKIIFKMYSENNGATSIAEHLNMLGLKTKTGNNFSPSSVLAILKNPIYIGKITWKKREEKKSKIPGKTKDCRTRDKSEWIISQGKHEAIISEDLFNKCQNILTGRYHIPYQLHNKPVNPFSGLITCKICGKKMTMRPSRGINRLMCVHKCGNRSSRFDYVESDLIKALEEYVANYKIQIEIKEKKVDLGLYKKQATLITNELNELKKQKNKLFDLLERGIYDEMIFLERSKNIDKRIEECECSLTKINEELSLNNLKTEENIVNFKNAIEAYKETNDIDSKNLILKSILEKVEYYKDKEAKNDDFELTIYPKFLR

SEQ ID NO: 5705 - protein, 502 aa, Unknown
  Description of Unknown: Integrase B5706 sequence
  PTHR30461:SF3,SM00857,G3DSA:1.10.10.2600,IPR036162,PF13408, IPR025827,PS51737,G3DSA:3.40.50.1390,IPR006119,IPR038109, PF07508,SSF53041,IPR011109,PF00239,PTHR30461, PS51736,Coil,cd00338
MYEDIKTACLYVRFSSHNQTEQSIEGQTRVCRDFCKRHNIRIVEIYADRATSASKDIEKRVQFLKMIKDSEKGLFDAVIVYKLDRFARSRYDSATYKYRLKRNGVQLISATENISNDPEGIILESVLEGMAEFYSAELSQKINRGMRESAYKHNSIGGAVPLGYKIEDKKLVIDPKTAPLVKEAFEKYADGETVAEICRQFNARGYKTSKGTAFGKSSFTKIFRNERYIGVYTFHDYRAEGAVPAIIDKDLWDRVQLRAGKIKSAPARHKAKVVYLLSGKLFCGHCGSRMNGNCNASNYYYYQCYGKKNGHVDCKKKNIRKEFIERLVAQDALSLLTDEYVEQIATIACEKNQHEIELDSALPTIRDRIHQVDISLNNLLKAIESGSAPDMLVKRMGELEKEKKDLQVQAKKESDNLIELDKAQVIYWLEQFRGGSIEDEEFCRMLIDLFVNSVTVWDEDDDTYKVTVAYNLTSLPTKTYRLSKGGTLSDFASNAPAESRRT

SEQ ID NO: 5706 - protein, 502 aa, Unknown
  Description of Unknown: Integrase B5707 sequence
  PTHR30461:SF3,IPR036162,PS51737,IPR011109,PTHR30461, PS00397,PF00239,G3DSA:1.10.10.2600,IPR006119,SSF53041, cd00338,SM00857,IPR025827,IPR038109,PS51736, IPR006118,PF13408,G3DSA:3.40.50.1390,PF07508,Coil
MTDNTSMRTGALYIRVSTGKQEELSPDAQRRLLLDYASKNNIIISNQYIYEEDGISGRKADKRPQFQNMIAHAKSKEHPFDVILVWKYSRFARNQEESIVYKSMLRKDHVEVISVSEPLVDGPFGSLIERIIEWMDEYYSIRLSGEVVRGMTENALRGRNQARPPLGYEVPHAKETPVIVPEEALIIHTIFDMYTEDGASMFAIAKHLNNLGYLTSHKKPFERRSIGYILSNPTYIGKSVWNRHSNDNKALKDESEWIIRDGSHEPIISVEQYEKAQQRIKAEYTPKYAKPPELHRHWLSGMVKCHTCGRSLSTSIHKDKRYGRTYTNFQCYGYLKGKCNVSHQISARKLEPAVLEGLQEIMEGVRPLQFKIIKSEEPAAQSAHEILTERLHDIEKKEERIRQAYRDGIDTIEEYRDNKAILFKERAEIESRLAELTPAPAPSETDTRELMCNRLKNVHEILSSEDVSTVTKSNALKSIVDKIVYDSEKKELSIYLYCSDTL

SEQ ID NO: 5707 - protein, 502 aa, Unknown
  Description of Unknown: Integrase B5708 sequence
  cd00338,SM00857,G3DSA:1.10.10.2600,IPR036162,PS51737, G3DSA:3.40.50.1390,IPR006119,IPR038109,PF07508,IPR011109, SSF53041,PTHR30461,PS51736,Coil,PF00239
MNNKICMYLRKSRADEELEKTLGEGETLSKHRKALLKFAKEKKLNIVEIKEEIVSGESLFFRPKMLELLKEVEAKKYDGVLVMDMQRLGRGDMKDQGIILETFKNSNTKIITPQKTYDLNNDFDEEYTEFEAFMSRKELKMINRRMQGGRVRSVEEGNYIATNPPYGYDIGFINKSRVLKVNEYESNAIKLIFKLYLDGNGASFIANELNNLGYKTKLGNNFSNSSVLTIIKNPVYIGKIAWKRKDIKKSKTPGKVKDTRLRDVSEWIIADGKHQAIINTETWEAAQKILKSRYHIPYQLSNSPVNVFAGLITCGICGKKMVMRKARGINRLMCIYKCGNKSTRFDNVESDCLKYLREYLTDYTAEIKNQIKEDDNNIYISQISQLKKELTTLNNQRLKLFDLLERNLYDENTFLERSKNINDRIETVSSTLKSIEKLLKKKSKASYEEDIEFFKSVLDAYDETEDISKKNSLLKSILFKIEYTKTNKGKDYEIKLFPKLRK

SEQ ID NO: 5708 - protein, 502 aa, Unknown
  Description of Unknown: Integrase B5709 sequence
  SM00857,G3DSA:1.10.10.2600,IPR036162,PS51736, PS51737,G3DSA:3.40.50.1390,IPR006119,IPR038109, PF07508,IPR011109,SSF53041,PTHR30461, mobidb-lite,cd00338,PF00239
MTKSEQQERKQKIRERYKGADTSRIKVIPAKSSEHLETSNTIRRVAAYVRVSTDNDEQTSSYELQKNYYTKYIKAQPGWEFAGIYADEGISGTSLEHRKGMQKLIEDCKAGKIDLILTKSISRFARNIVDCLSIVGMLKDLEPPVGVKFETDNISTLDINGRMLLSIVASLAEEESHNKSLLMNWSLEQRYKEGMFLIPELLGYDLDENGDLVVNPEEAQTVKVIYYLYLNGFSLTEIAELLTDYRRKTKLGNTEWNPSSLAAVIANERHCGDLLARKTYTPNYLTHKSKKIKNNERAQYWDFDHHEAIVSREVYNAANHLRASRSYAKRKRPLPVLSVVDDGILRGYVPFDKDWTGFSAEEYREASESVWQEKQTNTVEVMNRLDLTGYELVRSQYFSTLRNPAMTISNGKLRFNTACLKKFKNVEYAELLLNSVDRCVAIRPCEKSNPNAIHWGRLKEGRWCASTLVCRGLAKALFDIMEWEDGLKYRFRGQFVQISLLQ

SEQ ID NO: 5709 - protein, 502 aa, Unknown
  Description of Unknown: Integrase B5710 sequence
  PTHR30461:SF3,IPR036162,PS51737,IPR011109,PTHR30461, PS00397,PF00239,G3DSA:1.10.10.2600,IPR006119,SSF53041, cd00338,SM00857,IPR025827,IPR038109,PS51736, IPR006118,PF13408,G3DSA:3.40.50.1390,PF07508,Coil
MTDNTSMRTGALYIRVSTGKQEELSPDAQRRLLLDYASKNNIIISNQYIYEEDGISGRKAEKRPQFQDMIAHAKSKEHPFDVILVWKYSRFARNQEESIVYKSMLRKDHVEVISVSEPLVDGPFGSLIERIIEWMDEYYSIRLSGEVVRGMTENALRGRNQARPPLGYKVPHAKETPVIVPEEALIIHTIFDMYTEDGASMFAIAKHLNNLGYLTSHKKPFERRSIGYILSNPTYIGKSVWNRHSNDNKALKDESEWIIRDGSHEPIISTEQYEKAQQRIKAEYAPKYAKPPELHRHWLSGMVKCHTCGRSLSTSIHKDKRYGRTYTNFQCYGYLKGKCNVSHQISVRKLEPAILEVLKEIMEGVRPLQFKIIKSEEPAAQSAHEILTERLHDIEKKEERIRQAYRDGIDTIEEYRDNKAILFKERTEIESRLAELTPAPAPSETDTRELMRNRLKNVYEILSSGDVSTVTKSNALKSIVDKIVYDSEKKELSIYLYCSDTL

SEQ ID NO: 5710 - protein, 502 aa, Unknown
  Description of Unknown: Integrase B5711 sequence
  PTHR30461:SF3,SM00857,G3DSA:1.10.10.2600,IPR036162,PF13408, PS51737,G3DSA:3.40.50.1390,IPR025827,IPR006119,IPR038109, PF07508,IPR011109,SSF53041,PF00239,PTHR30461, PS51736,Coil,cd00338
MKTAVIYARYSSDKQTEQSIEGQLYDCYNYAKANNITVIGEYIDRAMTGRNDDRPDFQRMISDSAKHTFELVLVWKLDRFARSTEDAAYNRGKLKRNGVRLLSIKEDFGDSSAGDLMMHVMESFNEFYSADLREKTVRGMHQSALKCQSTGGQIPIGYKIEGKKYAIDEATRFIPETVFRMYAEGKRLAEIARYLNERGYRTRMGRKFTTGSFYTMLSNEKYIGVYKYGDVRIEGGYEAMIDPVLFDAVQKKLVENKKRAPKISERENFYLTGKLFCGHCGEPMNGMSGNSTKGKHLYYRCNGVRKHTGCDKRTERKEELENEIIGAIQRAFANADPEELTRKVIENYEKNSRPADQVKVMKAELQKITNKVDNVVNAIAEMGGNETLYTQLRQLTEQKEQKETEIRIAEHKADDMPTVELVKKILDLIQNADTMTDEGRQLLIDGAVSRIYVYDDSLDIYFNGGKNTEIPLNPANKDDVSDNSFACCKEWGSENEKKQKKS

SEQ ID NO: 5711 - protein, 502 aa, Unknown
  Description of Unknown: Integrase B5712 sequence
  cd03768,PTHR30461:SF3,SM00857,G3DSA:1.10.10.2600,IPR036162, PF13408,IPR025827,G3DSA:3.40.50.1390,PS51737,IPR006119, IPR038109,PF07508,SSF53041,IPR011109,PTHR30461, PS51736,Coil,PF00239
MDIIREDCIYARQSVDRKDSISIESQIDFCKYELKGGSCKVFKDKGYSGKNTDRPEFQKLLGEIRKGRVRRVIVYKLDRISRSILDFANMMELFQEYDVEFVSSTEKFDTSTPMGRAMLNICIVFAQLERETIQKRVTDAYYSRCLKGFHMSGQAPYGYQLEPTVVEGIRTKKMVADPVAADHVRLMFEMYAEPETSFGDITRYFEEQGIKIYEKSMVRSFLSQLLRNPVYAQADLELYEFFKSQGAAIVNDASDFAGTNGCYLYQGRDVKEDKDRCLKDQILVIAPHEALIPSDVWLKCRKKLMMNKTFQQGRKPKNTWLAGKVKCGRCGYALKATHVPNSPGYFRCTKRAENKGCPGCGKIRKTEFEEFIFNAMRKRFKNFQVRHDREEKVNPKLTAHQIELAQVEAEIEKLLDTLTGANATLLAYANKKIEELDTRRQTISKAIAELSVETMSPQKEQELSYFLDHWDSIDFEDKRKSADGLIISISATSDHVQVEWKI

SEQ ID NO: 5712 - protein, 502 aa, Unknown
  Description of Unknown: Integrase B5713 sequence
  PTHR30461:SF3,SM00857,G3DSA:1.10.10.2600,IPR036162,PF13408, PS51737,G3DSA:3.40.50.1390,IPR025827,IPR006119,IPR038109, PF07508,IPR011109,SSF53041,PTHR30461,Coil, PS51736,cd00338,PF00239
MKTCIYLRKSRADEEAEKQGEFETLHRHKTTLLKIAKEKCLNVVDIKEELESGESIKDRPRMIELLKEVEDNQYDAVLVMDIDRLGRGNMQDQGLILDTFKNSNTEIITPRKTYNLNNEFDEEYSEFEAFMARKELKLINRRLQRGRIKSIEEGKYISPDPPYGYKFKYDDRGKKCLIIDEYQAEAVRLIFSMYLDMYGSNKIANKLNELGYKTNNHMQFKNKAVKDILTNITYCGYVKWKTVDRKNHNRVRPKDEQIIVKGNHEAIIDEITFNRAQEIRKNRYIPPTFEKKEISNPLAGVLICGKCGHNLIQAVDSRRPKDDIRRFYIKCKHCDNKSSRFDYIEKAILNSLEDWLNEYKIKVSLEDDRTEIDKLKFESKAIKRELKNTENQQNKLYDFLERGIYSEEIFLERSVLLSNKIKSLKEELSRVNIEIISSKENTLARKQLIPTLETTLENYYKSDNAKEKNILLKTVLDKVVYTKEKNQKNDNFSIELYPKLPK

SEQ ID NO: 5713 - protein, 502 aa, Unknown
  Description of Unknown: Integrase B5714 sequence
  PTHR30461:SF3,IPR036162,PS51737,IPR011109,PTHR30461, PS00397,PF00239,G3DSA:1.10.10.2600,IPR006119,SSF53041, cd00338,SM00857,IPR025827,IPR038109,PS51736, IPR006118,PF13408,G3DSA:3.40.50.1390,PF07508,Coil
MTDNTSMRTGALYIRVSTGKQEELSPDAQKRLLLDYASKNNIIISNQYIYEEDGISGRKADKRPQFQDMIAHAKSKEHPFDVILVWKYSRFARNQEESIVYKSMLRKDHVEVISVSEPLVDGPFGSLIERIIEWMDEYYSIRLSGEVVRGMTENALRGRNQARPPLGYKVPHAKETPVIVPEEALIIHTIFDMYTENGASMFAIAKHLNNLGYLTSHKKPFERRSIGYILSNPTYIGKSVWNRHSNDNKALKDESEWIIRDGSHEPIISVEQYEKAQQRIKAEYTPKYAKPPELHRHWLSGMVKCHTCGRSLSTSIHKDKRYGRTYTNFQCYGYLKGKCNVSHQISARKLEPAVLEGLQEIMEGVRPLQFKIIKSEKPTAQSAHEILTERLHDIEKKEERIRQAYRDGIDTIEEYRDNKAILFKERAEIESRLEELTPAPVPSETDTRELMRNRLKNVYEILSSEDVSTVTKSNALKSIVDKIVYDSEKKELSIYLYCSDTL

SEQ ID NO: 5714 - protein, 502 aa, Unknown
  Description of Unknown: Integrase B5715 sequence
  PTHR30461:SF3,IPR036162,PS51737,IPR011109,PTHR30461, PF00239,G3DSA:1.10.10.2600,IPR006119,SSF53041,cd00338, SM00857,IPR025827,IPR038109,PS51736,mobidb-lite, PF13408,G3DSA:3.40.50.1390,PF07508,Coil
MNAVIYARFSSHSQREQSIEGQLRDCYEYAKRYDINIVGEYIDRAISGMTDDRPDFQRMIADAPKKQFERIIVWKLDRFARNRYDSALYKHKLKQYGIRVISAMENVGEGDESILLEALLEASAEYYSLDLKKKIKRGQRETIAKGRWCGGPIPYGYKAVDGKLLADEKTAPIIRYVFEQYAQGVSMKEIIDELKRRGVRSSRGGELTYTTFSRALTNPVYIGNFMYKGELVPGVADALIDEDTYNKVQNIVKANAHAPAANKAKVEYLLQGKAFCGHCGSHMVGESGKSRNGDVYYYYSCAARKKAHKCRKKNEKKDFIEWYVVEQTLQYVLTPARMRDIAKAVVAEYDKEFAGSRVEEYEKAIKQYERELDKLVDALVDAPKVAHKRIYEKMETLETQKAAMENELVKLRIASEIRFTEEEVRAWLRRFCTGDLFDPEFRRNIIDTFINCIYLYDDRIIIFYNIKGGKQVSFVDLAESLDNESESSGSDLNANAPPFKNL

SEQ ID NO: 5715 - protein, 502 aa, Unknown
  Description of Unknown: Integrase B5716 sequence
  cd03768,PTHR30461:SF3,SM00857,IPR036162,PF13408, IPR025827,PS51737,G3DSA:3.40.50.1390,IPR006119,PF07508, IPR011109,SSF53041,PTHR30461,PS51736,Coil, PF00239
MIAIYARQSVEKKDSISIESQIEYAKREVFSEDFKIYQDSGYSGKNTNRPAFHEMMADVQSGRIEKVVVYRLDRISRSILDFADFINILESNRISFVSATEKFDTSTPMGRAMLYIIVVFAQLERETIAERVRDNYYARVKKGAWGGGPAAFGFDLVKTTIDGKKATICQPNEQISVVQRIFELYALPYSSLADVQRQLIQDGSVSSGGVNFDNAKLSSILKNPAYVRADTAVYNFYKAKGAILANPPEDFDGVHGCILVGKRDANERKYKDVSNHLLAMGHHEGIVDSTAFLFCQQKLSRNRQIKNTYKGKHSWLTGLVKCAHCGYAFSIRFSKTKDGQVPYFCCSGKYLHKACTAKQTHRVREIEAEVQASLIQHAASYNLIHRQNTDAAAKELQSRISEIDAKIENLILSLESVSHVSAQYINQRIEALHHEKQLLLHRYNETISEYNINEVTPFSATDWEQMDIEQKRQLARSLIRTVYLSEDGLSVSFNIKKGGHKP

SEQ ID NO: 5716 - protein, 502 aa, Unknown
  Description of Unknown: Integrase B5717 sequence
  cd03768,PTHR30461:SF3,SM00857,IPR036162,G3DSA:3.40.50.1390, IPR006119,SSF53041,PTHR30461,PS51736,Coil, PF00239
MKKVAIYSRKSVLVEGSVSIETQINMCKDYINNKFPNAKFKVFEDEGFSGGNTNRPAFQKMLRLAQLNEIDIVVCYKVDRIARNTLDFLKILELFKENNVELISISEGFDPNTQMGKVMLTLLASFAEMERTNIQQRVKDNLLSIAKKGKWTGGSPPTGFKNGLNGGLEWDKKDMILDVFNMKCEKEKNSNIIKYIKEKYNHNFLGGTLATTLRKPIYVKSSPSVSLYLKTKGYIVQGDEDNIHSYLTYTDKETKYAIVSDIVGLIEPSIWISINKDMDKNISREGNRFSEKFWLTKTVRCKYCGQTFCGQTKTTKTKYYNKYGEEKIYISTYSYYSCRDAVRGKLKTCKNTKRVKQEILESKVSELIHLLKDKKTFNSSYFSNKIDNSSKIDTIKKQIKNIDKTINNLTDKIALLSNEASLIFISKLEELVKEKSILKDNLLQLELQELNSNNKKDSLLVYNNILAFNDNLSVDDKRKIAMSLFKEIIYDPETDLLDVTFM

SEQ ID NO: 5717 - protein, 502 aa, Unknown
  Description of Unknown: Integrase B5718 sequence
  cd03768,PTHR30461:SF3,SM00857,G3DSA:1.10.10.2600, IPR036162,PF13408,IPR025827,G3DSA:3.40.50.1390, PS51737,IPR006119,IPR038109,PF07508, IPR011109,SSF53041,PTHR30461,PS51736,Coil,PF00239
MEFIREDCIYARQSVDRKDSISIESQIDFCKYELKGGSCRVFKDKGYSGKNTDRPEFQKLLGEIRKGKVRRVIVYKLDRISRSILDFATMMELFQEYDVEFVSSTEKFDTSTPMGRAMLNICIVFAQLERETIQKRVTDAYYSRCLKGFHMSGQAPYGYQLEPTVVEGIRTKKMVADPVAADHVRLMFEMYAEPETSFGDITRYFEEHDIKIYGKSMFRTFLSQLLRNPVYAQADLELYEFFKSQGAAIVNDASDFAGTNGCYLYQGRDVKEDKDRCLKDQILVIAPHEALISSDTWLKCRKKLMANTTFQQGRKPKNTWLAGKIKCGHCGYALKATHVPNSTGYFRCTKRTENKGCPGCGKIRKEEFEQFIFSAMQEKFKDFQILYGREEKVNPKLTAYQVELAQVEAEIEKLLDTLTGANATLLAYANKKIEELDTRRQTISKAIAELSVETISPQQIKKLSYYLDNWDSIDFDDKRKAADGLISTIKATSDRVQIEWKI

SEQ ID NO: 5718 - protein, 502 aa, Unknown
  Description of Unknown: Integrase B5719 sequence
  PTHR30461:SF3,IPR036162,PS51737,IPR011109,PTHR30461, PS00397,PF00239,G3DSA:1.10.10.2600,IPR006119,SSF53041, cd00338,SM00857,IPR025827,IPR038109,PS51736, IPR006118,PF13408,G3DSA:3.40.50.1390,PF07508,Coil
MTDNTSMRTGALYIRVSTGKQEELSPDAQRRLLLDYASKNNIIISNQYIYEEDGISGRKADKRPQFQDMIAHAKSKEHPFDVILVWKYSRFARNQEESIVYKSMLRKDHVEVISVSEPLVDGPFGSLIERIIEWMDEYYSIRLSGEVVRGMTENALRGRNQARPPLGYKVPHAKETPVIVPEEALIIHTIFDMYTEDGASMFAIAKHLNNLGYLTSHKKPFERRSIGYILSNPTYIGKSVWNLHSNDNKALKDESEWIIRDGSHEPIISVEQYEKAQQRIKAEYTPKYAKPPELHRHWLSGMVKCHTCGRSLSTSIHKDKRYGRTYTNFQCYGYLKGKCSVSHQISARKLEPAVLEGLKEIMEGVRPLQFKIIKSEEPTAQSAHEILTEKLHDIEKKEERIRQAYRDGIDTIEEYRDNKAILFKERAEIESRLEELTPAPVPSETDTRELMRNRLKNVYEILSSEDVSTVTKSNALKSIVDKIVYDSEKKELSIYLYCSDTL

SEQ ID NO: 5719 - protein, 502 aa, Unknown
  Description of Unknown: Integrase B5720 sequence
  cd03768,PTHR30461:SF3,SM00857,IPR036162,PF13408, PS51737,G3DSA:3.40.50.1390,IPR025827,IPR006119,PF07508, SSF53041,IPR011109,PTHR30461,PS51736,Coil, PF00239
MIAIYARQSVEKKDSISIESQIEYAKREVFSEDFKIYQDSGYSGKNTNRPAFHEMMADVQSGKIEKVVVYRLDRISRSILDFADFINILESNRISFVSATEKFDTSTPMGRAMLYIIVVFAQLERETIAERVRDNYYARVKKGVWGGGPAAFGFDLVKTTIDGKKATICQPNEQISVVQRIFELYALPYSSLADVQRQLIQDGSVSSGGVNFDNAKLSSILKNPAYVRADTAVYNFYKAKGAILANPPEDFDGVHGCILVGKRDANERKYKDVSNHLLAMGHHEGIVDSAAFLFCQQKLSRNRQIKNTYKGKHSWLTGLVKCAHCGYAFSIRFSKTKDGQVPYFCCSGKYLHKACTAKQTHRVREIEAEVQASLIQHAASYNLIHRQNTDAAAKELQSRISEIDAKIENLILSLESVSHVSAQYINQRIEALHHEKQLLLHRYNETISEYNINEVTPFSATDWEQMDIEQKRQLARSLIRTVYLSEDGLSVSFNIKKGGHKP

SEQ ID NO: 5720 - protein, 502 aa, Unknown
  Description of Unknown: Integrase B5721 sequence
  PTHR30461:SF3,IPR036162,PS51737,IPR011109,PTHR30461, PS00397,PF00239,G3DSA:1.10.10.2600,IPR006119,SSF53041, cd00338,SM00857,IPR025827,IPR038109,PS51736, IPR006118,PF13408,G3DSA:3.40.50.1390,PF07508,Coil
MTDNTSMRTGALYIRVSTGKQEELSPDAQRRLLLDYASKNNIIISNQYIYEEDGISGRKADKRPQFQNMIAHAKSKEHPFDVILVWKYSRFARNQEESIVYKSMLRKDHVEVISVSEPLVDGPFGSLIERIIEWMDEYYSIRLSGEVVRGMTENALRGRNQARPPLGYEVPHAKETPVIVPEEALIIHTIFDMYTEDGASMFAIAKHLNDLGYLTSHKKPFERRSIGYILSNPTYIGKSVWNRHSNDNKALKDESEWIIRDGSHEPIISTEQYEKAQQRIKAEYTPKYAKPPELHRHWLSGMVKCHTCGRSLSTSIHKDKRYGRTYTNFQCYGYLKGKCNVSHQISARKLEPAVLEGLQEIMEGVRPLQFKIIKSEEPATQSAHEILTERLHDIEKKEERIRQAYRDGIDTIEEYRDNKAILFKERTEIKSRLAELTPAPVPSETDTRELMRNRLKNVYEILSSEDVSTVTKSNALKSIVDKIVYDSEKKELNIYLYCSDTL

SEQ ID NO: 5721 - protein, 502 aa, Unknown
  Description of Unknown: Integrase B5722 sequence
  cd03768,PTHR30461:SF3,SM00857,IPR036162,PF13408, IPR025827,G3DSA:3.40.50.1390,IPR006119,SSF53041,PTHR30461, PS51736,Coil,PF00239
MKRIAIYSRKSVYIEGSISIETQINMCKEYMLKKFKDCEFKIFEDEGFSGGNTNRPAFKKLLRLAELKQIDIVVCYKIDRIARNTLDFLNILEMFKENNVELISITEGFDPNTQMGKVMLTLLASFAEMERSNIQQRVKDNLLSIAKKGKWTGGSPPTGFKNNPNGGIEWDNKDMILDVFNMKYEKSKNTDLIQFIQHKYNHKFLGGTLATTLRKPIYVKSSSSVSLYLKSKGYIVQGTEDNIHSYLTYTDKDTKYAIVSNIVGLVEPSIWISVNKDMDKNISREGNRFSEKFWLTKTIRCKCCGQTYCGQTKTTKTKYYNKKGEEKIYVSTYSYYSCRDAVRGKLKTCNNTKRIKQDVLEAKVSALIYSLKDEKIFNSSYSINKVDNSFKIASLNKKVIEIDKTISNLTDKIALLSNDASLIFIDKIENLIKEKSSIKSNIVELELQELNSKIKTDKALIYNNIKAFNNNLSVDDKRKITMSIFKKIVYDPETNDLDVTFM

SEQ ID NO: 5722 - protein, 502 aa, Unknown
  Description of Unknown: Integrase B5723 sequence
  cd03768,SM00857,G3DSA:1.10.10.2600,IPR036162, PF13408,IPR025827,G3DSA:3.40.50.1390,PS51737, IPR006119,IPR038109,PF07508,IPR011109, SSF53041,PTHR30461,PS51736,Coil,PF00239
MNLIDAIYTRQSVDRIDSISVESQVEFCKREVIGENIKVYTDKGYSGKNTDRPAFQEMMTDIEAGKIRRVIVYRLDRISRSVLDFASVIDVFQKHSVDFVSTMEKFDTGTPIGKAMLMIVMIFAQLERETIQQRVIDAYSSRSKRGFYMGGKVPYGFQLKETVIDGIRTKMYEPIPEEAEIVQTMFRMYAEPQTSFGDIVRYLDEQQVKKRDGEPFSRSRIRDVVVNPVYVRADYRLYEFYKAQGTLIANQPEDFIGTNGAYLYSGNEGKRKTVSLQGHTLVLAPHEGLVSSDIWIKCRSKCLKNACVAKPVKAKATWLAGKIKCAHCGYSLSAKVYHCKTKEDNRYYLCNNKYNTGGCNFGSLDADIVDEIVFEEMQKKLAEFNTLSKQKQESCDLQTIKLKTSIEKIDQEIGALLDKIPMANGTVMDYINNRIADLDAKKKELYAEIVQLSDNNGYSLDEITDYLTHWEEISMADKLTVVDSLVESIYASQDKIKINWKI

SEQ ID NO: 5723 - protein, 502 aa, Unknown
  Description of Unknown: Integrase B5724 sequence
  cd03768,SM00857,G3DSA:1.10.10.2600,IPR036162,PF13408, IPR025827,PS51737,G3DSA:3.40.50.1390,IPR006119,IPR038109, PF07508,IPR011109,SSF53041,PTHR30461,PS51736, Coil,PF00239
MKTDKKKELRCAIYTRKSVAEGLDKDFNTLDAQREAGESYIASQKHEGWIVIPKHYDDGGFSGGNMERPALAELFDDIKKGKIDIVVVYKVDRLSRSIMDFAKIVELFEDHNVSFVSVTQHFNTKDSMGRLTLNILLSFAQFERELISERIKDKMSASRKKGRWTGGLPVLGYDILPEGRAIAVNHKEAQIVRRIFAYYLENRSIRSVLEWLRSENIRTKTWKSRKGKILGGNSFSLSVLAHLLKNKIYIGKIEYEGEIYEAECDAIIDSDTFEKVQGLLAANNVDKSPQVRNKYNALLSGKVFCKHCGTPMTHSYTKKTQNKVYRYYICSNATKTGWKNCPHPSVSAEELESLVVSELERISDDTKLADDVIESYFAINEAELDTLIKNEAFAKRSLENLRRKISENENASNITELRRKETDTESVAKDIRAEIKRLRNRLETSMVKLRNIFADFRKVWSNLNFKEQYELTDLLIERIVFDGTNGEVFINFRETGIKTFKE

SEQ ID NO: 5724 - protein, 502 aa, Unknown
  Description of Unknown: Integrase B5725 sequence
  SM00857,G3DSA:1.10.10.2600,IPR036162,PS51737,G3DSA:3.40.50.1390, IPR006119,IPR038109,PF07508,IPR011109,SSF53041, PTHR30461,Coil,PS51736,cd00338,PF00239
MPYCIYLRKSRKDMELEQYGDGETLARHKRTLLELARKQNLTIGEIYEEIVSGESIEARPQMQKLLRDVENNLWDGVLVMELERLARGDTKDQGTVAQTFKLTNTLIITPQKTYNPLNEFDEEYFEFGLFMSRREYKTINRRLQAGRLASIKEGNYIGSLPPFGYDKVRLTDAKGYTLAENGESDYVRMIYDLYVNKNMTPGKIADYLTSIGVQPKKGGKFTMHSVRDILRNPIYIGKVRWNWRPNKKSVQDGRIIVTRPRSTSESTVLIKGKHQAIISEEIFNAAQKKHGSNPRTQIKHELKNPFAHLMYCRECGKAMVYRTYANSEPRIICANKYCEISSSPFEVIEKSVIDSLTEKLGELEIAAAQPEQSSAEFKTYRSAVKKIEQELEQANAQQNKLYDLLEQGIYTQEIFLERQKALEQRRKDLQNKLVAARENAPQPINYEERITKVRQVLELYPTLDVKEQNTLLRSVIKRITYYRPKSDRYHQNLAEIDIELVF

SEQ ID NO: 5725 - protein, 502 aa, Unknown
  Description of Unknown: Integrase B5726 sequence
  PTHR30461:SF3,SM00857,G3DSA:1.10.10.2600,IPR036162,PF13408, IPR025827,G3DSA:3.40.50.1390,PS51737,IPR006119,IPR038109, PF07508,IPR011109,SSF53041,PF00239, PTHR30461,PS51736,Coil,cd00338
MSETTQIGVIYARYSSDKQRDESIDGQIRECMAYAEREGITITNTYIDRALSAKTDDRPEFRQMILDSNKQAFNYVLVYQLDRFSRNRYDSAIYKAKLRKNGIRVISVKENIKDDPSGIILESVLEGMAEYYSAELSQKVMRGMTDNVLQGKWVGTVVPYGYKLSNNRQLEINEHEANVVRKLFDMYLQRHTLSEMASYMNANGHLTHKGKPFNTNSIKAIISNEKYIGVYSWGSERIENAIPPIIDKSIFEKAQHKRNLRAKKKGNRSELYQLCGKLKCGRCGGNYVGSTGTSKTGALHHYYVCSNRRRKNACKAQNIRRDALDDIVISQTLAILNKPNVVNKIAKYAASSGKNLQSETVAQIDIIDAHIRDLKKSLDNYMTAIANGFISDVLKHRIESTEQELKDQIEIKTNLENTIIPVELTEDHIRFFLLKMAKENPSTLRGRARIIEAFVHHVTIYEDHIEIVFNYKNELSEFHDKTLESSLLNDLVTQKGFEPLAF

SEQ ID NO: 5726 - protein, 502 aa, Unknown
  Description of Unknown: Integrase B5727 sequence
  cd03768,PTHR30461:SF3,SM00857,IPR036162,PF13408, IPR025827,G3DSA:3.40.50.1390,IPR006119,SSF53041,PTHR30461, PS51736,Coil,PF00239
MKKVAIYSRKSVYIEGSVSIETQINMCKEYILKKFPNSTFEVFEDEGFSGGNTNRPAFQKLLRLAELKQIDIVVCYKIDRIARNTLDFLNILEMFKENNVELISITEGFDPNTQMGKVMLTLLASFAEMERSNIQQRVKDNLLSIAKKGKWTGGSPPTGFKNNPNGGIEWDNKDMILDVFNMKYEKSKNTDLIQFIQHKYNHKFLGGTLATTLRKPIYVKSSSSVSLYLKSKGYIVQGTEDNIHSYLTYTDKDTKYAIVSNIVGLVEPSIWISVNKDMDKNISREGNRFSEKFWLTKTIRCKCCGQTYCGQTKTTKTKYYNKKGEEKIYVSTYSYYSCRDAVRGKLKTCNNTKRIKQDVLEAKVSALIYSLKDEKIFNSSYSINKVDNSFKIASLNKKVIEIDKTISNLTDKIALLSNDASLIFIDKIENLIKEKSSIKSNIVELELQELNSKIKTDKALIYNNIKAFNNNLSVDDKRKITMSIFKKIVYDPETNDLDVTFM

SEQ ID NO: 5727 - protein, 502 aa, Unknown
  Description of Unknown: Integrase B5728 sequence
  PTHR30461:SF3,IPR036162,PS51737,IPR011109, PTHR30461,PS00397,PF00239,G3DSA:1.10.10.2600, IPR006119,SSF53041,cd00338,SM00857,IPR025827,IPR038109 ,PS51736,IPR006118,PF13408,G3DSA:3.40.50.1390,PF07508,Coil
MTDNTSMRTGALYIRVSTGKQEELSPDAQRRLLLDYASKNNIIISNQYIYEEDGISGRKADKRPQFQNMIAHAKSKEHPFDVILVWKYSRFARNQEESIVYKSMLRKDHVEVISVSEPLVDGPFGSLIERIIEWMDEYYSIRLSGEVVRGMTENALRGRNQARPPLGYKVMHAKETPVIVPEEAHIVHIIFDMYTEDGASMFAIAKHLNDLGYLTSHKKPFERRSIGYILNNPTYIGKSVWNRHSNDNKALKDESEWIIRDGSHEPIISAEQYEKAQQRIKAEYTPKYAKPPELHRHWLSGMVKCHTCGRSLSTSIHKDKRYGRTYTNFQCYGYLKGKCNVSHQISARKLEPAVLEGLKEIMEGVRPLQFKIIKSEEPAAQSAHEILTERLHDIEKKEERIRQAYRDGIDTIEEYRDNKAILFKERTEIESRLEELTPAPVPSETDTRELMRNRLKNVYEILSSEDVSTVTKSNALKSIVDKIVYDSEKKELSIYLYCSDTL

SEQ ID NO: 5728 - protein, 502 aa, Unknown
  Description of Unknown: Integrase B5729 sequence
  PTHR30461:SF3,cd00338,SM00857,G3DSA:1.10.10.2600,IPR036162, PS51737,G3DSA:3.40.50.1390,IPR006119,IPR038109,PF07508, IPR011109,SSF53041,PTHR30461,PS51736,Coil, PF00239
MKTCIYLRKSRADEELEKKEDVDTLARHRSTLLEVAKNQDLNVIEIKEEIKTGDSIAKRPKMIKLLEEIEKNMYDAVLCMDIDRLGRGDMQDQGRIINTFKKTNTLIITPDKTYNLNNDLDEEMTEFKTFFARRELKVITKRMQRGRVKSIEEGNFIGSTAPLGYKFRYDEYGKRHMIIDEETAPAIKLIFDMYLNGEGSFRIMKRLNTLGYKTTAGKDFTECAVRRIIRNQTYCGYVTWFEYRRKGTKTRKNKEGDVLVCKGKHKPIISEEDWNKAQEIRKGNQITAKKSDRKLINPLAGLIKCSCCKHTMVASYNTVKEGPVLYLRCKNCYEVGSSRLDLVEEEILNTLKVKLKEIKDELNNTEIEDKENKQLEMLKNTLTTLEKEKVELDKQKNKLHDLLERGIYDVDTFLERQQTLAAKKEEIETAIKGTKKLLEAEVSKDIDYKELAKNIECAIGDYENTDNIELKNKALKTVIKEILYYKEKKRFAQFTLEVKFKI

SEQ ID NO: 5729 - protein, 502 aa, Unknown
  Description of Unknown: Integrase B5730 sequence
  PTHR30461:SF3,cd00338,SM00857,IPR036162,PF13408, IPR025827,G3DSA:3.40.50.1390,IPR006119,SSF53041,PTHR30461, PS51736,Coil,PF00239
MPKGTRAAIYARFSSHNQRSESIDIQVEKSREYCAQNGLDVVRVYSDYAQTGRDVQRVEFQRMMADAKLGLFDYVVIYKVTRIMRNRDEMALARIRLRKAGVEILYAGESLGEGSTRVLNLGMLEVLAEWESAIDSERIRDGINKNAQRGMANGRTHYGWDIVNGYYEVNEREAAVMHRMKNMLFAGSTVAEIKRAVAGERGKRGKPLTHGVITKLLRREQNCGVYDYAGVRIEDGMPALWSREDQDMINSILGSNGRKHNKTRDTNDYPLSGKMWCPECGQYYVGTCGTSKTGRVYHYYKCKKCKRTFRRDAVEEAVLDTVLETIKKPDIRQRIVDVMALYNEMNEEKEEPESNRIEREIKRIDTAFERIWQAIEDGIAPPGGKERVAMLREQKAALEADLRQAQANEGANLSGEAIAAWLDHIAQEPDAAEIIETFVRLIEVDGDELKLYFAFDYWGDDFQPKQKKANPERCLPIRKHRGAREKRYSFGYAVFLILALMK

SEQ ID NO: 5730 - protein, 502 aa, Unknown
  Description of Unknown: Integrase B5731 sequence
  SM00857,G3DSA:1.10.10.2600,IPR036162,PF13408, IPR025827,G3DSA:3.40.50.1390,PS51737,IPR006119, IPR038109,PF07508,IPR011109,SSF53041, PTHR30461,Coil,PS51736,cd00338,PF00239
MRGVIYARYSPGPHQTEQSIEGQVADCQQYAEEHGIDIIEIYADRHVSGKSVVGRDEFQRMLRDAEKGRFDCVLVWKIDRFGRDRQDIAMGKMTLKRAGVKLMYARESVPEGPEGIILESVLEGLAEYYSADLRQKVIRGMKETAKKGQYCGQPLPIGYKVDSQRHVVIDEREAAAVREAFKMHIAGAQLRDIVQLFADRGIMGRRGKPVSNAVVYRMLRNEKYLGEFYIQDVKLNVEPIIDQATFLEAARHFKTSRNNAAGRAKVNYLLSCKMFCGYCGSMISAEAGTGKLGKVYRYYKCGDKKRGKKCELKPFPKDHLEDAIILATVNDMLTDEMIEKLTVRILEVQEQENADDPVVGLRRRLDSNKKRQRNLLDAIEEGGARGLVSRLAALEEEEEQLVLEIQRAEIKRPRLTHEVVEAWLRSFRVGDVTDDDFRARLVDTFIARVELRNDEALIFYNIREKGPHSRVRVRPEWWSPRDGTRTPKVIVLRDYVVLRIAV

SEQ ID NO: 5731 - protein, 502 aa, Unknown
  Description of Unknown: Integrase B5732 sequence
  PTHR30461:SF3,cd00338,SM00857,G3DSA:1.10.10.2600,IPR036162, PF13408,PS51737,G3DSA:3.40.50.1390,IPR025827,IPR006119, IPR038109,PF07508,SSF53041,IPR011109,PTHR30461, PS51736,Coil,PF00239
MKTAVIYARYSSDKQTEQSIEGQLYDCYNYAKSNNITVIGEYIDRAMTGRNDDRPDFQRMISDSAKHTFELVLVWKLDRFARSTEDAAYNRGKLKRNGVRLLSVKEDFGDSSAGDLMMHVMESFNEFYSADLREKTVRGMHQSALKCQSTGGQIPIGYKIEGKKYVIDESARFIPETVFRMYAEGKRLAEIARYLNEKGYRTRMGRKFTTGSFYTMLSNEKYIGVYKYGDVRIEGGYEAMIDPVLFDAVQKKLVENKKRAPKISERENFYLTGKLFCGHCGEPMNGMSGNSTKGKHLYYRCNGVRKHTGCDKRTERKEELENEIIGAIQRAFANADPEELTRKVIENYEKNSRPADQVKVMKAELQKITNKVDNVVNAIAEMGGNETLYTQLRQLTEQKEQKETEIRIAEHKADDMPTVELVKKILDLIQNADTMTDEGRQLLIDGAVSRIYVYDDSLDIYFKGGKNTEIPLNPANKDDVSDNSFACCKEWGAKTKTYKPFR

SEQ ID NO: 5732 - protein, 502 aa, Unknown
  Description of Unknown: Integrase B5733 sequence
  SM00857,G3DSA:1.10.10.2600,IPR036162,PF13408,IPR025827, G3DSA:3.40.50.1390,PS51737,IPR006119,IPR038109,PF07508, IPR011109,SSF53041,PTHR30461,Coil,PS51736, cd00338,PF00239
MRGVIYARYSPGPHQTEQSIEGQVADCQQYAEEHGIDIIEIYADRHVSGKSVVGRDEFQRMLRDAEKGRFDCVLVWKIDRFGRDRQDIAMGKMTLKRAGVKLMYARESVPEGPEGIILESVLEGLAEYYSADLRQKVIRGMKETAKKGQYCGQPLPIGYKVDSQRHVVIDEREAAVVREAFKLHIAGAQLRDIVQLFADRGIMGRRGKPVSNAVVYRMLRNEKYLGEFYIQDVKLNVEPIIDQATFLEAAQHFKTSRNNAAGRAKVNYLLSCKMFCGYCGSMISAEAGTGKLGKVYRYYKCGDKKRGKKCELKPFPKDHLEDAIILATVNDMLTDEMIEKLTVRILEVQEQENADDPVVGLRRRLDSNKKRQRNLLDAIEEGGARGLVSRLAALEEEEEQLVLEIQRAEIKRPRLTHEVVEAWLRSFRVGDVTDDDFRARLVDTFIARVELRNDEALIFYNIREKGPHSRVRVRPEWWSPRDGTRTPKIIVLRDYVVLRIAV

SEQ ID NO: 5733 - protein, 502 aa, Unknown
  Description of Unknown: Integrase B5734 sequence
  cd03768,PTHR30461:SF3,SM00857,G3DSA:1.10.10.2600,IPR036162, PF13408,IPR025827,G3DSA:3.40.50.1390,PS51737,IPR006119, IPR038109,PF07508,IPR011109,SSF53041,PTHR30461, PS51736,Coil,PF00239
MEFIREDCIYARQSVDRKDSISIESQIDFCKYELKGGSCRVFKDKGYSGKNTDRPEFQKLLGEIRKGKVRRVIVYKLDRISRSILDFATMMELFQEYDVEFVSSTEKFDTSTPMGRAMLNICIVFAQLERETIQKRVTDAYYSRCLKGFHMSGQAPYGYQLEPTVVEGIRTKKMVADPVAADHVRLMFEMYAEPETSFGDITRYFEEHDIKIYGKSMFRTFLSQLLRNPVYAQADLELYEFFKSQGAAIVNDASDFAGTNGCYLYQGRDVKEDKDRCLKDQILVIAPHEALISSDTWLKCRKKLMANTTFQQGRKPKNTWLAGKIKCGHCGYALKATHVPNSTGYFRCTKRTENKGCPGCGKIRKEEFEQFIFSAMQEKFKDFQILHGREEKVNPKLTTYQVELAQVEAEIEKLLDTLTGANATLLAYANKKIEELDTRRQTISKAIAELSVETISPQQIKKLSYYLDNWDSIDFDDKRKAADGLISTIKATSDRVQIEWKI

SEQ ID NO: 5734 - protein, 502 aa, Unknown
  Description of Unknown: Integrase B5735 sequence
  PTHR30461:SF3,IPR036162,PS51737,IPR011109,PTHR30461, PS00397,PF00239,G3DSA:1.10.10.2600,IPR006119,SSF53041, cd00338,SM00857,IPR025827,IPR038109,PS51736, IPR006118,PF13408,G3DSA:3.40.50.1390,PF07508,Coil
MTDNTSMRTGALYIRVSTGKQEELSPDAQKRLLLDYAAKNNIIISNQYIYEEDGISGRKADKRPQFQDMIAHAKSKEHPFDVILVWKYSRFARNQEESIVYKSMLRKDHVEVISVSEPLVDGPFGSLIERIIEWMDEYYSIRLSGEVVRGMTENALRGRNQARPPLGYKVPHAKETPVIVPEEALIIHTIFDMYTENGASMFAIAKHLNNLGYLTSHKKPFERRSIGYILSNPTYIGKSVWNRHSNDNKALKDESEWIIRDGSHEPIISAEQYEKAQQRIKAEYTPKYAKPPELHRHWLSGMVKCHTCGRSLSTSIHKDKRYGRTYTNFQCYGYLKGKCSVSHQISARKLEPAVLEGLKEIMEGVRPLQFKIIKSEEPTAQSAHEILTERLHDIEKKEERIRQAYRDGIDTIEEYRDNKAILFKERAEIESRLEELTPAPVPSESDTRELMRNRLKNVYEILSSEDVSTVTKSNALKSIVDKIVYDSEKKELSIYLYCSDTL

SEQ ID NO: 5735 - protein, 502 aa, Unknown
  Description of Unknown: Integrase B5736 sequence
  PTHR30461:SF3,SM00857,G3DSA:1.10.10.2600,IPR036162,PF13408, PS51737,G3DSA:3.40.50.1390,IPR025827,IPR006119,IPR038109, PF07508,SSF53041,IPR011109,PF00239,PTHR30461, PS51736,Coil,cd00338
MNAVIYARFSSHNQREQSIEGQLRDCYAYAKRYDLNVVGEYIDRALSGLTDDRPDFQRMIADAAKKQFERIIVWKLDRFARNRYDSALYKHRLKQYGVRVVSAMENVGEGDESILLEALLEASAEYYSLDLKKKIKRGQRENVANGKYNGGPLPYGYKAQNGKLIIDEKKAPVIRYLFEQYASGVPMKEIIDELTRRGVRGSRGGALTYNTFSRALTNTTYIGEYRYAGEVVPGLAEPMIDKEVFEKAQMFVKANARAPAANKAEVEYLLQGKAFCGNCGSPMIGECGRGRNGVVYNYYTCATRKKHHACRKKNERKDFIEWYVVEQTLQYVLTPARIKEIAKAVVTQYDKEFSGSKINECEKMIRQLDRELNKLVDALIEAPKAAHKRIYEKMESLEAQKTAMETDLVKLRIANEIRFTEEEVRAWLKQFCTGDLFDPEFRCNIIDTFINAIYLYDDRVIIFYNIKGGKQVSYIDMISTLEGEESDFVSDSIANAPPAKNP

SEQ ID NO: 5736 - protein, 502 aa, Unknown
  Description of Unknown: Integrase B5737 sequence
  SM00857,G3DSA:1.10.10.2600,IPR036162,PS51737,G3DSA:3.40.50.1390, IPR006119,IPR038109,PF07508,IPR011109,SSF53041, PTHR30461,Coil,PS51736,cd00338,PF00239
MNNKICMYLRKSRADEELEKTLGEGETLSKHRNALLKFAKEKKLNIVEIKEEIVSGESLFFRPKMLELLKEVEAKKYDGVLVMDMQRLGRGDMKDQGIILETFKNSNTKIITPQKTYDLNNDFDEEYTEFEAFMSRKELKMINRRMQGGRVRSVEEGNYIATNPPYGYDIGFINKNRVLKINEYESNAIKLIFKLYLNGNGASFIANELNNLGYKTKLGNNFSNSSVLTIIKNPVYIGKIAWKRKDIKKSRTPGKVKDTKTRDKSEWIIADGKHEAIIDMNTWDKTQEILKGKYHIPYQLTNSPANPFAGLITCGVCGKKMVMRKARGINRLMCIYKCGNKSTRFDLVESDCFEALKEHLKNYTAEVENELIEENTNIYTYQVSQLKKELTTLNNQRLKLFDLLERNLYDEDTFLERSKNINDRIDTVSSTLKSIEKLLKKKTKSSYQEDIQFFQSVLDAYNETEDIAKKNSLLKTILYKIEYTKLNRSKEHVIKVFPKLRK

SEQ ID NO: 5737 - protein, 502 aa, Unknown
  Description of Unknown: Integrase B5738 sequence
  PTHR30461:SF3,IPR036162,PS51737,IPR011109,PTHR30461, PS00397,PF00239,G3DSA:1.10.10.2600,IPR006119,SSF53041, cd00338,SM00857,IPR025827,IPR038109, PS51736,IPR006118,PF13408,G3DSA:3.40.50.1390,PF07508,Coil
MTDNTSMRTGALYIRVSTGKQEELSPDAQRRLLLDYASKNNIIISNQYIYEEDGISGRKADKRPQFQNMIAHAKSKEHPFDVILVWKYSRFARNQEESIVYKSMLRKDHVEVISVSEPLVDGPFGSLIERIIEWMDEYYSIRLSGEVVRGMTENALRGRNQARPPLGYKVPHAKETPVIVPEEALIIHTIFDMYTENGASMFAIAKHLNNLGYLTSHKKPFERRSIGYILSNPTYIGKSVWNRHSNDNKALKDESEWIIRDGSHEPIISVEQYEKAQQRIKAEYTPKYAKPPELHRHWLSGMVKCHTCGRSLSTSIHKDKRYGRTYTNFQCYGYLKGKCNVSHQISARKLEPAVLEGLQEIMEGVRPLQFKIIKSEEPAAQSAHEILTERLHDIEKKEERIRQAYRDGIDTIEEYRDNKAILFKERAEIESRLAELTPAPAPSETDTRELMRNRLKNVYEILSSEDVSTVTKSNALKSIVDKIVYDSEKKELSIYLYCSDTL

SEQ ID NO: 5738 - protein, 502 aa, Unknown
  Description of Unknown: Integrase B5739 sequence
  SM00857,G3DSA:1.10.10.2600,IPR036162,PF13408,PS51737, IPR025827,G3DSA:3.40.50.1390,IPR006119,IPR038109,PF07508, IPR011109,SSF53041,PTHR30461,Coil,PS51736, cd00338,PF00239
MRGVIYARYSPGPHQTEQSIEGQVADCQQYAEEHGIDIIEIYADRHVSGKSVVGRDEFQRMLRDAEKGRFDCVLVWKIDRFGRDRQDIAMGKMTLKRAGVKLMYARESVPEGPEGIILESVLEGLAEYYSADLRQKVIRGMKETAKKGQYCGQPLPIGYKVDSQRHIVIDEREAAVVREAFKLHIAGAQLRDIVQLFADRGIMGRRGKPVSNAVVYRMLRNEKYLGEFYIQDVKLNVEPIIDQATFLEAAQHFKTSRNNAAGRAKVNYLLSCKMFCGYCGSMISAEAGTGKLGKVYRYYKCGDKKRGKKCELKPFPKDHLEDAIILATVNDMLTDEMIEKLTVRILEVQEQENADDPVVGLRRRLDSNKKRQRNLLDAIEEGGARGLVSRLAALEEEEEQLVLEIQRAEIKRPRLTHEVVEAWLRSFRVGDVTDDDFRARLVDTFIARVELRNDEALIFYNIREKGPHSRVRVRPEWWSPRDGTRTPKIIVLRDYVVLRIAV

SEQ ID NO: 5739 - protein, 502 aa, Unknown
  Description of Unknown: Integrase B5740 sequence
  cd03768,PTHR30461:SF3,SM00857,IPR036162,PF13408, PS51737,IPR025827,G3DSA:3.40.50.1390,IPR006119,PF07508, IPR011109,SSF53041,PTHR30461,PS51736,PF00239
MIAIYARQSVEKKDSISIESQIEYAKREVFSEDFKIYQDSGYSGKNTNRPAFHEMMADVQSGRIEKVVVYRLDRISRSILDFADFINILESNRISFVSATEKFDTSTPMGRAMLYIIVVFAQLERETIAERVRDNYYARVKKGAWGGGPAAFGFDLVKTTIDGKKATICQPNEQISVVQRIFELYALPYSSLADVQRQLIQDGSVSSGGVNFDNAKLSSILKNPAYVRADTAVYNFYKAKGAIPANPPEDFDGVHGCILVGKRDANERKYKDVSNHLLAMGHHEGIVDSTAFLFCQQKLSRNRQIKNTYKGKHSWLTGLVKCAHCGYAFTIRFSKTKEGQVPYFCCSGKYLHKACTAKQTHRVREIEAEVQASLIQHAASYNLIHRQNTDAAAKEFQSRISEIDAKIENLILSLESVSHVSAQYINQRIEALHHEKQLLLHRYNETISEYNINEVTPFSATDWEQMDIEQKRQLARSLIRTVYLSEDGLSVSFNIKNGGHKP

SEQ ID NO: 5740 - protein, 501 aa, Unknown
  Description of Unknown: Integrase B5741 sequence
  cd03768,PTHR30461:SF3,SM00857,IPR036162,PF13408,PS51737, G3DSA:3.40.50.1390,IPR025827,IPR006119,PF07508,IPR011109, SSF53041,PTHR30461,PS51736,Coil,PF00239
MNAVYARQSLDKKDSLSIETQIELCKQELGIDVPTKVYIDKGFSGKNTNRPQFQEMMKDIHSGVINKVTVYKLDRLSRSLLDFAEMIEVFKQHNVEFQSTREKFDTSTPIGNAMLSIIMVFAQLERETIQLRVRDNYYMRSANGAYDSTAPYGFIKTKVALQGKSVSSLVCDPETTQILRGIFDAYAYTSTSLGALARQLNKRRVPSPGGAAWDSCKLSRIMSNPVYVKANADIYNYYRLTGINITNPIEAFAGVNGCVTYGQWDHKRRKFDQLKSLTLSIGLHEGLVDAQTFLLCQNRLSNNTQVYNGGQGKHSWLTGLIKCGYCGKAMKADVMKKGVPKFRCSGHANYGTCDDNARVSIAQVEEAVETQIMQHIQRHSDLQAQQIAECDVKEQQYKIQINKINEQIDNLVNAIAQGSATVIGYLNDKIAELETQRHEIEVALQKHILERPSPENTRQLYDTLDMWPYMDIAQRHEVAAMLIKEVRIFTDEIRIFWKYDL

SEQ ID NO: 5741 - protein, 501 aa, Unknown
  Description of Unknown: Integrase B5742 sequence
  cd03768,SM00857,IPR036162,PF13408,IPR025827, G3DSA:3.40.50.1390,PS51737,IPR006119,PF07508,SSF53041, IPR011109,PTHR30461,PS51736,Coil,PF00239
MNIREDAIYGRQSVDRKDSISIESQIEFCKYELRGGNFRQHTDKGYSGKNTDRPKFQELMADIKRGLIKRVVVYKLDRISRSILDFATMMETFQAYNMEFVSSTEKFDTSTPMGRAMLNICIVFAQLERETIQKRVTDAYYSRCQRGFHMSGAAPFGFQLEPTTIQGIRTKMMKPDPETADIARLMFEMYAQPSTSFGDIARYFADEGILIYDKELTRGFISQMLRNPIYVQADLEMYEFFKSQGTVVINEAADFAGINGCYLYQGRDVQARKNKHLKDQFLVVAPSEGMVSADVWLRCRKKLMANITFQNGRKAKNIWLAGKVKCGRCGYALMSVGNPSGVQYLRCSKRADNKSCPGCGTLRTREFEQFIYDEMVKKMAQFHSLTGKRETVNPKLTALKVELAHVEDEIEKLLNTLTGASAVLISYANTKIEELDAQRQTLSKEIAALSAESMSPEQIERLSVYLNRWEEIAFDDRRQVADSLISQIRATGECVAIEWKI

SEQ ID NO: 5742 - protein, 501 aa, Unknown
  Description of Unknown: Integrase B5743 sequence
  cd03768,PTHR30461:SF3,SM00857,IPR036162,PF13408,PS51737, G3DSA:3.40.50.1390,IPR025827,IPR006119,PF07508,IPR011109 ,SSF53041,PTHR30461,PS51736,Coil,PF00239
MNAVYARQSLDKKDSLSIETQIELCKQELGIDVPTKVYIDKGFSGKNTNRPQFQEMMKDIHSGVINKVTVYKLDRLSRSLLDFAEMIEVFKQHNVEFQSTREKFDTSTPIGNAMLSIIMVFAQLERETIQLRVRDNYYMRSANGAYDSTAPYGFIKTKIALQGKSVSSLVCDPETTQILRGIFDAYAYTSTSLGALARQLNQRRVPSPGGAAWDSCKLSRIMSNPVYVKANADIYNYYRLTGINITNPIEAFAGVNGCVTYGQWDHKRRKFDQLKSLTLSIGLHEGLVDAQTFLLCQNRLSNNTQVYNGGQGKHSWLTGLIKCGYCGKAMKADVMKKGVPKFRCSGHANYGTCDDNARVSIAQVEEAVETQIMQHIQRHSDLQAQQIAECDIKEQQYKIQINKINEQIDNLVNAIAQGSATVIGYLNDKIAALETQRHEIEVALQKHILERPSPENTRQLYDTLDMWPYMDIAQRHEVAAMLIKEVRIFTDEIRIFWKYDL

SEQ ID NO: 5743 - protein, 501 aa, Unknown
  Description of Unknown: Integrase B5744 sequence
  cd03768,PTHR30461:SF3,SM00857,IPR036162,PF13408, PS51737,G3DSA:3.40.50.1390,IPR025827,IPR006119,PF07508, IPR011109,SSF53041,PTHR30461,PS51736,Coil, PF00239
MNAVYARQSLDKKDSLSIETQIELCKQELGIDVPTKVYIDKGFSGKNTNRPQFQEMMKDIHSGVINKVTVYKLDRLSRSLLDFAEMIEVFKQHNVEFQSTREKFDTSTPIGNAMLSIIMVFAQLERETIQLRVRDNYYMRSANGAYDSTAPYGFIKTKVALQGKSVSSLVCDPETTQILRGIFDAYAYTSTSLGALARQLNQRRVPSPGGAAWDSCKLSRIMSNPVYVKANADIYNYYRLTGINITNPIEAFAGVNGCVTYGQWDHKRRKFDQLKSLTLSIGLHEGLVDAQTFLLCQNRLSNNTQVYNGGQGKHSWLTGLIKCGYCGKAMKADVMKKGVPKFRCSGHANYGTCDDNARVSIAQVEEAVETQIMQHIQRHSDLQAQQIAECDIKEQQYKIQINKINEQIDNLVNAIAQGSATVIGYLNDKIAALETQRHEIEVALQKHILERPSPENTRQLYDTLDMWPYMDIAQRHEVAAMLIKEVRIFTDEIRIFWKYDL

SEQ ID NO: 5744 - protein, 501 aa, Unknown
  Description of Unknown: Integrase B5745 sequence
  PTHR30461:SF3,SM00857,G3DSA:1.10.10.2600,IPR036162,PF13408, IPR025827,PS51737,G3DSA:3.40.50.1390,IPR006119,IPR038109, PF07508,IPR011109,SSF53041,PTHR30461,Coil, PS51736,cd00338,PF00239
MTAVIYARYSSDSQREASIEGQLRDCKDYAEKNGITVVGTYIDRAYSAKTDDRPDFQRMIKDSAKKIFDVVLVWKLDRFARNRFDAVNYKYQLEKNSVHLVSAMEPISQGPEGIMVESMLIGMAEYYSAELALKVARGERENALQCKYNGGVVPLGFTIGKEDRLYHIDPETAPIVQEIFTRYADGEPAEKIAASLNERGLRTRTGKPFVKNSFFQIFRNRRYIGEYRYKDIVTPGGIPAIVDQDLFDRVQQRFEQNRIAHGRPAKEDVSYLLTTKLFCGKCGTLMGGESGTSHMGNTYYYYKCGNAKRHGKAHCDLKAIRKEPLERFVVDTAIKVIFSDEIIERLIDLVIEAQQKENTRLPVLKDQLRDTEKRLANLLEAIEQGILTPTTKQRLDELEARKEALNTSILEEELKKPVLTREWIRFWLEKFRKGDVGSMEHQRQIIDTFVNSVYVFDDRVVLNFNFTDDAKTVTREEVLGSSAVDNAPPKKRAQLCYFVAK

SEQ ID NO: 5745 - protein, 501 aa, Unknown
  Description of Unknown: Integrase B5746 sequence
  PTHR30461:SF3,cd00338,SM00857,G3DSA:1.10.10.2600,IPR036162, PF13408,IPR025827,G3DSA:3.40.50.1390,PS51737,IPR006119, IPR038109,PF07508,SSF53041,IPR011109,PTHR30461, PS51736,Coil,PF00239
MNAVIYARFSSHNQREESIEGQVRECRKYAEQYDLHVVEVYADRAVSGKTDQRPEFQRMIRDSAKRRFQIVIMYTLDRFARNRRDSATYKYELRKNGVRVVYAKQEIPDSPEGIILESVLEGYAEYYSENLARNITRGLMENALQGKSVGGTTPLGYKREDDRLVIDPVNAQAVRTIFDMYLSGKSSQEIIRWLNEKGYFTALGNPFGKNSLRTILTNEKYIGIYRYRDVVIEDCVPKIIDKDIFDRVQERVKVVSKAKAHYKGDTDYLLCTKAFCGYCGAPLIGECGTGKSGQVYHYYKCASRKRGKTCNKHIENKDALEEAVVRETVNHILQKNVIESIAARAMASLDKLTADDALLKSLQSRLKETEIALANMTKAIEMGIITPTTKSRLLELEADKGDLLDKIKREQESYPDMSKEGIIYWLSSFMQGDPKDENFRRRIFESLLNRVDVFDNDDGTRRIVLTYNLSENRVSAVTCSCSDSALTPPPSSRNESFRLFF

SEQ ID NO: 5746 - protein, 501 aa, Unknown
  Description of Unknown: Integrase B5747 sequence
  cd03768,PTHR30461:SF3,SM00857,IPR036162,PF13408, PS51737,IPR025827,G3DSA:3.40.50.1390,IPR006119,PF07508, IPR011109,SSF53041,PTHR30461,PS51736,Coil, PF00239
MNAVYARQSLDKKDSLSIETQIELCKQELGIDVPTKVYIDKGFSGKNTNRPQFQEMMKDIHSGVINKVTVYKLDRLSRSLLDFAEMIEVFKQYNVEFQSTREKFDTSTPIGNAMLSIIMVFAQLERETIQLRVRDNYYMRSANGAYDSTAPYGFIKTKVALQGKSVSSLVCDPETTQILRGIFDAYAYTSTSLGALARQLNKRRVPSPGGAAWDSCKLSRIMSNPVYVKANADIYNYYRLTGINITNPIEAFAGVNGCVTYGQWDHKRRKFDQLKSLTLSIGLHEGLVDAQTFLLCQNRLNNNTQVYNGGQGKHSWLTGLIKCGYCGKAMKADVMKKGVPKFRCSGHANYGTCNDNARVSIAQVEEAVETQIMQHIQRHSDLQAQQIAECDVKEQQYKIQINKINEQIDNLVNAIAQGSATVIGYLNDKIAELETQRHEIEVALQKHILERPSPENTRQLYDTIDMWPYMDIAQRHEVAAMLIKEVRIFTDEIRIFWKYDL

SEQ ID NO: 5747 - protein, 501 aa, Unknown
  Description of Unknown: Integrase B5748 sequence
  PTHR30461:SF3,SM00857,G3DSA:1.10.10.2600,IPR036162,PF13408, IPR025827,G3DSA:3.40.50.1390,PS51737,IPR006119,IPR038109, PF07508,IPR011109,SSF53041,PTHR30461,Coil, PS51736,cd00338,PF00239
MRFSSPGQMSGDSLNRQRRLITEWLKVNSDYYLDTVTYEDLGLSAFNGKHAQSGAFSEFLDAIEHGYILPGTTLLVESLDRLSREKVGEAIERLKLILNHGIDVITLCDNTVYNIDSLNEPYSLIKAILIAQRANEESEIKSSRVKLSWKKKRQDALESGTIMTASCPRWLSLDDKRTAFVPDPDRVKTIELIFKLRMERRSLNAIAKYLNDHAVKNFSGKESAWGPSVIEKLLANKALIGICVPSYRARGKGISEIAGYYPRVISDDLFYAVQEIRLTPFGISNSSKNPMLINLLRTVMKCEACGNTMIVHAVSGSLHGYYVCPMRRLHRCDRPSIKRDLVDYNIINELLFNCSKIQPVENKKDANETLELKIIELQMKINNLIAALSVAPEVTAIAEKIRVLDKELRRASVSLKTLKSKAVSSLGDFHAIDLTSKNGRELCRTLAYKTFEKIIINTDNKTCDIYFMNGIVFKHYPLMKTISAQQAISTLKYMVDGEVYF

SEQ ID NO: 5748 - protein, 501 aa, Unknown
  Description of Unknown: Integrase B5749 sequence
  cd03768,SM00857,IPR036162,PF13408,IPR025827, PS51737,G3DSA:3.40.50.1390,IPR006119,PF07508,IPR011109, SSF53041,PTHR30461,PS51736,Coil,PF00239
MIIREDAIYGRQSVDRKDSISIESQIEFCKYELRGGNFRKYTDKGYSGKNTDRPKFQEMMADIRRGLIKRVVVYKLDRISRSILDFATMMETFQEYNVDFVSSTEKFDTSTPMGRAMLNICIVFAQLERETIQKRVTDAYYSRCQHGFHMSGAAPYGFQLEPTTIEGIRTKMMKPDPETADIAKLMFEMYSQPATSFGDIARYFADEGILIYGKEMTRGFISQLLRNPIYAQADLDMYEFFKSQGTVVVNEATDFAGTNGCYLYQGRDVQERKNKHLKDQILVLAPSEGLVSSDTWLRCRKKLMANKTFQGGRKAKNTWLAGKVKCGRCGYALMSVGNPTGIQYLRCSKRADSKSCDGCGTLRTREFERFLYGEMVKKLSEFQTLTAKRETVNPKLTALNMELARVEEEIEKLLNTLTGANAVLLSYANSKIEELDTRRQALTKEIAALSAETISPEQIERLSVYLNQWEEIDFEDRRQVADGLISQIRATDEHVSIEWKI

SEQ ID NO: 5749 - protein, 501 aa, Unknown
  Description of Unknown: Integrase B5750 sequence
  cd03768,PTHR30461:SF3,SM00857,IPR036162, PF13408,IPR025827,G3DSA:3.40.50.1390,PS51737, IPR006119,PF07508,IPR011109,SSF53041, PTHR30461,PS51736,Coil,PF00239
MNAVYARQSLDKKDSLSIETQIELCKQELGIDVPTKVYIDKGFSGKNTNRPQFQEMMKDIHSGVINKVTVYKLDRLSRSLLDFAEMIEVFKQHNVEFQSTREKFDTSTPIGNAMLSIIMVFAQLERETIQLRVRDNYYMRSANGAYDSTAPYGFIKTKIALQGKSVSSLVCDPETTQILRGIFDAYAYTSTSLGALARQLNQRRVPSPGGAAWDSCKLSRIMSNPVYVKANADIYNYYRLTGINITNPIEAFAGVNGCVTYGQWDHKRRKFDQLKSLTLSIGLHEGLVDAQTFLLCQNRLNNNTQVYNGGQGKHSWLTGLIKCGYCGKAMKADVMKKGVPKFRCSGHANYGTCDDNARVSIAQVEEAVETQIMQHIQRHSDLQAQQIAECDIKEQQYKIQINKINEQIDNLVNAIAQGSATVIGYLNDKIAALETQRHEIEVALQKHILERPSPENTRQLYDTLDMWPYMDIAQRHEVAAMLIKEVRIFTDEIRIFWKYDL

SEQ ID NO: 5750 - protein, 501 aa, Unknown
  Description of Unknown: Integrase B5751 sequence
  cd03768,PTHR30461:SF3,SM00857,IPR036162,PF13408, IPR025827,G3DSA:3.40.50.1390,PS51737,IPR006119,PF07508, IPR011109,SSF53041,PTHR30461,PS51736,Coil, PF00239
MNAVYARQSLDKKDSLSIETQIELCKQELGIDVPTKVYIDKGFSGKNTNRPQFQEMMKDIHSGVINKVTVYKLDRLSRSLLDFAEMIEVFKQHNVEFQSTREKFDTSTPIGNAMLSIIMVFAQLERETIQLRVRDNYYMRSANGAYDSTAPYGFIKTRVALQGKSVSSLVCDPETTQILRGIFDAYAYTSTSLGALARQLNKRRVPSPGGAAWDSCKLSRIMSNPVYVKANADIYNYYRLTGINITNPIEAFAGVNGCVTYGQWDHKRRKFDQLKSLTLSIGLHEGLVDAQTFLLCQNRLSNNTQVYNGGQGKHSWLTGLIKCGYCGKAMKADVMKKGVPKFRCSGHANYGTCNDNARVSIAQVEEAVETQIMQHIQRHSDLQAQQIAECDAKEQQYKIQITKINEQIDNLVNAIAQGSATVIGYLNDKIAELETQRHEIEVALQKHILERPSPENTRQLYDTLDMWPYMDIAQRHEVAAMLIKEVRIFTDEIRIFWKYDL

SEQ ID NO: 5751 - protein, 501 aa, Unknown
  Description of Unknown: Integrase B5752 sequence
  cd03768,PTHR30461:SF3,SM00857,IPR036162,G3DSA:3.40.50.1390, IPR006119,SSF53041,PTHR30461,PS51736,Coil, PF00239
MKRIAIYSRKSVYIEGSISIETQINMCKEYMLKKFKDCEFKIFEDEGFSGGNTNRPAFQKMLKLAELKQIDVVVCYKIDRIARNTLDFLNILEMFKKSSVELISITEGFDPNTQMGKVMLTLLASFAEMERSNIQQRVKDSMFSLAQKGKWTGGAPPLGFKVKESGGIEIDNKNLILDVFNMKFKKYKNTEIIEYIESKYNHKFVNTTLASTLRKPIYVKSSKEVSIYLKSKGYKILREENNINSYHTYKNDNVDYAIVNNIEGFIEPNIWIAVNKSMDKNSNGETNRFSENFWLTKTLRCKYCGKTYCGQTKIVKSKYTTKDGVIKEYTGNYEYYMCRDMLKGRLKTCENTKRIKRETLELKIEELIYMLQDKKFFEKYYGNKQVDTTFELKEIESKISKINKTIDNLTNKISLLSNDAAMIFIDKIESLVEEKKILNNRIIELELQSLNNLNSKEDFIYENILKFNKNLSVEQKRNIAMNIFKKIIYDYKTDKFEVSFN

SEQ ID NO: 5752 - protein, 501 aa, Unknown
  Description of Unknown: Integrase B5753 sequence
  cd03768,PTHR30461:SF3,SM00857,IPR036162,PF13408,PS51737, G3DSA:3.40.50.1390,IPR025827,IPR006119,PF07508,IPR011109 ,SSF53041,PTHR30461,PS51736,Coil,PF00239
MNAVYARQSLDKKDSLSIETQIELCKQELGIDVPTKVYIDKGFSGKNTNRPQFQEMMKDIHSGVINKVTVYKLDRLSRSLLDFAEMIEVFKQHNVEFQSTREKFDTSTPIGNAMLSIIMVFAQLERETIQLRVRDNYYMRSANGAYDSTAPYGFIKTKVALQGKSVSSLVCDPETTQILRGIFDAYAYTSTSLGALARQLNKRRVPSPGGAAWDSCKLSRIMSNPVYVKANADIYNYYRLTGINITNPIEAFAGVNGCVTYGQWDHKRRKFDQLKSLTLSIGLHEGLVDAQTFLLCQNRLSNNTQVYNGGQGKHSWLTGLIKCGYCGKAMKADVMKKGVPKFRCSGHANYGTCDDNARVSIAQVEEAVETQIMQHIQRHSDLQAQQIAECDAKEQQHKIQINKINEQIDNLVNAIAQGSATVIGYLNDKIAELETQRHEIEVALQKHILERPSPENARQLYDTLDMWPYMDIAQRHEVAAMLIKEVRIFTDEIRIFWKYDL

SEQ ID NO: 5753 - protein, 501 aa, Unknown
  Description of Unknown: Integrase B5754 sequence
  PTHR30461:SF3,IPR036162,PS51737,IPR011109,PTHR30461, PS00397,PF00239,G3DSA:1.10.10.2600,IPR006119,SSF53041, SM00857,IPR025827,IPR038109,PS51736,cd03768, IPR006118,PF13408,G3DSA:3.40.50.1390,PF07508,Coil
MRDMDSARLRVVCYVRVSTREQAEKGYSVSEQQERLKAYCLAKDWVVAQVITDPGFSGAKLERPGMQQLISLVQAKKCDAVLVWKLDRLSRSQKDTLYLIEDVFLKNGCAFVSMNENFDTSTAFGRAMIGILSVFAQLEREQIRERMAVGRVGRAKAGLFHGGGFAPIGYDYKTIAEGGAGLVVNEYEAIQVREVFSLYLQGWPVNRIRKYMAAHYTTKDGDWGSDTTVRDVLKNPLYTGKINWAKKVYDGQHEPLISQETFDAAAARLATSSWKRTCSDGMERNSPFKSTHLLGGIIWCARCGARYFASGNYSGRGENKRYWPYYVCYSRAKSAKHMIRDPNCRNDRWAVTKLDAIIEGEIRKLAFDPAALELAVSGPQRDEDVAQRRAALQQRLNDLRAQMGRVLDLYQMGGSLPASMVGDRVAKLQAEIDGVEAALAEAVEEPPTQRLDAARAALVGAEDVLDNGTLDERRELVHSLIRRIDLDGENIDIHWSFSPEA

SEQ ID NO: 5754 - protein, 501 aa, Unknown
  Description of Unknown: Integrase B5755 sequence
  PTHR30461:SF3,IPR036162,PS51737,IPR011109,PTHR30461, PS00397,PF00239,G3DSA:1.10.10.2600,IPR006119,SSF53041, SM00857,IPR025827,IPR038109,PS51736,cd03768, IPR006118,PF13408,G3DSA:3.40.50.1390,PF07508,Coil
MRDMDSARLRVVCYVRVSTREQAEKGYSVSEQQERLKAYCLAKDWVVAQVITDPGFSGAKLERPGMQQLISLVQAKKCDAVLVWKLDRLSRSQKDTLYLIEDVFLKNGCAFVSMNENFDTSTAFGRAMIGILSVFAQLEREQIRERMAVGRVGRAKAGLFHGGGFAPIGYDYKTIAEGGAGLVVNEYEAMQVREVFSLYLQGWPVNRIRKYMAAHYTTKDGDWGSDTTVRDVLKNPLYTGKINWAKKVYDGQHEPLISQETFDAAAARLATSSWKRTCSDGMERNSPFKSTHLLGGIIWCARCGARYFASGNYSGRGENKRYWPYYVCYSRAKSAKHMIRDPNCRNDRWAVAKLDAIIEGEIRKLAFDPAALELAVSGPQQDEDVAQRRAALQQRLNDLRAQMGRVLDLYQMGGSLPASMVGDRVAKLQAEIDGVEAALAEAVEEPPTQRLDAARAALVGAEDVLDNGTLDERRELVHSLIRRIDLDGENIDIHWSFSPEA

SEQ ID NO: 5755 - protein, 501 aa, Unknown
  Description of Unknown: Integrase B5756 sequence
  cd03768,SM00857,G3DSA:1.10.10.2600,IPR036162,PF13408, PS51737,G3DSA:3.40.50.1390,IPR025827,IPR006119,IPR038109, PF07508,IPR011109,SSF53041,PTHR30461,PS51736, Coil,PF00239
MNIREDVIYARQSVDRKDSISIESQIDFCKYELKGGSCRVFKDKGYSGKNTDRPEFQKLLGEIRKGKVRRVVVYKLDRISRSILDFANMMELFQEYDVEFVSSTEKFDTSTPMGRAMLNICIVFAQLERETIQKRVTDAYYSRCLKGFHMSGQAPYGFDLEPTVVENIRTKMMVADPIAASHVRLMFEMYAEPETSFGDITRYFEERGIKVYGKSLTRSYLSQLLRNPVYAQADLEMYEFFKSQGTVVVNDAADFAGTNGCYLYQGRDVKEDKDKSLKDQILVIAPHEGFVSADVWLRCRKKLMTNTTFQNGRKARNTWLAGKIKCGKCGYALKTTHNPAGYEYLRCSKRVDHKGCPGCGTLRKTEFEQFIFTAMGEKFREFKLLRGGEEKANPKITAYQVELAQVEAEIEKLLDTLTGANATLLAYANKKIEDLDNRRKTLSKAIADLSVETLSSQQIELLSGYLDDWENISFEDKRKAADGLISSISATSDYVKIEWKI

SEQ ID NO: 5756 - protein, 501 aa, Unknown
  Description of Unknown: Integrase B5757 sequence
  cd03768,PTHR30461:SF3,SM00857,G3DSA:1.10.10.2600,IPR036162, PF13408,PS51737,G3DSA:3.40.50.1390,IPR025827,IPR006119, IPR038109,PF07508,IPR011109,SSF53041,PTHR30461, PS51736,Coil,PF00239
MNAVYARQSLDKKDSLSIETQIELCKQELGIDVPAKVYIDKGFSGKNTNRPQFQEMMKDIHSGVINKVTVYKLDRLSRSLLDFAEMIEVFKQHNVEFQSTREKFDTSTPIGNAMLSIIMVFAQLERETIQLRVRDNYYMRSANGAYDSTAPYGFVKTKVALQGKSVSSLVCDPETAQILRGIFDAYAYTSTSLGTLARQLNKRRVPSPGGAAWDSCKLSRIMSNPVYVKANADIYNYYRLTGINITNPIEAFAGVNGCVTYGQWDHKRRKFDQLKSLTLSIGLHEGLVDAQTFLLCQNRLTNNAQVYNGGQGKHSWLTGLIKCGYCGKAMKADVMKKGVPKFRCSGHANYGTCDDNARVSIAQVEEAVETQIMQHVQRHSDLQAQQIAECDAKEQHYKIQINKINEQIDNLVNAIAQGSATVIGYLNDKITELETQRHEIEVALQKHILERPSPENTRQLYDTLDMWPYMDIAQRHEVAAMLIKEVRIFTDEIRIFWKYDL

SEQ ID NO: 5757 - protein, 501 aa, Unknown
  Description of Unknown: Integrase B5758 sequence
  cd00338,SM00857,G3DSA:1.10.10.2600,IPR036162,PS51737, G3DSA:3.40.50.1390,IPR006119,IPR038109,PF07508,IPR011109, SSF53041,PTHR30461,PS51736,Coil,PF00239
MRRRIDPNGRYCAYLRKSRDDRDERGNVMTVEETLRKHESWIVELAIRHGIRVEKWYREVVSAETIDARPEVQQVLRELAEGKWDGVLCVDVQRLARGDTKDQGIMCEFLEVSGALVITTDGYFDTTDEADMDYLEYGLFRSRQEYKAINKILKRGRKRSKLDGNWPFSIAPYGYVKVRDEIGPTLAHGDCAKYVVIVDELSAQGLSFGSIARRMVEIGAPGEWSATKVRRIVTNEAYLGRTPVEKFVVVKRMKADGSGLEKVSIPVKDPQYRPGRHDPIVTQELFDAANANRCNPSLKKSNELRNPLASLLVCSGCGFAMRMIKDSKTGMFRYYHSMKPNGCSVKSCGYDLMMDAVIAELKRRIDDSRVEVRQRSDRSAEREIAAMKESLSVVDRSLASLLDRLMREVVTEDEYMAMKRKLSDEKQSLEATLAAAEADRERETSIEHRNVTIHQAIDILRSDATAGEANAFLRTFIERIEYSNDGVGLNVHNIKLDIFFK

SEQ ID NO: 5758 - protein, 501 aa, Unknown
  Description of Unknown: Integrase B5759 sequence
  PTHR30461:SF3,cd00338,SM00857,G3DSA:1.10.10.2600,IPR036162, PS51737,G3DSA:3.40.50.1390,IPR006119,IPR038109,PF07508, SSF53041,IPR011109,PTHR30461,PS51736, Coil,PF00239
MQNAIYLRKSRADQGTVEDTLRKHKETLLDYAAKHNIFVSLNDIYEEVISGESLYARPQMLRLLSDVEAGKFSAVLCMDIDRLGRGGMSDQGIILDTFKSSNTKIITPAKTYDLNDELDENNMEFAAFIARFEYKQIRKRMRAGVKKSIQDGCYLANAPYGYVNITENKRATLAIQPEEAAYVRQIFDMYVNQGIGCQTIADNMNAMGAKPHRAAQFGRTSVMTILKNPVYIGKIVWDKKTHIRKNSKGNSKHIIISNPQDKWTVTQGLHPPIIDPETFSKAQEIIQNRYHPPAFTGVVINPLSGLIVCKNCGGVMQRAANCKGGPFCLCQKRGCMPMSKLAYVEQSLLGKLQLAADELAAAAQNPRPPAASKEDYQKIIKEIDHQIKTVRQQISRLQDLLEQNVYDIPTFLERQKKHSEKLAALENKKTSILRQANAHREIDIQKTRQRITEVLAAYATAAPQQKNILLKTIVEKAVYYKEKGWAPAQFELEVALRPSFL

SEQ ID NO: 5759 - protein, 501 aa, Unknown
  Description of Unknown: Integrase B5760 sequence
  cd03768,SM00857,IPR036162,PF13408,IPR025827, PS51737,G3DSA:3.40.50.1390,IPR006119,PF07508,SSF53041, IPR011109,PTHR30461,PS51736,Coil,PF00239
MFDAIYTRQSVDKADSISVTAQADFCRKEVVDYPIKVYTDKGYSGKNIDRPGFKELLADIEAGAVRRVIVYRLDRISRSVLDFANIIEIFQKKNVSFVSTMEKFDTDTPIGKAMLMIVMVFAQLERETIQRRVLDAYRSRSRRGFYMGGPVPFGYTLDEIVIDGIRTKTYKQIPEEVRAIQLMYDLYKAPQVSLRDVVRALNQNEVRRRDGTDFCVARVRDILMNPINVKADRRIYEFYKQQGTNVLNPAEDFVGTNGAYLYSSTDQNTRKSSDLSGKFLVLAPHEGIIDSITWIKCRNKLLGNVAVAKPLKAKATWLAGKIKCGYCGYSLVARTYHCKTKQDYRYFICSHKYVSAGCRFSTIDADQVEAYVFDAMRNKLEEFETLRRAKQTDVDLMTVKLKDRIAVIDSEIADLMGKLGAANDVLMNYINDRVKALDEEKRDLQVQINSAVIRDDDDPDAISGYLDKWDELSLPDKLTVVDSLIVKITACKDRIQIYWKI

SEQ ID NO: 5760 - protein, 501 aa, Unknown
  Description of Unknown: Integrase B5761 sequence
  cd00338,SM00857,IPR036162,PS51737, G3DSA:3.40.50.1390,IPR006119,PF07508,SSF53041, IPR011109,PTHR30461,PS51736,Coil, PF00239
MQKQNGLAYSYIRFSSKKQEQGDSVRRQTELAEKYSIANNLTLSEKNFQDLGISAFKEGNRPSLGDMLSAIEQGAIESGSTIIIESLDRLSRRGIDVTQQIIKSILQHNVFIASLTDGLLLNRESVNDLVSVIRIALAADLAHKESEKKSQRLRETKQQQRKAALEGKVINKILPFWLAREKDQFVFSDRLDAVKRIIELKRKGLGTNKIAKTLNDEGFRPLRSAGWNHTTVGKTLSSVALYGAYQTSETTKDRKVILLDIIDNYYPAVISKEDWMLLQSDAKQNKPGYKSDKNAFTGLLKHSCGGALVRKFHVVTGKTYQYHVCANARDGKCTVTQNFKNMEIALYKILKHLKMEKKTSVDTTIAQERAQLKEQIDNLNGMLLTMKKVPMSVLETIGNLEEKLQELDQQFKQQSDMVLAEQSVDFNLLSEIKDPIELNMMLKRVIKEITVFNLKKSWRIKVQYLNGHSQSFRWDGYSMSFVSDSKKLLEYMNAEKEQLDN

SEQ ID NO: 5761 - protein, 501 aa, Unknown
  Description of Unknown: Integrase B5762 sequence
  SM00857,G3DSA:1.10.10.2600,IPR036162,PF13408,IPR025827, G3DSA:3.40.50.1390,PS51737,IPR006119,IPR038109,PF07508, SSF53041,IPR011109,PTHR30461,Coil,PS51736, cd00338,PF00239
MSEKSAVIYARYSSHNQREESIEGQIRECKRYAQINDVTIIAEYADRAISGKSDNRAEFQRMIRDAEKGRFGLVIVYKLDRFARNRYDSAMYKARLKKCGVKVVSATEQLSDSPEGIILEAMLEGMAEYYSANLSQNIKRGMMENALKGLATGGGRCLGYYTGPDKKYYIDEAGASTVRMIYEMYDQGHTYAHIVETLNNQGRKTYKGAPFNKNSLGKILHNRRYIGDYVWGDIVQEGGMPQIIDRDLWERVQRKLNRKQNASARARGEYDYILSGKLYCGRCGKPMIGDSGTSRNGAKHYYYTCSTKKHGGTCPKKSVRAAAIEDEVIRTTIQTILTDEMLEHIADKVMEYQARDTDSAILIEQYKNQLKETETAIAGILRAVEAGMFSPSMKDRMDELEGQKAELNADIEREQINQQKVSRDEVLFFLSQFKGGDPDDPDYKQRLVDTFVNSVWLYDDKLVLTYNYSGDDNKITLDMVNAGLSGKPNGCSDNACQAPPK

SEQ ID NO: 5762 - protein, 501 aa, Unknown
  Description of Unknown: Integrase B5763 sequence
  cd03768,PTHR30461:SF3,SM00857,IPR036162,PF13408, IPR025827,PS51737,G3DSA:3.40.50.1390,IPR006119,PF07508, IPR011109,SSF53041,PTHR30461,PS51736,Coil, PF00239
MNAVYARQSLDKKDSLSIETQIELCKQELGIDVPTKVYIDKGFSGKNTNRPQFQEMMKDIHSGVINKVTVYKLDRLSRSLLDFAEMIEVFKQHNVEFQSTREKFDTSTPIGNAMLSIIMVFAQLERETIQLRVRDNYYMRSANGAYDSTAPYGFIKTKVALQGKSVSSLVCDPETTQILRGIFDAYAYTSTSLGALARQLNKRRVPSPGGAAWDSCKLSRIMSNPVYVKANADIYNYYRLTGINITNPIEAFAGVNGCVTYGQWDHKRRKFDQLKSLTLSIGLHEGLVDAQTFLLCQNRLNNNTQVYNGGQGKHSWLTGLIKCGYCGKAMKADVMKKGVPKFRCSGHANYGTCNDNARVSIAQVEEAVEAQIMQHIQRHSDLQAQQIAECDVKEQQYKIQINKINEQIDNLVNAIAQGSATVIGYLNDKIAELETQRHEIEVALQKHILERPSPENTRQLYDTLDMWPYMDIAQRHEVAAMLIKEVRIFTDEIRIFWKYDL

SEQ ID NO: 5763 - protein, 501 aa, Unknown
  Description of Unknown: Integrase B5764 sequence
  PTHR30461:SF3,SM00857,G3DSA:1.10.10.2600,IPR036162,PF13408, PS51737,IPR025827,G3DSA:3.40.50.1390,IPR006119,IPR038109, PF07508,IPR011109,SSF53041,PTHR30461,Coil, PS51736,cd00338,PF00239
MYEDIKTACLYVRFSSHNQTEQSIEGQTRVCRDFCKRHNIRIVEIYADRATSASKDIEKRVQFLKMIKDSEKGLFDAVIVYKLDRFARSRYDSATYKYRLKRNGVQLISATENISNDPEGIILESVLEGMAEFYSAELSQKINRGMRESAYKHNSIGGAVPLGYKIEDKKLVIDPKTAPIVKEAFEKYADGETVAEICRQFNARGYKTSKGTAFGKSSFTKIFRNERYIGVYSFHDYRAEDAIPAIIDKDLWDRVQLRVGKIKNAPARNKAKVVYLLSGKIFCGHCGSKMNGNCNAGNYYYYQCYGKKNGNVDCKKKNIRKEFIERLVAQDALSLLTDEYIEQIATIACEKNQHEIELDSALPTIRDRIHQVDLSLNNLLKAIESGSAPDMLVKRMGELEKEKKDLQAQAKKESEDIVELDKAQVIYWLEQFRGGSIEDEEFCRMLIDLFVNSVTVWDEDDNTYKVTVAYNLTSLPTKTYRLNKGGTLSDFTYNAPAFAHQ

SEQ ID NO: 5764 - protein, 501 aa, Unknown
  Description of Unknown: Integrase B5765 sequence
  PTHR30461:SF3,SM00857,G3DSA:1.10.10.2600,IPR036162,PF13408, IPR025827,G3DSA:3.40.50.1390,PS51737,IPR006119,IPR038109, PF07508,SSF53041,IPR011109,PF00239,PTHR30461, Coil,cd00338
MDKTNKEKNTKYAGRAVIYARFSSGKQREESIEGQIRVCTDFAKRNNMKVIGHYADRAISGRRDTRAQFQKMMQDSLKRMFDYVIVYQHERFARNRYDSAIYKWQLRKCGVRVISALEYFGDGPEAILFETWAEGNAEYFSADLARKVKRGMTENALKGKWNGTCPLGYIIGEDKRLKINPKTAPLVRKIFRRFVDGAKTVDIIKELSPEYFALTGKKFQRTSFSKMLTNETYIGVYSWNGITVDNAVPPIIKKEVFLMAKDRVEKQKRNKPVYMSDIYLLTAKIKCARCGAYMTGMSGTSRNGVKHYYYVCNNQRRNKSCDMKAIKVDTIEQAVINNAMSILNDEKSVDLIADEAIKLLAQSADGEQEVEILKNERKEVEKKINNCLMALENGVISDSIVERIAENEARLKSIDNEIEHLSLMNNPLSLTKERIIYFLMHGLKGKKRREFILSTLVKEVLLNYDSEHEVWEMSIAYNYSNNCNECNKNDNNVRKVKIWYA

SEQ ID NO: 5765 - protein, 501 aa, Unknown
  Description of Unknown: Integrase B5766 sequence
  PTHR30461:SF3,SM00857,G3DSA:1.10.10.2600,IPR036162,PF13408, PS51737,G3DSA:3.40.50.1390,IPR025827,IPR006119,IPR038109, PF07508,SSF53041,IPR011109,PF00239,PTHR30461, PS51736,Coil,cd00338
MYEDIKTACLYVRFSSHNQTEQSIEGQTRVCRDFCKRHNIRIVEIYADRATSASKDIEKRVQFLKMIKDSEKGLFDAVIVYKLDRFARSRYDSATYKYRLKRNGVQLISATENISNDPEGIILESVLEGMAEFYSAELSQKINRGMRESAYKHNSIGGAIPLGYKIEDKKLVIDPKTAPIVKEAFEKYADGETVAEICRQFNARGYKTSKGTAFGKSSFTKIFRNERYIGVYTFHDYRAEDAIPAIIDKDLWDRVQLRVGKIKNAPARNKAKVVYLLSGKIFCGHCGSKINGNCNAGNYYYYQCYGKKNGNVDCKKKNIRKEFIERLVAQDALSLLTDEYIEQIATIACEKNQHEIELDSALPTIRDRIHQVDLSLNNLLKAIESGSAPDMLVKRMGELEKEKKDLQVQAKKESEDIIELDKAQVIYWLEQFRGGNIEDEEFCRMLIDLFVNSVTVWDEDDNTYKVTVAYNLTSLPTKTYRLNKGGTLSDFTSNAPVPSSR

SEQ ID NO: 5766 - protein, 501 aa, Unknown
  Description of Unknown: Integrase B5767 sequence
  cd03768,SM00857,IPR036162,PF13408,IPR025827, G3DSA:3.40.50.1390,PS51737,IPR006119,PF07508,IPR011109, SSF53041,PTHR30461,PS51736,Coil,PF00239
MIIREDAIYGRQSVDRKDSISIESQIEFCKYELRGGNFRKYTDKGYSGKNTDRPKFQEMMADIRRGLIKRVVVYKLDRISRSILDFATMMETFQEYNVEFVSSTEKFDTSTPMGRAMLNICIVFAQLERETIQKRVTDAYYSRCQHGFHMSGAAPYGFQLEPTTIEGIRTKMMKPDPETADIAKLMFEMYSQPGTSFGDIARYFADEGILIYGKEMTRGFISQLLRNPIYAQADLDMYEFFKSQGTVVVNEATDFAGTNGCYLYQGRDVQERKNKHLKDQILVLAPSEGLVSSDTWLRCRKKLMANKTFQGGRKAKNTWLAGKVKCGRCGYALMSVGNPTGVQYLRCSKRADSKSCDGCGTLRTREFERFLYGEMVKKLSEFQTLTAKRETVNPKLTALNMELARVEDEIEKLLNTLTGANAVLLSYANSKIEELDTRRQALTKEIAALSAETMSPEQIERLSVYLNQWEEIDFEDRRQVADGLISQIRATDEHVSIEWKI

SEQ ID NO: 5767 - protein, 501 aa, Unknown
  Description of Unknown: Integrase B5768 sequence
  PTHR30461:SF3,SM00857,G3DSA:1.10.10.2600,IPR036162,PF13408, IPR025827,G3DSA:3.40.50.1390,PS51737,IPR006119,IPR038109, PF07508,IPR011109,SSF53041,PTHR30461, PS51736,cd00338,PF00239
MAIVKKIMPMVLSLDTRKRVAAYARVSMDTEQLQHSLSAQISAYSTIIQANPEWVYAGVFYDEGISGRSMKNRNGFIAMLEACEEGKIDMILVKSISRFARDTVDCLNTIRHLKELGIAVVFERERINTMTGEGELLLTLLASFAQEESRSISENVKWSIRKRFEQGIPNGHKPPYGYRWDGEMFRVIPEEGAVVKEIYRRYLAGESAYAIARSLAARGVKGRSGNPIEQTTIKDMFMNTCYMGTMMLQKYFFTEGRKRRKNCGELPRFYVDGLFEPLVTEEDHARAVELRRQNAEKCANINVELMPFSGKMKCGVCGCGLSRRSPKGYKKWTCNTKEKKGMAVCNSRPINEDELFRLATKALGLRKFDKDKFNEKIELITVRGDVLEFKFKSGAVKEVRREYDGSRGKNPFTNKCYCGTCVGKCERDTYPKGYKVWRCSKPKEKCQMKYLRETELFEASKEILGQNYQGEVVENIAKIVINDDTIDFVFKDGREQIWQRQ

SEQ ID NO: 5768 - protein, 501 aa, Unknown
  Description of Unknown: Integrase B5769 sequence
  PTHR30461:SF3,SM00857,G3DSA:1.10.10.2600,IPR036162,PF13408, PS51737,G3DSA:3.40.50.1390,IPR025827,IPR006119,IPR038109, PF07508,IPR011109,SSF53041,PTHR30461,Coil, PS51736,cd00338,PF00239
MQRAVIYARYSPGPNQTEQSIEGQVRECTKYAELHDLRIVGTYVDRKISGKTDNRREFQRMIDDSEKHIFDVIILYHTDRFARNRYDSAIYKHKLKENGVELRYATTDIPKGPEGIILESIMEGWAEYYSAELSRKIKRGMRESALKCHSTGAGRCLGYRTAEDKSLVIEPEGAKAVQTVFDMYIKGKSHADICRYLNDCGFRTAQGKLFNKNSVTHIIRNKRYIGVYTYDDITIEDGIPAIISKDTFHLAQLEAARRKTAKRPKEPKAEYLLSGKAFCGHCQKPLVGVSGTGKSGNKWYYYYCQESRAKRGCTKRPVKRDWLEREVVERTVAEILQPEVIQRIAKKCYDLQMEYRQDNSDVLFYELKLKDVRKAIKNTMHAIESGVKTKTLPARLQELENEEEALEAELAIAKASDFVITTDQIEFLLTQFAEPWECESEEEYHRRIIKCFVHKVFLFDDKLLIYYNVSRDGKTREQSEAELLEEALGEGFDKRSSGSTK

SEQ ID NO: 5769 - protein, 501 aa, Unknown
  Description of Unknown: Integrase B5770 sequence
  cd00338,SM00857,G3DSA:1.10.10.2600,IPR036162,PS51737, G3DSA:3.40.50.1390,IPR006119,IPR038109,PF07508,IPR011109, SSF53041,PTHR30461,PS51736,Coil,PF00239
MRRRIDPNGRYCAYLRKSRDDRDERGNVMTVEETLRKHESWIVELAIRHGIRVEKWYREVVSAETIDARPEVQQVLRELAEGKWDGVLCVDVQRLARGDTKDQGIMCEFLEVSGALVITTDGYFDTTDEADMDYLEYGLFRSRQEYKAINKILKRGRKRSKLDGNWPFSIAPYGYVKVRDEIGPTLAHGDCAKYVVIVDELSAQGLSFGSIARRMVEIGAPGEWSATKVRRIVTNEAYLGRTPVEKFVVVKRMKADGSGLEKVSIPVKDPQYRPGRHDPIVTQELFDAANANRCNPSLKKSNELRNPLASLLVCSGCGFAMRMIKDSKTGMFRYYHSMKPNGCSVKSCGYDLMMDAVIAELKRRIDDSRVEVRQRSDRSAEREIAAMKESLSVVDRSLASLLDRLMREVVTEDEYMTMKRKLSDEKQSLEATLAAAEADRERETSIEHRNVTIHQAIDILRSDATAGEANAFLRTFIERIEYSNDGVGLNVHNIKLDIFFK

SEQ ID NO: 5770 - protein, 501 aa, Unknown
  Description of Unknown: Integrase B5771 sequence
  PTHR30461:SF3,IPR036162,PS51737,IPR011109,PTHR30461, PS00397,PF00239,G3DSA:1.10.10.2600,IPR006119,SSF53041, SM00857,IPR025827,IPR038109,PS51736, cd03768,IPR006118,PF13408,G3DSA:3.40.50.1390,PF07508,Coil
MRDMDSARLRVVCYVRVSTREQAEKGYSVSEQQERLKAYCLAKDWVVAQVITDPGFSGAKLERPGMQQLISLVQAKKCDAVLVWKLDRLSRSQKDTLYLIEDVFLKNGCAFVSMNENFDTSTAFGRAMIGILSVFAQLEREQIRERMAVGRVGRAKAGLFHGGGFAPIGYDYKTIAEGGAGLVVNEYEAMQVREVFSLYLQGWPVNRIRKYMAAHYTTKDGDWGSDTTVRDVLKNPLYTGKINWAKKVYDGQHEPLISQETFDAAAARLATSSWKRTCSDGMERNSPFKSTHLLGGIIWCARCGARYFASGNYSGRGENKRYWPYYVCYSRAKSAKHMIRDPNCRNDRWAVAKLDAIIEGEIRKLAFDPAALELAVSGPQQDEDVAQRRAALQQRLNDLRAQMGRVLDLYQMGGSLPASMVGDRVAKLQAEIDGVEAALAEAVEEPPARRMDAARTALVGAEDVLDNGTLDERRELVHSLIRRIDLDGENIDIHWSFSPEA

SEQ ID NO: 5771 - protein, 501 aa, Unknown
  Description of Unknown: Integrase B5772 sequence
  PTHR30461:SF3,cd00338,SM00857,G3DSA:1.10.10.2600,IPR036162, PF13408,PS51737,G3DSA:3.40.50.1390,IPR025827,IPR006119, IPR038109,PF07508,IPR011109,SSF53041,PTHR30461, Coil,PF00239
MDKTNKEKNTKYAGRAVIYARFSSGKQREESIEGQIRVCTDFAKRNNMKVIGHYADRAISGRRDTRAQFQKMMQDSLKRMFDYVIVYQHERFARNRYDSAIYKWQLRKSGVRVISALEYFGDGPEAILFETWAEGNAEYFSADLARKVKRGMTENALKGKWNGTCPLGYVIGEDKRLKINPKTAPLVRKIFRRFVDGAKTVDIIKELSPEYFALTGKKFQRTSFSKMLTNETYIGVYSWNGITVDNAVPPIIKKEVFLMAKDRVEKQKRNKPVYMSDIYLLTAKIKCARCGAYMTGMSGTSRNGVKHYYYVCNNQRRNKSCEMKAIKVDTIEQAVINNAMSILNDEKSVDLIADEAIKLLAQSADGEQEVEILKNERKEVEKKINNCLMALENGVISDSIVERIAENEARLKSIDNEIEHLSLMNNPLSLTKERIIYFLMHGLKGKKRREFILSTLVKEVLLNYDSEHEVWEMSIAYNYSNNCNECNKNDNNVRKVKIWYA

SEQ ID NO: 5772 - protein, 501 aa, Unknown
  Description of Unknown: Integrase B5773 sequence
  PTHR30461:SF3,cd00338,SM00857,G3DSA:1.10.10.2600,IPR036162, PS51737,G3DSA:3.40.50.1390,IPR006119,IPR038109,PF07508, SSF53041,IPR011109,PTHR30461,PS51736,Coil, PF00239
MDVFMYLRKSRADNPESSVEETLRRHRDTLEKVAKERGYTVLHVYEEVVSGDSLYSRPQMLQMLEDVATGDCEAVLCMDLDRLGRGGMADQGVILETFKQSNTLIITPEKTYDLNNDIDEELTEFQTFMARRELKMIKRRLQRGIRKTIEEGGYIANAPYGYRKATVNKKPTLEINEEEARFVRMIFDMYVNQGIGCHTIAETLNAMGAKPHRAEKFGRTSIRHILKNPTFLGKIVWDQKHHIRKGTQNNAKHITIYNPPEKWTVVEGLHPAIIDEDTWNKAQAILKSRHHSPFFDGTVKNPLAGILRCAKCGSLMQRQPNLSRKDMEYILCTTKGCCASSRMDYVTDAVVQGIRKELDRLVNEKQQGIIRHAVDYSTAIKSTEKELASAKSQKDKLHDLLEQGVYDTNTFMERRKKVSARIQELSDVLEDLKKKKETQKAINYDKTIEKITTALNAFETADASKRNQLLKGIIHNATYLKEKGWSPRHFIVSVEIEPTYF

SEQ ID NO: 5773 - protein, 501 aa, Unknown
  Description of Unknown: Integrase B5774 sequence
  PTHR30461:SF3,SM00857,G3DSA:1.10.10.2600,IPR036162,PF13408, IPR025827,G3DSA:3.40.50.1390,PS51737,IPR006119,IPR038109, PF07508,SSF53041,IPR011109,PTHR30461,Coil, PS51736,cd00338,PF00239
MRIAAYCRVSTGKEDQLDSLEHQKEFFIEYAKKNGHTLVQVYADEGISGMSLKHRAEFNRLMKDAELHLFDMLVVKDISRFARNTVDFLQSIRTLKKFGINTLFLTANMESLGESEFVLTVFSALAQEESVNLSKRVKFGKQINTKMGRVPHKIFGYDRVDNFHLRINDNEAAIVRKIFELYLSGMGGTCIAQALNANGCTTKTGLQWKGYTVRRILRNSIYCGQYVNNKYEIADCLEHTRTIKDENQWLVHDRPEWAIISRDIFDQAQKQMAHRRQEYNSKTQKGISRYSYKHIFSMLIKCDCCGRSFTRKHYKNNGKRGAEIDRYCWKCITYDAYSAKGPCHNRVTINETDLIEHIREYLKSLIEDPKTFVQQIIDEAQSYCKSTPNEDVVQLKQKKASMQARRKKYQEMYAADLMTIDELKIEINKISDEMEMIDYKIKSSEMPLDPNDSNGIIDQYRKEIESFLNLETITSMDIRKIIDHIDAKADGEIIIHLKHLA

SEQ ID NO: 5774 - protein, 501 aa, Unknown
  Description of Unknown: Integrase B5775 sequence
  cd03768,SM00857,IPR036162,PF13408,IPR025827, G3DSA:3.40.50.1390,PS51737,IPR006119,PF07508,IPR011109, SSF53041,PTHR30461,PS51736,Coil,PF00239
MIIREDAIYGRQSVDRKDSISIESQIEFCKYELRGGNFRKYTDKGYSGKNTDRPKFQEMMADIRRGLIKRVVVYKLDRISRSILDFATMMETFQEYNVEFVSSTEKFDTSTPMGRAMLNICIVFAQLERETIQKRVTDAYYSRCQHGFHMSGAAPYGFQLEPTTIEGIRTKMMKPDPETADIAKLMFEMYSQPGISFGDIARYFADEGILIYGKEMKRGFISQLLRNPIYAQADLDMYEFFKSQGTVVVNEATDFAGTNGCYLYQGRDVQERKNKHLKDQILVLAPSEGLVSSDTWLRCRKKLMANKTFQGGRKAKNTWLAGKVKCGRCGYALMSVGNPTGVQYLRCSKRADSKSCDGCGTLRTREFERFLYGEMVKKLSEFQTLTAKRETVNPKLTALNMELARVEDEIEKLLNTLTGANAVLLSYANSKIEELDTRRQALTKEIAALSAETMSPEQIERLSVYLNQWEEIDFEDRRQVADGLISQIRATDEHVSIEWKI

SEQ ID NO: 5775 - protein, 501 aa, Unknown
  Description of Unknown: Integrase B5776 sequence
  cd03768,PTHR30461:SF3,SM00857,IPR036162,PF13408,PS51737, G3DSA:3.40.50.1390,IPR025827,IPR006119,PF07508,IPR011109 ,SSF53041,PTHR30461,PS51736,Coil,PF00239
MNAVYARQSLDKKDSLSIETQIELCKQELGIDVPTKVYIDKGFSGKNTNRPQFQEMMKDIHSGVINKVTVYKLDRLSRSLLDFAEMIEVFKQHNVEFQSTREKFDTSTPIGNAMLSIIMVFAQLERETIQLRVRDNYYMRSANGAYDSTAPYGFIKTKVALQGKSVSSLVCDPETTQILRGIFDAYAYTSTSLGALARQLNKRRVPSPGGAAWDSCKLSRIMSNPVYVKANADIYNYYRLTGINITNPIEAFAGVNGCVTYGQWDHKRRKFDQLKSLTLSIGLHEGLVDAQTFLLCQNRLSNNTQVYNGGQGKHSWLTGLIKCGYCGKAMKADVMKKGVPKFRCSGHANYGTCDDNARVSIAQVEEAVETQIMQHIQRHSDLQAQQIAECDAKEQQYKIQINKINEQIDNLVNAIAQGSATVIGYLNDKIAELETQRHEIEVALQKHILERPSPENTRQLYDTLDMWPYMDIAQRHEVAAMLIKEVRIFTDEIRIFWKYDL

SEQ ID NO: 5776 - protein, 501 aa, Unknown
  Description of Unknown: Integrase B5777 sequence
  PTHR30461:SF3,SM00857,G3DSA:1.10.10.2600,IPR036162,PF13408, IPR025827,G3DSA:3.40.50.1390,PS51737,IPR006119,IPR038109, PF07508,SSF53041,IPR011109,PTHR30461,Coil, PS51736,cd00338,PF00239
MNAVIYARFSSHSQREQSIEGQLRDCYEYAKRYDINIVGEYIDRAISGMTDDRPDFQRMIADAPKKQFERIIVWKLDRFARNRYDSALYKHKLKQYGIRVISAMENVGEGDESILLEALLEASAEYYSLDLKKKILRGQRETIAKGRWCGGPIPYGYKAVDGKLVADEKTAPIIRYVFEQYAQGVPMKEIIDELKRRGVRSSRGGELTYTTFSRALTNPVYIGNFMYKGELVPGVADALIDEDTYNKVQIIVKANAHAPAANKAKVEYLLQGKAFCGHCGSHMVGESGKSRNGDVYYYYSCAARKKAHKCRKKNEKKDFIEWYVVEQTLQYVLTPARMRDIAKAVVAEYDKEFAGSRVEEYEKAIKQYERELDKLVDALVDAPKVAHKRIYEKMETLETQKASMENELVKLRIASEIRFTEEEVRAWLRRFCTGDLFDPEFRRNIIDTFINCIYLYDDRIIIFYNIKGGKQVSFVDLAESLDNESESSGSDLNANAPPQFV

SEQ ID NO: 5777 - protein, 501 aa, Unknown
  Description of Unknown: Integrase B5778 sequence
  PTHR30461:SF3,SM00857,G3DSA:1.10.10.2600,IPR036162,PF13408, IPR025827,G3DSA:3.40.50.1390,PS51737,IPR006119,IPR038109, PF07508,IPR011109,SSF53041,PTHR30461,cd00338, PF00239
MDKTNKEKNTKYAGRAVIYARFSSGKQREESIEGQIRVCTDFAKRNNMKVIGHYADRAISGRRDTRAQFQKMMQDSLRRMFDYVIVYQHERFARNRYDSAIYKWQLRKSGVRVISALEYFGDGPEAILFETWAEGNAEYFSADLARKVKRGMTENALKGKWNGTCPLGYVIGGDKRLKINPKTAPLVRKIFRRFVDGAKTVDIIKELSPEYFALTGKKFQRTSFSKMLTNETYIGVYSWNGITVDNAVPPIIKKEVFLMAKDRVEKQKRNKPVYMSDIYLLTAKIKCARCGAYMTGMSGTSRNGVKHYYYVCNNQRRNKSCDMKAIKVDTIEQAVINNAMSILNDEKSVDLIADEAIKLLAQSADGEQEVEILKNERKEVVKKINNCLMALENGVISDSIVERIAENEARLKSIDNEMEHLSLMNNPLSLTKERIIYFLMHGLKGKKRREFILSTLVKEVLLNYDSEHEVWEMSIAYNYSNNCNECNKNDNNVRKVKIWYA

SEQ ID NO: 5778 - protein, 501 aa, Unknown
  Description of Unknown: Integrase B5779 sequence
  PTHR30461:SF3,SM00857,G3DSA:1.10.10.2600,IPR036162,PF13408, PS51737,G3DSA:3.40.50.1390,IPR025827,IPR006119,IPR038109, PF07508,SSF53041,IPR011109,PTHR30461,Coil, PS51736,cd00338,PF00239
MNAVIYARYSSDKQTEQSIEGQLREGYAYAERMGITVVGEYIDRAVSGTSDQRPDFQRMISDSIKRQFEAVIVWKLDRFARNRYDSAIYKSKLKKNGVRVFSVTEGIGDGDESIILEAVLEAMAEVYSKQLGQNAARGMRETAMKGLCTGGQIPLGYAVGEDHKLHIDSKTAPAVQLIYTLYADGQSKTQIANELNSRGFRTKTGKPYNCNSFYRILTNPMYYGNYTYKGEVLRECPAIISKALYDKCQERNDAVKRSRGMKISEVEWLLRGKLYCGHCGTQMTGDSGTSRTNEKYYYYTCHKHKRYKDCDKKSEKKEQLERAVCQKTVEYVLREDRIEYIAERVVEQYEKEFDASTIKEKETSLSKLNIELDKCAESLMNTTIRSVVDRINARAEELEAAKTELEHELAQLRITSKARITVDEIITFLRGFCSGDVDDIQFRRKIIDTFINAVYVFDDKYVIYYNVRDCKQVTYSDMLASIHAPSDMSVHGSDCLLYGEP

SEQ ID NO: 5779 - protein, 501 aa, Unknown
  Description of Unknown: Integrase B5780 sequence
  PTHR30461:SF3,IPR036162,PS51737,IPR011109,PTHR30461, PS00397,PF00239,G3DSA:1.10.10.2600,IPR006119,SSF53041, SM00857,IPR025827,IPR038109,PS51736,cd03768, IPR006118,PF13408,G3DSA:3.40.50.1390,PF07508,Coil
MRDMDSARLRVVCYVRVSTREQAEKGYSVSEQQERLKAYCLAKDWVVAQVITDPGFSGAKLERPGMQQLISLVQAKKCDAVLVWKLDRLSRSQKDTLYLIEDVFLKNGCAFVSMNENFDTSTAFGRAMIGILSVFAQLEREQIRERMAVGRVGRAKAGLFHGGGFAPIGYDYKTIAEGGAGLVVNEYEAMQVREVFSLYLQGWPVNRIRKYMAAHYTTKDGDWGSDTTVRDVLKNPLYTGKINWAKKVYDGQHEPLISQETFDAAAARLATSSWKRTCSDGMERNSPFKSTHLLGGIIWCARCGARYFASGNYSGRGENKRYWPYYVCYSRAKSAKHMIRDPNCRNDRWAVAKLDAIIEGEIRKLAFDPAALELAVSGPQQDEDVAQRRAALQQRLNDLRAQMGRVLDLYQMGGSLPASMVGDRVAKLQAEIDGVEAALAEAVEEPPTQRLDAARAALVGAEDVLDNGTLDERRELVHSLIRRIDLDGENIDIHWSFSPET

SEQ ID NO: 5780 - protein, 501 aa, Unknown
  Description of Unknown: Integrase B5781 sequence
  cd03768,SM00857,G3DSA:1.10.10.2600,IPR036162,PF13408, PS51737,G3DSA:3.40.50.1390,IPR025827,IPR006119,IPR038109, PF07508,SSF53041,IPR011109,PTHR30461,PS51736, Coil,PF00239
MNIREDVIYARQSVDRKDSISIESQIDFCKYELKGGSCRIFKDKGYSGKNTDRPEFQKLLGEIRKGKVRRVVVYKLDRISRSILDFANMMELFQEYDVEFVSSTEKFDTSTPMGRAMLNICIVFAQLERETIQKRVTDAYYSRCLKGFHMSGQAPYGFDLEPTVVENIRTKMMVADPIAANHVRLMFEMYAEPETSFGDITRYFEEQGIKVYGKSLTRPFLSQLLRNPVYAQADLEMYEFFKSQGAVVVNDAADFAGTNGCYLYQGRDVKEDKDKSLKDQILVIAPHEGFISSDIWLRCRKKLMTNITFQNGRKARNTWLAGKIKCGKCGYALKTTHNPSGYEYLRCSKRADHKGCPGCGTLRKNEFEQFIFTAMGEKFREFKLLRGGEGKVNPKITAYQVELAQVEVEIEKLLDTLTGANATLLAYANKKIEDLDNRRKTLSKAIADLSVETLSSQQIELLSGYLDDWEHISFEDKRKAADSLISSISATSDYVKIEWKI

SEQ ID NO: 5781 - protein, 501 aa, Unknown
  Description of Unknown: Integrase B5782 sequence
  PTHR30461:SF3,IPR036162,PS51737,IPR011109,PTHR30461, PS00397,PF00239,G3DSA:1.10.10.2600,IPR006119,SSF53041, cd00338,SM00857,IPR025827,IPR038109,PS51736, IPR006118,PF13408,G3DSA:3.40.50.1390,PF07508,Coil
MKEKVSERKTGAIYIRVSTDKQEELSPDAQLRLLMDYAKKDAIDVPKEYIFQDNGISGRKANKRPAFQNMIALAKSREHPIDTIIVWKFSRFARNQEESIVYKSLLKKNNVDVVSVSEPLVDGPFGSLIERIIEWMDEYYSIRLSGEVFRGMKENATRGAYQARPPLGYQVIERGKPPVIVPEEAAIVRMIFDKYVNGKMSFFDIARHLNSLGLKTSHGKAFERRSIEDIIQNPSYCGMIRWNRMENATNRIKDQDEWIIADGMQEAIISKELFDAAQERLKKIYKPVGKRPSSTYKHWLSGLLKCPVCGRTLTATTMKRANGEKYAYFSCYGYSKGKCDKPHGVSSLVIEREILKALEEALGSNSIVYEMREIRPQELSNERSLIMVCLASLKGKEDRIRASYREGIDTLEEYKENKALIAKERDSLEQQLAELEENTPDKIPDDPTPKMLDRVSSVHDILVSDSYSLVQKNEALKQIIDKIVYDRESDTLKIHFFLYHS

SEQ ID NO: 5782 - protein, 501 aa, Unknown
  Description of Unknown: Integrase B5783 sequence
  cd03768,SM00857,IPR036162,PF13408,IPR025827, G3DSA:3.40.50.1390,PS51737,IPR006119,PF07508,IPR011109, SSF53041,PTHR30461,PS51736,Coil,PF00239
MIIREDAIYGRQSVDRKDSISIESQIEFCKYELRGGNFRKYTDKGYSGKNTDRPKFQEMMADIRRGLIKRVVVYKLDRISRSILDFATMMETFQEYNVEFVSSTEKFDTSTPMGRAMLNICIVFAQLERETIQKRVTDAYYSRCQHGFHMSGAAPYGFQLEPTTIEGIRTKMMKPDPETADIAKLMFEMYSQPGTSFGDIARYFADEGILIYGKEMKRGFISQLLRNPIYAQADLDMYEFFKSQGTVVVNEATDFAGTNGCYLYQGRDVQERKNKHLKDQILVLAPSEGLVSSDTWLRCRKKLMANRTFQGGRKAKNTWLAGKVKCGRCGYALMSVGNPTGVQYLRCSKRADSKSCDGCGTLRTREFERFLYGEMVKKLSVFQTLTAKRETVNPKLTALNMELARVEDEIEKLLNTLTGANAVLLSYANSKIEELDTRRQALTKEIAALSAETMSPEQIERLSVYLNQWEEIDFEDRRQVADGLISQIRATDEHVSIEWKI

SEQ ID NO: 5783 - protein, 501 aa, Unknown
  Description of Unknown: Integrase B5784 sequence
  PTHR30461:SF3,IPR036162,PS51737,IPR011109,PTHR30461, PS00397,PF00239,G3DSA:1.10.10.2600,IPR006119,SSF53041, SM00857,IPR025827,IPR038109,PS51736, cd03768,IPR006118,PF13408,G3DSA:3.40.50.1390,PF07508,Coil
MRDMDSARLRVACYVRVSTREQAEKGYSVSEQQERLKAYCLAKDWVVAQVITDPGFSGAKLERPGMQQLISLVQTKKCGAVLVWKLDRLSRSQKDTLYLIEDVFLKNGCAFVSMNENFDTSTAFGRAMIGILSVFAQLEREQIRERMAVGRVGRAKAGLFHGGGYAPIGYDYKTIAEGGDGLVVNEYEAMQVREVFSLYLQGWPVNRIRKYMAAHYTTKDGDWGSDTTVRDVLKNPLYTGKINWAKKVYDGQHEPLISQETFDAAAARLATSSWKRTCSDGMERNSPFKSTHLLGGIIWCARCGARYFASGNYSGRGENKRYWPYYVCYSRAKSAKHMIRDPNCRNDRWAVAKLDAIIEGEIRKLAFDPAALELAVSGPQQDEDVAQRRAALQQRLNDLRAQMGRVLDLYQMGGSLPASMVGDRVAKLQAEIDGVEAALAEAVEEPPTQRLDAARAALVGAEDVLDNGTLDERRELVHSLIRRIDLDGENIDIHWSFSPEA

SEQ ID NO: 5784 - protein, 501 aa, Unknown
  Description of Unknown: Integrase B5785 sequence
  PTHR30461:SF3,cd00338,SM00857,G3DSA:1.10.10.2600,IPR036162, PF13408,IPR025827,PS51737,G3DSA:3.40.50.1390,IPR006119, IPR038109,PF07508,SSF53041,IPR011109,PTHR30461, PS51736,Coil,PF00239
MYEDIKTACLYVRFSSHNQTEQSIEGQTRVCRDFCKRHNIRIVEIYADRATSASKDIEKRVQFLKMIKDSEKGLFDAVIVYKLDRFARSRYDSATYKYRLKRNGVQLISATENISNDPEGIILESVLEGMAEFYSAELSQKINRGMRESAYKHNSIGGAVPLGYKIEDKKLVIDPKTAPIVKEAFEKYADGETVAEICRQFNARGYKTSKGTAFGKSSFTKIFRNERYIGVYTFHDYRAEDAIPAIIDKDLWDRVQLRVGKIKNAPARNKAKVVYLLSGKIFCGHCGSKMNGNCNAGNYCYYQCYGKKNGNVDCKKKNIRKEFIERLVAQDALSLLTDEYIEQIATIACEKNQHEIELDSALPTIRDRIHQVDLSLNHLLKAIESGSAPDMLVKRMGELEKEKKDLQAQAKKESEDIVELDKAQVIYWLEQFRGGSIEDEEFCRMLIDLFVNSVTVWDEDDNTYKVTVAYNLTSLPTKTYRLNKGGTLSDFASNAPGTVSE

SEQ ID NO: 5785 - protein, 501 aa, Unknown
  Description of Unknown: Integrase B5786 sequence
  cd03768,PTHR30461:SF3,SM00857,IPR036162,PF13408, IPR025827,PS51737,G3DSA:3.40.50.1390,IPR006119,PF07508, IPR011109,SSF53041,PTHR30461,PS51736,Coil, PF00239
MNAVYARQSLDKKDSLSIETQIELCKQELGIDVPTKVYIDKGFSGKNTNRPQFQEMMKDIHSGVINKVTVYKLDRLSRSLLDFAEMIEVFKQYNVEFQSTREKFDTSTPIGNAMLSIIMVFAQLERETIQLRVRDNYYMRSANGAYDSTAPYGFIKTKVALQGKSVSSLVCDPETTQILRGIFDAYAYTSTSLGALARQLNKRRVPSPGGAAWDSCKLSRIMSNPVYVKANADIYNYYRLTGINITNPIEAFAGVNGCVTYGQWDHKRRKFDQLKSLTLSIGLHEGLVDAQTFLLCQNRLNNNTQVYNGGQGKHSWLTGLIKCGYCGKAMKADVMKKGVPKFRCSGHANYGTCNDNARVSIAQVEEAVEAQIMQHIQRHSDLQAQQIAECDVKEQQYKIQINKINEQIDNLVNAIAQGSATVIGYLNDKIAELETQRHEIEVALQKHILERPSPENTRQLYDTLDMWPYMDIAQRHEVAAMLIKEVRIFTDEIRIFWKYDL

SEQ ID NO: 5786 - protein, 501 aa, Unknown
  Description of Unknown: Integrase B5787 sequence
  SM00857,G3DSA:1.10.10.2600,IPR036162,PF13408,IPR025827, PS51737,G3DSA:3.40.50.1390,IPR006119,IPR038109,PF07508, SSF53041,IPR011109,PTHR30461,Coil,PS51736, cd00338,PF00239
MRGVIYARYSPGPHQTEQSIEGQVADCQQYAEEHGIDIIEIYADRHVSGKSVGRDEFQRMLRDAEKGRFDCVLVWKIDRFGRDRQDIAMGKMTLKRAGVKLMYARESVPEGPEGIILESVLEGLAEYYSADLRQKVIRGMKETAKKGQYCGQPLPIGYKVDSQRHVVIDEREAAVVREAFKLHIAGAQLRDIVQLFADRGIMGRRGKPVSNAVVYRMLRNEKYLGEFYIQDVKLNVEPIIDQATFLEAAQHFKTSRNNAAGRAKVNYLLSCKMFCGYCGSMISAEAGTGKLGKVYRYYKCGDKKRGKKCELKPFPKDHLEDAIILATVNDMLTDEMIEKLTVRILEVQEQENADDPVVGLRRRLDSNKKRQRNLLDAIEEGGARGLVSRLAALEEEEEQLVLEIQRAEIKRPRLTHEVVEAWLRSFRVGDVTDDDFRARLVDTFIARVELRNDEALIFYNIREKGPHSRVRVRPEWWSPRDGTRTPKIIVLRDYVVLRIAV

SEQ ID NO: 5787 - protein, 501 aa, Unknown
  Description of Unknown: Integrase B5788 sequence
  cd03768,PTHR30461:SF3,SM00857,IPR036162,PF13408, PS51737,G3DSA:3.40.50.1390,IPR025827,IPR006119,PF07508, IPR011109,SSF53041,PTHR30461,PS51736,Coil, PF00239
MNAVYARQSLDKKDSLSIETQIELCKQELGIDVPTKVYIDKGFSGKNTNRPQFQEMMKDIHSGVINKVTVYKLDRLSRSLLDFAEMIEVFKQHNVEFQSTREKFDTSTPIGNAMLSIIMVFAQLERETIQLRVRDNYYMRSANGAYDSTAPYGFIKTKVALQGKSVSSLVCDPETTQILRGIFDAYAYTSTSLGALARQLNKRRVPSPGGAAWDSCKLSRIMSNPVYVKANADIYNYYRLTGINITNPIEAFAGVNGCVTYGQWDHKRRKFDQLKSLTLSIGLHEGLVDAQTFLLCQNRLSNNTQVYNGGQGKHSWLTGLIKCGYCGKAMKADVMKKGVPKFRCSGHANYGTCNDNARVSIAQVEEAVETQIMQHIQRHSDLQAQQIAECDAKEQQYKIQITKINEQIDNLVNAIAQGSATVIGYLNDKIAELETQRHEIEVALQKHILERPSPENTRQLYDTLDMWPYMDIAQRHEVAAMLIKEVRIFTDEIRIFWKYDL

SEQ ID NO: 5788 - protein, 501 aa, Unknown
  Description of Unknown: Integrase B5789 sequence
  PTHR30461:SF3,IPR036162,PS51737,IPR011109,PTHR30461, PF00239,G3DSA:1.10.10.2600,IPR006119,SSF53041,cd00338, SM00857,IPR025827,IPR038109,mobidb-lite,PS51736, PF13408,G3DSA:3.40.50.1390,PF07508,Coil
MRAFIYCRFSSHKQQELSIEGQRDICQEYADKHNITVVGQYADRARSGKTENRADFRRLMRDAATGVVDCVLVWRYDRFFRNRAESALYRKQLEAAGVHLISVTEYIPEGSAGIITQGMIETVAEYFSAKLSEDVSRGMNKAAQHCQIVGRAPLGYRAGPNKRWQIDPVGAELVRRIFEWYASGKAMGQLAAQLNEEGHRTTNGTLYTRSSFNSILRNEKYIGVYSYGGEVRIEGGCPRIIEDELFFTVQRRLSANRHRPGAYKAEVPYLLSGKLFCGLCGAPMTGTAGTSHTGARHYYYICNNRRAKTCKKKNVRLDLIEEAVLQSALDILTDENIAYISAEVERRCAENSDSAALLASLNAQLEEVQRRLKNIGNAIAQGIITETTKELLEEAEADRTALRRQIDRAKVQAALVVKAEAVACWLDGFRRGDRTDPDFRRQVFGALVHSVFVYDDYLKIIFNVDSAGAAVVPYEAAQAATPSEAPPGSYLDTLGAPEKAR

SEQ ID NO: 5789 - protein, 501 aa, Unknown
  Description of Unknown: Integrase B5790 sequence
  PTHR30461:SF3,SM00857,G3DSA:1.10.10.2600,IPR036162,PF13408, IPR025827,PS51737,G3DSA:3.40.50.1390,IPR006119,IPR038109, PF07508,IPR011109,SSF53041,PTHR30461,PS51736, cd00338,PF00239
MNTVIYARYSAGPRQTDQSIDGQLRVCTEFCKQRGLTVVDTYCDRHISGRTDERPEFQRLIADAKAHKFEAVVVYKTDRFARNKYDSAIYKRELRRNGIQIFYAAEAIPEGPEGIILESLMEGLAEYYSAELAQKIKRGLNESALKCQSLGSGRPLGYTVDEQKHFQIDPESSQAVKTIFEMYIKGESNAAICDYLNARGLRTSQGNLFNKNSINRIIKNRKYIGEYRYNDIVVEGGMPAIISKETFCLAQAEMERRRTHRAPVSPKAEYLLAGKLFCGHCKGPMQGVSGTGKSGNKWYYYYCANTRGKERTCDKKQVSRDRLEKAVVDFTVRYILQEDVLEELSKKVYAAQERQNNTASEIAFYEKKLAENKKAIANILRAIESGAMTQALPARLQELENEQTVIQGELSYLKGARLAFTEDQILFALLQHLDPRPGESEQDYHRRIITDFVSEVYLYDDRMLIYFNISSADGKLKHADLSAIESGVFDAGLISSTTSPP

SEQ ID NO: 5790 - protein, 501 aa, Unknown
  Description of Unknown: Integrase B5791 sequence
  PTHR30461:SF3,SM00857,G3DSA:1.10.10.2600,IPR036162,PF13408, PS51737,G3DSA:3.40.50.1390,IPR025827,IPR006119,IPR038109, PF07508,IPR011109,SSF53041,PF00239,PTHR30461, PS51736,Coil,cd00338
MQRAVIYARYSPGPNQTEQSIEGQVRECTKYAELHDLRIVGTYVDRKISGKTDNRREFQRMIDDSEKHIFDVIILYHTDRFARNRYDSAIYKHKLKENGVELRYATTDIPKGPEGIILESIMEGWAEYYSAELSRKIKRGMRESALKCHSTGAGRCLGYRTAEDKSLVIEPEGAKAVQTVFDMYIKGKSHADICRYLNDCGFRTAQGKLFNKNSVTHIIRNKRYIGVYTYDDITIEDGIPAIISKDTFHLAQLEAARRKTAKRPKEPKAEYLLSGKAFCGHCQKPLVGVSGTGKSGNKWYYYYCQESRAKRGCTKRPVKRDWLEREVVERTVAEVLRPEVIQHIAKKCYDLQMEYRQDNSDVLFYELKLKDVRKAIKNTMHAIESGVKTKTLPARLQELENEEEALEAELAIAKASDFVITTDQIEFLLTQFAEPWACESEEEYHRRIIKCFVHKVFLFDDKLLIYYNVSRDGKTREQSEVELLEEALGEGFDKRSSGSTK

SEQ ID NO: 5791 - protein, 501 aa, Unknown
  Description of Unknown: Integrase B5792 sequence
  PTHR30461:SF3,SM00857,G3DSA:1.10.10.2600,IPR036162,PF13408, IPR025827,G3DSA:3.40.50.1390,PS51737,IPR006119,IPR038109, PF07508,IPR011109,SSF53041,PTHR30461,Coil, PS51736,cd00338,PF00239
MRNAVIYARYSSDRQREESIEGQIRVCEDFARRNDMRILKIYTDRALTGRTDKRPEFQLMIKEAASRAFDAVIVYKLNRFARNRYDSASYKHKLKKYGVKVVSAMENIADDPSGILLESVIEGMAEYYSAELSENVIRGQTENILEGKWAGGTVPLGYKLDAEKHLVLDEEKVPIVKLVFSMTLDGLGTTTIARELNRRGYRNARGKPFRMSNIYVILKNKHYLGKFSWRGIESPHAVPAIVSESDFNEVQKIMNARRVNRVKAGERYMLSGKLFCGECGERMVGTSGTSRNGEIYYYYACPNHQRKNTRTCERTQIRADIIDSTVCDVTTRLLESDAAVEAIARQAVEVQTHTDVNAAIAATKKRMADVKKKIDNCVKAVESGIISDAIAKTLHDNEETLRDLECELAKQEIARKSSELTVDKIRFFFKSICRDAKKADKYRRILLSTLVRMVIVRGDALEIRYNYANEYPALQNPVKAECSYNHRLVGLSGFEPETSSM

SEQ ID NO: 5792 - protein, 501 aa, Unknown
  Description of Unknown: Integrase B5793 sequence
  PTHR30461:SF3,cd00338,SM00857,G3DSA:1.10.10.2600,IPR036162, PF13408,IPR025827,PS51737,G3DSA:3.40.50.1390,IPR006119, IPR038109,PF07508,SSF53041,IPR011109,PTHR30461, PS51736,Coil,PF00239
MYEDIKTACLYVRFSSHNQTEQSIEGQTRVCRDFCKRHNIRIVEIYADRATSASKDIEKRVQFLKMIKDSEKGLFDAVIVYKLDRFARSRYDSATYKYRLKRNGVQLISATENISNDPEGIILESVLEGMAEFYSAELSQKINRGMRESAYKHNSIGGAIPLGYKIEDKKLVIDPKTAPIVKEAFEKYADGETVAEICRQFNARGYKTSKGTAFGKSSFTKIFRNERYIGVYTFHDYRAEDAIPAIIDKDLWDRVQLRVGKIKNAPARNKAKVVYLLSGKIFCGHCGSKMNGNCNAGNYCYYQCYGKKNGNVDCKKKNIRKEFIERLVAQDALSLLTDEYIEQIATIACEKNQHEIELDSALPTIRDRIHQVDLSLNHLLKAIESGSAPDMLVKRMGELEKEKKDLQAQAKKESEDIVELDKAQVIYWLEQFRGGSIEDEEFCRMLIDLFVNSVTVWDEDDNTYKVTVAYNLTSLPTKTYRLNKGGTLSDFASNAPGPRWS

SEQ ID NO: 5793 - protein, 501 aa, Unknown
  Description of Unknown: Integrase B5794 sequence
  SM00857,G3DSA:1.10.10.2600,IPR036162,PF13408,PS51737, IPR025827,G3DSA:3.40.50.1390,IPR006119,IPR038109,PF07508, IPR011109,SSF53041,PTHR30461,Coil,PS51736, cd00338,PF00239
MRAVIYARYSPGPKQTDLSIEGQVRECKEYIKKKGYELVKVYADRHVTGMSLKKRDDFACLMDDAKAHKFDVVVCYDTARFARDKFDAVVNKKILRQDLGIGIEYATLNTEGPEGRLIESVMEGFNQYYSEELSRKVKRGMYDAAMKGQTLGSRPPLGYRVDEQKRFIVDEAEAEAVRSAFEAYARGATFASCARTLNAAGYRTSRGSEFTISTVRKMLVNQRYIGVYMGEQDKVPRIVTDEVFYEVQKRIKKAEPRSPKGVYPLVGKLICGCCGAHMTGVSGTSKTGRRYFYYKCPNKCKGQRVRQDKLDQFVAEFTREAFISPETLREIAHRLFTHQEAENASKEVQTSLETTLARTETALDNIALALAERPKSKTLLKKLDDLELQRHDIEITLAKEKTKRSGILSEAALEEGLAAFIQGFEFEGSEDQDRRLIDALVDTVVLYPDRVLATYTIQGIKNLEKVEFSRDGLSSTTTIKGRTLIFASGGFAIQCKRNGKI

SEQ ID NO: 5794 - protein, 501 aa, Unknown
  Description of Unknown: Integrase B5795 sequence
  PTHR30461:SF3,cd00338,SM00857,G3DSA:1.10.10.2600,IPR036162, PF13408,PS51737,G3DSA:3.40.50.1390,IPR025827,IPR006119, IPR038109,PF07508,IPR011109,SSF53041,PTHR30461, PS51736,Coil,PF00239
MYEEVKNACIYARYSSSNQTEQSIEGQLRVCREFCNRHNIRVVEVYTDRATSASKDIEKRVSFLKMIKDSERGNFDAVIVYKLDRFARSRYDSATYKYRLRKNGVQLISATENISNDPEGIILESVLEGMAEFYSAELSQKIHRGLRESAYKHNSIGGQIPLGYKTEGKKLVIDEETAPIVREAFEMYAEGHSVADICRTFNAKGYKTSKGTRFGKSSFSKIFRNEKYIGIYQFHDYRAEDAIPALIDRKTFNLVQARLKTVGKAPGQFKAKHIYLLSGKLYCGHCGSKMNGNCNTNEYSYYECYGKKNLHKDCHKRNLRKDFIEDIVVRDALSLLTPERIEEIATVAIQTNTYEVETTTDIPAIRGRLHETKLSLENITKAIEGGLAPETLVKRMVELEKEKKVLEGELKKEEKGVAYLDREQVIYWLNQFKNGDIEDEDFRRQLIDLFVNSVTVWDEPDDFFKITIAYNLTSLQEKTYRLPKGGTLSDLALNPPGSSCG

SEQ ID NO: 5795 - protein, 501 aa, Unknown
  Description of Unknown: Integrase B5796 sequence
  PTHR30461:SF3,cd00338,SM00857,G3DSA:1.10.10.2600,IPR036162, PF13408,PS51737,G3DSA:3.40.50.1390,IPR025827,IPR006119, IPR038109,PF07508,IPR011109,SSF53041,PTHR30461, PS51736,Coil,PF00239
MAEITIIPAKNHADEIVRTAAYARVSSDSEDQLNSFAAQIRYYTELLQNSTDAVFVDMYADQGITGTSAAKRTEFQRLMSDCRKGKIDRILTKSISRFARNTKDSLEAVRELKTLGISVYFEKENIDTGEISSEMMLAIYSQFAQEESMSISRNVRMGFQKRMADGSYVPSAVPFGYIRENGKFVIDKEKAEIVRGIFSDYLNGVSAEWLAEKYRVKLATVKYVLTNEKYTGDSIFHKWYTTDTLPFDCRENRGERDKYYVSETHPAIISREVFQSVQRLIERKGRAHKGKTTQSYPLRKKIYCGECGTLYKRKERGSRVCWVCRNHDSSADKCSAKQIDEREIYGAFIVMFNKLLQNYKVILVPLQRQIQELFNLKMRENAQIVQLRKELAESREQAYLIAGLRSKGILDAAYYTEKAAALEKNIDSLQKRLDAFEEDDENGRILGKFRKLIGIFERAETITEFDEIKFGQIVEKITVLSESKIRFELIGGIGFVEQIMR

SEQ ID NO: 5796 - protein, 501 aa, Unknown
  Description of Unknown: Integrase B5797 sequence
  cd03768,SM00857,G3DSA:1.10.10.2600,IPR036162,PF13408, PS51737,IPR025827,G3DSA:3.40.50.1390,IPR006119,IPR038109, PF07508,IPR011109,SSF53041,PTHR30461,PS51736, Coil,PF00239
MNIREDVIYARQSVDRKDSISIESQIDFCKYELKGGSCRVFKDKGYSGKNTDRPEFQKLLGEIRKGKVRRVVVYKLDRISRSILDFANMMELFQEYDVEFVSSTEKFDTSTPMGRAMLNICIVFAQLERETIQKRVTDAYYSRCLKGFHMSGQAPYGFDLEPTVVENIRTKMMVADPIAASHVRLMFEMYAEPETSFGDITRYFEERGIKVYGKSLTRSYLSQLLRNPVYAQADLEMYEFFKSQGTVVVNDAADFAGTNGCYLYQGRDVKEDKDKSLKDQILVIAPHEGFVSADVWLRCRKKLMTNTTFQNGRKARNTWLAGKIKCGKCGYALKTTHNPSGYEYLRCSKRADHKGCPGCGTLRKTEFEQFIFTAMGEKFREFKLLRGGEEKANPKITAYQVELAQVEAEIEKLLDTLTRANATLLAYANKKIEDLDNRRKTLSKAIADLSVETLSSQQIELLSGYLDDWENISFEDKRKAADGLISSISATSDYVKIEWKI

SEQ ID NO: 5797 - protein, 500 aa, Unknown
  Description of Unknown: Integrase B5798 sequence
  SM00857,G3DSA:1.10.10.2600,IPR036162,PS51737,G3DSA:3.40.50.1390, IPR006119,IPR038109,PF07508,SSF53041,IPR011109, PF00239,PTHR30461,PS51736,Coil,cd00338
MAYAMYLRKSRADEELGYENTLERHEEMLRNLAAQTGIHVDESHIYREIVSGESIEARPQMQKLLKAVEMGLYTGVLCIELERLSRGDGADQQRILKAFQFSDTKIITLTKTYDLAGDDSFDEEFFEFGLFMSRREYKMIKKRLYRGRIQAQKEGYFIGSRPPYGYDKKRIGKGYVLVPNENAEVVRYIFRRYAKRETAANILHDLNNMAIPTVTGTKWTAYAIREVIKNQTYIGKINTKTVRCEKSIKDGKVVQRWLNNYEPVVVDGKHEPIIDEELFWKCQEVRDSKKTRTRSDLTLKNPLASLMFCSVCGKTIRRTHYDYKGERTFYYGCVTSRCETKNTFTHVVYDMVMAELKKELERQQVMLADYDTSPEHDARKDELEMLKAELGKKSMMLERACEAYETGVYDRQTYLERVQKVNAARAELQTRVEELEASIEESEERHAKAVPILTRVVEEMHTLEPKEQNDLLKMIIDRIEYEKTESGAAIEPTLRISLKI

SEQ ID NO: 5798 - protein, 500 aa, Unknown
  Description of Unknown: Integrase B5799 sequence
  PTHR30461:SF3,cd00338,SM00857,G3DSA:1.10.10.2600,IPR036162, PF13408,PS51737,G3DSA:3.40.50.1390,IPR025827,IPR006119, IPR038109,PF07508,IPR011109,SSF53041, PTHR30461,PS51736,Coil,PF00239
MAYAMYLRKSRADEELGYENTLERHEEMLRNLAAQTGIHVDESHIYREIVSGESIEARPQMQRLLKAVEMGLYTGVLCIELERLSRGDGADQQRILKAFQFSDTKIITLTKTYDLAGDDSFDEEFFEFGLFMSRREYKMIKKRLYRGRIQAQKEGYFIGSRPPYGYDKKRIGKGYVLVPNENAEVVRYIFRRYAQYDTAANILHDLNNMAIPTVTGAKWTAYAIREVIKNQTYIGKINTKTVRCEKSIRDGKVVQKWLNNYEPVTVEGRHEPIVDEELFWKCQEVRDSKKTRTRSDQTLKNPFASIMFCSVCGKTMRRTHYDYKGERTFYYGCQTSRCETKNTFTHVVYDMVIDELKKELERQQVVLADYDTSPEHDARRDELEMLKAELGKKSMMLERACEAYETGVYDRQTYLERVQKVNAARAELQARVEDLEKSIDESEERHEKAVPILTRVVEEMHTLEPKEQNDLLKMIVDRIEYEKTESGAAIEPTLRISLKI

SEQ ID NO: 5799 - protein, 500 aa, Unknown
  Description of Unknown: Integrase B5800 sequence
  PTHR30461:SF3,cd00338,SM00857,G3DSA:1.10.10.2600,IPR036162, PF13408,IPR025827,G3DSA:3.40.50.1390,PS51737,IPR006119, IPR038109,PF07508,SSF53041,IPR011109,PTHR30461, PS51736,Coil,PF00239
MQKNTTIENTTKAVIYARYSSDRQREESIEGQLRVCEDYAKRTGMTILHVYADRALSGRSDQRPEFQMMIQAAATQAFDTVLVYKLNRFARNRYDSAKYKHKLKKYGVKVVSAMENIANDPSGILLESVIEGMAEYYSAELAENVMRGMTENALECKWPGGTVPLGYKLDAARHLIIDEPAAKTVRWIYQMALESRQPSSIIRELNAAGCRTAFGRPFGRTSLNTILKNERYIGTFIWNDIKKPNAIPVIIDPEDWQKVQTISKSKKKCIAKSRGENYLLTGRLFCGQCGESMVGTAGTSKMQRVYHYYACGNHLKKKGCTTKAIRADKLEDLICTATTQLLSNQDAIKAIAKQAISAQETQGPSLVLKSLQNQKADISRKLQNCVKAVEEGLISQTVTNHIQEYEKQLQSLNDDIKKEELMNRVPQLTEKHIEFFFWSISQQIKKADKYKSILLSSLVRSVIIYEDFIEIQYNYKKELPILQNPVKIKSGSIIYFGALK

SEQ ID NO: 5800 - protein, 500 aa, Unknown
  Description of Unknown: Integrase B5801 sequence
  PTHR30461:SF3,IPR036162,PS51737,IPR011109,PTHR30461, PF00239,G3DSA:1.10.10.2600,IPR006119,SSF53041,cd00338, SM00857,IPR025827,IPR038109,PS51736,mobidb-lite, PF13408,G3DSA:3.40.50.1390,PF07508,Coil
MKTAVIYARYSSDKQTEQSIEGQLYDCYNYAKQHGITVVREYIDRAMTGKNDDRPAFQQMLHDSAQHKWDSVLVWKLDRFARNTIDSAVNRQILAKNGVRLLSVMESFGDDASGQMMTHIIEAINEYYSADLREKTIRGMRQSAMKAQTTGHIPLGYKVVDKKLVIDDETRIIPETVFRMYAEGERLTDIAEHLNAQGYRNRRGRPFTPNSFYNMLANEKYIGIYKYDDIVIEGGIPQMIPNEVFEAVREKLITNRKRAAKNTAKADYYLSGKLYCGHCGEPMSGLSGTGRNGVKHYYYRCNGVQKKSGCHKKLEKKYLIEDEVCRAARSAFEQMDKAETAETIYQMYLQTVRNEYAPAELEKELTECTKQAENVVNAIAQTGGNQLLYDKVRELEERKEQLGSALRLSQAMTDNVPSVEQITVFIDDILATDINTTEGKKAIADIMISKVYVYDDKLTVIFKDKDGKSVDIPLSAVSDSSSADCAPSALGSHTGQRRTT

SEQ ID NO: 5801 - protein, 500 aa, Unknown
  Description of Unknown: Integrase B5802 sequence
  PTHR30461:SF3,cd00338,SM00857,G3DSA:1.10.10.2600,IPR036162, PS51737,G3DSA:3.40.50.1390,IPR006119,IPR038109,PF07508, IPR011109,SSF53041,PTHR30461,PS51736,Coil, PF00239
MAYAMYLRKSRADEELGYENTLERHEEMLRNLAAQTGIHVDESHIYREIVSGESIEARPQMQKLLKAVEMGLYTGVLCIELERLSRGDGADQQRILKAFQFSDTKIITLTKTYDLAGDDSFDEEFFEFGLFMSRREYKMIKKRLYRGRIQAQKEGYFIGSRPPYGYDKKRIGKGYVLVPNENAEVVRYIFRRYAQRETAANILHDLNNMAIPTVTGTKWTAYAIREVIKNQTYIGKINTKTVRCEKSIKDGKVVQRWLNNYEPVVVEGKHEPIVDEELFWKCQEVRDSKKTRMRSDLTLKNPLASIMFCSVCGKTIRRTHYDYKGERTFYYGCVTSRCETKNTFTHVVYDMVIDELKKELERQQVVLASYDTSPEHDARRDELEMLRAELGKKSMMLERACEAYETGIYDRQTYLERVQKVNAARAELQARVEELEASIEESEERHEKAVPILTRVVEEMHTLEPKEQNDLLKMIIDRIEYEKTESGAAIEPTLRISLKI

SEQ ID NO: 5802 - protein, 500 aa, Unknown
  Description of Unknown: Integrase B5803 sequence
  PTHR30461:SF3,cd00338,SM00857,G3DSA:1.10.10.2600,IPR036162, PF13408,IPR025827,PS51737,G3DSA:3.40.50.1390,IPR006119, IPR038109,PF07508,SSF53041,IPR011109,PTHR30461, PS51736,Coil,PF00239
MYEDIKTACLYVRFSSHNQTEQSIEGQTRVCRDFCKRHNIRIVEIYADRATSASKDIEKRVQFLKMIKDSEKGLFDAVIVYKLDRFARSRYDSATYKYRLKRNGVQLISATENISNDPEGIILESVLEGMAEFYSAELSQKINRGMRESAYKHNSIGGAIPLGYKIEDKKLVIDPKTAPIVKEAFEKYADGETVAEICRQFNARGYKTSKGTAFGKSSFTKIFRNERYIGVYTFHDYRAEDAIPAIIDKDLWDRVQLRVGKIKNAPARNKAKVVYLLSGKIFCGHCGSKMNGNCNAGNYCYYQCYGKKNGNVDCKKKNIRKEFIERLVAQDALSLLTDEYIEQIATIACEKNQHEIELDSALPTIRDRIHQVDLSLNHLLKAIESGSAPDMLVKRMGELEKEKKDLQAQAKKESEDIVELDKAQVIYWLEQFRGGSIEDEEFCRMLIDLFVNSVTVWDEDDNTYKVTVAYNLTSLPTKTYRLNKGGTLSDFASNAPGSRC

SEQ ID NO: 5803 - protein, 500 aa, Unknown
  Description of Unknown: Integrase B5804 sequence
  PTHR30461:SF3,SM00857,G3DSA:1.10.10.2600,IPR036162,PF13408, PS51737,IPR025827,G3DSA:3.40.50.1390,IPR006119,IPR038109, PF07508,IPR011109,SSF53041,PTHR30461,PS51736, cd00338,PF00239
MNGVIYARYSSENQREESIDGQLRECTAFAQHNDIQIVGEYIDRAFSAKTDNRPSFQKMIKDSAKGEFDVIIVWKLDRFARNRYDSAHYKNILKKNGVKVVSATEAISSGAEGIILESVLEGMAEYYSAELAEKVSRGMKENALKCKYNGGSVPLGYYIDESKHFQIDSSVAPFVVECFEHYADGMTMKQLRDELNMKGVKNSRGGKLSIDVISRMLTNRKYLGEYTFQDITIKDGIPAIVSTSLFEKVQDRLTKTKKAPSSHKADDDYILTTKLFCGKCKSFMVGESGTNAQGKKYRYYKCVNHKKHQGCDMKSIRKDLIENMTIKYIREFLNDEDLINTLIDLAYDAQHKENEQLPLLRKQLAQTEKGIKNIVDAIEQGISTKSTRERLLDLEQRKNDIEMSISKESIENPMLTKKQFKFWFDQLKKLDISKSEQRQKLVDLFVNSIIIYDDHIKFFFNYKEHTETITFDELNNCSDLPDSPRPNNKRHPLGCLLFFI

SEQ ID NO: 5804 - protein, 500 aa, Unknown
  Description of Unknown: Integrase B5805 sequence
  PTHR30461:SF3,SM00857,G3DSA:1.10.10.2600,IPR036162,PF13408, PS51737,G3DSA:3.40.50.1390,IPR025827,IPR006119,IPR038109, PF07508,IPR011109,SSF53041,PF00239,PTHR30461, PS51736,Coil,cd00338
MSSTETLKSGALYIRVSTHGKQEELSPAAQKRLLLKYAKEHNIVVSKEYIYEEKGISGRKADRRPEFMRMISAAKSNPSPFDVILVWKFSRFARNQEESIVYKSLLRRKCNVDVISVSEPLVEGPFGSLIERIIEWMDEYYSIRLSGEVFRGMSEKAMKGGYQARPPLGYKILVKGEPPVIVPEEAKIVEYIFDKYVNARSGIFDIARSLNTMGAKTSHGKAFERRSVEYILQNPTYCGKIRWNRTTNATNEIKPKEDWILADGTHPAIISEELFHAAQERFQSEYRPTGARPSSTYRHWLSGIIKCPECGRTMIAKSTTDKRYHKQYSYFTCYGYSKGKCLAKNSVSSKKLEPVVIAGIKAATSDTNLSFTIKKSIPVEDKSELKILEGLLAKIDMKEKRIKEAYMNGIDSLEEYKENKLLLTKERAVLEEKIKNTNAEPNNNMDMIKNDMKKRIENVYDIITGDSFSDQQKSDALKSIVEKIVYKKEEETVDIYYYYL

SEQ ID NO: 5805 - protein, 500 aa, Unknown
  Description of Unknown: Integrase B5806 sequence
  PTHR30461:SF3,cd00338,SM00857,G3DSA:1.10.10.2600,IPR036162, PF13408,PS51737,IPR025827,G3DSA:3.40.50.1390,IPR006119, IPR038109,PF07508,IPR011109,SSF53041,PTHR30461, PS51736,Coil,PF00239
MRKKAIDSTAAVVYARYSAGPKQTDQSIEGQIYDCQEYAKKHGLTIIEYYIDRHISGKEDSNRSEFQRMLNDCCKGQFKYVITWKVDRFGRNREELAVNKSKLKRAGVQLVYAKESIPDGPEGIILESLLEGLAEYYSADLAQKVKRGMSESAKKGKVLGSACIYGFQKSSDGLYEINEPAATIIREVFRRYADGDTVPQIIKDLNSRGVLTYKNKPFDSSTLYRALRNRKYIGEYTFGDVVYESGIPQIIDNETFDRVQERMDANKHTGFKYAAPVPFLFTGKIICGECGESYCGESGTSKTGTVHRYYKCHGRKARKTLCNSPVFRKDWFEQFILQKTVTDVLNDDVIDYLVKEIIKVQESDSFSSEISVLKKEKREVEKSLSNIMRAIESGIFNDTTADRMSQLEHRSKELSVEISKAELKRLRLTPDHLYYWFDQFRGGDISDETFRKHLADAFINQIFVYEDRVVIAYNCANNNPRSIDLSELSACVRTRSRKVD

SEQ ID NO: 5806 - protein, 500 aa, Unknown
  Description of Unknown: Integrase B5807 sequence
  SM00857,G3DSA:1.10.10.2600,IPR036162,PS51737,G3DSA:3.40.50.1390, IPR006119,IPR038109,PF07508,IPR011109,SSF53041, PTHR30461,Coil,PS51736,cd00338,PF00239
MAYAMYLRKSRADEELGYENTLERHEEMLRNLAAQTGIHVDESHIYREIVSGESIEARPQMQKLLKAVEMGLYTGVLCIELERLSRGDGADQQRILKAFQFSDTKIITLTKTYDLAGDDSFDEEFFEFGLFMSRREYKMIKKRLYRGRIQAQKEGYFIGSRPPYGYDKKRIGKGYVLVPNENAEVVRYIFRRYAQRDTAANILHDLNNMAIPTVTGTKWTAYAIREVIKNQTYIGKINTKTVRCEKSIKDGKVVQRWLNNYEPVTVEGRHEPIVDEELFWKCQEVRDSKKTRVKADQTLKNPLASIMFCDVCGKTIRRTHYDYKGERTFYYGCVTSRCETKNTFTHVVYDMVIDELKKELERQQVVLASYDTTPEKDTRKDELEMLKAELGKKQMMLERACEAYETGIYDRQTYLERVQKVNAAKVELQARIETLEKDIEESEERHEKAVPILTKVVEEMHTLTPKEQNDLLKMIIDKIIYKKTESGAAIEPELEISLKI

SEQ ID NO: 5807 - protein, 500 aa, Unknown
  Description of Unknown: Integrase B5808 sequence
  cd00338,SM00857,G3DSA:1.10.10.2600,IPR036162, PS51737,G3DSA:3.40.50.1390,IPR006119,IPR038109, PF07508,IPR011109,SSF53041,PTHR30461, PS51736,Coil,PF00239
MKSVLYARVSTEDLEQNNSYIQQQLYQDDRFEIVKIFSDKASGSSVDGRESFLEMLKYVGISKEGNNYFVEHRTEIECIIVANVSRFSRSVVDARLIIDALHKNNVKVFFVDLNKFSDDADIFLQLNMYLMIEEQYLRDVSKKVKAGMQRKQSTGYILGSNKIWGYNYVTKDDGKGYLVPHETESLMVKNIFKEYIFGAGTRTLAKKYKLASSTILGILKNTKYCGYMGYNLKSDNPTYVKSPFIEPLISTEAFEEVQRIIKGRCNSESGRGRRIKVRNLTGKIKCECGANYHYKQRETEWCCGREGVEGRTKGCGSPQFNTKLIIPYLEKNIDNIEKNLEFNLNREIKDINVGSFDRLNQRKEELIRQQDKLLDLYLDEDKLKNISKEMLERRSKLIKEEIEEVEEKLVILNDMNSHLNNLRRIKVEYKNEIKNIRRLIEEKNLDEIEKLISKIQLETIVNIINFRKELKIKEIQFSCFNELYNTNFIFAPEPKKVWDK

SEQ ID NO: 5808 - protein, 500 aa, Unknown
  Description of Unknown: Integrase B5809 sequence
  PTHR30461:SF3,cd00338,SM00857,G3DSA:1.10.10.2600,IPR036162, PF13408,IPR025827,G3DSA:3.40.50.1390,PS51737,IPR006119, IPR038109,PF07508,IPR011109,SSF53041,PTHR30461, PS51736,Coil,PF00239
MRVVLYMRYSSDRQTEQSIEGQNRVCTAFCEQQGYEIVDRYIDRATSAFKDTDKRTEFQRMIRDSEKQLWEGIVVYKLDRFARNRYDSATYKARLKKNGVRVISATENISDNPEGVILEAVLEGMAEFYSKELSQKIMRGMFESANKCHSIGGHIPLGYKIENKKLVIDEAGAAIVREAFDLYANGATVAEICETFNTKGYRTAKNAEFNKNSFRSMFKNERYIGIYKYKDLRIEGGVPAIVDKDIFTIVQKKLSKNAEAPSRGKAKIDYLLSQKLFCGHCGSLMTGESGTGKGGTTYFYYTCGKRKREHTCDKKPLKKDFIERAVVEDALTLLTPETINELADIAAKESVREMEENSIIPALKNQLHETERSINNLVKMVEKGVESDTIADRLKELEKEKRAIEKRLVVAQDDYVILEKDHIVWWLSEFCNGDIEDEEFRRHIIDLLVNSVTVWDEPDGWYKITSVYNLTSNKTKTFRCSDLSGQAPPQVKKSEHYHQW

SEQ ID NO: 5809 - protein, 500 aa, Unknown
  Description of Unknown: Integrase B5810 sequence
  PTHR30461:SF3,SM00857,G3DSA:1.10.10.2600,IPR036162,PF13408, PS51737,G3DSA:3.40.50.1390,IPR025827,IPR006119,IPR038109, PF07508,IPR011109,SSF53041,PF00239,PTHR30461, Coil,cd00338
MYEEIKTACLYLRYSSSNQTEQSIEGQMHVCQDFCKRHNIRIVEMYIDRATSASKDIEKRVEFLKMIKDSEKGNFNAVIVYKLDRFARSRYDSATYKYRLKRNGVQLISATENITQDPEGIILESVLEGMAEFYSAELSQKINRGMRESAMKHNSIGGAIPLGYKTVDKKLVIDETTAPIVREAFQMYADGESVAEICRTFNNRGYKTSKGTRFGKSSFTKIFRNEKYIGVYKYHDYRAEDVIPPIIDKDLWDRVQVRVGKIKKAPARNKARHTYLLTGKLFCGHCGSAMNADGNSQGYLYYRCYGKKNLDKQCNKRNMEKNLIERLVAQDAMSFLTDEYIEKIATIACDRNKQEIESDSPIPVIRDRIRQVDVSLNNLLKAIETGSAPDMLVKRMGELETEKKDMEVQLKKEMAHQVYIDKEQVIFWLEKFREGDINDEEFCQTVIDLFVNSVTVWDEPDDKFKITIAYNLTSIPQKTYRLSKDGRLSDYASNTPDWKS

SEQ ID NO: 5810 - protein, 500 aa, Unknown
  Description of Unknown: Integrase B5811 sequence
  cd00338,SM00857,G3DSA:1.10.10.2600,IPR036162,PF13408, IPR025827,G3DSA:3.40.50.1390,PS51737,IPR006119,IPR038109, PF07508,SSF53041,IPR011109,PTHR30461,PS51736, Coil,PF00239
MYLRKSRADDPHESIEDTLRKHEKILFDLANKLNIKKDEIVQFKEVVSGENLKNRPQAQKMLKLVMENAFEGVLVVDSQRLARGDTLDQGTIIRAFSLNNTKIITPGKTINPGDEIDQDYFEFDLFMGRREYKMINKRMQRGRNISVQEGNYVGSIAPYGYKKTKIGKCHTLKINEDEIDCFNKMKELALNGLGCTSIANELNRLGFKPRKSKLWTTNAVRDILLNKTNLGLIKWNTRKSVKLYKNDEIIKSRPRNEEAEYYPGKHPAIITQVEYDAIVENIKNRARPVKKDKKLQNPLAGVVYCGKCGKAMIRRSYNNGYRDGLICTNTHCNNVSSVLEVVEKRVLESLEDTLKEYRQFIDNYHNDKTKTNNDSLIIKTEKEINKIDSQINKACEMLEVGTYSVELFKERKTLLDNQKKALIDKIEALKKEDTDFKLQNYINAVPILENAIKLYWNSSVEEKNKLLKQIVKRCGYLKSERGKRNGKGVYNFKLNIYLKI

SEQ ID NO: 5811 - protein, 500 aa, Unknown
  Description of Unknown: Integrase B5812 sequence
  PTHR30461:SF3,cd00338,SM00857,G3DSA:1.10.10.2600,IPR036162, PF13408,PS51737,G3DSA:3.40.50.1390,IPR025827,IPR006119, IPR038109,PF07508,IPR011109,SSF53041,PTHR30461, PS51736,Coil,PF00239
MKTAAIYARYSCENQTEQSIEGQLRVCQEYAASLGILIVETYIDRAMSGTNDNRAAFQQMLKDSSKKQFQFVIVYKLDRFARNKVESVINKKTLQDNGVTLLSAMERITDTPEGHMMETILEGFNQYFSEELAQKVKRGMRETRLKGLYQGGGLPYGYKVEGRKVVIDESAAEIVRYAFQEYSKGAFVLEIIDTLHKKGLLYKGKPFPRNLLYHVLRNEKYTGSYKCRDEVVDNIYPQIIPVELFQKVGARLEKNRYGKRSFEATYLLKFKAKCGYCGMPMYSETGTASNGETNRYYKCAGKKKYHNGCTKSQLRKEYLEDIVVNAIIDELNRPGAIEYITKKLLETQEENIKNNSTVNALLKEKTKIDKQLENIANAIQNGIVSKTTAKRLQDLEEQQEKLEREILIEQSKQATPLTRAQIKEFYSDALGMELRMLIEYLVKEVIMYDDKIQIIFKSPINTVPDEDRGFLFYEGTKQPKTIISRRWSTKRKIMVEIRVE

SEQ ID NO: 5812 - protein, 500 aa, Unknown
  Description of Unknown: Integrase B5813 sequence
  PTHR30461:SF3,cd00338,SM00857,G3DSA:1.10.10.2600,IPR036162, PF13408,PS51737,G3DSA:3.40.50.1390,IPR025827,IPR006119, IPR038109,PF07508,IPR011109,SSF53041,PTHR30461, Coil,PF00239
MYEEIKTACLYLRYSSSNQTEQSIEGQMHVCQDFCKRHNIRIVEMYIDRATSASKDIEKRVEFLKMIKDSEKGNFNAVIVYKLDRFARSRYDSATYKYRLKRNGVQLISATENITQDPEGIILESVLEGMAEFYSAELSQKINRGMRESAMKHNSIGGAIPLGYKTVDKKLVIDETTAPIVREAFQMYADGESVAEICRTFNNRGYKTSKGTRFGKSSFTKIFRNEKYIGVYKYHDYRAEDVIPPIIDKDLWDRVQVRVGKIKKAPARNKAKHTYLLTGKLFCGHCGSSMNADGNSNGYLYYRCYGKKNMNESCKKRNMEKNLIERLVAQDAMSFLTDEYIEKIATIACDRNRQEIESDSPIPVIRDRIRQVDVSLNNLLKAIETGSAPDMLVKRMGELETEKKDMEVQLKKEMAHQVYIEKEQVIFWLEKFREGDINDEEFCQTVIDLFVNSVTVWDEPDDKFRITIAYNLTSIPQKTYRLSKDGRLSDYASNTPDWKS

SEQ ID NO: 5813 - protein, 500 aa, Unknown
  Description of Unknown: Integrase B5814 sequence
  PTHR30461:SF3,SM00857,G3DSA:1.10.10.2600,IPR036162,PF13408, IPR025827,G3DSA:3.40.50.1390,PS51737,IPR006119,IPR038109, PF07508,IPR011109,SSF53041,PTHR30461,Coil, PS51736,cd00338,PF00239
MNTVIYARYSAGPRQTDQSIEGQLRVCTDFCKQRGLTVIDTYCDRHISGRTDERPEFQRLIADAKRKKFEAVVVYKTDRFARNKYDSAVYKRELKRNGIQIFYAAEAIPDGPEGIILESLMEGLAEYYSAELAQKIKRGMHESALKCQSTGSGRPLGYRVDEQKHFQTDPESAQTVQTIFEQYIKGESNAAICELLNSRGLRTAQGKPFNKNSINRIIKNRKYIGEYRYHDIVVEGGMPAIISKDTFNLAQAEMERRRTRKAPKSPKAEYLLAGRLFCGHCKGPMQGVSGTGKSGNKWYYYYCGNTRGKNKTCDKKQVSRDRLERAVVDFTVRYILQEEVLEELARKVHAAQERQNDTASEIAFYEKKLADNKKSIANVLRAIESGAATQTLPARLQELENEQAVILGEISFLKGKRLAFTEDQILFALMKHLEPYPGESEQDYRRRIISDFVSEVYLYDDRLLIYFNISSENGKLKSADLSNIEGGEFDEGLVRSTKTI

SEQ ID NO: 5814 - protein, 500 aa, Unknown
  Description of Unknown: Integrase B5815 sequence
  PTHR30461:SF3,SM00857,G3DSA:1.10.10.2600,IPR036162,PF13408, IPR025827,G3DSA:3.40.50.1390,PS51737,IPR006119,IPR038109, PF07508,IPR011109,SSF53041,PF00239,PTHR30461, PS51736,Coil,cd00338
MRVVLYMRYSSDRQTEQSIEGQNRVCTAFCEQQGYEIVDRYIDRATSAFKDTDKRTEFQRMIRDSEKQLWEGIVVYKLDRFARNRYDSATYKARLKKNGVRVISATENISDNPEGVILEAVLEGMAEFYSKELSQKITRGMFESANKCHSIGGHIPLGYKIENKKLVIDEAGAAIVREAFDLYANGATVAEICETFNTKGYRTAKNAEFNKNSFRSMFKNERYIGIYKYKDLRIEGGVPAIVDKDTFAIVQKKLSKNAEAPSRGKAKIDYLLSQKLFCGHCGSLMTGESGTGKGGTTYFYYTCGKRKREHTCDKKPLKKDFIERAVVEDALTLLTPETIDELADIAVNESIREMEENSIIPALKDQLHDTERSINNLVKMVEKGVESDTIADRLKELEKEKRAIEKRLVVAQDDYVLLEKDHIVWWLSEFCNGDIEDEEFRRHIIDLLVNSVTVWDEPDGWYKITSVYNLTSNKTKTFRCSDLSGQAPPQVKKSEHYHQW

SEQ ID NO: 5815 - protein, 500 aa, Unknown
  Description of Unknown: Integrase B5816 sequence
  cd00338,SM00857,G3DSA:1.10.10.2600,IPR036162,PF13408, PS51737,G3DSA:3.40.50.1390,IPR025827,IPR006119,IPR038109, PF07508,IPR011109,SSF53041,PTHR30461,PS51736, Coil,PF00239
MAYAMYLRKSRADEELGYENTLERHEEMLRNLAAQTGIHVDESHIYREIVSGESIEARPQMQRLLKAVEMGLYTGVLCIELERLSRGDGADQQRILKAFQFSDTKIITLTKTYDLAGDDSFDEEFFEFGLFMSRREYKMIKKRLYRGRIQAQKEGYFIGSRPPYGYDKKRIGKGYVLVPNENAEVVRYIFRRYAQRETAANILHDLNNMAIPTVTGTKWTAYAIREVIKNQTYIGKINTKTVRCEKSIKDGKVVQRWLNNYEPVTVDGKHEPIVDEDLFWKCQEVRDSKKTRTRSDQTLKNPFASIMFCSVCGKTMRRTHYDYKGERTFYYGCQTSRCETKNTFTHVVYDMVIDELKKELERQHVMLADYDTSPEHDARKDELEMLRAELGKKSMMLERACEAYETGIYDRQTYLERVQKVNAARAELKARVEELEVSIDESEERHQKAVPILTRVVEEMHTLEPKEQNDLLKMIVDRIEYEKTESGAAIEPTLRISLKI

SEQ ID NO: 5816 - protein, 500 aa, Unknown
  Description of Unknown: Integrase B5817 sequence
  PTHR30461:SF3,SM00857,G3DSA:1.10.10.2600,IPR036162,PF13408, IPR025827,G3DSA:3.40.50.1390,PS51737,IPR006119,IPR038109, PF07508,IPR011109,SSF53041,PTHR30461,Coil, PS51736,cd00338,PF00239
MKAAAYARYSTDKQTENSIAYQMNAITKYCLDHDIDLISAFSDEAESGTNTDREGFQNLVRAAQNKEFEAVVIYDISRGSRDVADWFQFRKTMRALGVQVISTNQQLGDITNPNDFLIELINVGLGQHMVLDTRKKSMAGMLERAKKGLYCGGNCPLGYKIENGRYVIEEKEAEVVRQIFNRYAQGESYNQIIDGLNGAVGKFGRPIGKNSLHSILANERYTGVYIWNERNVRIMRKWAGGKKNPNPVIIEGIIPQIIDKTTWERVKKRMETRKNGTNKAKREYLLTGLIECAECGATYVGHCNVAHRKDGSVRENRYYECGNKYRTRTCHSKNLNADELELFVVTQIQDTLRNWDPSEVARKYIKEIQGATADCTEEKRELVDVEHQINNGVKAVLSGMRIPELDKEIDRLRQRKLDLENIIAEKSQQTNHSYSADEIEAALSDLIKNFDPKEAVKQLVQKIYANADGSCTVHIGVHKIGAGDPSYSICTFFFPAKSKT

SEQ ID NO: 5817 - protein, 500 aa, Unknown
  Description of Unknown: Integrase B5818 sequence
  cd00338,SM00857,G3DSA:1.10.10.2600,IPR036162,PF13408, PS51737,G3DSA:3.40.50.1390,IPR025827,IPR006119,IPR038109, PF07508,IPR011109,SSF53041,PTHR30461,PS51736, Coil,PF00239
MAYAMYLRKSRADEELGYENTLERHEEMLRNLAEQTGIHIDEAHIYREIVSGESIEARPQMQRLLKAVEMGLYTGVLCIELERLSRGDGADQQRILKAFQFSDTKIITLTKTYDLAGDDSFDEEFFEFGLFMSRREYKMIKKRLYRGRIQAQKEGYFIGSRPPYGYDKKRIGKGYVLVPNENAEVVRYIFRRYAQHDTAANILHDLNNMAIPTVTGAKWTAYAIREVIKNQTYIGKINTKTVRCEKSIKDGKVVQRWLNNYEPVTVEGRHEPIVDEELFWKCQEVRDSKKTRTRSDQTLKNPFASMMFCSVCGKTMRRTHYDYKGERTFYYGCQTSRCETKNTFTHVVYDMVIDELKKELERQQVVLANYDTAPEKDTRKDELEMLRAELGKKSMMLERACEAYETGIYDRQTYLERVQKVNAARAELQARVEELEASIEESEERHEKAVPILTRVVEEMHTLTPKEQNDLLKMIVDRIEYEKTESGAAIEPTLRISLKI

SEQ ID NO: 5818 - protein, 500 aa, Unknown
  Description of Unknown: Integrase B5819 sequence
  cd00338,SM00857,G3DSA:1.10.10.2600,IPR036162,PS51737, G3DSA:3.40.50.1390,IPR006119,IPR038109,PF07508,IPR011109, SSF53041,PTHR30461,PS51736,Coil,PF00239
MAYAMYLRKSRADEELGYENTLERHEEMLRNLAAQTGIHVDESHIYREIVSGESIEARPQMQKLLKAVEMGLYTGVLCIELERLSRGDGADQQRILKAFQFSDTKIITLTKTYDLAGDDSFDEEFFEFGLFMSRREYKMIKKRLYRGRIQAQKEGYFIGSRPPYGYDKKRIGKGYVLVPNENAEVVRYIFRRYAQRETAANILHDLNNMAIPTVTGTKWTAYAIREVIKNQTYIGKINTKTVRCEKSIKDGKVVQRWLNNYEPVVVEGKHEPIVDEDLFWKCQEVRDSKKTRMRSDLTLKNPLASIMFCSVCGKTIRRTHYDYKGERTFYYGCVTSRCETKNTFTHVVYDMVIDELKKELERQQVVLASYDTSPEHDARRDELEMLRAELGKKSMMLERACEAYETGIYDRQTYLERVQKVNAARADLQARVEELEASIEESEERHEKAVPILTKVVEEMHTLEPKEQNDLLKMIIDRIEYEKTESGAAIEPTLRISLKI

SEQ ID NO: 5819 - protein, 500 aa, Unknown
  Description of Unknown: Integrase B5820 sequence
  PTHR30461:SF3,SM00857,G3DSA:1.10.10.2600,IPR036162,PF13408, IPR025827,G3DSA:3.40.50.1390,PS51737,IPR006119,IPR038109, PF07508,IPR011109,SSF53041,PF00239, PTHR30461,Coil,cd00338
MTIIGEYCDRAISGKTDNRPNFQRLIKDSEKGQFEAVIMYTLDRFARNRYDSAIYKAKLKKNGVKVYYAKQPMPDTPEGIILESVLEGYAEYYSENLSRNIKRGLKENALQCLAVGGAGMPLGYTVGEDRKYKIDPVGAKIVQEIFQMYADGMSATQIINECNRRGYKTSRGNAFNKNSLRTMLKNDRYIGVYRFADVVVEDGVPPIISRELFEKVQATLRHNYSARARNKAKDDYLLTTKLFCGHCGSSMVGESGTSRSGKLHHYYKCIDRKRNHKCKKAVEKKDWIEELVVRFTVQNVLNDETIERIARKTMEIIEKESADTSYLNGLQNELKDIKKKIKNLMNAIEQGIITPTTKERMDELEAEKNDLEGKIAREEMKKPLLTKERIMHWLNSFKSGNVNDIEYRRRVIDTLVNSVYIYDDGDKGRRIVFTFNMSGQNTATLSCSDIACVAPPPIMVSLDRMRVKAHPIGLFRGFSDLNFSRKTKDRLTVFSGTVGI

SEQ ID NO: 5820 - protein, 500 aa, Unknown
  Description of Unknown: Integrase B5821 sequence
  PTHR30461:SF3,IPR036162,PS51737,IPR011109,PTHR30461, PS00397,PF00239,G3DSA:1.10.10.2600,IPR006119,SSF53041, cd00338,SM00857,IPR025827,IPR038109,PS51736, IPR006118,PF13408,G3DSA:3.40.50.1390,PF07508,Coil
MPQNTNYGNLSHSDSTKRAAAYIRVSTDDQLELSPDSQLKEIRAFADRNGYTIDDEYIFHDDGISGTSAKRRPAFMEMIATAKKKPKPFDAIIVWKFSRFARSREDSIVFKSMLKKLGISVISVSEPITDDKMSIIVEGLIESMDEYYSANLSEEVKRGMLEKFSRKQAMSAAPYGYRLEDKKYVPEPAEAEIIKEVFTRFVGGETVWGISKDLKARGIKTKRGNITEPRTIHYYLDNPVYIGSIRYTLDGGGSRQRYLDGNFMLQEDCHEPIISKELWNEAQKLIKKNREIYGKSTKPVSYHEYALKGIVKCASCEHNLTYCSSKDAPRVQCPMYQHNKCDTSSSVRLDLLNEALLLHLQEALKDKNLNIDISADTSTKSSREIQLEAEIKRETARLARMKEAYLNGVDTIEEYKENKSAQTKIISRLEKELKKLKSPPSDKEKQEKIKQVKTKIKTAIDALQSTAISETEKNALLKTFISKALYDSKTKTLTVYYYAQ

SEQ ID NO: 5821 - protein, 500 aa, Unknown
  Description of Unknown: Integrase B5822 sequence
  PTHR30461:SF3,SM00857,G3DSA:1.10.10.2600,IPR036162,PF13408, PS51737,G3DSA:3.40.50.1390,IPR025827,IPR006119,IPR038109, PF07508,IPR011109,SSF53041,PTHR30461,Coil, PS51736,cd00338,PF00239
MRMCGYARVSTDEERQLDSLEHQMEFFSDFAKQNGHHLVNVYTDEGITGRQLKKRDAFNKMLSDSKLGLFDLLVVKDVSRFARNTVDLLTSIRQLKSRGIDVIFVNNSQKVLGESEFVITLLGAVAQEESSNLSKRVKFGKNITSKKGRVPPRIFGYDRIDNFTMEINEREAEVVREIYHLYIDEGLGCRLIAITLGEKQMKTKYGNDWNQRNIRRILENPIYSGHYINHRYTVVDFLEGTTKALPKEQHYHHDRPEWAIITPERFQQAQEILEQRRKQYATEYTHFTGRYSNRHLFSTLIRCKECGRAFSRRVTHYPNSDYIYWRCPTNNQYTAKRCSNNTIVREDDLIETLSTYLREVVSNKESIAQEIARKFKEANAVEGSKPDAQTLEAKKVKLKAKLEKYMEMYANDIITMEALKSKTAEINESINVIDDQLILLEGQHTQERTIESITNEAMTEIERFLSLQSATNMDLRRIIDSIIVDDKKQVKINLKITGNL

SEQ ID NO: 5822 - protein, 500 aa, Unknown
  Description of Unknown: Integrase B5823 sequence
  PTHR30461:SF3,SM00857,G3DSA:1.10.10.2600,IPR036162,PF13408, PS51737,G3DSA:3.40.50.1390,IPR025827,IPR006119,IPR038109, PF07508,IPR011109,SSF53041,PTHR30461,Coil, PS51736,cd00338,PF00239
MKAAAYARYSTDKQTENSIAYQMNAITKYCLDHDIDLISAFSDEAESGTNTDREGFQNLVRAAQNKEFEAVVIYDISRGSRDVADWFQFRKTMRALGVQVISTNQQLGDITNPNDFLIELINVGLGQHMVLDTRKKSMAGMLERAKKGLYCGGNCPLGYKIENGRYVIEEKEAKVVRQIFNRYAQGESYNQIIDGLNGAVGKFGRPIGKNSLHSILANERYTGVYIWNERNVRIMRKWAGGKKNPNPVIIEGIIPQIIDKTTWERVKKRMETRKNGTNKAKREYLLTGLIECAECGATYVGHCNVAHRKDGSVRENRYYECGNKYRTRTCHSKNLNADELELFVVTQIQDTLRNWDPSEVARKYIKEIQGATADCTEEKRELVDVERQINNGVKAVLSGMRVPELDKEIDRLRQRKLDLENIIAEKSQQTNHSYSADEIEAALSGLIKNFDPKEAVKQLVQKIYANADGSCTVHIGVHKIGAGDPSYSICTFFFPAKSKT

SEQ ID NO: 5823 - protein, 500 aa, Unknown
  Description of Unknown: Integrase B5824 sequence
  PTHR30461:SF3,SM00857,G3DSA:1.10.10.2600,IPR036162,PF13408, PS51737,G3DSA:3.40.50.1390,IPR025827,IPR006119,IPR038109, PF07508,IPR011109,SSF53041,PTHR30461,Coil, PS51736,cd00338,PF00239
MRMCGYARVSTDEERQLDSLEHQMEFFSDFAKQNGHHLVNVYTDEGITGRQLKKRDAFNKMLSDSKLGLFDLLVVKDVSRFARNTVDLLTSIRQLKSRGIDVIFVNNSQKVLGESEFVITLLGAVAQEESSNLSKRVKFGKNITSKKGRVPPRIFGYDRIDNFTMEINEREAEVVREIYHLYIDEGLGCRLIAITLGEKQMKTKFGNDWNQRNIRRILENPIYSGHYINHRYTVVDFLEGTTKALPKEQHYHHDRPEWAIITPERFQQAQEILEQRRKQYATEYTHFTGRYSNRHLFSTLIRCKECGRAFSRRVTHYPNSDYIYWRCPTNNQYTAKRCSNNTIVREDDLIETLSTYLREVVSNKESIAQEIARKFKEANAVEGSKPDAQALEAKKVKLKAKLEKYMEMYANDIITMEALKSKTAEINESINVIDDQLILLEGQRTQERTIESITNEAMAEIERFLSLQSATNMDLRRIIDSIIVDDKKKVKINLKITGNL

SEQ ID NO: 5824 - protein, 500 aa, Unknown
  Description of Unknown: Integrase B5825 sequence
  SM00857,G3DSA:1.10.10.2600,IPR036162,PF13408,PS51737, IPR025827,G3DSA:3.40.50.1390,IPR006119,IPR038109,PF07508, IPR011109,SSF53041,PTHR30461,PS51736,cd00338, PF00239
MVVRARETNEEIEAIGYIRQSDQRQDKEDISELTQLRKIEQFCESNNFKLVKVFKDIDYSGFRIKYTKRPGLMDALKCIEDRPKVRKMIFFNLSRLTRLKKDFQELQGILNSHQVDICSASEFVDFSTPNGRLVAGFFVDLNEYYSDNLSEIVNDSKETNAKKGRWNGGPAPFGFVKTADGMGFEEVPERAYYVREIFRMAKLGKGPYLIARWLNEQKVYSLTGKEWTARRVRYMLTNPTYAAMQRWKGECYKLLVCPVLVSWDDFNYIQSTLFGKDKAWKGKERQLLTSVLICPECGSKMHSRYMSHSKQKRKYVCSRKTSMGAISCSSPNHDQESFEAAVINLIANMAEKKYGYESLIPEMKEDSDNNNSFSKLQDELANINNAEQKIFDDYYLHNKIEEHHYELSMRRYGKRKAEILELLDKIPLPQSKSFGDYNDAIQEFSELINELPNDDKRRSIELLVEKITPGAPAVVHFKWGETREIHPRNIEKFKKKLILY

SEQ ID NO: 5825 - protein, 500 aa, Unknown
  Description of Unknown: Integrase B5826 sequence
  SM00857,G3DSA:1.10.10.2600,IPR036162,PS51737,G3DSA:3.40.50.1390, IPR006119,IPR038109,PF07508,IPR011109,SSF53041, PTHR30461,Coil,PS51736,cd00338,PF00239
MKDRSALYLRKSQADQPDESIAEVLAKHRAMLMELADKMDVTISQDDIYEEVVSGESLYARPEMLRMLEQVEAGVYDGVFCMDIDRLGRGSMSEQGIILETFRMAETKIICPGKTYDLTNDADEELTEMKALFARFELKMIRKRMQRGLMQTIQAGGYVANQPYGYRKCTVGKLPSLEINEDQAKFIRHAYKRYIEGVGAHIIADELNAMGSVPNRSAKWSRNTVRDILRNPTYAGKVAWNRVKRYKPTKSHPRPRAEYQKMEDWIMVDGLHPAIIPWEDWERVQEIRKGRHIPSVNHGQVANPMAGLIRCGNCGRNMQRVGVSTKGGPRLHCMEKACIASAKFGLVEQRLLENLERMRDELEIEAQKSSGPDISSLLVEKRTIETKLRKTASRVDVLHDLLEDGTYDRETFKTRLSKAQAETEALNAQQADVERRIEEAKRRDTTLVLAQLTSVLQLYPTLDNEGKNRLLKSVIDYVIYRKPQKTRPMAFTLEIKLKNI

SEQ ID NO: 5826 - protein, 500 aa, Unknown
  Description of Unknown: Integrase B5827 sequence
  PTHR30461:SF3,SM00857,G3DSA:1.10.10.2600,IPR036162,PF13408, IPR025827,G3DSA:3.40.50.1390,PS51737,IPR006119,IPR038109, PF07508,IPR011109,SSF53041,PTHR30461, Coil,PS51736,cd00338,PF00239
MSNTETLKSGALYIRVSTHGKQEELSPAAQKRLLLKYAKEHNIVVSKEYIYEEKGISGRKADRRPEFMRMISAAKSNPSPFDVILVWKFSRFARNQEESIVYKSLLRRKCNVDVISVSEPLVDGPFGSLIERIIEWMDEYYSIRLSGEVFRGMSEKAMKGGYQARPPLGYKIITKGEPPVIVPEEAKIVEYIFDKYVNARSGIFDIARSLNTMGAKTSHGKAFERRSVEYILQNPTYCGKIRWNRTTNATNEIKPKEDWILADGTHPAIISEELFHAAQERFQSEYRPTGARPSSTYRHWLSGIVKCPECGRTMIAKSTTGKSNNKQYCYFTCYGYSKGKCLAKSSISSRKLEPVVLEGIKAATLNDNLSFSIKAPVPVEDKSELKILKGLLAKLENKEKRIKEAYMNEIDTLEEYKENKLLLAKERSDLEEKIKNSSTEPTNNTEDMKKDMQERIRNVYDIITSDNFTDQQKSDAIRSIVEKIVYKKEEEMVEIYYYYV

SEQ ID NO: 5827 - protein, 500 aa, Unknown
  Description of Unknown: Integrase B5828 sequence
  PTHR30461:SF3,SM00857,G3DSA:1.10.10.2600,IPR036162,PF13408, IPR025827,PS51737,G3DSA:3.40.50.1390,IPR006119,IPR038109, PF07508,IPR011109,SSF53041,PF00239,PTHR30461, PS51736,Coil,cd00338
MELSKGVIYARYSSDKQRDESIEGQIRECKAYAEREGIIITHIYTDRALSARTDHRPEFRQMIDDAKKHNFEYVIVYQLDRFSRSREDSAVYKSILKRNGVKVISAKENISSDPAGIILESVLEGMAEYYSAELAQKVRRGMTDNALKGKMNGTPTPLGYDKTKENSLIINKREAKIVERIFDMYLKGHSIPSICSFLNSKGYLSKKGGKFSYSVVRRILSNEKYIGIMKWNDITVEDAIPSIISKEIFDKVQTANSRRIKLKASRSEFYNLCGKLYCGKCNAHYVGSTATSRSGEKHYYYVCNNRRKHHTCDAPNIKREIIEDIVVNKTLEILNQPNTIEELAKMAIKANKDMMSTSELELQAVNDRIKQLQSELDNYMKAIAKGFISDTLQTQIEKTEAELQDQMTRRANHEIANNQIHLTAEHIEFFLTKMAKENPTTKQGRASIIDTFIKQATIFDDRVEIVFNYSNDLPQFKEQAIECSHSCDMVDHQGFEPWTP

SEQ ID NO: 5828 - protein, 500 aa, Unknown
  Description of Unknown: Integrase B5829 sequence
  PTHR30461:SF3,SM00857,G3DSA:1.10.10.2600,IPR036162,PF13408, PS51737,G3DSA:3.40.50.1390,IPR025827,IPR006119,IPR038109, PF07508,IPR011109,SSF53041,PTHR30461,Coil, PS51736,cd00338,PF00239
MRMCGYARVSTDEERQLDSLEHQMEFFSDFAKQNGHHLVNVYTDEGITGRQLKKRDAFNKMLSDSKLGLFDLLVVKDVSRFARNTVDLLTSIRQLKSRGIDVIFVNNSQKVLGESEFIITLLGAVAQEESSNLSKRVKFGKNITSKKGRVPPRIFGYDRIDNFTMEINEREAEVVREIYHLYIDEGLGCRLIAITLAEKQMKTKFGNDWNQRNIRRILENPIYSGHYINHRYTVVDFLEGTTKALPKEQYYHHDRPEWAIITPERFQQAQEILEQRRKQYATEYTHFTGRYSNRHLFSTLIRCKECGRAFSRRVTHYPNSDYIYWRCPTNNQYTAKRCSNNTIVREDDLIETLSTYLREVVSNKESIAQEIARKFKEANAVEGSKPDVQTLEAKKVKLKAKLEKYMEMYANDVITMEALKSKTAEINESINVIDDQLILLEGQRTQERTIESITNEAMTEIERFLSLQSATNMDLRRIIDSIIVDDKKQVKINLKITGNL

SEQ ID NO: 5829 - protein, 500 aa, Unknown
  Description of Unknown: Integrase B5830 sequence
  PTHR30461:SF3,SM00857,G3DSA:1.10.10.2600,IPR036162,PF13408, IPR025827,G3DSA:3.40.50.1390,PS51737,IPR006119,IPR038109, PF07508,IPR011109,SSF53041,PF00239,PTHR30461, PS51736,Coil,cd00338
MNTVIYARYSAGPRQTDQSIEGQLRVCTDFCKQRGLTVIDTYCDRHISGRTDERPEFQRLIADAKRKKFEAVVVYKTDRFARNKYDSAVYKRELKRNGIQIFYAAEAIPDGPEGIILESLMEGLAEYYSAELAQKIKRGMHESALKCQSTGSGRPLGYRVDEQKHFQIDPEAAQTVQTIFEQYIKGESNAAICELLNSRGLRTAQGKPFNKNSINRIIKNRKYIGEYRYHDIVVEGGMPAIISKDTFNLAQAEMERRRTRKAPKSPKAEYLLAGRLFCGHCKGPMQGVSGTGKSGNKWYYYYCGNTRGKNKTCDKKQVSRDRLERAVVDFTVRYILQEDVLEELARKVHAAQERQNDTTSEIVFYEKKLADNKKSIANVLRAIESGAATQTLPARLQELENEQAVILGELSFLKGKRLAFTEDQILFALMKHLEPYPGEPEQDYRRRIISDFVSEVYLYDDRLLIYFNISSEDGKLKSADLSNIEGGEFDEGLVGSTKLC

SEQ ID NO: 5830 - protein, 500 aa, Unknown
  Description of Unknown: Integrase B5831 sequence
  PTHR30461:SF3,IPR036162,PS51737,IPR011109,PTHR30461, PF00239,G3DSA:1.10.10.2600,IPR006119,SSF53041,cd00338, SM00857,IPR025827,IPR038109,PS51736,mobidb-lite, PF13408,G3DSA:3.40.50.1390,PF07508,Coil
MDKKLKVAAYGRVSTNSKQQSHSFDNQSDYWNKKLAEDPRYEYVGLYADKGISGKYMKYRPQMLAMLDACRCGKIDMIFTKSVQRFARNTIELLEVVRELRDMNIAVYFEKENINTLTAESELYLTIAAAVAEEDLNRYGQNVAWTIQDRFEKGDISVVGIRMLGYETRNKKLHIIPSEAAVVQQMFELYSTGNYSTRQMAELLNSRGYKTAKGNEWTSQTILGILTNEKYKGDALLYKRINVNGQQLMNHGLRDMLYVENSHDAIISKELWDKVRDVLDKKGNKKLRGKTIDNYPFTSLITCPICGKSYIHKVNNAGTKYACPIWRCKMQLTYGKSACSNTGIKDSVLKEKFIDVYNEFIESKRFGETNSEAEQQLKKLINDENELIALHVRGLISKINLDNDRAELRKQRIILERQINEYRQSHIKNLELKPITEFNEELVGRVLKQVTIQDWIITFEFYNGVKISRQYTNGPNGNQKGWKEKKRLKEAQEQNGNDNQ

SEQ ID NO: 5831 - protein, 500 aa, Unknown
  Description of Unknown: Integrase B5832 sequence
  cd00338,SM00857,G3DSA:1.10.10.2600,IPR036162,PF13408, IPR025827,G3DSA:3.40.50.1390,PS51737,IPR006119,IPR038109, PF07508,IPR011109,SSF53041,PTHR30461,PS51736, Coil,PF00239
MYLRKSRADDPHESIEDTLRKHEKILFDLANKLNIKKDEIVQFKEVVSGENLKNRPQAQKMLKLVMENAFEGVLVVDSQRLARGDTLDQGTIIRAFSLNNTKIITPGKTINPGDEIDQDYFEFDLFMGRREYKMINKRMQRGRNISVQEGNYVGSIAPYGYKKTKIGKCHTLKINEDEIDCFNKMKELALNGLGCTSIANELNRLGFKPRKSKLWTTNAVRDILLNKTNLGLIKWNTRKSVKLYKNDEIIKSRPRNEEAEYYPGKHHAIITQVEYDAIVENIKNRARPVKKDKKLQNPLAGVVYCGKCGKAMIRRSYNNGYRDGLICTNTHCNNVSSVLEVVEKRVLESLEDTLKEYRQFIDNYHNDKTKTNNDSLIIKTEKEINKIDSQINKACEMLEVGAYSVELFKERKTLLDNQKKALIDKIEALKKEDTDFKLQNYINAVPILENAIKLYWNSSVEEKNKLLKQIVKRCDYLKSERGKRNGKGMYNFKLNIYLKI

SEQ ID NO: 5832 - protein, 500 aa, Unknown
  Description of Unknown: Integrase B5833 sequence
  PTHR30461:SF3,SM00857,G3DSA:1.10.10.2600,IPR036162,PF13408, PS51737,IPR025827,G3DSA:3.40.50.1390,IPR006119,IPR038109, PF07508,IPR011109,SSF53041,PTHR30461,PS51736, cd00338,PF00239
MQRAVIYARFSSDMQREESIDAQVRACKAYAKNKGYIVVDTYADEAKSGRDVTKRDAYNQMLADAMEDKFDVIIFHKIDRNSRNELNYFTFKDKLEKLGIRYEYAAQPIDALSPEGQMMETMMVGMAAYYSRNLAKETKKGLNENAYKALFNGGCPPLGYKIVDKKYVIDEQEAAAVRLIFELYLNGYGYAAICRELSAKGYTTKAGKAFAKNSLHDILCNEKYIGTYTFNKIPRKKGGRNSHAAERPEDFISIENAFPAIISKDDWALVRAKMDRNRHRAASYTAKEKYLLSGKVFCGHCGSAMVGHRIRKRYCYYGCTRKEQTPTSKCPQKMIRAEVLEHWVLQILERVVFTVGGMRRIADAIVDAYEAEQKEQAGSQATLLQRKAVAEKKLNNLYKIFEEGNADEFDRQRLNQIKAELREINKSICETSVKPAKLLSKQKIAAILAAMKDEIFVKKNSYYVQQAVDLLVDHVTITDKVLKITLSTQNVCAYLVPRRR

SEQ ID NO: 5833 - protein, 500 aa, Unknown
  Description of Unknown: Integrase B5834 sequence
  cd00338,SM00857,G3DSA:1.10.10.2600,PS51736,PF13408, IPR025827,PS51737,G3DSA:3.40.50.1390,IPR036162,IPR006119, IPR038109,PF07508,IPR011109,SSF53041,PTHR30461, mobidb-lite,Coil,PF00239
MNVVLYMRYSSDRQTEQSIEGQKRVCMDFCERQGYNVVGEYIDRATSAYKETAKRTNFCRMIRDSSNGLWQGVVVYKLDRFARNRYDSATYKVRLKKNGVKVISATENISDSPEGVILESVLEGMAEFYSKELSQKVSRGLNESAHKCNSTGGAIPLGYKTVNKKLTVDEPNAQIVKEAFDLYAGGATISEICEKFNSQGYRTKKGTEFNKNSFKTMFRNEKYIGTYTYKDIRIEGGIPAIIDKETFETVQKRLSANAQAPARGKARVNYLLSQKLFCGHCGANMIGDSGRSKTGETYYYYSCSTRKRFHSCKKRTIRKDLIERIVAENAMRLITPEMINTIADMAIKCNREDIESDAIIPALTADLKEINTGIKNLLKMVERGVESETLDSRLKELEKRKKDTESRLDAAKSEYLTLDKTVIVGWLSQFLSGDIEDEDFRRHLIDTLINSVTVWDEPDGGYKITTVYNLRKGNTQTYRVNADGSSDLERNSPPKKRQFS

SEQ ID NO: 5834 - protein, 500 aa, Unknown
  Description of Unknown: Integrase B5835 sequence
  PTHR30461:SF3,SM00857,G3DSA:1.10.10.2600,IPR036162,PF13408, IPR025827,G3DSA:3.40.50.1390,PS51737,IPR006119,IPR038109, PF07508,SSF53041,IPR011109,PF00239,PTHR30461, PS51736,Coil,cd00338
MNEKINAVIYARFSSHNQQEQSIEGQLRYCSDYANKNGMTVINSYIDRAISGTSDNRPSFQQMIKDSNNRKFDIVLVWKLDRFARNKYDSVVYKNKLKKNGVKVISVTEYLGEGTESVLLESLLEAMAETYSRQLSENVQRGMRESAMKGLSTGGNIPLGYKIIDKKYVIDEAEAEIIRYIFNNYADGKPKKQIIDEINAKGWRTKKGCKFKYNSFNTILKNRKYIGEYIYQDLAVKDVIPAIVDVDIFNQVQSQMTQNKRTAGTQSAKREYLLSTKLFCGQCGGAMTGETSTGRHGGKYGYYMCRNKKFHKNNCEKKRERQEELEEFVVQKTVAMYSDKQFMQLIAKKVVKLYNDEFGSNHIATLEENKHKLETRFDELSNALVKTTNARMLDKFNKEIEQIDIELQELEIEIARENSIAHAQMTVDDVIDFINEVMKGNIKDKEFQKQIIDTFVNAIYVFDDKLVIYYNGSSEAEKVNYSDMLKDMRKDATSNTFAPP

SEQ ID NO: 5835 - protein, 500 aa, Unknown
  Description of Unknown: Integrase B5836 sequence
  PTHR30461:SF3,SM00857,G3DSA:1.10.10.2600,IPR036162,PF13408, PS51737,G3DSA:3.40.50.1390,IPR025827,IPR006119,IPR038109, PF07508,IPR011109,SSF53041,PTHR30461,Coil, PS51736,cd00338,PF00239
MSNKETLKSGALYIRVSTHGKQEELSPDAQKRLLLKYAKDHNIVVSKSYIYEEKGISGRKADRRPEFMRMISTAKSNPSPFDVILVWKFSRFARNQEESIVYKSLLRRKCNVDVISVSEPLIEGPFGSLIERIIEWMDEYYSIRLSGEVFRGMSEKAMKGGYQARPPLGYKILVKGEPPVIVPEEAKIVEYIFDKYVNARSGIFDIARSLNTMGVKTSHGKAFERRSVEYILQNPTYCGKIRWNRTTNATNEIKPKEVWILADGTHPAIISEELFHAAQERFQSEYRPTGARPSSTYRHWLSGIVKCPECGRTMIAKSTTGKSNNKQYCYFTCYGYSKGKCLAKSSISSRKLEPVVLEGIKAATLNDNLSFSIKAPVPVEDKSELKILKGLLAKLENKEKRIKEAYMNEIDTLEEYKENKLLLAKERSDLEEKIKNSSTEPTNNTEDMKKDMQERIRNVYDIITSDNFTDQQKSDAIRSIVEKIVYKKEEEMVEIYYYYV

SEQ ID NO: 5836 - protein, 500 aa, Unknown
  Description of Unknown: Integrase B5837 sequence
  PTHR30461:SF3,SM00857,G3DSA:1.10.10.2600,IPR036162,PF13408, PS51737,G3DSA:3.40.50.1390,IPR025827,IPR006119,IPR038109, PF07508,IPR011109,SSF53041,PF00239,PTHR30461, PS51736,Coil,cd00338
MNEKINAVIYARFSSHNQQEQSIEGQLRYCSDYANKNGMTVINSYIDRAISGTSDNRPSFQQMIKDSNNRKFDIVLVWKLDRFARNKYDSVVYKNKLKKNGVKVISVTEYLGEGTESVLLESLLEAMAETYSRQLSENVQRGMRESAMKGLSTGGNIPLGYKIIDKKYVIDEAEAEIIKYIFNNYANGKPKKQIIDEINAKGWRTKKGCKFKYNSFNTILKNRKYIGEYNYQDLVVKDVIPAIVDVDIFNQVQSQMTQNKRTAGTQSAKREYLLSTKLFCGQCGGAMTGETSTGRHGGKYGYYMCRNKKFHKNNCEKKREKQEELEEFVVQKTVAMYSDKQFMHLIAKKVVKLYNDEFGSNHVTTLEENKHKLETRFDELSDALVKTANARMLDKFNKEIEQIDIELQELEIEIARENSIAHAQMTVDDVIDFINEVMQGNIKDKEFQKQIIDTFINAIYVFDDKLVIYYNGSSEAEKVNYSDMLKDMKKGATSNTFAPP

SEQ ID NO: 5837 - protein, 500 aa, Unknown
  Description of Unknown: Integrase B5838 sequence
  cd00338,SM00857,G3DSA:1.10.10.2600,IPR036162,PF13408, IPR025827,PS51737,G3DSA:3.40.50.1390,IPR006119,IPR038109, PF07508,IPR011109,SSF53041,PTHR30461,PS51736, Coil,PF00239
MYLRKSRADDPHESIEETLRKHEKILFDLANKLNIKKDEIVQFKEIVSGENLKNRPQAQKMLKLVMENAFDGVLVVDSQRLARGDTLDQGTIIRAFSLNNTKIITPGKTINPGDEIDQDYFEFDLFMGRREYKMINKRMQRGRSISVQEGNYVGSIAPYGYKKTKIGKCHTLEINEDEIDCFNKMKELALNGFGCTSVANELNGLGFKPRKSKLWTTNAVRDILLNKTNLGLVKWNTRKSVKIYKNDEIIKSRPRNEEAEYYQGKHPAIITQEEYDTIVENIKNRARPVKKDKKLQNPLAGIVYCGKCGKAMIRRSYNNGYRDGLICTNTHCNNVSSVLEVVEKRLLESLEDTLKEYRQFIDNYHNDETKTNNDSLIIKTEKEIDKIDSQINKACEMLEIGTYSVELFKERKTLLDNQKKALIDKIEALKKEGADFKLQNYINAVPILENAIKLYWNSSVEERNKLLKQIVKRCDYLKSERGKRNGKGMYNFKLNIYLKI

SEQ ID NO: 5838 - protein, 500 aa, Unknown
  Description of Unknown: Integrase B5839 sequence
  PTHR30461:SF3,SM00857,G3DSA:1.10.10.2600,IPR036162,PF13408, IPR025827,G3DSA:3.40.50.1390,PS51737,IPR006119,IPR038109, PF07508,SSF53041,IPR011109,PTHR30461,Coil, cd00338,PF00239
MNTVIYTRYSAGPRQTDQSIEGQLRVCTDFCKQRGLTVIDTYCDRHISGRTDERPEFQRLIADAKRKKFEAVVVYKTDRFARNKYDSAVYKRELKRNGIQIFYAAEAIPDGPEGIILESLMEGLAEYYSAELAQKIKRGMHESALKCQSTGSGRPLGYRVDEQKHFQIDPESAQTVQTIFEQYIKGESNAAICELLNSRGLRTAQGKPFNKNSINRIIKNRKYIGEYRYHDIVVEGGMPAIISKDTFNLAQAEMERRRTRKAPKSPKAEYLLAGRLFCGHCKGPMQGVSGTGKSGNKWYYYYCGNTRGKNKTCDKKQVSRDRLECAVVDFTVRYILQEEVLEELARKVHAAQERQNDTASEIAFYEKKLADNKKSIANVLRAIESGAATQTLPARLQELENEQAVILGELSFLKGKRLAFTEDQILFALMKHLEPYPGETEQDYRRRIISDFVSEVYLYDDRLLIYFNISSEDGKLKSADLSNIEGGEFDEGLVSSTITI

SEQ ID NO: 5839 - protein, 500 aa, Unknown
  Description of Unknown: Integrase B5840 sequence
  PTHR30461:SF3,SM00857,G3DSA:1.10.10.2600,IPR036162,PF13408, PS51737,IPR025827,G3DSA:3.40.50.1390,IPR006119,IPR038109, PF07508,IPR011109,SSF53041,PTHR30461,Coil, PS51736,cd00338,PF00239
MKAAAYARYSTDKQTENSIAYQMNAITKYCLDHDIDLISAFSDEAESGTNTDREGFQNLVRAAQNKEFEAVVIYDISRGSRDVADWFQFRKTMRALGVQVISTNQQLGDITNPNDFLIELINVGLGQHMVLDTRKKSMAGMLERAKKGLYCGGNCPLGYKIENGRYVIEEKEAKVVRQIFNRYAQGESYNQIIDGLNGAVGKFGRPIGKNSLHSILANERYTGVYIWNERNVRIMRKWAGGKKNPNPVIIEGIIPQIIDKTTWERVKKRMETRKNGTNKAKREYLLTGLIECAECGATYVGHCNVAHRKDGSVRENRYYECGNKYRTRTCHSKNLNADELELFVVTQIQDTLRNWDPSEVARKYIKEIQGATADCTEEKRELVDVEHQINNGVKAVLSGMRIPELDKEIDRLRQRKLDLENIIAEKSQQTNHSYSADEIEAALSDLIKNFDPKEAVKQLVQKIYANADGSCTVHIGVHKIGAGDPSYSICTFFFPAKSKT

SEQ ID NO: 5840 - protein, 500 aa, Unknown
  Description of Unknown: Integrase B5841 sequence
  PTHR30461:SF3,SM00857,G3DSA:1.10.10.2600,IPR036162,PF13408, IPR025827,G3DSA:3.40.50.1390,PS51737,IPR006119,IPR038109, PF07508,IPR011109,SSF53041,PF00239,PTHR30461, PS51736,Coil,cd00338
MELSKGVIYARYSSDKQRDESIEGQIRECKAYAEREGIIITHIYTDKALSARTDHRPEFRQMIDDAKKHNFEYVIVYQLDRFSRSREDSAVYKSILKRNGVKVISAKENISSDPAGIILESVLEGMAEYYSAELAQKVRRGMTDNALKGKMNGTPTPLGYDKTKDNSLIINKREAKIVERIFDMYLKGHSIPSICSFLNSKGYLSKKGGKFSYAVIRRILSNEKYIGTMKWNDIIVEDAIPAIISKEIFDKVQAANSRRIKLKASRSEFYNLCGKLYCGKCNAHYVGSTATSRSGEKHYYYVCNNRRKHHTCDAPNLKREIIEDIVINKTLEILNQPNTIEQLAELAVKANKDMMSTSELELQAVNDRIKQLQSELDNYMKAIAKGFISDTLQTQIEKTEAELQDQMTRRTNHEIASNQIHLTAEHIEFFLHKMAKENPTTKRGRASIIDTFIKQATIYDDRVEIIFNYSNDLPQFKEQAIECSHSCDMVDHQGFEPWTP

SEQ ID NO: 5841 - protein, 500 aa, Unknown
  Description of Unknown: Integrase B5842 sequence
  PTHR30461:SF3,SM00857,G3DSA:1.10.10.2600,IPR036162,PF13408, IPR025827,PS51737,G3DSA:3.40.50.1390,IPR006119,IPR038109, PF07508,IPR011109,SSF53041,PF00239,PTHR30461, PS51736,Coil,cd00338
MNEKINAVIYARFSSHNQQEQSIEGQLRYCSDYANKNGMTVINSYIDRAISGTSDNRPSFQQMIKDSNNKKFDVVLVWKLDRFARNKYDSVVYKNKLKKNGVKVISVTEYLGEGTESVLLESLLEAMAETYSRQLSENVQRGMRESAMKGLSTGGNIPLGYKIVDKKYVVDEAEAEIIKYIFNNYADGKPKKQIIDEINSKGWRTKKGCKFKYNSFNTILKNRKYIGEYNYQDLVVKDVIPAIVDVDVFNQAQSQMTQNKRTAGTQSAKREYLLSTKLFCGQCGGAMTGETSTGRHGGKYGYYMCRNKKFHKNNCEKKRERQEELEEFVVQKTVAMYSDKQFMQLIAKKVVKLYNDEFGSNHIATLEENKHKLETRFDELSNALVKTTNARMLDKFNKEIEQIDIELQELEIEIARENSIAHAQMTVDDVIDFINEVMKGNIKDKKFQKQIINTFINAIYVFDDKLVIYYNGSSEAEKVSYSDMLKDMKKGATSATFAPP

SEQ ID NO: 5842 - protein, 500 aa, Unknown
  Description of Unknown: Integrase B5843 sequence
  PTHR30461:SF3,IPR036162,PS51737,IPR011109,PTHR30461, PS00397,PF00239,G3DSA:1.10.10.2600,IPR006119,SSF53041, cd00338,SM00857,IPR025827,IPR038109,PS51736, IPR006118,PF13408,G3DSA:3.40.50.1390,PF07508,Coil
MPKNSNYGNLSHSDSTKRAAAYIRVSTDDQLELSPDSQLKEIRAFADRNGYTIDDEYIFHDDGISGTSAKRRPAFMDMIATAKKKPKPFDAIIVWKFSRFARSREDSIVFKSMLKKLGISVISVSEPITDDKMSIIVEGLIESMDEYYSANLSEEVKRGMLEKFSRKQAMSAAPYGYRLEDKKYVPEPAEAEIIKEVFTRFVGGETVWGISKDLKSRGVKTKRGNITEPRTIHYYLDNPVYIGSIRYTLDGGGSRQRYLDGNYMLQEDCHEPIISKELWNEAQKLIKKNREIYGKSTKPVSYHEYALKGIVKCASCEHNLTYCSSKDAPRVQCPMYQHNKCDTSSSVRLDLLNEALLLHLQEALKDKNLNIDISADTSAKSSREIQLEAEIKRETARLARMKEAYLNGVDTIEEYKENKSAQTKIISRLEKELKKLKSPPSDKDKQEKIKQVKTKIKTAIDALQSTAISETEKNALLKTFILKALYDSKTKTLTVYYYAQ

SEQ ID NO: 5843 - protein, 500 aa, Unknown
  Description of Unknown: Integrase B5844 sequence
  cd00338,SM00857,G3DSA:1.10.10.2600,IPR036162,PF13408, IPR025827,G3DSA:3.40.50.1390,PS51737,IPR006119,IPR038109, PF07508,IPR011109,SSF53041,PTHR30461,PS51736, Coil,PF00239
MYLRKSRADDPHESIEDTLRKHEKILFDLANKLNIKKDEIVQFKEVVSGENLKNRPQAQKMLKLVMENAFEGVLVVDSQRLARGDTLDQGTIIRAFSLNNTKIITPGKTINPGDEIDQDYFEFDLFMGRREYKMINKRMQRGRNISVQEGNYVGSIAPYGYKKTKIGKCHTLKINEDEIDCFNKMKELALNGFGCTSVANELNRLGFKPRKSKLWTTNAVRDILLNKTNLGLIKWNTRKSVKLYKNDEIIKSRPRNEEAEYYPGKHPAIITQVEYDAIVENIKNRARPVKKDKKLQNPLAGVVYCGKCGKAMIRRSYNNGYRDGLICTNTHCNNVSSVLEVVEKRVLESLEDTLKEYRQFIDNYHNDKTKTNNDSLIIKTEKEINKIDSQINKACEMLEVGTYSVELFKERKTLLDNQKKALIDKIEALKKEDTDFKLQNYINAVPILENAIKLYWNSSVEEKNKLLKQIVKRCDYLKSERGKRNGKGVYNFKLNIYLKI

SEQ ID NO: 5844 - protein, 500 aa, Unknown
  Description of Unknown: Integrase B5845 sequence
  PTHR30461:SF3,cd00338,SM00857,G3DSA:1.10.10.2600,IPR036162, PF13408,PS51737,IPR025827,G3DSA:3.40.50.1390,IPR006119, IPR038109,PF07508,SSF53041,IPR011109,PTHR30461, PS51736,Coil,PF00239
MRAFIYGRFSSHKQQELSIEAQIDICREYAEKHNITVVGEYVDRARSARTENRADFRRLIRDACTGVVDCVLVWRYDRFFRDRAESALYRKQLEAAGVHLISVTEFIPDGSAGVITQGMIETVAEYFSAKLSEDVTRGMNKAAQHCQITGGAPLGYRPGPNKRWQIDPVGAELVKRCFEWYDSGKSMGELADHFNKEGHKTAKGNSFNKSSFTTILRNKKYIGIYEYDGTVSIAGGVPRIIEDDLFFRVQRKIDANRHRPGAYKAEVPYLLSGKLFCGKCGSPMTGTAGTGKSGVRHYYYICNNRRAKKCDKKNVRLDLIEEAVLQSALDVLTDDNISYISAEVERRCSENSGNKALVASLRVQLTEVEKQLKNIGNAIAQGIITETTKQMLMDAEADRAALRQQIDRATVQASLEVKAEAVACWLDGFRHGDRKSPEFRKDVFGALVHSVFVYDDYMKIIFNVDSAGAALVPFSAVQNAATSDFVGALPGSYLGGSGVP

SEQ ID NO: 5845 - protein, 500 aa, Unknown
  Description of Unknown: Integrase B5846 sequence
  PTHR30461:SF3,SM00857,G3DSA:1.10.10.2600,IPR036162,PF13408, PS51737,G3DSA:3.40.50.1390,IPR025827,IPR006119,IPR038109, PF07508,IPR011109,SSF53041,PF00239,PTHR30461, Coil,cd00338
MYEEIKTACLYLRYSSSNQTEQSIEGQMHVCQDFCKRHNIRIVEMYIDRATSASKDIEKRVEFLKMIKDSEKGNFNAVIVYKLDRFARSRYDSATYKYRLKRNGVQLISATENITQDPEGIILESVLEGMAEFYSAELSQKINRGMRESAMKHNSIGGAIPLGYKTVDKKLVIDETTAPIVREAFQMYADGESVAEICRTFNNRGYKTSKGTRFGKSSFTKIFRNEKYIGVYKYHDYRAEDVIPPIIDKDLWDRVQVRVGKIKKAPARNKARHTYLLTGKLFCGHCGSAMNADGNSQGYLYYRCYGKKNLDKQCNKRNMEKNLIERLVAQDAMSFLTDEYIEKIATIACDRNKQEIESDSPIPVIRDRIRQVDVSLNNLMKAIETGSAPDMLVKRMGELETEKKDMEVQLKKEMAHQVYIDKEQVIFWLEKFREGDINDEEFCQTVIDLFVNSVTVWDEPDDKFKITIAYNLTSIPQKTYRLSKDGRLSDYASNTPDWKS

SEQ ID NO: 5846 - protein, 500 aa, Unknown
  Description of Unknown: Integrase B5847 sequence
  PTHR30461:SF3,SM00857,G3DSA:1.10.10.2600,IPR036162,PF13408, PS51737,IPR025827,G3DSA:3.40.50.1390,IPR006119,IPR038109, PF07508,SSF53041,IPR011109,PF00239,PTHR30461, PS51736,Coil,cd00338
MNEKINAVIYARFSSHNQQEQSIEGQLRYCSDYANKNGMTVINSYIDRAISGTSDNRPSFQQMIKDSNNKKFDVVLVWKLDRFARNKYDSVVYKNRLKKNGVKVISVTEYLGEGTESVLLESLLEAMAETYSRQLSENVQRGMRESAMKGLSTGGNIPLGYKIIDKKYVIDEAEAEIIRYIFNNYADGKPKKQIIDEINSKGWRTKKGCKFKYNSFNTILKNRKYIGEYNYQELIVEDVIPAIVDVDIFNQVQSQMAQNKRTAGTQSAKREYLLSTKLFCGQCGGAMTGETSTGRHGGKYGYYMCRNKKFHKNNCEKKRERQEELEEFVVQKTVAMYSDKQFMQLIAKKVVKLYNDEFGSNHIATLEENKHKLETRFDELSDALVKTTNARMLDKFNSEIEQIDIELQELEIEIARENSIAHAQMTVDDVIDFINEVMKGNIKDKEFQKQIIDTFINAIYVFDDKLVIYYNGSSEAEKVSYSDMLKDMRKGATSSTLAPP

SEQ ID NO: 5847 - protein, 500 aa, Unknown
  Description of Unknown: Integrase B5848 sequence
  PTHR30461:SF3,SM00857,G3DSA:1.10.10.2600,IPR036162,PF13408, IPR025827,G3DSA:3.40.50.1390,PS51737,IPR006119,IPR038109, PF07508,IPR011109,SSF53041,PF00239,PTHR30461, PS51736,Coil,cd00338
MNTVIYARYSAGPRQTDQSIEGQLRVCTDFCKQRGLTVIDTYCDRHISGRTDERPEFQRLIADAKRKKFEAVVVYKTDRFARNKYDSAVYKRELKRNGIQIFYAAEAIPDGPEGIILESLMEGLAEYYSAELAQKIKRGMHESALKCQSTGSGRPLGYRVDEQKRFQIDPESAQTVQTIFEQYIKGESNAAICELLNSRGLRTAQGKPFNKNSINRIIKNRKYIGEYRYHDIVVEGGMPAIISKDTFNLAQAEMERRRTRKAPKSPKAEYLLAGRLFCGHCKGPMQGVSGTGKSGNKWYYYYCGNTRGKNKTCDKKQVSRDRLERAVVDFTVRYILQEDVLEELARKVHAAQERQNDTASEIAFYEKKLADNKKSIANVLRAIESGAATQTLPARLQELENEQAVILGELSFLKGKRLAFTEDQILFALMKHLEPYPGESEQDYRRRIISDFVSEVYLYDDRLLIYFNISSEDGKLKSADLSNIEGGEFDEGLISSTKTI

SEQ ID NO: 5848 - protein, 500 aa, Unknown
  Description of Unknown: Integrase B5849 sequence
  PTHR30461:SF3,cd00338,SM00857,G3DSA:1.10.10.2600,IPR036162, PF13408,PS51737,IPR025827,G3DSA:3.40.50.1390,IPR006119, IPR038109,PF07508,SSF53041,IPR011109,PTHR30461, PS51736,Coil,PF00239
MYEDIKTACLYVRFSSHNQTEQSIEGQTRVCRDFCKRHNIRIVEIYADRATSASKDIEKRVQFLKMIKDSEKGLFDAVIVYKLDRFARSRYDSATYKYRLKRNGVQLISATENISNDPEGIILESVLEGMAEFYSAELSQKINRGMRESAYKHNSIGGAVPLGYKIEDKKLVIDPKTAPIVKEAFEKYADGETVAEICRQFNARGYKTSKGTAFGKSSFTKIFCNERYIGVYSFHDYRAEDAIPAIIDKDLWDRVQLRVGKIKNAPARNKAKVVYLLSGKIFCGHCGSKMNGNCNAGNYYYYQCYGKKNGNVDCKKKNIRKEFIERLVAQDALSLLTDEYIEQIATIACEKNQHEIELDSALPTIRDRIHQVDLSLNNLLKAIESGSAPDMLVKRMGELEKEKKDLQVQAKKESEDIVELDKAQVIYWLEQFRGGSIEDEEFCRMLIDLFVNSVTVWDEDDNTYKVTVAYNLTSLPTKTYRLNKGGTLSDFTSNAPDWET

SEQ ID NO: 5849 - protein, 500 aa, Unknown
  Description of Unknown: Integrase B5850 sequence
  PTHR30461:SF3,SM00857,G3DSA:1.10.10.2600,IPR036162,PF13408, IPR025827,G3DSA:3.40.50.1390,PS51737,IPR006119,IPR038109, PF07508,IPR011109,SSF53041,PF00239,PTHR30461, PS51736,Coil,cd00338
MSSKETLKSGALYIRVSTHGKQEELSPAAQKRLLLKYAKEHNIVISKDYIYEEKGISGRKADRRPEFMRMISTAKSNPSPFDVILVWKFSRFARNQEESIVYKSLLRRKCDVEVVSVSEPLVDGPFGSLIERIIEWMDEYYSIRLSGEVFRGMSEKAMKGGYQARPPLGYQIVSKGEPPVIVPEEAKVVEYIFDKYVNAHSGIFDIARSLNTLGAKTSHGKPFERRSVEYILQNPTYCGKIRWNRTLNATNEIKPKEEWILTQGTHPAIISEEMFDAAQERFKNEYHPTGARPSSTYRHWLSGIMKCPACGRTMIAKAVTDKRYHKQYCYFTCYGYSKGKCLAKNSISSKKLEPVVIAGIKAATLSNDLSFAIKNPIPVEDKSELKILEGLLAKMESKEKRIKDAYMNGIDSMEEYKENKLLLSKERADLEERIKNTNTEPEDNMDIIKNDMKKRIQNVYEIITSDDFSNQEKSDALKSAVEKIVYKKEEEIVDICYYYL

SEQ ID NO: 5850 - protein, 500 aa, Unknown
  Description of Unknown: Integrase B5851 sequence
  PTHR30461:SF3,SM00857,G3DSA:1.10.10.2600,IPR036162,PF13408, IPR025827,G3DSA:3.40.50.1390,PS51737,IPR006119,IPR038109, PF07508,SSF53041,IPR011109,PF00239,PTHR30461, PS51736,Coil,cd00338
MNSLKAVIYARYSSDKQRDESIEGQIRECRAFAEREGIIITGIYTDKALSARTDNRPEFLQMIEDSKKHLFDYVLVYQLDRFSRSREDSAVYKAILKKNGVKVVSAKENITNDPAGIILESVLEGMAEYYSAELSQKVRRGMTDNALQGKVNGTPTPLGYDKTEDKHLIINEREARIVQTIFDLYIKGHSIPSICSHLDAKGYLSKHGSKFSYAVVRRILSNEKYIGTMRWNDIVIENAIPSIISKEIFDKVQHEKGHRIKKKGARSEFYNLCGKIYCGKCGGHYTGNTATSHTGAKHHYYSCTNRRKHKTCTGKNIKRDILEDIIINKTIHILNEPNTIAQLAKMATEASSTMLGDAELELKHIDARIKELQSELENYMKAIAKGFISDTLQTQIENAEAELQDHMTRKTNHEIKAHPIKLTAEHIEFFLYKMAKENPTTNTGRARILDTFIHSATIYDDRVEITFNYNNDLPQFKGQVIDGSFSVDVVDHQGFEPWTP

SEQ ID NO: 5851 - protein, 500 aa, Unknown
  Description of Unknown: Integrase B5852 sequence
  PTHR30461:SF3,SM00857,G3DSA:1.10.10.2600,IPR036162,PF13408, IPR025827,G3DSA:3.40.50.1390,PS51737,IPR006119,IPR038109, PF07508,IPR011109,SSF53041,PTHR30461,Coil, PS51736,cd00338,PF00239
MRMCGYARVSTDEERQLDSLEHQMEFFSDFAKQNGHHLVNVYTDEGITGRQLKKRDAFNKMLSDSKLGLFDLLVVKDVSRFARNTVDLLTSIRQLKSRGIDVIFVNNSQKVLGESEFIITLLGAVAQEESSNLSKRVKFGKNITSKKGRVPPRIFGYDRIDNFTMEINEREAEVVREIYHLYIDEGLGCRLIAITLAEKQMKTKFGNDWNQRNIRRILENPIYSGHYINHRYTVVDFLEGTTKALPKEQYYHHDRPEWAIITPERFQQAQEILEQRRKQYATEYTHFTGRYSNRHLFSTLIRCKECGRAFSRRVTHYPNSDYIYWRCPTNNQYTAKRCSNNTIVREDDLIETLSTYLREVVSNKESIAQEIARKFKEANAVEGSKPDAQTLEAKKVKLKAKLEKYMEMYANDVITMEALKSKTAEINESINVIDDQLILLEGQRTQERTIESITNEAMTEIERFLSLQSATNMDLRRIIDSIIVDDKKKVKINLKITGNL

SEQ ID NO: 5852 - protein, 500 aa, Unknown
  Description of Unknown: Integrase B5853 sequence
  PTHR30461:SF3,SM00857,G3DSA:1.10.10.2600,IPR036162,PF13408, IPR025827,G3DSA:3.40.50.1390,PS51737,IPR006119,IPR038109, PF07508,IPR011109,SSF53041,PF00239,PTHR30461, PS51736,Coil,cd00338
MKAVIYARYSSDSQREESIEGQLRECTAFAEKNGITVLRHYIDRAYSAKTDNRPEFQNMIKDSGKRLFDIVIVWKLDRFARNRYDSARYKATLKKNGVKVVSATEIISEGAEGIILESVLEGYAEYYSADLSEKVIRGMTDNALKCKFNGGMMPIGYVIDAERHFQIDPLTAPFVLEAFKRYDGGETISSIMNWLNEQGLTNTRGRKMTFNSVGHILHNRRYIGEFRYRDVIVPDGIPAIVPQDLFDRVQEKLAKNKKAPARHKAEDDYLLTTKLFCGYCGAYLCGESGTSRTGKVHHYYKCVSVKKKRTECHKKPVRKEWIEDLVVGETMKMVMDDKAIEAIVSMLMDLQERDNVNVPLYEQQLREAETAINNLLNAIQQGILTRSTKARLEELENRRDELENRLACEKLAKPKVSAEFMTFWLHRFRKLDVRQQSHRKMLIDTFINEIFLYDDKMVITFNYKEGTKTITFAELQEAISNKNGSDLDCLVAPKCSKRKV

SEQ ID NO: 5853 - protein, 500 aa, Unknown
  Description of Unknown: Integrase B5854 sequence
  SM00857,G3DSA:1.10.10.2600,IPR036162,PS51737,G3DSA:3.40.50.1390, IPR006119,IPR038109,PF07508,IPR011109,SSF53041, PTHR30461,Coil,PS51736,cd00338,PF00239
MAYAMYLRKSRADEELGYENTLERHEEMLRNLAAQTGIHVDESHIYREIVSGESIEARPQMQKLLKAVEMGLYTGVLCIELERLSRGDGADQQRILKAFQFSDTKIITLTKTYGLAGDDSFDEEFFEFGLFMSRREYKMIKKRLYRGRIQAQKEGYFIGSRPPYGYGKKRIGKGYVLVPNENAEVVRYIFRRYAQRETAANILHDLNNMAIPTVTGTKWTAYAIREVIKNQTYIGKINTKTVRCEKSIKDGKVVQRWLNNYEPVTVEGRHEPIVDEELFWKCREVRDSEKTRVKADQTLKNPLASIMFCEVCGKTIRRTHYDYKGERTFYYGCVTSRCETKNTFTHIVYDMVIDELKKELERQQVMLADYDTSPEHDARKDELEMLKAELGKKQMMLERACEAYETGIYDRQTYLERVQKVNAAKVELQARIETLEKDIEESEERHEKAVPILTKAVEEMHTLTPKEQNDLLKMIIDKITYKKTESGAAIEPELEISLKI

SEQ ID NO: 5854 - protein, 500 aa, Unknown
  Description of Unknown: Integrase B5855 sequence
  PTHR30461:SF3,SM00857,G3DSA:1.10.10.2600,IPR036162,PF13408, PS51737,G3DSA:3.40.50.1390,IPR025827,IPR006119,IPR038109, PF07508,IPR011109,SSF53041,PTHR30461, Coil,PS51736,cd00338,PF00239
MSNKETLKSGALYIRVSTHGKQEELSPDAQKRLLLKYAKDHNIVVPKSYIYEEKGISGRKADRRPEFMRMISTAKSNPSPFDVILVWKFSRFARNQEESIVYKSLLRRKCNVDVISVSEPLIEGPFGSLIERIIEWMDEYYSIRLSGEVFRGMSEKAMKGGYQARPPLGYKILVKGEPPVIVPEEAKIVEYIFDKYVNARSGIFDIARSLNTMGVKTSHGKAFERRSVEYILQNPTYCGKIRWNRTTNATNEIKPKEDWILADGAHPAIISEELFHAAQERFQSEYRPTGARPSSTYRHWLSGIVKCPECGRTMIAKSTTGKSNNKQYCYFTCYGYSKGKCLAKSSISSRKLEPVVLEGIKAATLNDNLSFSIKAPVPVEDKSELKILKGLLAKLENKEKRIKEAYMNEIDTLEEYKENKLLLAKERSDLEEKIKNSSTEPTNNTEDMKKDMQERIRNVYDIITSDNFTDQQKSDAIRSIVEKIVYKKEEEMVEIYYYYV

SEQ ID NO: 5855 - protein, 500 aa, Unknown
  Description of Unknown: Integrase B5856 sequence
  cd00338,SM00857,G3DSA:1.10.10.2600,IPR036162,PF13408, IPR025827,PS51737,G3DSA:3.40.50.1390,IPR006119,IPR038109, PF07508,IPR011109,SSF53041,PTHR30461,PS51736, Coil,PF00239
MAYAMYLRKSRADEELGYENTLERHEEMLRNLAAQTGIHVDESHIYREIVSGESIEARPQMQKLLKAVEMGLYTGVLCIELERLSRGDGADQQRILKAFQFSDTKIITLTKTYDLAGDDSFDEEFFEFGLFMSRREYKMIKKRLYRGRIQAQKEGYFIGSRPPYGYDKKRIGKGYVLVPNENAEVVRYIFRRYAKRETAANILHDLNNMAIPTVTGTKWTAYAIREVIKNQTYIGKINTKTVRCEKSIKDGKVVQRWLNNYEPVVVEGKHEPIVDEELFWKCQEVRDSKKTRTRSDQTLKNPFASIMFCSVCGKTMRRTHYDYKGERTFYYGCQTSRCETKNTFTHVVYDIVIGELRKELERQQVILADYDTSPEHDARKDELEMLRDELGKKSMMLERACEAYETGIYDRQTYLERVQKVNAARAELQARVEELEASIEESEERHEKAVPILTRVVEEMHTLTPKEQNDLLKMIVDRIEYEKTESGAAIEPTLRISLKI

SEQ ID NO: 5856 - protein, 499 aa, Unknown
  Description of Unknown: Integrase B5857 sequence
  PTHR30461:SF3,cd00338,SM00857,G3DSA:1.10.10.2600,IPR036162, PF13408,PS51737,G3DSA:3.40.50.1390,IPR025827,IPR006119, IPR038109,PF07508,IPR011109,SSF53041,PTHR30461, PS51736,Coil,PF00239
MKTAVIYARYSSDKQTEQSIEGQLYDCYNYAKQHGITVVQEYIDRAMTGKNDDRPAFQQMLHESAMHKWDSVIVWKLDRFARNTIDSAVNRQILAKNGVKLLSVMESFGDDASGQMMTHIIEAINEYYSADLREKTIRGMRQSAMKAQTTGHIPLGYKVVDKKLVIDDETRIIPETVFRMYAEGERLTDIANHLNSQGYRNRRGRPFSTNSFYNMLSNEKYIGIYKYDDIVIEGGIPQMIPNEVFEAVREKLITNRKRAAKNTAKADYYLSGKLYCGHCGEPMSGLSGTGRNGVKHYYYRCNGVQKKSGCHKKLENKYLIEDEVCRAARSAFEQMDKAETAETIYQMYLQTVRNEYAPAELEKELTECTKQAENVVNAIAQTGGNQLLYDKVRELEERKEQLSSALRLSQAMTDNVPSVEQITVFIDDILATDINTTEGKKAIADIMISKVYVYDDKLTVIFKDKDGKSVDIPLSAMSDTSSADCAPSALGSQANFKAN

SEQ ID NO: 5857 - protein, 499 aa, Unknown
  Description of Unknown: Integrase B5858 sequence
  cd03768,PTHR30461:SF3,SM00857,IPR036162,PF13408, IPR025827,G3DSA:3.40.50.1390,PS51737,IPR006119,PF07508, IPR011109,SSF53041,PTHR30461,PS51736,Coil, PF00239
MDAIYARQSIEKKDSLSIEQQIDMCKKSAADAVEIYKDIGYSGKNTTRPDFQRLLGDVKSGTVNRVICYRIDRISRNLLDFMNIWQLFQQNHVEFISVSEQFDTSTPVGKAMLYIAMVFAQMERETIGTRITDNFYARTAAGAWGGGPAPYGFKKVRGMLHGKTQTLLEPVPDEQENIKWMFTEYATGLRSLGWLGREMWKRDPDRGIRWTNVSLRRILINPLYAAADADLYAFFSRSGINIVSPLAAWDGKHSALQTGSRSADTRVRRPISEQQLSVFSTNPVVSSQTYIRVQKQLAKNRQIKNTGKGQWSWLSGKIKCAECGYSCTLCHSPGVTRTKAYIRCSGRYGQLAEKRCTTRHTETIESVEEYVLAQLKDHLSGVAPSKRSKKSAAQERKRNELKLQLIEVQQKQQNAAAAIAEGGATIMRLMMPEIEKLDAEATKITDELSTLAGSEQQSWMPDMALDFDAIDDTGLRDLVALTIDKVLVSPSRPPEIIWK

SEQ ID NO: 5858 - protein, 499 aa, Unknown
  Description of Unknown: Integrase B5859 sequence
  PTHR30461:SF3,IPR036162,PS51737,IPR011109,PTHR30461, PF00239,G3DSA:1.10.10.2600,IPR006119,SSF53041,cd00338, SM00857,IPR025827,IPR038109,mobidb-lite,PS51736, PF13408,G3DSA:3.40.50.1390,PF07508,Coil
MNVVLYMRYSSDRQTEQSIEGQKRVCMDFCERQGYNVVGEYIDRATSAYKETAKRTNFCRMIRDSSNGLWQGVVVYKLDRFARNRYDSATYKVRLKKNGVKVISATENISDSPEGVILESVLEGMAEFYSKELSQKVSRGLNESAHKCNSTGGAIPLGYKTVDKKLTVDEPNAQIVKEAFDLYAGGATISEICEKFNSQGYRTKKGTEFNKNSFKSMFRNEKYIGTYTYKDIRIEGGIPAIIDKETFETVRKKLSANAQAPARGKARVNYLLSQKLFCGHCGANMIGESGRSKTGETYYYYSCSTRKRFHSCKKRTIRKDLIERIVAENAMRLITPEMINTIADMAIKCNREDIESDAIIPALTADLKEINTSIKNLLKMVERGVESETLDSRLKELEKRKKDTESRLDAAKSEYLTLDKTVIVGWLSQFLSGDIEDEDFRRHLIDTLINSVTVWDEPDGGYKITTVYNLKGNTQTYRVNADGSSDMKRNSPPKKRQFS

SEQ ID NO: 5859 - protein, 499 aa, Unknown
  Description of Unknown: Integrase B5860 sequence
  PTHR30461:SF3,IPR036162,PS51737,IPR011109,PTHR30461, PF00239,G3DSA:1.10.10.2600,IPR006119,SSF53041,cd00338, SM00857,IPR025827,IPR038109,mobidb-lite,PS51736, PF13408,G3DSA:3.40.50.1390,PF07508,Coil
MNVVLYMRYSSDRQTEQSIEGQKRVCMDFCERQGYNVVGEYIDRATSAYKETAKRTNFCRMIRDSSNGLWQGVVVYKLDRFARNRYDSATYKVRLKKNGVKVISATENISDSPEGVILESVLEGMAEFYSKELSQKVSRGLNESAHKCNSTGGAIPLGYKTVNKKLTVDEPNAQIVKEAFDLYAGGATISEICEKFNSQGYRTKKGTEFNKNSFKSMFRNEKYIGTYTYKDIRIEGGIPAIIDKETFETVQKRLSANAQAPARGKARVNYLLSQKLFCGHCGANMTGDSGRSKTGETYYYYSCSTRKRFHSCKKRTIRKDLIERIVAENAMRLITPEMINTIADMAIKCNREDIESDAIIPALTADLKEINTSIKNLLKMVERGVESETLDLRLKELEKRKKDTESRLDAAKSEYLTLDKTVIVGWLSQFLSGDIEDEDFRRHLIDTLINSVTVWDEPDGGYKITTVYNLKGNTQTYRVNADGSSDMKRNSPPKKRQFS

SEQ ID NO: 5860 - protein, 499 aa, Unknown
  Description of Unknown: Integrase B5861 sequence
  PTHR30461:SF3,IPR036162,PS51737,IPR011109,PTHR30461, PS00397,PF00239,G3DSA:1.10.10.2600,IPR006119,SSF53041, cd00338,SM00857,IPR025827,IPR038109,PS51736, IPR006118,PF13408,G3DSA:3.40.50.1390,PF07508,Coil
MSEKLKEVCAYIRVSTDKQEELSPESQIRLIKDYAEQHNMLLTRIYQEDKGISGKKADKRPAFQEMIATCKEKSHPYDAILLWKFSRFARNIDESTYYKSVLRKKCNVDVISISEPITEGMYGRLIEMVIEWSDEFYLYNLSGEVMRGMTQKALKGGYNSNVPIGYIKERGKDKIPQIEPKGAEIVRKIFDMYTEQNIPMGDIAARLNQSGYRTARGSLFETRVIGYILENPFYIGKIRWNFFNKQSNKRKNPDDVIISDGKHEAIISEEQFSQAANRRANDRLRTGYNKKRRPAPLLANWLSGMIKCSKCGASLGFAHGGTKTVPNFCCWKYSKGLCSTRNGITLKNAEKEVLSILEELSGSGYFYNYNLNVINTENTERGYILKELKSLDAKMKRIKDAYINEIDTLEEYKANKELILKRRTELNEKLEAATITIHPASVHKDVDFQGLIDIIKDENSNDTKKHNALLEIVDHFVWDKETQEMTVVLNDDISLVNCK

SEQ ID NO: 5861 - protein, 499 aa, Unknown
  Description of Unknown: Integrase B5862 sequence
  PTHR30461:SF3,SM00857,G3DSA:1.10.10.2600,IPR036162,PS51737, G3DSA:3.40.50.1390,IPR006119,IPR038109,PF07508,IPR011109, SSF53041,PTHR30461,Coil,PS51736,cd00338, PF00239
MSLYALYLRKSRSDDPEKSVEETLRRHREILDKYAIENGIDVKPEDIYEEVVSGESLYSRPEMLRLLESVESGAYEGVLCMDIDRLGRGKTSDQGIILETFKYSNTKIITPNRQYDLNDEFDEDYAEFEGFMAHRELKMIKRRMQRGIQKTIEEGGYLANAPYGYVSAKIGKRPSLAINEDEAPFVRMIFDLYVNKGMGCQHIADTINSMGAKPHRSQEFGRTSIMKIIKSPVYIGKIVWNQKTHIRKGTRGNTKHETIYNPPEKWTIVDGLHPAIIDEALYNRAQEIARIKYHSPSFTGVIENPLSGLIHCGNCNRMMTRAPHMRGGPYLLCARRGCIPSSKLPLVEDAVLMSLRNEITRLKGQQEQECEEKQELSVTATKAIDKELKATKEQLSRLHDLLEQQIYDVATFMERRTTLTKKIEKLEAAKASYQKQEKQLNIPAMIQRIELVLMQYRQCRPQEQNELLKSVIEKVIYHKEKGAKPADFKLDISLLPIFL

SEQ ID NO: 5862 - protein, 499 aa, Unknown
  Description of Unknown: Integrase B5863 sequence
  cd00338,SM00857,G3DSA:1.10.10.2600,IPR036162,PF13408, IPR025827,G3DSA:3.40.50.1390,PS51737,mobidb-lite,IPR006119, IPR038109,PF07508,IPR011109,SSF53041,PTHR30461, PS51736,Coil,PF00239
MNVVLYMRYSSDRQTEQSIEGQKRVCMDFCERQGYNVVGEYIDRATSAYKETAKRTNFCRMIRDSSNGLWQGVVVYKLDRFARNRYDSATYKVRLKKNGVKVISATENISDSPEGVILESVLEGMAEFYSKELSQKVSRGLNESAHKCNSTGGAIPLGYKTVNKKLTVDEPNAQIVKEAFDLYAGGATISEICEKFNSQGYRTKKGTEFNKNSFKTMFRNEKYIGTYTYKDIRIELGIPAIIDKETFETVQKRLSANAQAPARGKARVNYLLSQKLFCGHCGANMIGESGRSKTGETYYYYSCSTRKRFHSCKKRTIRKDLIERIVAENAMRLITPEMINTIADMAIKCNREDIESDAIIPALTADLKEINTGIKNLLKMVERGVESETLDLRLKELEKRKKDTESRLDAAKSEYLTLDKTVIVGWLSQFLSGDIEDEEFRRHLIDTLINSVTVWDEPDGGYKITTVYNLKGNTQTYRVNADGSSDMKRNSPPKKRQFS

SEQ ID NO: 5863 - protein, 499 aa, Unknown
  Description of Unknown: Integrase B5864 sequence
  PTHR30461:SF3,IPR036162,PS51737,IPR011109,PTHR30461, PF00239,G3DSA:1.10.10.2600,IPR006119,SSF53041,cd00338, SM00857,IPR025827,IPR038109,mobidb-lite,PS51736, PF13408,G3DSA:3.40.50.1390,PF07508,Coil
MNVVLYMRYSSDRQTEQSIEGQKRVCMDFCERQGYNVVGEYIDRATSAYKETAKRTNFCRMIRDSSNGLWQGVVVYKLDRFARNRYDSATYKVRLKKNGVKVISATENISDSPEGVILESVLEGMAEFYSKELSQKVSRGLNESAHKCNSTGGAIPLGYKTVDKKLTVDEPNAQIVKEAFDLYAGGATISEICEKFNSQGYRTKKGTEFNKNSFKSMFRNEKYIGTYTYKDIRIEGGIPAIIDKETFETVQKKLSANAQAPARGKARVNYLLSQKLFCGHCGANMIGDSGRSKTGETYYYYSCSTRKRFHSCKKRTIRKDLIERIVAENAMRLITPEMINTIADMAIKCNREDIESDAIIPALTADLKEINTSIKNLLKMVERGVESETLDLRLKELEKRKKDTESRLDAAKSEYLTLDKTVIVGWLSQFLSGDIEDEDFRRHLIDTLINSVTVWDEPDGGYKITTVYNLKGNTQTYRVNADGSSDMKRNSPPKKRQFS

SEQ ID NO: 5864 - protein, 499 aa, Unknown
  Description of Unknown: Integrase B5865 sequence
  PTHR30461:SF3,IPR036162,PS51737,IPR011109,PTHR30461, PF00239,G3DSA:1.10.10.2600,IPR006119,SSF53041,cd00338, SM00857,IPR025827,IPR038109,mobidb-lite,PS51736, PF13408,G3DSA:3.40.50.1390,PF07508,Coil
MNVVLYMRYSSDRQTEQSIEGQKRVCMDFCERQGYNVVGEYIDRATSAYKETAKRTNFCRMIRDSSNGLWQGVVVYKLDRFARNRYDSATYKVRLKKNGVKVISATENISDSPEGVILESVLEGMAEFYSKELSQKVSRGLNESAHKCNSTGGAIPLGYKTVNKKLTVDELNAQIVKEAFDLYAGGATISEICEKFNSQGYRTKKGTEFNKNSFKSMFRNEKYIGTYTYKDIRIEGGIPAIIDKETFETVQKRLSANAQAPARGKARVNYLLSQKLFCGHCGANMIGDSGRSKTGETYYYYSCSTRKRFHSCKKRTIRKDLIERIVAENAMRLITPEMINTIADMAIKCNREDIESDAIIPALTADLKEINTSIKNLLKMVERGVESETLDLRLKELEKRKKDTESRLDAAKSEYLTLDKTVIVGWLSQFLSGDIEDEDFRRHLIDTLINSVTVWDEPDGGYKITTVYNLKGNTQTYRVNADGSSDMKRNSPPKKRQFS

SEQ ID NO: 5865 - protein, 499 aa, Unknown
  Description of Unknown: Integrase B5866 sequence
  SM00857,G3DSA:1.10.10.2600,IPR036162,PF13408,PS51737, G3DSA:3.40.50.1390,IPR025827,IPR006119,IPR038109,PF07508, IPR011109,SSF53041,PF00239,PTHR30461,PS51736, Coil,cd00338
MKDKYALYLRKSQADQPDESIAEVLAKHRTMLMELADKMGVDVAQADIFEEVVSGESLYARPEMLRLLEQVEAGAYAGVFCMDIDRLGRGSMSEQGIILETFRLAETKIICPGKTYDLTNDADEELTEMKALFARFELKMIRKRMRRGLMQTIQAGGYVANQPYGYRKCTVGKLPSLEIDEEQAKFIRHIYKRYREGVGAHIISEELNAMGSVPNRSGRWSRNTVRHVLRNPTYAGKVAWNRVKRYKPTKNNPRPRAEHQKMEDWILVDGLHPAIIPWEEWQQVQEIRKGRYIPSQNHGQVANVLAGLIRCGNCGHNMQRMGQNKCDPRILCTEKGCVPSTKYDLVVERFLESLERIRDDLQIEVQQAKAPDISGLLAEQSTIAAKRKKTATKIDTLHDLLEDGTYDRATYKERMAKAEAEQAALLLQQADVELRIQRAMSRDKANMLSRLTSVLQLYPTLDNEGKNHILKSIVNYAVYRKSPKSKPGDFTLEIILKDI

SEQ ID NO: 5866 - protein, 499 aa, Unknown
  Description of Unknown: Integrase B5867 sequence
  PTHR30461:SF3,SM00857,G3DSA:1.10.10.2600,IPR036162,PS51737, G3DSA:3.40.50.1390,IPR006119,IPR038109,PF07508,SSF53041, IPR011109,PTHR30461,Coil,PS51736,cd00338, PF00239
MSLYALYLRKSRSDDPEKSVEETLRRHREILDKYAIENGIDVKPEDIYEEVVSGESLYSRPEMLRLLESVESGAYEGVLCMDIDRLGRGKTSDQGIILETFKYSNTKIITPNRQYDLNDEFDEDYAEFEGFMAHRELKMIKRRMQRGIQKTIEEGGYLANAPYGYVSAKIGKRPSLAINEDEAPFVRMIFDLYVNKGMGCQHIADTINSMGAKPHRSQEFGRTSIMKIIKSPVYIGKIVWNQKTHIRKGTRGNTKHETIYNPPEKWTIVDGLHPAIIDEALYNRAQEIARTKYHSPSFTGVIENPLSGLIHCGNCNRMMTRAPHMRGGPYLLCARRGCIPSSKLPLVEDAVLMSLRNEITKLKGRQKQMEEEKQNTSITVIKAIDKELKATKDQLSRLHDLLEQQVYDVSTFMERRSTLTKKIEKLEASRESFRKQEKRLNIPAMIQRIELVLTQYRDSSPQVQNELLKSVIEKVIYHKEKGAKPADFQLEVSLLPIFL

SEQ ID NO: 5867 - protein, 499 aa, Unknown
  Description of Unknown: Integrase B5868 sequence
  PTHR30461:SF3,IPR036162,PS51737,IPR011109,PTHR30461, PS00397,PF00239,G3DSA:1.10.10.2600,IPR006119,SSF53041, cd00338,SM00857,IPR025827,IPR038109,PS51736, IPR006118,PF13408,G3DSA:3.40.50.1390,PF07508,Coil
MSEKLKEVCAYIRVSTDKQEELSPESQIRLIKDYAEQHNMLLTRIYQEDKGISGKKADKRPAFQEMIATCKEKSHPYDAILLWKFSRFARNIDESTYYKSVLRKKCNVDVISISEPITEGMYGRLIEMVIEWSDEFYLYNLSGEVMRGMTQKALKGGYNSNVPIGYIKERGRDKIPQIEPKGAEIVRKIFDMYTEQNIPMGDIAAKLNKSGYRTARGSLFETRVIGYILENPFYIGKIRWNFFDKQSNKRKNPDDVIISDGKHEAIISEEQFSKAANRRAHDRLRTGYNKKRRPAPLLANWLSGMIKCSKCGASLGFAHGGTKTVPNFCCWKYSKGLCSTRNGITLKNAEKEVLSILEELSGSGYFYNYNLNVINTENTERGYILKELKSLDAKMKRIKDAYINEIDTLEEYKANKELILKRRTELNKKLESATITVHPASVHKDVDFQGLIDIIKDENSNDTKKHNALLEVVDHFVWNKETQEMTVVLNDDISLAYCK

SEQ ID NO: 5868 - protein, 499 aa, Unknown
  Description of Unknown: Integrase B5869 sequence
  PTHR30461:SF3,IPR036162,PS51737,IPR011109,PTHR30461, PS00397,PF00239,G3DSA:1.10.10.2600,IPR006119,SSF53041, cd00338,SM00857,IPR025827,IPR038109,PS51736, IPR006118,PF13408,G3DSA:3.40.50.1390,PF07508,Coil
MSEKLKEVCAYIRVSTDKQEELSPESQIRLIKDYAEQHNMLLTRIYQEDKGISGKKADKRPAFQEMIATCKEKSHPYDAILLWKFSRFARNIDESTYYKSVLRKKCNVDVISISEPITEGMYGRLIEMVIEWSDEFYLYNLSGEVMRGMTQKALKGGYNSNVPIGYIKERGRDKIPQIEPKGAEIVRKIFNMYTEQNIPMGDIAARLNQSGYRTARGSLFETRVIGYILENPFYIGKIRWNFFDKQSNKRKNPDDVIISDGKHEAIISEEQFSQAANRRAHDRLRTGYNKKRRPAPLLANWLSGMIKCSKCGASLGFAHGGTKTVPNFCCWKYSKGLCSTRNGITLKNAEKEVLSILEELSGSGYFYNYNLNVINTENTERGYILKELKSLDAKMKRIKDAYINEIDTLEEYKANKELILKRRTELNKKLESATITVHPASVHKDVDFQGLIDIIKDENSNDMEKHNALLEVVDHFVWNKETQEMTVVLNDDISLVNCK

SEQ ID NO: 5869 - protein, 499 aa, Unknown
  Description of Unknown: Integrase B5870 sequence
  PTHR30461:SF3,SM00857,G3DSA:1.10.10.2600,IPR036162,PF13408, IPR025827,G3DSA:3.40.50.1390,PS51737,IPR006119,IPR038109, PF07508,SSF53041,IPR011109,PTHR30461,PS51736, cd00338,PF00239
MAYAEYLRKSRYDNPDETLEETLARHRKLLAEYMVRNNISVLPEDIYEEVVSGDSLYARPQMLRLLEAVEAGKYEGVVCMDIQRLGRGSMTDQGAILDAFKYSHTKILTPTKTYDLDDDTDETYTEFETFMGRQELKMIKKRLQRGIKATVEAGGYISNAPYGYEQTRVGKMPTLRIKEDEASFVRMMFDMYANQGMGCQRIADTISAMGARPHRGEAFSRNTIRRILKSPVYIGKVVWNQKSCIQPGKQGNNKHMVIYHPPEKWIVVDGIHPAIVDEDIFYRVQKMFDGHSHSPTFTGVIENPLSGIVICGNCGGRMQRQMHERGGPYLMCQRRGCIVSSQLPLVEEAILNHLREEMIALPANQEPHDSDNQKDLTEALRTIDRDIRTARQQDNKLHDLLEQGVYDIDTFMERHAMLTDRIAKLSLAKERLRPQEKQLLDIEGMQQRIRAVLDAYHGATPQARSDLLKSVIERVVYHKEPGAKPAGFELEMYLKPMYL

SEQ ID NO: 5870 - protein, 499 aa, Unknown
  Description of Unknown: Integrase B5871 sequence
  PTHR30461:SF3,SM00857,G3DSA:1.10.10.2600,IPR036162,PS51737, G3DSA:3.40.50.1390,IPR006119,IPR038109,PF07508,SSF53041, IPR011109,PTHR30461,Coil,PS51736,cd00338, PF00239
MSLYALYLRKSRSDDPEKSVEETLRRHREILDKYAIENGIDVKPEDIYEEVVSGESLYSRPEMLRLLESVESGAYEGVLCMDIDRLGRGKTSDQGIILETFKYSNTKIITPNRQYDLNDEFDEDYAEFEGFMAHRELKMIKRRMQRGIQKTIEEGGYLANAPYGYVSAKIGKRPSLAINEDEAPFVRMIFDLYVNKGMGCQHIADTINSMGAKPHRSQEFGRTSIMKIIKSPVYIGKIVWNQKTHIRKGTRGNTKHETIYNPPEKWTIVDGLHPAIIDEALYNRAQEIARTKYHSPSFTGVIENPLSGLIHCGNCNRMMTRAPHMRGGPYLLCARRGCIPSSKLPLVEDAVLMSLRNEITRLKGQQEQECEEKQELSVTATKAIDKELKATKEQLSRLHDLLEQQIYDVATFMERRSTLTKKIEKLEAAKASYQKQEKQLNIPAMIQRIELVLMQYRQCRPQEQNELLKSVIEKVIYHKEKGAKPADFKLEISLLPIFL

SEQ ID NO: 5871 - protein, 499 aa, Unknown
  Description of Unknown: Integrase B5872 sequence
  PTHR30461:SF3,IPR036162,PS51737,IPR011109,PTHR30461, PF00239,G3DSA:1.10.10.2600,IPR006119,SSF53041,cd00338, SM00857,IPR025827,IPR038109,mobidb-lite,PS51736, PF13408,G3DSA:3.40.50.1390,PF07508,Coil
MNVVLYMRYSSDRQTEQSIEGQKRVCMDFCERQGYNVVGEYIDRATSAYKETAKRTNFCRMIRDSSNGLWQGVVVYKLDRFARNRYDSATYKVRLKKNGVKVISATENISDSPEGVILESVLEGMAEFYSKELSQKVSRGLNESAHKCNSTGGAIPLGYKTVDKKLTVDEPNAQIVKEAFDLYAGGATISEICEKFNSQGYRTKKGTEFNKNSFKTMLRNEKYIGTYTYKDIRIEGGIPAIIDKETFETVQKRLSANAQAPARGKARVNYLLSQKLFCGHCGANMTGDSGRSKTGETYYYYSCSTRKRFHSCKKRTIRKDLIERIVAENAMRLITPEMINTIADMAIKCNREDIESDAIIPALTADLKEINTSIKNLLKMVERGVESETLDSRLKELEKRKKDTELRLDAAKSEYLTLDKTVIVGWLSQFLSGDIEDEDFRRHLIDTLINSVTVWDEPDGGYKITTVYNLKGNTQTYRVNADGSSDMKRNSPPKKRQFS

SEQ ID NO: 5872 - protein, 499 aa, Unknown
  Description of Unknown: Integrase B5873 sequence
  cd00338,SM00857,G3DSA:1.10.10.2600,IPR036162,PF13408, IPR025827,G3DSA:3.40.50.1390,mobidb-lite,PS51737,IPR006119, IPR038109,PF07508,IPR011109,SSF53041,PTHR30461, PS51736,Coil,PF00239
MNVVLYMRYSSDRQTEQSIEGQKRVCMDFCERQGYNVVGEYIDRATSAYKETAKRTNFCRMIRDSSNGLWQGVVVYKLDRFARNRYDSATYKVRLKKNGVKVISATENISDSPEGVILESVLEGMAEFYSKELSQKVSRGLNESAHKCNSTGGAIPLGYKTVDKKLTVDEPSAQIVKEAFDLYAGGATISEICEKFNSQGYRTKKGTEFNKNSFKSMFRNEKYIGTYTYKDIRIEGGIPAIIDKKTFETVQKKLSANAQAPARGKARVNYLLSQKLFCGHCGANMIGESGRSKTGETYYYYSCSTRKRFHSCKKRTIRKDLIERIVAENAMRLITPEMINTIADMAIKCNREDIESDAIIPALTADLKEINTSIKNLLKMVERGVESETLDSRLKELEKRKKDTESRLDAAKSEYLTLDKTVIVGWLSQFLSGDIEDEDFRRHLIDTLINSVTVWDESDGGYKITTVYNLKGNTQTYRVNADGSSDMKRNSPPKKRQFS

SEQ ID NO: 5873 - protein, 499 aa, Unknown
  Description of Unknown: Integrase B5874 sequence
  cd00338,SM00857,G3DSA:1.10.10.2600,IPR036162,PF13408, IPR025827,G3DSA:3.40.50.1390,PS51737,mobidb-lite,IPR006119, IPR038109,PF07508,IPR011109,SSF53041,PTHR30461, PS51736,Coil,PF00239
MNVVLYMRYSSDRQTEQSIEGQKRVCMDFCERQGYNVVGEYIDRATSAYKETAKRTNFCRMIRDSSNGLWQGVVVYKLDRFARNRYDSATYKVRLKKNGVKVISATENISDSPEGVILESVLEGMAEFYSKELSQKVSRGLNESAHKCNSTGGAIPLGYKTVDKKLTVDEPNAQIVKEAFDLYAGGATISEICEKFNSQGYRTKKGTEFNKNSFKSMFRNEKYIGTYTYKDIRIEGGIPAIIDKETFETVQKKLSANAQAPARGKARVNYLLSQKLFCGHCGANMIGDSGRSKTGETYYYYSCSTRKRFHSCKKRTIRKDLIERIVAENAMRLITPEMINTIADMAIKCNREDIESDAIIPALTADLKEINTSIKNLLKMVERGVESETLDSRLKELEKRKKDTELRLDAAKSEYLTLDKTVIVGWLSQFLSGDIEGEDFRRHLIDTLINSVTVWDEPDGGYKITTVYNLKGNTQTYRVNADGSSDMKRNSPPKKRQFS

SEQ ID NO: 5874 - protein, 499 aa, Unknown
  Description of Unknown: Integrase B5875 sequence
  PTHR30461:SF3,IPR036162,PS51737,IPR011109,PTHR30461, PF00239,G3DSA:1.10.10.2600,IPR006119,SSF53041,cd00338, SM00857,IPR025827,IPR038109,mobidb-lite,PS51736, PF13408,G3DSA:3.40.50.1390,PF07508,Coil
MNVVLYMRYSSDRQTEQSIEGQKRVCMDFCERQGYNVVGEYIDRATSAYKETAKRTNFCRMIRDSSNGLWQGVVVYKLDRFARNRYDSATYKVRLKKNGVKVISATENISDSPEGVILESVLEGMAEFYSKELSQKVSRGLNESAHKCNSTGGAIPLGYKTVDKKLTVDEPNAQIVKEAFDLYAGGATISEICEKFNSQGYRTKKGTEFNKNSFKSMFRNEKYIGTYTYKDIRIEGGIPAIIDKETFETVQKRLSANAQAPARGKARVNYLLSQKLFCGHCGANMIGDSGRSKTGETYYYYSCSTRKRFHSCKKRTIRKDLIERIVAENAMRLITPEMINTIADMAIKCNREDIESDAIIPALTADLKEINTSIKNLLKMVERGVESETLDLRLKELEKRKKDTESRLDAAKSEYLTLDKTVIVGWLSQFLSGDIEDEDFRRHLIDTLINSVTVWDEPDGGYKITTVYNLKGNTQTYRVNADGSSDMKRNSPPKKRQFS

SEQ ID NO: 5875 - protein, 499 aa, Unknown
  Description of Unknown: Integrase B5876 sequence
  PTHR30461:SF3,SM00857,G3DSA:1.10.10.2600,IPR036162,PF13408, PS51737,IPR025827,G3DSA:3.40.50.1390,IPR006119,IPR038109, PF07508,IPR011109,SSF53041,PF00239,PTHR30461, PS51736,Coil,cd00338
MKTAVIYARYSSDTQTEQSIEGQLRVCNEYAKNNDILILRTYIDRAMTGTNDNRPDFRQMIEDSKKHDFSIVLVYKFDRFSRNKYETTKHKKTLKDNGVKVVSATEYIPDSPEAIILESMIEGYAEYYSAELSQKVKRGMNETRQKGNFTGGTIIYGYKLENHKVVIDEEKAEVVRFIYDQYAQGVYVKDIIKTLTERGIFNRGKKFARNTVYNILKNEKYSGIYRHGNEVFTNMYPQIVPTEIYENVRRKTETNKYGTRSVEVVYLLRNKIKCGYCGSPISAECGTAKNGQKIRYYKCLGRKHQSGCKKSQVRKEILEKYVLDNVCEQMQRPEILDKMATYLLQVQENRIKQNSVLTNLIKEKRQTENTINNIMQAIELGGQSATVMKRMRELEEKLTDIEKRLTIEKSQTAFRLSKEQMIDYYKSALEKEPQQLINYFIKEIQLYDDKMIIIYNTPKTINLDESQGFSFYEKNVKMPYVIQNREYYGLKDFRLIMRI

SEQ ID NO: 5876 - protein, 499 aa, Unknown
  Description of Unknown: Integrase B5877 sequence
  SM00857,G3DSA:1.10.10.2600,IPR036162,PS51737,G3DSA:3.40.50.1390, IPR006119,IPR038109,PF07508,SSF53041,IPR011109, PTHR30461,Coil,PS51736,cd00338,PF00239
MARRRRCAIYARFSSERQREESIEDQLRVCREWAAREGWEVAATYADRHISGRTDRRPEFRRMVADAEAGAGWQAVVVYKLDRFARSRADSAHYRMRLRASGVRLLSATEAIPDGPEGIIMEGVLDSFAEYYSAALGQNVRRGMHGNALKHKANGVLPMGYAVDAAGGYELDPREAPIVRGVFEIVAAGKGRKEARDWANAQGLRTRRGNELNYDSVRRMVMDERYRGVYHFGDVRDEDGMPRIVDDATWYEANDRLARKPRKYSFPLSGKLWDAQTGKPFRGTAGTSGTGRRYLYYSVPVGGGHEWRVAKDLVEGTVRDALAECFADPSTAGTLAEWAHAAMVEEAGVDTSSIEAAIADAERRSANILRAIEAGVVPDGAKERIEALREERSRLTARLSRARASVPDVGEIREFVTTQLYRQAGDRLMEDLVSKVTVDRERGEVDIRIPWSARLSGDSGSETFEREVLRSRVWWSSREHGRTLYVLPGGLLLRARMAA

SEQ ID NO: 5877 - protein, 499 aa, Unknown
  Description of Unknown: Integrase B5878 sequence
  cd00338,SM00857,G3DSA:1.10.10.2600,IPR036162, PF13408,PS51737,G3DSA:3.40.50.1390,IPR025827, IPR006119,IPR038109,PF07508,SSF53041, IPR011109,PTHR30461,PS51736,Coil,PF00239
MKKAFAYARFSTDMQREESIDAQFRAIKEYCSRNKISLINFFKDEGISGTTDNRPAFQEMIKKAEEVDYIIVHKLDRFSRNKYDSAIYKRALHQKGVRVLSVLENLDNSPESIILESVLEGMSEYYSKNLSREVKKGLYENAYKAKFNGGVPLFGYSIDENKNYIINEYQAIAVRLIFEMFSKGHSYSEIITELNKRGYKTNKGNNFKKTTLHDLLANERYIGTYVFSREDYDMENRKRNSHKFKNRNDMIIVENGNPAIIDKKTWDLVKERQSLNKKISNKAKWTYVLSPFLYCNQCGKKMSGFTRKNKIGKYYQHYRCINTSCEQKSVRTDILESEFYDAFNKLIFNDSNKKLLVEKINNFIKMKNSNNDNSKIENELKDIEQQLNNAVTFILNGSSSQTIKNKIEELEQKKYNLQNELIQKSQKHNNINSKEIINFLNRYDKLEKFSIPEQQTILKFFIDQLRYEKGKLIIKLKLAEKPPPTLKNNENGTELPAPF

SEQ ID NO: 5878 - protein, 499 aa, Unknown
  Description of Unknown: Integrase B5879 sequence
  PTHR30461:SF3,IPR036162,PS51737,IPR011109,PTHR30461, PS00397,PF00239,G3DSA:1.10.10.2600,IPR006119,SSF53041, cd00338,SM00857,IPR025827,IPR038109,PS51736, IPR006118,PF13408,G3DSA:3.40.50.1390,PF07508,Coil
MSEKLKEVCAYIRVSTDKQEELSPESQIRLIKDYAEQHNMLLTRIYQEDKGISGKKADKRPAFQEMIATCKEKSHPYDAILLWKFSRFARNIDESTYYKSVLRKKCNVDVISISEPITEGMYGRLIEMVIEWSDEFYLYNLSGEVMRGMTQKALKGGYNSNVPIGYIKERGRDKIPQIEPKGAEIVRKIFDMYTEQNIPMGDIAARLNQSGYRTARGSLFETRVIGYILENPFYIGKIRWNFFDKQSNKRKNPDDVIISDGKHEAIISEEQFSKAANRRAHDRLRTGYNKKRRPAPLLANWLSGMIKCSKCGASLGFAHGGTKTVPNFCCWKYSKGLCSTRNGITLKNAEKEVLSILEELSGSGYFYNYNLNVINTENTERGYILKELKSLDAKMKRIKDAYINEIDTLEEYKTNKELILKRRTELNEKLEAATITIHPASVHKDVDFQGLIDIIKDENSNDTKKHNALLEIVDHFVWDKETQEMTVVLNDDISLVNCK

SEQ ID NO: 5879 - protein, 499 aa, Unknown
  Description of Unknown: Integrase B5880 sequence
  PTHR30461:SF3,IPR036162,PS51737,IPR011109,PTHR30461, PF00239,G3DSA:1.10.10.2600,IPR006119,SSF53041,cd00338, SM00857,IPR025827,IPR038109,mobidb-lite,PS51736, PF13408,G3DSA:3.40.50.1390,PF07508,Coil
MNVVLYMRYSSDRQTEQSIEGQKRVCMDFCERQGYNVVGEYIDRATSAYKETAKRTNFCRMIRDSSNGLWQGVVVYKLDRFARNRYDSATYKVRLKKNGVKVISATENISDSPEGVILESVLEGMAEFYSKELSQKVSRGLNESAHKCNSTGGAIPLGYKTVNKKLTVDEPNAQIVKEAFDLYAGGATISEICEKFNSQGYRTKKGTEFNKNSFKTMFRNEKYIGTYTYKDIRIEGGIPAIIDKETFKAVQKRLSANAQAPARGKARVNYLLSQKLFCGHCGANMIGESGRSKTRETYNYYSCSTRKRFHSCKKRTIRKDLIERIVAENAMRLITPEMINTIADMAIKCNREDIESDAIIPALTADLKEINTSIKNLLKMVERGVESETLDSRLKELEKRKKDTESRLDAAKSEYLTLDKTVIVGWLSQFLSGDIEDEDFRRHLIDTLINSVTVWDEPDGGYKITTVYNLKGNTQTYRVNADGSSDMKRNSPPKKRQFS

SEQ ID NO: 5880 - protein, 499 aa, Unknown
  Description of Unknown: Integrase B5881 sequence
  PTHR30461:SF3,IPR036162,PS51737,IPR011109,PTHR30461, PF00239,G3DSA:1.10.10.2600,IPR006119,SSF53041,cd00338, SM00857,IPR025827,IPR038109,mobidb-lite,PS51736, PF13408,G3DSA:3.40.50.1390,PF07508,Coil
MNVVLYMRYSSDRQTEQSIEGQKRVCMDFCERQGYNVVGEYIDRATSAYKETAKRTNFCRMIRDSSNGLWQGVVVYKLDRFARNRYDSATYKVRLKKNGVKVISATENISDSPEGVILESVLEGMAEFYSKELSQKVSRGLNESAHKCNSTGGAIPLGYKTVDKKLTVDEPSAQIVKEAFDLYAGGATISEICEKFNSQGYRTKKGTEFNKNSFKSMFRNEKYIGTYTYKDIRIEGGIPAIIDKETFETVQKRLSANAQAPARGKARVNYLLSQKLFCGHCGANMIGESGRSKTGETYYYYSCSTRKRFHSCKKRTIRKDLIERIVAENAMRLITPEMINTIADMAIKCNREDIESDAIIPALTADLKEINTSIKNLLKMVERGVESETLDSRLKELEKRKKDTESRLDAAKSEYLTLDKTVIVGWLSQFLSGDIEDEDFRRHLIDTLINSVTVWDESDGGYKITTVYNLKGNTQTYRVNADGSSDMKRNSPPKKRQFS

SEQ ID NO: 5881 - protein, 499 aa, Unknown
  Description of Unknown: Integrase B5882 sequence
  PTHR30461:SF3,SM00857,IPR006118,G3DSA:1.10.10.2600,IPR036162, PS51737,G3DSA:3.40.50.1390,IPR006119,IPR038109,PF07508, IPR011109,SSF53041,PF00239,PTHR30461,PS00397, PS51736,Coil,cd00338
MSEKLKEVCAYIRVSTDKQEELSPESQIRLIKDYAEQHNMLLTRIYQEDKGISGKKADKRPAFQEMIATCKEKSHPYDAILLWKFSRFARNIDESTYYKSVLRKKCNVDVISISEPITEGMYGRLIEMVIEWSDEFYLYNLSGEVMRGMTQKALKGGYNSNVPIGYIKERGRDKIPQIEPKGAEIVRKIFNMYTEQNIPMGDIAARLNQSGYRTARGSLFETRVIGYILENPFYIGKIRWNFFDKQSNKRKNPDDVIISDGKHEAIISEEQFSKAANRRAHDRLRTGYNKKRRPAPLLANWLSGMIKCSKCGASLGFAHGGAKTVPNFCCWKYSKGLCSTRNGITLKNAEKEVLSILEELSGSGYFYNYNLNVINTENTERGYILKELKSLDAKMKRIKDAYINEIDTLEEYKANKELILKRRTELNKKLESSTITVHPASVHKDVDFQGLIDIIKDENSNDMEKHNALLEVVDHFVWDKETQEMTVVLNDDISLAYCK

SEQ ID NO: 5882 - protein, 499 aa, Unknown
  Description of Unknown: Integrase B5883 sequence
  PTHR30461:SF3,SM00857,IPR006118,G3DSA:1.10.10.2600,IPR036162, PS51737,G3DSA:3.40.50.1390,IPR006119,IPR038109,PF07508, SSF53041,IPR011109,PF00239,PTHR30461,PS00397, PS51736,Coil,cd00338
MSEKLKEVCAYIRVSTDKQEELSPESQIRLIKDYAEQYNMLLTRIYQEDKGISGKKADKRPAFQEMIATCKDKAHPYDAILLWKFSRFARNIDESTYYKSVLRKKCNVDVISVSEPIVEGMYGRLIEMVIEWSDEFYLYNLSGEVMRGMTQKALKGGYNSNVPIGYIKERGRDKIPQIELKGAEIVRKIFDMYTEQNIPMGDIAARLNQSGYRTARGSLFETRVVGYILENPFYIGKIRWNFFDKQSNKRKNPDDVIISDGKHEAIISDEQFSKAANRRAHDRLRTGYNKKRRPTPLLANWLSGMIKCSKCGASLGFAHGTDKVVPNFCCWKYSKGLCSTRNGITLKNAEKEVLTILEELSGSGYFYNYNLNVINTENTERAYILKELRSLDTKMKRIKDAYINEIDTLEEYKANKELINKRREELNKKLEAASVTVHPAAVHKAVDFQALIDIIKDENSNDTEKHNALLEVVDYFVWDKETQEMTVVLNSDISLVNCK

SEQ ID NO: 5883 - protein, 499 aa, Unknown
  Description of Unknown: Integrase B5884 sequence
  PTHR30461:SF3,IPR036162,PS51737,IPR011109,PTHR30461, PF00239,G3DSA:1.10.10.2600,IPR006119,SSF53041,cd00338, SM00857,IPR025827,IPR038109,PS51736,mobidb-lite, PF13408,G3DSA:3.40.50.1390,PF07508,Coil
MSAKTDHRPDFQRMIKDSAKGLFDVIIVWKLDRFARNRYDSAHYKALLRKYGVKVLSATENISEGPEGIILESMLEGMAEYYSAELSEKVIRGHTENALKCKYNGGTPTFGFIIDKEKCYQIDPHTAPVVLESFTRYADGATMKEVMQYLVESGFTTVRGRKIDLNFIARLLKNRKYIGEYSYRHIVTPGGIPAIVPQDLFDRVQQRLEANRKAPARHKAEDDYLLTTKLFCGTCGAMMVGESGTSASKGRKYHYYRCVNTKKHKTCNAKHKSVRKIPLENAVVSAVMAKVMNDDFVEYIADRVLEIQGMESSELPALRQQLAETERGIENMLNAIQMGIINQSTKQRLDELEERKKEIELRIIQEEIKKPMLSREDVTFWICRFRKLDVSRLEERRRLIDSFVNSVTIFDDYLLITFNYKDGETRLDFKDIESSDLQSVGGRDRLRVDIPFRISTCFVLLSIRYRRLPGMPSSGQQSSYATGTGKDSACGHTLSPAFR

SEQ ID NO: 5884 - protein, 499 aa, Unknown
  Description of Unknown: Integrase B5885 sequence
  PTHR30461:SF3,SM00857,G3DSA:1.10.10.2600,IPR036162,PF13408, PS51737,G3DSA:3.40.50.1390,IPR025827,IPR006119,IPR038109, PF07508,IPR011109,SSF53041,PTHR30461,Coil, PS51736,cd00338,PF00239
MKKAVIYARYSSDMQREESIDAQVRACTYYAHQYQFEVVRVYADRAQSGKRTKNREQFLQMIEDASQKEFEVILVHKLNRFGRNTLEVLEYKNSLEDMGIELISVTERLESTPEGKLMLIIIAGMNEFYSDNLSQEVMKGLKENAYQCKFTGGVPALGYKVDPESKKLVVDEQEAPIVRLIFQRYADGWSYNMIIDELDRLGYHTKYGRPFGKNSLFELLRNEKYVGIYTFNRAAKRKRDGSRNYHATKDPSEIIRIPGGCPALIDKETFEKVQNIMEQNKRLNIQQHGKKVYILSGKLFCANCGARMYGNCKTTRGQAHFYYVCSNSWRHHNCSARHIPAEELENEIVDMLQNRICNSEFLNNVSQQLQDDMQKGIEATQKQRKSTAKQLQTVNFKIKNLLNLASQGIDIEELGEAISSLKQEKETLITTLDAMDSLPSAMSKENPIRQSLTRLSSLEAPEQASILRQYVDKIFVSSQKESTVPIQVQICLYSTSPEQ

SEQ ID NO: 5885 - protein, 499 aa, Unknown
  Description of Unknown: Integrase B5886 sequence
  PTHR30461:SF3,cd00338,SM00857,IPR006118,G3DSA:1.10.10.2600, IPR036162,PS51737,G3DSA:3.40.50.1390,IPR006119,IPR038109, PF07508,SSF53041,IPR011109,PTHR30461,PS00397, PS51736,Coil,PF00239
MSEKLKEVCAYIRVSTDKQEELSPESQIRLIKDYAEPHNMLLTRIYQEDHGISGKKADKRPAFQEMIATCKDKSHPYDAILLWKFSRFARNIDESTYYKSVLRKKCNVDVISVSEPIVEGMYGRLIEMVIEWSDEFYLYNLSGEVMRGMTQKALKGGYNSNVPIGYIKERGKDKIPQIEPKGAEIVRKIFDMYTEQNIPMSDIAAKLNKSGYRTARGSFFETRVVGYILENPFYIGKIRWNFFDKQSNKRKNPDDVIISDGKHEAIISDEQFSKAANRRAHDRLRTGYNKKRRPTPLLANWLSGMIKCSKCGASLGFAHGTAKVVPNFCCWKYSKGLCSTRNGITLKNAEKEVLTILEELSGSGYFYNYNLNVINTENTERAYILKELRSLDTKMKRIKDAYINEIDTLEEYKANKELINKRREELNKKLEAASVTVHPAAVHKAVDFQALIDIIKDENSIDTEKHNALLEVVDHFVWDKETQEMTVVLNSDISLVNCK

SEQ ID NO: 5886 - protein, 499 aa, Unknown
  Description of Unknown: Integrase B5887 sequence
  PTHR30461:SF3,IPR036162,PS51737,IPR011109,PTHR30461, PF00239,G3DSA:1.10.10.2600,IPR006119,SSF53041,cd00338, SM00857,IPR025827,IPR038109,mobidb-lite,PS51736, PF13408,G3DSA:3.40.50.1390,PF07508,Coil
MNVVLYMRYSSDRQTEQSIEGQKRVCMDFCERQGYNVVGEYIDRATSAYKETAKRTNFCRMIRDSSNGLWQGVVVYKLDRFARNRYDSATYKVRLKKNGVKVISATENISDSPEGVILESVLEGMAEFYSKELSQKVSRGLNESAHKCNSTGGAIPLGYKTVDKKLTVDEPSAQIVKEAFDLYAGGATISEICEKFNSQGYRTKKGTEFNKNSFKSMFRNEKYIGTYTYKDIRIEGGIPAIIDKETFETVQKRLSANAQAPARGKARVNYLLSQKLFCGHCGANMIGDSGRSKTGETYYYYSCSTRKRFHSCKKRTIRKDLIERIVAENAMRLITPEMINTIADMAIKCNREDIESDAIIPALTADLKEINTSIKNLLKMVERGVESETLDSRLKELEKRKKDTELRLDAAKSEYLTLDKTVIVGWLSQFLSGDIEDEDFRRHMIDTLINSVTVWDEPDGGYKITTVYNLKGNTQTYRVNADGSSDMKRNSPPKKRQFS

SEQ ID NO: 5887 - protein, 499 aa, Unknown
  Description of Unknown: Integrase B5888 sequence
  SM00857,G3DSA:1.10.10.2600,IPR036162,PS51737,G3DSA:3.40.50.1390, IPR006119,IPR038109,PF07508,IPR011109,SSF53041, PTHR30461,PS51736,cd00338,PF00239
MKDKYAQYLRKSQADQPDESIAEVLVKHRTMLMELADKMGVDVAQADIFEEVVSGESLYARPEMLRLLEQVEAGAYAGVFCMDIDRLGRGSMSEQGIILETFRLAETKIICPGKTYDLTNDADEELTEMKALFARFELKMIRKRMRRGLMQTIQAGGYVANQPYGYRKCTVGKLPSLEINEEQAKFIRHIYKRYLEGAGAHIISDELNAMGSVPNRSGRWSRNTVRHVLRNPTYAGKVAWNRVKRYKPTKNNPRPRAEHQKMEDWILVDGLHPAIIPWEEWQQVQEIRKGRYIPSQNHGQVANVLAGLIRCGNCGHNMQRMGQNKCDPRILCTEKGCIPSTKYDLVVERFMESLERIRDDLQIEVQQAKTPDISGLTSEQRAVAAKLKKTASKIDTLHDLLEDGTYDRATYKERMAKAEAEQGSLLLQQADVEQRIQRAMSRDKANMLSKLTSVLQLYPTLDNEGKNQILKSIVNYAVYRKSPKSKPGDFTLEIILKDI

SEQ ID NO: 5888 - protein, 499 aa, Unknown
  Description of Unknown: Integrase B5889 sequence
  PTHR30461:SF3,IPR036162,PS51737,IPR011109, PTHR30461,PS00397,PF00239,G3DSA:1.10.10.2600, IPR006119,SSF53041,cd00338,SM00857,IPR025827,IPR038109 ,PS51736,IPR006118,PF13408,G3DSA:3.40.50.1390,PF07508,Coil
MSEKLKEVCAYIRVSTDKQEELSPESQIRLIKDYAEQHNMLLTRIYQEDKGISGKKADKRPAFQEMIATCKEKSHPYDAILLWKFSRFARNIDESTYYKSVLRKKCNVDVISISEPITEGMYGRLIEMVIEWSDEFYLYNLSGEVMRGMTQKALKGGYNSNVPIGYIKERGRDKIPQIEPKGAEIVRKIFDMYTEQNIPMGDIAARLNQSGYRTARGSLFETRVIGYILENPFYIGKIRWNFFNKQSNKRKNPDDVIISDGKHEAIISEEQFSKAANRRAHDRLRTGYNKKRRPAPLLANWLSGMIKCSKCGASLGFAHGGTKTVPNFCCWKYSKGLCSTRNGITLKNAEKEVLSILEELSGSGYFYNYNLNVINTENTERGYILKELKSLDAKMKRIKDAYINEIDTLEEYKANKELILKRRTELNEKLEAATITVHPASVHKDVDFQGLIDIIKDENSNDMEKHNALLEVVDHFVWNKETQEMTVVLNDDISLVNCK

SEQ ID NO: 5889 - protein, 499 aa, Unknown
  Description of Unknown: Integrase B5890 sequence
  PTHR30461:SF3,SM00857,G3DSA:1.10.10.2600,IPR036162,PF13408, IPR025827,PS51737,G3DSA:3.40.50.1390,IPR006119,IPR038109, PF07508,SSF53041,IPR011109,PTHR30461,Coil, PS51736,cd00338,PF00239
MNAVIYARFSSHSQREQSIEGQLRDCYEYAKRYDINIVGEYIDRAISGMTDDRPDFQRMIADAPKKQFERIIVWKLDRFARNRYDSALYKHKLKQYGIRVISAMENVGEGDESILLEALLEASAEYYSLDLKKKILRGQRETIAKGRWCGGPIPYGYKAVDGKLVADEKTAPIIRYVFEQYAQGVPMKEIIDELKRRGVRSSRGGELTYTTFSRALTNPVYIGNFMYKGELVPGVADALIDEDTYNKVQIIVKANAHAPAANKAKVEYLLQGKAFCGHCGSHMVGESGKSRNGDVYYYYSCAARKKAHKCRKKNEKKDFIEWYVVEQTLNYVLTPTRMRDIAKAVVAEYDKEFSGSKVQEYEKAIKQYERELDKLVDALVDAPKVAHKRIYEKMETLETQKASMENELVKLRIASEIRFTEEEVRAWLRRFCTGDLFDPEFRRNIIDTFINCIYLYDDRIIIFYNIKGGKQVSFVDLAESLDSESESSGSDLNANAPPN

SEQ ID NO: 5890 - protein, 499 aa, Unknown
  Description of Unknown: Integrase B5891 sequence
  PTHR30461:SF3,cd00338,SM00857,IPR006118,G3DSA:1.10.10.2600, IPR036162,PS51737,G3DSA:3.40.50.1390,IPR006119,IPR038109, PF07508,IPR011109,SSF53041,PTHR30461,PS00397, PS51736,Coil,PF00239
MSENLKEVCAYIRVSTDKQEELSPESQIRLIKDYAEQHNMLLTRIYQEDKGISGKKADKRPAFQEMIATCKDKSHPYDAILLWKFSRFARNIDESTYYKSVLRKKCNVDVISVSEPITEGMYGRLIEMVIEWSDEFYLYNLSGEVMRGMTQKALKGGYNSNVPIGYVKERGRDKIPQIEPKGAEIVKKIFDMYTEQNIPMGDIAARLNKAGYRTARGSLFETRVVGYILENPFYIGKIRWNYFDKQSNKRKSPDNVIISKGKHKAIISDEQFSKAANRRAHDRLRTGYNKKRRPAPLLANWLSGMIKCSKCGGSLGFAHGGAKTVPNFCCWKYSKGLCSTRNGITLKNAEKEVLTILEELSSSGYFYNYNLNVINTENTERAYILKELRSLDTKMKRIKDAYINEIDTLEEYKANKELINKRREELNKKLEAASVTVHPAAVHKAVDFQALIDIIKDENSNDTEKHNALLEVVEHFVWDKETQEMTVVLNSDISLVNCK

SEQ ID NO: 5891 - protein, 499 aa, Unknown
  Description of Unknown: Integrase B5892 sequence
  PTHR30461:SF3,SM00857,G3DSA:1.10.10.2600,IPR036162,PF13408, PS51737,IPR025827,G3DSA:3.40.50.1390,IPR006119,IPR038109, PF07508,IPR011109,SSF53041,PTHR30461,PS51736, cd00338,PF00239
MKIRRVQPSPILQKKLRVAAYARVSVDTLHHSLAAQVSYYSNLIQKNPAWEYAGVYADEGITGTSTTHRTEFKRLIADCNAGKIDLVLVKSISRFARDTVDCLNTVRQLKEKGIAVRFERENIDSMSEDGELLLTLLASFAQEESRSIGDNIRWGVRRRFAEGIPNGHKAPYGYQWDGEMFRIVPSEGEIVKEIYRRYLAGESAYAIANTLAGRGITGRQGRPIEQTTVKDILSNISYTGTMALQKNYITEGHIRKRNKGELPMYLVEGIFELLISRDDFDKAQEIRKRRAERAVNRNPVLMPLSGMVKCGCCGSGFSRRTAGKYRRWACNTRERKGRESCDSRPIKEEELVAAVRTVMEKEDFDATKLRRKVSKIVIHGDRIDFHLVNGRIKKTARIYNGQRGSNPFTNKVYCASCGSKCERDTWTKGTKVWSCSQPRTKCQLRRLPESELREAAASFFGNGYEGKIVQNVERIIISDDEVVFHLKEGGAYRWQRPCG

SEQ ID NO: 5892 - protein, 499 aa, Unknown
  Description of Unknown: Integrase B5893 sequence
  SM00857,G3DSA:1.10.10.2600,IPR036162,PS51737,G3DSA:3.40.50.1390, IPR006119,IPR038109,PF07508,IPR011109,SSF53041, PTHR30461,Coil,PS51736,cd00338,PF00239
MARRRRCAIYARFSSERQREESIEDQVRVCREWAAREGWEVVAEYADRHISGRTDRRPEFRRMVADAESGAGWQAVVVYKLDRFARSRADSARYRVRLRASGVRLLSATEAIPDGPEGIIMEGVLDSFAEYYSAALGQNVRRGMHGNALKHKANGVLPMGYAVDAAGGYELDPREASIVRGVFEMVAAGKGRKEARDWANDQGLRTRRGNELNYDSVRRMVMDERYRGVYHFGDVRDEGGMPRIVDDATWYEANDKLARKPRRYSFPLSGKLWDAQTGKPFRGTAGTSGTGRRYLYYSVPTGAGHEWRVAKDLVEGTVRDALAECFADPSTAGTLAEWAHAAMVEEAGVDTSSIETAIADAERRSANILRAIEAGVVPDGARERIEALREERSRLTARLSRARASVPDVEEIREFVTTQLYRQAGDRLMEDLVSKVTVDRERGEVDIRIPWSARLSGDSESETFEREVLRSRVWWSSREHGRTLYVLPGGLLLRARMAA

SEQ ID NO: 5893 - protein, 499 aa, Unknown
  Description of Unknown: Integrase B5894 sequence
  PTHR30461:SF3,IPR036162,PS51737,IPR011109,PTHR30461, PF00239,G3DSA:1.10.10.2600,IPR006119,SSF53041,cd00338, SM00857,IPR025827,IPR038109,mobidb-lite, PS51736,PF13408,G3DSA:3.40.50.1390,PF07508,Coil
MNVVLYMRYSSDRQTEQSIEGQKRVCMDFCERQGYNVVGEYIDRATSAYKETAKRTNFCRMIRDSSNGLWQGVVVYKLDRFARNRYDSATYKVRLKKNGVKVISATENISDSPEGVILESVLEGMAEFYSKELSQKVSRGLNESAHKCNSTGGAIPLGYKTVDKKLTVDEPSAQIVKEAFDLYAGGATISEICEKFNSQGYRTKKGTEFNKNSFKSMFRNEKYIGTYTYKDIRIEGGIPAIIDKETFETVQKRLSANAQAPARGKARVNYLLSQKLFCGHCGANMIGDSGRSKTGETYYYYSCSTRKRFHSCKKRTIRKDLIERIVAENAMRLITPEMINTIADMAIKCNREDIESDAIIPALTADLKEINTSIKNLLKMVERGVESETLDSRLKELEKRKKDTELRLDAAKSEYLTLDKTVIVGWLSQFLSGDIEDEDFRRHLIDTLINSVTVWDEPDGGYKITTVYNLKGNTQTYRVNADGSSDMKRNSPPKKRQFS

SEQ ID NO: 5894 - protein, 499 aa, Unknown
  Description of Unknown: Integrase B5895 sequence
  PTHR30461:SF3,cd00338,SM00857,G3DSA:1.10.10.2600,IPR036162, PF13408,IPR025827,G3DSA:3.40.50.1390,PS51737,IPR006119, IPR038109,PF07508,SSF53041,IPR011109,PTHR30461, PS51736,Coil,PF00239
MENAVIYARFSSHNQQEQSIDGQLRYCKDYAERNAMKVINVYSDRAISGTTDERPQFQQMIRDAKNKQFKYILVWKLDRFARNRYDSAVYKNQLKKCGVRVLSVTEFVGEGSEGVLLESILEAMAETYSLQLSENVRRGMRESVRHGLSCGGTAPLGYDVVNKRYVINEKEAEIVRYVYTQYASGKGKKEIINDLNAKGWRNKKGTKFAFSSLDRLLKNRKYIGEYNYQDITIKDVIPALVDVDLFDTVQNILTKNKRQGGARSYKREYLLSTKLFCGYCGASITGETSTGRHGVKFGYYVCRNQKFHKNNCNKKRERQEELEEIIVRKTLEMYSDRKFIKEVAQKVVDLYNCEFGDNHLTTLEENKNSLEAKFDELSHALLKTTNERMLDKLNKEIEQIDIELNELELEIAREKSISQAKMNVSDVVEFIKNVTNGNIRDKEFQKQIIDTFINAIYVFDDKIIIYYNGSKEAEKVSYNDMLKDISGATTTDTAQPKKT

SEQ ID NO: 5895 - protein, 499 aa, Unknown
  Description of Unknown: Integrase B5896 sequence
  PTHR30461:SF3,IPR036162,PS51737,IPR011109,PTHR30461, PF00239,G3DSA:1.10.10.2600,IPR006119,SSF53041,cd00338, SM00857,IPR025827,IPR038109,mobidb-lite,PS51736, PF13408,G3DSA:3.40.50.1390,PF07508,Coil
MNVVLYMRYSSDRQTEQSIEGQKRVCMDFCERQGYNVVGEYIDRATSAYKETAKRTNFCRMIRDSSNGLWQGVVVYKLDRFARNRYDSATYKVRLKKNGVKVISATENISDSPEGVILESVLEGMAEFYSKELSQKVSRGLNESAHKCNSTGGAIPLGYKTVDKKLTVDEPNAQIVKEAFDLYAGGATISEICEKFNSQGYRTKKGTEFNKNSFKTMLRNEKYIGTYTYKDIRIEGGIPAIIDKETFETVQKRLSANAQAPARGKARVNYLLSQKLFCGHCGANMTGDSGRSKTGETYYYYSCSTRKRFHSCKKRTIRKDLIERIVAENAMRLITPEMINTIADMAIKCNREDIESDAIIPALTADLKEINTSIKNLLKMVERGVESETLDSRLKELEKRKKDTESRLDAAKSEYLTLDKTVIVGWLSQFLSGDIEDEDFRRHLIDTLINSVTVWDESDGGYKITTVYNLKGNTQTYRVNADGSSDMKRNSPPKKRQFS

SEQ ID NO: 5896 - protein, 499 aa, Unknown
  Description of Unknown: Integrase B5897 sequence
  PTHR30461:SF3,IPR036162,PS51737,IPR011109,PTHR30461, PF00239,G3DSA:1.10.10.2600,IPR006119,SSF53041,cd00338, SM00857,IPR025827,IPR038109,mobidb-lite,PS51736, PF13408,G3DSA:3.40.50.1390,PF07508,Coil
MNVVLYMRYSSDRQTEQSIEGQKRVCMDFCERQGYNVVGEYIDRATSAYKETAKRTNFCRMIRDSSNGLWQGVVVYKLDRFARNRYDSATYKVRLKKNGVKVISATENISDSPEGVILESVLEGMAEFYSKELSQKVSRGLNESAHKCNSTGGAIPLGYKTVDKKLTVDEPSAQIVKEAFDLYAGGATISEICEKFNSQGYRTKKGTEFNKNSFKSMFRNEKYIGTYTYKDIRIEGGIPAIIDKETFETVQKRLSANAQAPARGKARVNYLLSQKLFCGHCGANMIGESGRSKTGETYYYYSCSTHKRFHSCKKRTIRKDLIERIVAENAMRLITPEMINTIADMAIKCNREDIESDAIIPALTADLKEINTSIKNLLKMVERGVESETLDSRLKELEKRKKDTESRLDAAKSEYLTLDKTVIVGWLSQFLSGDIEDEDFRRHLIDTLINSVTVWDEPDGGYKITTVYNLKGNTQTYRVNADGSSDMKRNSPPKKRQFS

SEQ ID NO: 5897 - protein, 499 aa, Unknown
  Description of Unknown: Integrase B5898 sequence
  PTHR30461:SF3,IPR036162,PS51737,IPR011109,PTHR30461, PS00397,PF00239,G3DSA:1.10.10.2600,IPR006119,SSF53041, cd00338,SM00857,IPR025827,IPR038109,PS51736, IPR006118,PF13408,G3DSA:3.40.50.1390,PF07508,Coil
MSEKLKEVCAYIRVSTDKQEELSPESQIRLIKDYAEQHNMLLTRIYQEDKGISGKKADKRPAFQEMIATCKEKSHPYDAILLWKFSRFARNIDESTYYKSVLRKKCNVDVISISEPITEGMYGRLIEMVIEWSDEFYLYNLSGEVMRGMTQKALKGGYNSNVPIGYIKERGRDKIPQIEPKGAEIVRKIFNMYTEQNIPMGDIAARLNQSGYRTARGSLFETRVIGYILENPFYIGKIRWNFFNKQSNKRKNPDDVIISDGKHEAIISEEQFSQAANRRANDRLRTGYNKKRRPAPLLANWLSGMIKCSKCGASLGFAHGGTKTVPNFCCWKYSKGLCSTRNGITLKNAEKEVLSILEELSGSGYFYNYNLNVINTENTERGYILKELKSLDAKMKRIKDAYINEIDTLEEYKANKELILKRRTELNKKLESATITVHPASVHKDVDFQGLIDIIKDENSNDMEKHNALLEVVDHFVWNKETQEMTVVLNDDISLAYCK

SEQ ID NO: 5898 - protein, 499 aa, Unknown
  Description of Unknown: Integrase B5899 sequence
  PTHR30461:SF3,IPR036162,PS51737,IPR011109,PTHR30461, PF00239,G3DSA:1.10.10.2600,IPR006119,SSF53041,cd00338, SM00857,IPR025827,IPR038109,mobidb-lite,PS51736, PF13408,G3DSA:3.40.50.1390,PF07508,Coil
MNVVLYMRYSSDRQTEQSIEGQKRVCMDFCERQGYNVVGEYIDRATSAYKETAKRTNFCRMIRDSSNGLWQGVVVYKLDRFARNRYDSATYKVRLKKNGVKVISATENISDSPEGVILESVLEGMAEFYSKELSQKVSRGLNESAHKCNSTGGAIPLGYKTVDKKLTVDEPNAQIVKEAFDLYAGGATISEICEKFNSQGYRTKKGTEFNKNSFKSMFRNEKYIGTYTYKDIRIEGGIPAIIDKETFETVQKRLSANAQAPARGKARVNYLLSQKLFCGHCGANMIGDSGRSKTGETYYYYSCSTRKRFHSCKKRTIRKDLIERIVAENAMRLITPEMINTIADMAIKCNREDIESDAIIPALTADLKEINTSIKNLLKMVERGVESETLDSRLKELEKRKKDTELRLDAAKSEYLTLDKTVIVGWLSQFLSGDIEDEDFRRHLIDTLINSVTVWDEPDGGYKITTVYNLKGNTQTYRVNADGSSDMKRNSPPKKRQFS

SEQ ID NO: 5899 - protein, 499 aa, Unknown
  Description of Unknown: Integrase B5900 sequence
  PTHR30461:SF3,IPR036162,PS51737,IPR011109,PTHR30461, PS00397,PF00239,G3DSA:1.10.10.2600,IPR006119,SSF53041, cd00338,SM00857,IPR025827,IPR038109,PS51736, IPR006118,PF13408,G3DSA:3.40.50.1390,PF07508,Coil
MSEKLKEVCAYIRVSTDKQEELSPESQIRLIKDYAEQHNMLLTRIYQEDKGISGKKADKRPAFQEMIATCKEKSHPYDAILLWKFSRFARNIDESTYYKSILRKKCNVDIISISEPITEGMYGRLIEMVIEWSDEFYLYNLSGEVMRGMTQKALKGGYNSNVPIGYIKERGRDKIPQIEPKGAEIVRKIFDMYTEQNIPMGDIAARLNQSGYRTARGSLFETRVIGYILENPFYIGKIRWNFFNKQSNKRKNPDDVIISDGKHEAIISEEQFSKAANRRAHDRLRTGYNKKRRPAPLLANWLSGMIKCSKCGASLGFAHGGTKTVPNFCCWKYSKGLCSTRNGITLKNAEKEVLSILEELSGSGYFYNYNLNVINTENTERGYILKELKSLDAKMKRIKDAYINEIDTLEEYKANKELILKRRTELNEKLEAATITVHPASVHKDVDFQGLIDIIKDENSNDMEKHNALLEVVDHFVWNKETQEMTVVLNDDISLAYCK

SEQ ID NO: 5900 - protein, 499 aa, Unknown
  Description of Unknown: Integrase B5901 sequence
  PTHR30461:SF3,SM00857,G3DSA:1.10.10.2600,IPR036162,PS51737, G3DSA:3.40.50.1390,IPR006119,IPR038109,PF07508,IPR011109, SSF53041,PF00239,PTHR30461,PS51736,Coil, cd00338
MQTAVIYARYSSDKQTEQSIEGQLYDCYNYAKQHGITVVQEYIDRAMTGKNDDRPAFQQMLHESAMHKWDSVIVWKLDRFARNTIDSAVNRQILAKNGVKLLSVMESFGDDASGQMMTHIIEAINEYYSADLREKTIRGMRQSAMKAQTTGHIPLGYKVVDKKLVIDDETRIIPETVFRMYAEGERLTDIAEHLNAQGYRNRRGRPFTTNSFYNMLANEKYIGIYKYDDIVIEGGIPQMIPNEVFEAVREKLITNRKRAAKNTAKADYYLSGKLYRGHCGEPMSGLSGTGRNGVKHYYYRCNGVQKKSGCHKKLENKYLIEDEVCRAARSAFEQMDKAETAETIYQMYLQTVRNEYAPAELEKELTECTKQAENVVNAIAQTGGNQLLYDKVRELEERKEQLGSALRLSQAMTDNVPSVEQITVFIDDILATDINTIEGKKAIADIMISKVYVYDDKLTVIFKDKDGKCVDIPLSAVSDSSSADCAPSALGSQANFKAT

SEQ ID NO: 5901 - protein, 499 aa, Unknown
  Description of Unknown: Integrase B5902 sequence
  PTHR30461:SF3,IPR036162,PS51737,IPR011109,PTHR30461, PF00239,G3DSA:1.10.10.2600,IPR006119,SSF53041,cd00338, SM00857,IPR025827,IPR038109,mobidb-lite,PS51736, PF13408,G3DSA:3.40.50.1390,PF07508,Coil
MNVVLYMRYSSDRQTEQSIEGQKRVCMDFCERQGYNVVGEYIDRATSAYKETAKRTNFCRMIRDSSNGLWQGVVVYKLDRFARNRYDSATYKVRLKKNGVKVISATENISDSPEGVILESVLEGMAEFYSKELSQKVSRGLNESAHKCNSTGGAIPLGYRTVNKKLTVDEPNAQIVKEAFDLYAGGATISEICEKFNSQGYRTKKGTEFNKNSFKSMFRNEKYIGTYTYKDIRIEGGIPAIIDKETFETVQKRLSANAQAPARGKARVNYLLSQKLFCGHCGANMIGDSGRSKTGETYYYYSCSTRKRFHSCKKRTIRKDLIERIVAENAMRLITPEMINTIADMAIKCNREDIESDAIIPALTADLKEINTSIKNLLKMVERGVESETLDSRLKELEKRKKDTESRLDAAKSEYLTLDKTVIVGWLSQFLSGDIEDEDFRRHLIDTLINSVTVWDEPDGGYKITTVYNLKGNTQTYRVNADGSSDMKRNSPPKKRQFS

SEQ ID NO: 5902 - protein, 499 aa, Unknown
  Description of Unknown: Integrase B5903 sequence
  cd00338,SM00857,IPR036162,PS51737,G3DSA:3.40.50.1390, IPR006119,PF07508,IPR011109,SSF53041,PTHR30461, PS51736,Coil,PF00239
MQKQNGLAFSYIRFSSKKQEQGDSVRRQTELAENYAQANNLILSEKNFQDLGISAFKEGNRASLADMLQAIEQGSISPGSTIIIESLDRLSRRGIDVTQQIIKQILQHQVYIASLVDGLLLNRESVNDLVSVIRIALAADLAHKESEKKSQRLRETKGQQRQRALNGEVINKSLPFWLERKDNAYVFSDRLDAVKRIIELKKKGLGNNKIAKTLNDEEFAPLRSAGWNHTTVAKTIKSVALYGAYQTSETTKDRKVILLDIVEDYYPAVISKEEFMLLQSDQKQNKPGYKSEKNAFTGLLKHECGGALVRKFHTVSGKVYEYHVCANARDGKCSVTQNFKNIETAMFKILRELKMEKKTSLDATLLQERSDVQEKIQDLNNMLLSMKKVPASVLQTIGSLEDKLQALDQAITEQNNRVMNEQSVDLNLLQEVQDPVELNMMLKRVIREITVFNLKKSWRIKVSYINGHSQSFRWDSKNISFKSDTEKLLDFMNSEREEE

SEQ ID NO: 5903 - protein, 499 aa, Unknown
  Description of Unknown: Integrase B5904 sequence
  PTHR30461:SF3,cd00338,SM00857,G3DSA:1.10.10.2600, IPR036162,PF13408,PS51737,G3DSA:3.40.50.1390, IPR025827,IPR006119,IPR038109,PF07508, SSF53041,IPR011109,PTHR30461,PS51736,Coil,PF00239
MKVAIYLRKSRADEELERTVGEGETLTKHKKALLKIAKERKYDIIEIKEEIVSGESLFHRPKMIELLNEVESKRYDGVLVMDMQRLGRGDMQDQGVILKTFKESNTKIITPQKTYDLNNDFDEEYSEFEAFMSRKELKMITRRMQGGRQRSVEEGNYLGTTPPLGYDIEKIGRARTLKPNDYADVVRLIFKRYLEGYGTGAIASELNTLGYKSATGKEFERTSVLFILKNLVYIGKITWKKKEQKKSTTPGKARDTRTRDKSEWIIVNGKHPAIIDENTFFAVQKKLEEKYHVPYQLVNGIANPLAGIIICGVCGNKMVLRKYGNRAPHIICNKKCGCKSSRFDYIENAVLENLKKYYTELEVVIKENKKEDKSEIYKKQIQHLNKELKTLKVQKNNIFDLFEQGKYDEEMFIERSVNVSSRIENISSQLEVLENELKKENKTSITSQEIKDVIDAYHLADIKEKNELLKSILFKVEYTKNKNQKNDDFDIKLFPKIYV

SEQ ID NO: 5904 - protein, 499 aa, Unknown
  Description of Unknown: Integrase B5905 sequence
  PTHR30461:SF3,IPR036162,PS51737,IPR011109,PTHR30461, PS00397,PF00239,G3DSA:1.10.10.2600,IPR006119,SSF53041, cd00338,SM00857,IPR025827,IPR038109,PS51736, IPR006118,PF13408,G3DSA:3.40.50.1390,PF07508,Coil
MKQSKAKISVDIRFALLCIIRKVNRVKCVIYVRVSTDEQAKHGYSIAAQIEKLEAYCISQGWELVAKFVDDGYSAKDLERPQFQEMMEQIKAGGIDVLLVYRLDRLTRSVSDLYSILNELDQYNCKFKSATEVYDTTNAMGRLFITLVAAIAQWERENTAERVYFGMDKKARLGEWPGGTPPFGYKIEEEKLIIDPEEVKTVREIFKLSKTLGFYTIAKQLTTKGIPTRNGGDWHVDSVRAIANNPIYAGYIRWGDDGRQNKKPPREQKLYDGIHEPIIDRDEFWGLQDILDKRRTFGGKRETSKYYFSSILKCARCGHSMSGHKGGNGKKTYRCSGKKAGKNCTSHIILEDNIVKAVLTEFEGLVRDIYSDVKTSKEPIERLSVLNSELSSVQKLMKKKKTMYENDIIDIDELIATTSELREKEKELIREIKNIQKEDKTDTDELKYIIENIDTLWDHANDYERKQLMTSIFSQLIIDTNDEYRGSKYPRDVIIVAAK

SEQ ID NO: 5905 - protein, 499 aa, Unknown
  Description of Unknown: Integrase B5906 sequence
  PTHR30461:SF3,SM00857,G3DSA:1.10.10.2600,IPR036162,PS51737, G3DSA:3.40.50.1390,IPR006119,IPR038109,PF07508,IPR011109, SSF53041,PTHR30461,Coil,cd00338,PF00239
MKYLIYARISERGSSFDHKAENSTTMQIEFCKKFVEMKGGEIVGVVKDEFLTGGNLNRAGIRQILKEVEAGHAAWDCLVTYNLSRLTREPRDLYKVMDILGSAGKRYSSASEPEFDAASITGEMMMGILTHIARYMRKSSAHTVRDRMMSIAARGEWPAGYPPYGYKRGAHKDNVLHVDERKAVIVRDIFELYASDKHTTREIVHKYKNELSKSKVLSLLRNPTYIGKIYYAGSIFNGKHERLISDDLFLQVQRKLPQLKKALRPKAYRYPFLLPGLLFCHCGCRLTPGTAKSGQYAYYTCTDPDCRTRVSAPKIEKYALEQIKSFKISDKAVKSAVEEVKKRNQEIREQHQPELDRLKKTRTSLVAERVKLVAACISNTLDDLLVAELNKRAARIRTDLETIDAQIAAIETIPSGDAEIERIALVFIGMLRNLQNLLEENATPDEIRSILPDFIKEIRLQEDKSYQIIFTNSGSSTKGSKWCALKDLIERKFFHFKIA

SEQ ID NO: 5906 - protein, 498 aa, Unknown
  Description of Unknown: Integrase B5907 sequence
  IPR036162,PS51737,IPR011109,PTHR30461, PS00397,PF00239,G3DSA:1.10.10.2600,IPR006119, SSF53041,cd00338,SM00857,IPR025827,IPR038109,PS51736 ,IPR006118,PF13408,G3DSA:3.40.50.1390,PF07508,Coil
MTPPKGFSSSTHAPLPDLRIAAAYIRVSTDDQAELSPASQLVEIRKWASRNGYIVPDEFVFMDEGISGRGVKKRDEFRRMIGVAKTKPKPFDAILLWKFSRFARNRDDAVMYKSILRKQLGIDVISISEPVAEGGMGLITEALIEAMDEYYSINLAQEVKRGMEEKHRRGEVQSNPPYGYGIKDHVFVPKPPEDGFVKELFRRYLAGEGCFPLARWMNECGQRTHRGGRFENRTIEYILRNPVYIGKLRWNPTGRTRRDFANENVVLVDGKHEPLIDEETFNAVQRRIDEQKLLYPRYARASGTQKHWISGLVRCAACGGGLIVNTPDYMACNNYVRGSCRVRQTVRRDALEAALISRLREDAARGSSLTFDVVRSSDGSASSLSAVEAARDSAVRMLDRLRDAYLTGADTVEEYKASKAAVQQRIADLDAQIAAMQKEDRAAADPKLLRSALRAVVKTLESPNTTVAEKNAAVRSVADNITWNKAANTLTIHYRLVL

SEQ ID NO: 5907 - protein, 498 aa, Unknown
  Description of Unknown: Integrase B5908 sequence
  cd00338,SM00857,G3DSA:1.10.10.2600,IPR036162,PS51736, PS51737,G3DSA:3.40.50.1390,PF13408,IPR025827,IPR006119, IPR038109,PF07508,IPR011109,SSF53041,PTHR30461, mobidb-lite,Coil,PF00239
MDRKIRAAAYGRVSTNSKEQAHSFENQSDYWNKKLANEPKYEYVGLYADKGISGRHVRYRPQMLALLDTCRRGEVEIIFTKSVQRFARNTIELLETVRELREINVAVVFEKENINTLTAESELYLTIAAAVAEEDLNRYGENVAWTIKDRFEKGDISVVGIRMLGYRMKNKEFRIIPHEAEVVRKLFELYSSGKYSTGELAEVMNEGGYRTMNGCLWTQQRVLQTLTNEKYRGDALLYKTATINGQQVVNRGVKDMLYVENSHAAIITPELWDKVTELINARGNMKLRGRVNESYPFTSLIKCPICGQSYIHKINNSGTKYACPIWKCRTHLACGKKGCSNSGIKDSVLKEKFIEAYNEFIENRNFGNDEDAAERELKKLNAEENELISLHVRGLISKHDYEHDKNDIRARRKALEQKVRDYRQAHIRHGAAKPINEFDEELVGRLIKGVTIKDYVVTFEFYNGVTISREYTNGPSGNQKGWKEKKRLKEAQTNGSSN

SEQ ID NO: 5908 - protein, 498 aa, Unknown
  Description of Unknown: Integrase B5909 sequence
  cd00338,SM00857,G3DSA:1.10.10.2600,IPR036162,PS51737, G3DSA:3.40.50.1390,IPR006119,IPR038109,PF07508,SSF53041, IPR011109,PTHR30461,Coil,PF00239
MSEYLMYLRKSRQDDPNENVEEVLSKHEIQLQEYALRNFKYHIPEEDIYREVVSGETIDDRPMINELFKSIESGDIKGVLVIEPQRLTRGDMLDCGTVEHLFRYTNTLVVTPPKTYDLSDKYDRKLFEMELSRGSDFLDYTKEILERGRKASTRRGNYVHSIPPYGYDKVRINKDWTLVPNETESQYVKLAFKLFNDGLGCNGVAHKLDALGARTRNGKPFESCVVSQMLQNPVYIGKLKIGNRSTVKVVENGKLIKKRIRNKNYDVVDGKHEALIDADTFEKAQERFGSNTKENTSHELKNMYAGLMKCGICGKAIMIVPYSNTCKRVDRYKCRNSFNCGNISHRYDEINDAIVEGLKKHLHDFEVKYREETPADNEAKQTLLNSLTKNFEEIDKKMNSICEYLESGLYTTDMFLSRKKALEEEKERLIVAIENTKKEMHSECDLEEKIITLHKALDMLNDDSISAKTKNRFLKTFIKVIYYKKTKEDGISLDIILL

SEQ ID NO: 5909 - protein, 498 aa, Unknown
  Description of Unknown: Integrase B5910 sequence
  PTHR30461:SF3,IPR036162,PS51737,IPR011109, PTHR30461,PS00397,PF00239,G3DSA:1.10.10.2600, IPR006119,SSF53041,SM00857,IPR025827,IPR038109,PS51736 ,cd03768,IPR006118,PF13408,G3DSA:3.40.50.1390,PF07508,Coil
MDSARLRVACYVRVSTREQAEKGYSVSEQQERLKAYCLAKDWVVAQVITDPGFSGAKLERPGMQQLISLVQAKKCDAVLVWKLDRLSRSQKDTLYLIEDVFLKNGCAFVSMNENFDTSTAFGRAMIGILSVFAQLEREQIRERMAVGRVGRAKAGLFHGGGYAPIGYDYKTIAEGGDGLVVNEYEAMQVREVFSLYLQGWPVNRIRKYMAAHYTTKDGDWGSDTTVRDVLKNPLYTGKINWAKKVYDGQHEPLISQETFDAAAARLATSSWKRTCSDGMERNSPFKSTHLLGGIIWCARCGARYFASGNYSGRGENKRYWPYYVCYSRAKSAKHMIRDPNCQNDRWAVAKLDAIIEGEIRKLAFDPAALELAVSGPQQDEDVAQRRAALQQRLNDLRAQMGRVLDLYQMGGSLPASMVGDRVAKLQAEIDGVEAALAEAVEEPPTQRLDAARAALVGAEDVLDNGTLDERRELVHSLIRRIDLDGENIDIHWSFSPEA

SEQ ID NO: 5910 - protein, 498 aa, Unknown
  Description of Unknown: Integrase B5911 sequence
  PTHR30461:SF3,SM00857,G3DSA:1.10.10.2600,IPR036162,PS51737, G3DSA:3.40.50.1390,IPR006119,IPR038109,PF07508,IPR011109, SSF53041,PF00239,PTHR30461,PS51736,Coil, cd00338
MPTAKTAVIYARFSCNKQREASIDDQLRICRQWCQRERYAIVAEYCDYAISGRTDDRPEFQRMVANAGESDIVLVYMMDRFSRGEYDAPIYKRELAQHGVKLVSALEQIPDSPEGIIYEKLLEGLAACESKKTAIRTRRGMEGNALKCKTNGVRVFGYARNEADEYVIDEDEAAFVREAFKRRIAKETTNSIARDFAARGVKTSNGNPCGYSMVERMVKNRKYTGRYEWGGVVKEGGMPAIIDEVTFMEAQGIRAAKERSAESWGDFALSGKAICAGCGRNLQGVSGRGRGNRKYEYYRCQDGCVKPVRREELEGEIVKALRALLQDRDEALRIAKMVAESSDGAEVAARRKQAAQSLSAAERGLKNILNAIEQGIIAPGAKERIAELEHQRDRAKLDLEAIRDDQIDPERLADFLQCGAALDDSTLMRAFVYQVSVSDDECIVTLNYDVENNEPARLDVQRVRTKCKWCPVRTTSRTEICSFGTIVLLRIPRTRLAA

SEQ ID NO: 5911 - protein, 498 aa, Unknown
  Description of Unknown: Integrase B5912 sequence
  IPR036162,PS51737,IPR011109,PTHR30461,PS00397, PF00239,G3DSA:1.10.10.2600,IPR006119,SSF53041,cd00338, SM00857,IPR025827,IPR038109,PS51736,IPR006118, PF13408,G3DSA:3.40.50.1390,PF07508,Coil
MTPPKGFSSSAHAPLPDLRIAAAYIRVSTDDQVELSPASQLVEIRKWASRNGYIVPDEFVFMDEGISGRGVKKRDEFRRMIGVAKTKPKPFDAILLWKFSRFARNRDDAVMYKSILRKQLGIDVISISEPVAEGGMGLITEALIEAMDEYYSINLAQEVKRGMEEKHRRGEVQSNPPYGYGIKDHVFVPKPPEDGFVKELFRRYLAGEGCFPLARWMNECGQRTHRGGRFENRTIEYILRNPVYIGKLRWNPAGRTRRDFANENVVLVDGKHEPLIDEETFNAVQRRIDEQKLLYPRYARASGTQKHWISGLVRCAACGGGLIVNTPDYMACNNYVRGSCRVRQTVRRDALEAALISRLREDAARGSSLTFDVVRSSDGSASSLSAVEAARDSAVRMLDRLRDAYLTGADTVEEYKASKAAVQQRIADLDAQIAAMQKEDRAAADPKLLRSALRAVVKTLESPDTTVAEKNAAVRSVADNITWNKAANTLTIHYRLVL

SEQ ID NO: 5912 - protein, 498 aa, Unknown
  Description of Unknown: Integrase B5913 sequence
  PTHR30461:SF3,IPR036162,PS51737,IPR011109,PTHR30461, PS00397,PF00239,G3DSA:1.10.10.2600,IPR006119,SSF53041, cd00338,SM00857,IPR025827,IPR038109,PS51736, IPR006118,PF13408,G3DSA:3.40.50.1390,PF07508,Coil
MANIQPVKNGALYIRVSTHLQEELSPDAQKRLLMEYAEAHNIIVLKEHIYIDSGISGRSARQRPQFNNMIAEAKSKEHPFDVILVWKYSRFARNQEESIVYKSMLKRENVDVISVSEPISDDPFGSLIERIIEWMDEYYSIRLSGEVSRGMAENAMRGNYQARPPLGYRIPGYRQTPVIVPEEAELIQLIFDLYTEKKMGIFEIVRYLNEHGYQTGHKKPFQRRSVTYILKNPTYIGKTIWNQHDQDHKLRDKSEWIIADGKHEPIISKEQFDKAQKRIESTYKPAYRKPTSVCHHWLSSLLKCSSCGRTLVVKRTASKNKDRMYINFQCYGYQKGICNTNQSISAIKLEPVIMHSLEDAMTSGKIHFDVLNPTTLDSSQKQQLLTRLNEIEKKEVRIKRAYRDGIDTLEEYKENKSIIQTEKEMLLKKIEHIEEPALSPEEAKPIMMDRIKNVYEVITNPDIGMEEKNKAARSIIEKIVFDRATGSVNIFFYLANCP

SEQ ID NO: 5913 - protein, 498 aa, Unknown
  Description of Unknown: Integrase B5914 sequence
  IPR036162,PS51737,IPR011109,PTHR30461,PS00397, PF00239,G3DSA:1.10.10.2600,IPR006119,SSF53041,cd00338, SM00857,IPR025827,IPR038109,PS51736,IPR006118, PF13408,G3DSA:3.40.50.1390,PF07508,Coil
MTPPKGFSSSAHAPLPDLRIAAAYIRVSTDDQVELSPASQLVEIRKWASRNGYIVPDEFVFMDEGISGRGVKKRDEFRRMIGVAKTKPKPFDAILLWKFSRFARNRDDAVMYKSILRKQLGIDVISISEPVAEGGMGLITEALIEAMDEYYSINLAQEVKRGMEEKHRRGEVQSNPPYGYGIKDHVFVPKPPEDGFVKELFRRYLAGEGCFPLARWMNECGQRTHRGGRFENRTIEYILRNPVYIGKLRWNPAGRTRRDFSNENVVLVDGKHEPLIVEETFNAVQRRIDEQKLLYPRYARASGTQKHWISGLVRCAACGGGLIVNTPDYMACNNYVRGSCRVRQTVRRDALEAALISRLREDAARGSSLTFDVVRSSDGSASSLSAVEAARDSAVRMLDRLRDAYLTGADTVEEYKASKAAVQKRIADLDAQIAAMQKEDRAAADPKLLRSALRAVVKTLESPDTTVAEKNAAVRSVADNITWNKAANTLTIHYRLVL

SEQ ID NO: 5914 - protein, 498 aa, Unknown
  Description of Unknown: Integrase B5915 sequence
  IPR036162,PS51737,IPR011109,PTHR30461,PS00397, PF00239,G3DSA:1.10.10.2600,IPR006119,SSF53041,cd00338, SM00857,IPR025827,IPR038109,PS51736,IPR006118, PF13408,G3DSA:3.40.50.1390,PF07508,Coil
MTPPKGFTSSVPAPLPDLRIAAAYIRVSTDDQVELSPASQLVEVRKWAARNGYIVPDEFVFMDEGISGRGVKKRDEFRRMIGVAKTKPKPFDAILLWKFSRFARNRDDAVMYKSILRKQLGIDVISISEPVAEGGMGLITEALIEAMDEYFSINLAQEVKRGMEEKHRRGEVQSNPPYGYGIKDHVFVPKPPEDGFVKELFRRYLAGEGCFPLARWMNECGQRTHRGGRFENRTIEYILRNPVYIGKLRWNPAGRTRRDFSNENVVLVDGKHEPLIDEETFNAVQHRIDEQKLLYPRYARASGTQKHWISGLVRCAACGGGLIVNTPDYMACNNYVRGSCRVRQTVRRDALEAALISRLQEDAARGSSLTFDVVRSSDGSASSLSAVEAARDSAVRMLDRLRDAYLTGADTVEEYKASKAAVQKRIADLDAQIAAMQKEDQAAVDPKLLRSALRAVVKTLESPDTTVAEKNAAVRSVADNITWNKAANTLTIHYRLVL

SEQ ID NO: 5915 - protein, 498 aa, Unknown
  Description of Unknown: Integrase B5916 sequence
  IPR036162,PS51737,IPR011109,PTHR30461,PS00397, PF00239,G3DSA:1.10.10.2600,IPR006119,SSF53041,cd00338, SM00857,IPR025827,IPR038109,PS51736,IPR006118, PF13408,G3DSA:3.40.50.1390,PF07508,Coil
MTPPKGFTSSVPAPLPDLRIAAAYIRVSTDDQVELSPASQLVEIRKWAARNGYIVPDEFVFMDEGISGRGVKKRDEFRRMIGVAKTKPKPFDAILLWKFSRFARNRDDAVMYKSILRKQLGIDVISISEPVAEGGMGLITEALIEAMDEYYSINLAQEVKRGMEEKHRRGEVQSNPPYGYGIKDHVFVPKPPEDGFVKELFRRYLAGEGCFPLARWMNECGQRTHRGGRFENRTIEYILRNPVYIGKLRWNPAGRTRRDFANENVVLVDGKHEPLIDEETFNAVQRRIDEQKLLYPRYARASGTQKHWISGLVRCAACGGGLIVNTPDYMACNNYVRGSCRVRQTVRRDALEAALISRLREDAARGSSLTFDVVRSSDGSASSLSAVEAARDSAVRMLDRLRDAYLTGADTVEEYKASKAAVQKRIADLDAQIAAMQKEDRAAADPKLLRSALRAVVKTLESPDTTVAEKNAAVRSVTDNITWNKAANTLTIHYRLVL

SEQ ID NO: 5916 - protein, 498 aa, Unknown
  Description of Unknown: Integrase B5917 sequence
  PTHR30461:SF3,SM00857,G3DSA:1.10.10.2600,IPR036162,PF13408, IPR025827,PS51737,G3DSA:3.40.50.1390,IPR006119,IPR038109, PF07508,IPR011109,SSF53041,PTHR30461,Coil, PS51736,cd00338,PF00239
MPEALNAVIYARYSSDRQTEQSIEGQLRECYAFAKANDIAVIDTYIDRAISGKTDNRPAFQKMIEDSAKRQFQAVIVYRLDRFTRNRYDSAIYKARLKKNGVKVLSAMENLNGSPESIIMESLLEGMAEYYSVELSQKITRGMRENALKGKALGGQRVLGYKVNSDCYFEIDETTAPVVVDIFKLYSSGKTVKEICDILNARGVKTARGGAFNKNSLHTILTNKKYIGIYKTKYGEIVGGIPAIIDKELFEMVALRMEQNKKAPARAKAEINYLLSTKLFCGKCRSAMVGESGTSKTGKKYYYYACVKKKREKACDKSNVKKDWIEDLVIQRTVTDILKDDVIEKIADRLVELQKAEAAESGTMLYLENSLAEIQVSIKNIMTAIEKGIITESTKTRLTELEDEKRNVEIEIAKESIARRIISREQIIYWISSFKDGDITSEKYRQQLIDTFVHAVFVYDDKIVITYNYSGENNTATISDLDLSSPPQVKKSEHYHQW

SEQ ID NO: 5917 - protein, 498 aa, Unknown
  Description of Unknown: Integrase B5918 sequence
  IPR036162,PS51737,IPR011109,PTHR30461,PS00397, PF00239,G3DSA:1.10.10.2600,IPR006119,SSF53041,cd00338, SM00857,IPR025827,IPR038109,PS51736,IPR006118, PF13408,G3DSA:3.40.50.1390,PF07508,Coil
MTPPKGFTSSVPAPLPDLRIAAAYIRVSTDDQVELSPASQLVEIRKWAARNGYIVPDEFVFMDEGISGRGVKKRDEFRRMIGIAKTKPKPFDAILLWKFSRFARNRDDAVMYKSILRKQLGIDVISISEPVAEGGMGLITEALIEAMDEYYSINLAQEVKRGMEEKHRRGEVQSNPPYGYGIKDHVFVPKPPEDGFVKELFRRYLAGEGCFPLARWMNECGQRTHRGGRFENRTIEYILRNPVYIGKLRWNPAGRTRRDFANENVVLVDGKHEPLIDEETFNAVQRRIDEQKLLYPRYARASGTQKHWISGLVRCAACGGGLIVNTPDYMACNNYVRGSCRVRQTVRRDALEAALISRLREDAARGSSLTFDVVRSSDGSASSLSAVEAARDSAVRMLDRLRDAYLTGADTVEEYKASKAAVQKRIADLDAQIAAMQKEDRAAADPKLLRSALRAVVKTLESPDTTVAEKNAAVRSVADNITWNKAANTLTIHYRLVL

SEQ ID NO: 5918 - protein, 498 aa, Unknown
  Description of Unknown: Integrase B5919 sequence
  PTHR30461:SF3,cd00338,SM00857,G3DSA:1.10.10.2600,IPR036162, PF13408,PS51737,G3DSA:3.40.50.1390,IPR025827,IPR006119, IPR038109,PF07508,IPR011109,SSF53041,PTHR30461, PS51736,Coil,PF00239
MKRAVFYGRYSSDRQTEQSIEGQRRVCEEFAKAEQIQIVGEYIDRATSGTSTEHREQFQKMLKDSKNGGWDYVLVYKLDRFARSRYDSAISKQQLKKNSVKVLSATERITDSPEGILIEGLLESMDEYFSRELSRKCKRGIRESIIKGHNFGGRVLYGYDRKDKRFVINEEQAVNVRRIFKSYLSGCTIQSIANQLNADGYRTNYGNEFKRYTVSDILHNDKYTGIHYIDGIEEPETCPAIISQTTFERVKEKLNQSAHRSREHTTGHTYALSGLLQCGVCGRYVCGSSVERKYFYYACRSREHAENSVHIHADKLEQVVIDALQTFFTEEQVSTLAERLYQIYTTDMDGKPDRSKRLNEIEKQIQGTVNALIACPSSKALQEKLTQLEEQKAEIEKMPILQPQLKKEHFENYFRWLALRLEHIEDRQTFFHTVIHKVLVYPEKAVIILNMTDEMADPPKREQVEAFMSNVGEVSPCPTLYKLYVTPFAIFIRAALIK

SEQ ID NO: 5919 - protein, 498 aa, Unknown
  Description of Unknown: Integrase B5920 sequence
  PTHR30461:SF3,SM00857,G3DSA:1.10.10.2600,IPR036162,PF13408, PS51737,G3DSA:3.40.50.1390,IPR025827,IPR006119,IPR038109, PF07508,IPR011109,SSF53041,PF00239,PTHR30461, PS51736,Coil,cd00338
MGNVMVIPAKRQVGNTARQQDAKPKLRVAAYCRVSTDSDEQATSYEAQVEHYTEFIQKNPEWEFAGIYADDGISGTNTKNRDEFNRMIEDCEAGTIDMIITKSISRFARNTLDCLKYIRQLKDKNIPVFFEKEAINTMDAKGEVLITIMASLAQQESQSLSQNVKLGLQFRYQNGQVQVNHNHFLGYTKDDEGNLIIDPEQAEVVKRIYREYLEGYSMDKIAKGLEADGILTGAGKTKWWTSTINKILRNEKYIGDALLQKTYTTDFLNKTRVKNNGIVPQYYVEGNHEAIIPKDIFLRVQEELVRRRVVKTSANSKKRSYSCNHCFAQIVICGECGEMFRRIHWNNRGCKSIVWRCLSRLEPTGEECHARTVNETVLENVVVQAINTLLGDKSTYQAQLQQNIAKVIREAQKSTADGIDEQLMELQKELLKKANNKEAYDEIADQIFKLREQREKCNVDTAARDAQIARINDLQDYIKQQRTDLAEFDETLVKRWLK

SEQ ID NO: 5920 - protein, 498 aa, Unknown
  Description of Unknown: Integrase B5921 sequence
  IPR036162,PS51737,IPR011109,PTHR30461,PS00397, PF00239,G3DSA:1.10.10.2600,IPR006119,SSF53041,cd00338, SM00857,IPR025827,IPR038109,PS51736,IPR006118, PF13408,G3DSA:3.40.50.1390,PF07508,Coil
MTPPKGFSSSAHAPLPDLRIAAAYIRVSTDDQVELSPASQLVEIRKWAARNGYIVPDEFVFMDEGISGRGVKKRDEFRRMIGVAKTKPKPFDAILLWKFSRFARNRDDAVMYKSILRKQLGIDVISISEPVAEGGMGLITEALIEAMDEYYSINLAQEVKRGMEEKHRRGEVQSNPPYGYGIKDHVFVPKPPEDGFVKELFRRYLAGEGCFPLARWMNECGQRTHRGGRFENRTIEYILRNPVYIGKLRWNPAGRTRRDFSNENVVLVDGKHEPLIDEETFNAVQRRIDEQKLLYPRYARASGTQKHWISGLVRCAACGGGLIVNTPDYMACNNYVRGSCRVRQTVRRDALEAALISRLREDAARGSSLTFDVVRSSDGSASSLSAVEAARDSAVRMLDRLRDAYLTGADTVEEYKASKAAVQKRIADLDAQIAAAHKENAAAANPNLLRSALRAVVKTLESPDTTVAEKNAAVRSVADNITWNKAANTLTIHYRLVL

SEQ ID NO: 5921 - protein, 498 aa, Unknown
  Description of Unknown: Integrase B5922 sequence
  PTHR30461:SF3,SM00857,G3DSA:1.10.10.2600,IPR036162,PF13408, IPR025827,PS51737,G3DSA:3.40.50.1390,IPR006119,IPR038109, PF07508,SSF53041,IPR011109,PTHR30461,PS51736, cd00338,PF00239
MQAAAYARYSTEHQTESSIAYQMRKIEEYCNDHSITVIARYTDEAKSGTNTQRPAFQQLCKDAAQRKFDAVVIYDISRGSRDVSDWFGFRKQMAILGIQVISVEDRIGDILNPSDYLTELITVGLGQHHVLTSRQKSMDSIATKAKTGQFLGGTPNFGYNVVNGRYVINPAEAEIVQKIYRMYAAGKSYGEILAEIGEVRGKRGRVIGKNSLHYLLRNERYIGVYSWCKYHHKIMGKYAGNIPNENAVRIEDSIPAIIDKDTWEAVQIRMNDKKQRACNKAKRSYLLSGLIECTECGANYVGHTSTNKKGYSTRYYCCGNKYRNHTCHAKNLNAEELEIFVVQNLKQYLSDLDFSQMAQQVADEINGASVDLKAERKELADIIFQLNNGTKAILKGIDYPELQEEMFRLRVRKSELEDIIRRGEEKKPVSAEKLEQLFQHAVKQLDTDTKQICKSMVKIYAHPNGDCDLEVGVHISGCGSRQTILCTTFHYFCKKKIV

SEQ ID NO: 5922 - protein, 498 aa, Unknown
  Description of Unknown: Integrase B5923 sequence
  PTHR30461:SF3,SM00857,G3DSA:1.10.10.2600,IPR036162,PF13408, IPR025827,PS51737,G3DSA:3.40.50.1390,IPR006119,IPR038109, PF07508,IPR011109,SSF53041,PTHR30461,Coil, PS51736,cd00338,PF00239
MENKRAVIYARYSSDRQREESIEGQIRECTAFAKRSNLDVINTYTDRALSARTDNRPSFQKLIRDSNKRIFDYVIVYTLDRFSRSRYDSAVYKNKLKKNGVKVLSAKEHIEDTPSGIILESVLEGYAEYYSAELAQKVKRGLTDNVLEHKWTGTCIPFGYKKDDANHLVPDAVTSPLTPRIYEAALGGKSRVEIARWLNEKGYITTYGRRFRPEQVTKILKNRIYTGTFTWDGKQYPAFTTPLITEELFDKVQKTFRKNTRKNPDDYVLTGKIYCGRCGSTMTGMSGTSKSRKTYYYYRCSSMNHSARQAKEPCGAKNVSRDMIEKLIYDKTLQILNTPEWRKEIAHQAMLAQSDDSEELKIKAMEQELSDAKRKITNIITAISNGISSEELAKTLHDLEARKKELESQISHEQLVKKDLTLTEDAIEFYFVQLARKSAGGSDLNVFWDFINHIVVYDDYIEVFYNYVANKKIANPVIIQCSPRNVLVDHQGFEPRTP

SEQ ID NO: 5923 - protein, 498 aa, Unknown
  Description of Unknown: Integrase B5924 sequence
  PTHR30461:SF3,IPR036162,PS51737,IPR011109,PTHR30461, PS00397,PF00239,G3DSA:1.10.10.2600,IPR006119,SSF53041, cd00338,SM00857,IPR025827,IPR038109,PS51736, IPR006118,PF13408,G3DSA:3.40.50.1390,PF07508,Coil
MSDIQPVKNGALYIRVSTHLQEELSPDAQKRLLMEYAEAHNIIVLKEHIYIDSGISGRSARQRPQFNNMIAEAKSKEHPFDVILVWKYSRFARNQEESIVYKSMLKRENVDVISVSEPISDDPFGSLIERIIEWMDEYYSIRLSGEVSRGMAENAMRGNYQARPPLGYRIPGYRQTPVIVPEEAELIQLIFDLYTEKKMGIFEIVRYLNEHGYQTGHKKPFQRRSVTYILKNPTYIGKTIWNQHDQDHKLRDKSEWIIADGKHEPIISKEQFDKAQKRIESTYKPAYRKPTSVCHHWLSSLLKCSSCGRTLVVKRTASKKKDRMYVNFQCYGYQKGICNTNQSISAIKLEPVIMHSLEDAMTSGKIHFDVLNPTTLDSSQKQQLLTRLSEIEKKEERIKRAYRDGIDTLEEYKENKFIIQTEKEMLLKKIEHIEEPALSQEEAKPIMMDRIKNVYEVITNPDIGMEEKNKAARSIIEKIVFDRATGSVNIFFYLANCP

SEQ ID NO: 5924 - protein, 498 aa, Unknown
  Description of Unknown: Integrase B5925 sequence
  IPR036162,PS51737,IPR011109,PTHR30461,PS00397, PF00239,G3DSA:1.10.10.2600,IPR006119,SSF53041,cd00338, SM00857,IPR025827,IPR038109,PS51736,IPR006118, PF13408,G3DSA:3.40.50.1390,PF07508,Coil
MTPPKGFTSSVPAPLPDLRIAAAYIRVSTDEQVELSPASQLVEIRKWAARNGYIVPDEFVFMDEGISGRGVKKRDEFRRMIGVAKTKPKPFDAILLWKFSRFARNRDDAVMYKSILRKQLGIDVISISEPVAEGGMGLITEALIEAMDEYYSINLAQEVKRGMEEKHRRGEVQSNPPYGYGIKDHVFVPKPPEDGFVKELFRRYLAGEGCFPLARWMNECGQRTHRGGRFENRTIEYILRNPVYIGKLRWNPAGRTRRDFANENVVLVDGKHEPLIDEETFNAVQCRIDEQKLLYPRYARASGTQKHWISGLVRCAACGGGLIVNTPDYMACNNYVRGSCRVRQTVRRDALEAALISRLREDAARGSSLTFDVVRSSDGSASSLSAVEAARDSAVRMLDRLRDAYLTGADTVEEYKSSKAAVQKRIADLDAQIAAAHKESAAAADPKLLRSALHAVVKTLESPDTTVAEKNAAVRSVTDNITWNKAANTLTIHYRLVL

SEQ ID NO: 5925 - protein, 498 aa, Unknown
  Description of Unknown: Integrase B5926 sequence
  PTHR30461:SF3,SM00857,G3DSA:1.10.10.2600,IPR036162,PF13408, IPR025827,G3DSA:3.40.50.1390,PS51737,IPR006119,IPR038109, PF07508,IPR011109,SSF53041,PTHR30461,Coil, PS51736,cd00338,PF00239
MKAVIYARFSSHNQREESIEGQVRACQRFAKEHDMTVIEIYADRGLSGLHADNRPEFQRMIADSDRHKFQALIMWNLDRFSRDKYDTAVYKSRLKKNGVTLYYSDQNIPDTPEGIILESLLEGFAQYYSANLSRNAKRGLQENARKCLWNGGGLPLGYTIDETKHFVIDPAGAACVRLIFQMYADNHSIKEIVSTLNEKGYRTVKGNKFRLGSIQGVLRNRKYIGEYHASGITVPNGVPAIVDVELFNAVQEKIGVVSAAKARNKAEIPYLLTTKVFCGHCGSPMIGESGTGKGGSTYRYYKCSCRKNRKGQCDKRTEQKEWLEETVVAQTVEKFLHPDVIEDVSNACAAVLEQDCQNNALLKALNAQLADVEKSSRNLIKAIEAGVFTASMRERLAELEQQKEDITVQIAREQLRKPQLSAEQIAFFLRSFLDGDAHDPNFQERIIESLVRRVDVYDEGPGNRKLTVFYNLKKNNHSSVSVKCSDSESVGLPKRSVA

SEQ ID NO: 5926 - protein, 498 aa, Unknown
  Description of Unknown: Integrase B5927 sequence
  IPR036162,PS51737,IPR011109,PTHR30461,PS00397, PF00239,G3DSA:1.10.10.2600,IPR006119,SSF53041,cd00338, SM00857,IPR025827,IPR038109,PS51736,IPR006118, PF13408,G3DSA:3.40.50.1390,PF07508,Coil
MNQNESLKTAFGYIRVSTHMQEEISPEAQKHELQKWAKQHNILITQWFQDNGISGKKAENRTAFQNMIALAKEKDHPDYILAWKFSRFARNQEESIVYKSLLRKNGVQVVSISEPLPDGPFAPLIERIIEWMDEYYSIRLSGEVKRGMKEKAKKGGYQSAPPLGYRREKGDTVPAIYEPEAKIYRLIKKYFIQDEYNPTTIARTLNDQGYRTRQGNRFEARVIIYILRNPFYIGKIRWNRSSHGGYYENSPDEVIVSDGQHEPLCTNEEWDIISKRIKKYTPGSTGRRRSKTLLPHYLSGGLFRCPICGASMCYQRGVSKKLPRAYPYFCCWKYAKGIHSENVNVGSPKTEEALLNSLQEFVDHGHSNITYTVEKVEEPSGNDAAQYEQLLDKLAIRKQRAKEAYLDGIDTKEEYRENRELIDAEVKSIKEKLATLETAAVITTTEEFHVDIREIILKLKDDTLSTLEKHTALASILDYMEYDKERDEYSFYYKFEME

SEQ ID NO: 5927 - protein, 498 aa, Unknown
  Description of Unknown: Integrase B5928 sequence
  SM00857,G3DSA:1.10.10.2600,IPR036162,PF13408,PS51737, IPR025827,G3DSA:3.40.50.1390,IPR006119,IPR038109,PF07508, SSF53041,IPR011109,PF00239,PTHR30461,PS51736, Coil,cd00338
MTAVIYARYSSDNQREESIEGQIRECTAYAEKNGITVVKHYIDRALSAKTDNRPDFQQMIKDSEKRLFDIVLVWKLDRFARNRYDSAHYEYQLERNHVKLVSATEPISDSPAGIMVKSMLTGMAEYYSAELSEKVVRGMTENVLKGKYNGGTIPIGFKVDEEKFFQVDPLKAPFVVEAFQRYNDGATMKELMNWLNDSGVTTNRNQKFTYNSVQKLLTNKRYIGENHFKDIVMPDSIPAIVDKDLFEEVQQKIKKNSRAPARHKAEDDYLLTTKLFCGMCGAMMFGECGTGRNKVVHHYYKCATAKRFKTCKKKTVRKEWLEDLVIAETMKLIQDDAVIDAIVAEVMELQDQENTTLPLLEKQMREVENGIENMLNAIQAGVLTNSTKSRLEKLEAQQKELEIRIAEEKIARPRLSENQVRFWLTRFRKLDPNVKSHRETLINTFVNAVYLYDEKVLITFNYKDGTKTITFDEIAAKDAPEGNGSDLGCFAPPKKFNV

SEQ ID NO: 5928 - protein, 498 aa, Unknown
  Description of Unknown: Integrase B5929 sequence
  PTHR30461:SF3,IPR036162,PS51737,IPR011109,PTHR30461, PS00397,PF00239,G3DSA:1.10.10.2600,IPR006119,SSF53041, cd00338,SM00857,IPR025827,IPR038109,PS51736, IPR006118,PF13408,G3DSA:3.40.50.1390,PF07508,Coil
MSDIQPVKNGALYIRVSTHLQEELSPDAQKRLLMEYAEAHNIIVLKEHIYIDSGISGRSARQRPQFNNMIAEAKSKEHPFDVILVWKYSRFARNQEESIVYKSMLKRENVDVISVSEPISDDPFGSLIERIIEWMDEYYSIRLSGEVSRGMAENAMRGNYQARPPLGYRIPGYRQTPVIVPEEAELIQLIFDLYTEKKMGIFEIVRYLNEHGYQTGHKKPFQRRSVTYILKNPTYIGKTIWNQHDQDHKLRDKSEWIIADGKHEPIISKEQFDKAQKRIESTYKPAYRKPTFVCHHWLSSLLKCSSCGRTLVVKRTASKKKDRMYVNFQCYGYQKGICNTNQSISAIKLEPVIMHSLEDAITSGKIHFDVLNPTTLDSSQKQQLLTRLNEIEKKEERIKRAYRDGIDTLEEYKENKSIIQTEKEMLLKKIEHIEEPALSPEEAKPIMMDRIKNVYEVITNPDIGMEEKNKAARSIIEKIVFDRATGSVNIFFYLANCP

SEQ ID NO: 5929 - protein, 498 aa, Unknown
  Description of Unknown: Integrase B5930 sequence
  PTHR30461:SF3,SM00857,G3DSA:1.10.10.2600,IPR036162,PF13408, IPR025827,PS51737,G3DSA:3.40.50.1390,IPR006119,IPR038109, PF07508,IPR011109,SSF53041,PTHR30461,Coil, PS51736,cd00338,PF00239
MQAAAYARYSTEHQTESSIAYQMRKIEEYCNDHSITVIARYTDEAKSGTNTQRPAFQQLCKDAAQRKFDAVVIYDISRGSRDVSDWFGFRKQMAILGIQVISVEDRIGDILNPSDYLTELITVGLGQHHVLTSRQKSMDSIATKAKTGQFLGGTPNFGYNVVNGRYVINPAEAEIVQKIYRMYAAGKSYGEILAEIGEVRGKRGRVIGKNSLHYLLRNERYIGVYSWCKYHHKIMGKYAGNIPNENAVRIEDSIPAIIDKDTWEAVQIRMNDKKQRACNKAKRSYLLSGLIECTECGANYVGHTSTNKKGYSTRYYCCGNKYRNHTCYAKNLNAEELEVFVVQNLKQYLSDLDFSQMAQQVADEINGASVDLKAERKELADIIFQLNNGTKAILKGIDYPELQEEMFRLRVRKSELEDIIRRGEEKKPVSVEKLEQLFQNAVKQLDTDTKQICKSMVKIYAHPNGDCDLEVGVHISGCGSRQTILCTTFHYFCKKKIV

SEQ ID NO: 5930 - protein, 498 aa, Unknown
  Description of Unknown: Integrase B5931 sequence
  PTHR30461:SF3,SM00857,G3DSA:1.10.10.2600,IPR036162,PF13408, PS51737,G3DSA:3.40.50.1390,IPR025827,IPR006119,IPR038109, PF07508,IPR011109,SSF53041,PF00239,PTHR30461, PS51736,Coil,cd00338
MNAVIYARYSTRNQKELSIEGQLRECMAFAAQKKYTVIEKYIDRAMSAKTDSRPEFQRMVRDSAKKQFQVVLCYKLNRFSRDRYDSAVYKAALRKNGVRLVYVEEQIPQGPEGIILESVLEGLAEFYSAELAQNVNRGMYDTAMKCQSVGGHITFGYKIGPDKKYQIDDSAAPIVQRIFAMWNDGARMRDILDYVNVLGVKTTMGKPFCNSTIASIIRNRRYTGLYIWRDVEIPDGIPRLISDKVFQKAQNRSEMGRKRVRSGKPAVAYDLTTKLFCGLCEAAMIGESGTSGGNGEKYCYYTCLARKRDHACAKKNVRKDWIERNVVELTRRHVLRPEIINKIIDNILKIEQQDIEQGVMASLKAQEKEVNSSIKNIMKAIEQGAYSPIIQSRLNELEKQREDLQVSIARESMLHDSITRDQLQFLFAEFSDGDIANADYRRRLIDAFVNAVYLTDTDLTIVYNYKDGQERIFLADLPFPDEKTTLSDSSDNVDLGGA

SEQ ID NO: 5931 - protein, 498 aa, Unknown
  Description of Unknown: Integrase B5932 sequence
  cd00338,SM00857,G3DSA:1.10.10.2600,IPR036162,PS51737, G3DSA:3.40.50.1390,IPR006119,IPR038109,PF07508,SSF53041, IPR011109,PTHR30461,Coil,PF00239
MSEYLMYLRKSRQDDPNENVEEVLSKHEIQLQEYALRNFKYHIPEEDIYREVVSGETIDDRPMINELFKSIESGDIKGVLVIEPQRLTRGDMLDCGTVEHLFRYTNTLVVTPPKTYDLSDKYDRKLFEMELSRGSDFLDYTKEILERGRKASTRRGNYVHSIPPYGYDKVRINKDWTLVPNETESQYVKLAFKLFNDGLGCNGVAHKLDALGARTRNGKPFESCVVSQMLQNPVYIGKLKIGNRSTVKVVENGKLIKKRIRNKNYDVVDGKHEALIDADTFEKAQERFGSNTKENTSHELKNMYAGLMKCGICGKAIMIVPYSNTCKRVDRYKCRNSFNCGNISHRFDEINDAIVEGLKKHLHDFEVKYMEDTPADNEAKQTLLNSLKKNFEEIDKKMNSICEYLESGLYTADMFLSRKKALEEEKERLIVAIENTKKEMHSECDLEEKIITLHKALDMLNDDSISAKTKNRFLKTFIKVIYYKKTKEDGISLDIILL

SEQ ID NO: 5932 - protein, 498 aa, Unknown
  Description of Unknown: Integrase B5933 sequence
  SM00857,IPR006118,G3DSA:1.10.10.2600,IPR036162, PS51737,G3DSA:3.40.50.1390,IPR006119,IPR038109, PF07508,SSF53041,IPR011109,PF00239, PTHR30461,PS00397,PS51736,Coil,cd00338
MTPPKGFTSPVPAPLPDLRIAAAYIRVSTDEQVELSPASQLVEIRKWAARNGYIVPDEFVFMDEGISGRGVKKRDEFRRMIGVAKSKPKPFDAILLWKFSRFARNRDDAVMYKSILRKQLGIDVISISEPVAEGGMGLITEALIEAMDEYYSINLAQEVKRGMEEKHRRGEVQCAPPYGYGLKDHVYVPKPPEDDYVREIFRRYLAGEGFFPLARWLNSCGQRTHRGGKFENRTVEYILRNPVYIGKLRWNPAGRTRRDYANENVVLSDGKHVPLIDEETFNAVQRRIDEQKLLYPKYSRQSWTQKHWVSGLVHCAACGGSLVVNTPEHLVCKNYIHGSCLVRQSIRRDVLEDALLSRFREDAARGSSPEFEVVRSGDNGVSAMAALEASRDSAVRMLDRLRDAYLTGADTVEEYKASKAAVQQRIADLDAQIAAMQKEDRAAADPKLLRSALRAVVKTLQSSDATVAEKNAAVRSVAENITWNKAANTLTVHYRLVL

SEQ ID NO: 5933 - protein, 498 aa, Unknown
  Description of Unknown: Integrase B5934 sequence
  PTHR30461:SF3,SM00857,G3DSA:1.10.10.2600,IPR036162,PF13408, IPR025827,G3DSA:3.40.50.1390,PS51737,IPR006119,IPR038109, PF07508,SSF53041,IPR011109,PTHR30461,Coil, PS51736,cd00338,PF00239
MNTVIYARYSAGPRQTDQSIEGQLRVCTDFCKQRGLTVIDTYCDRHISGRTDERPEFQRLITDAKRKKFEAVVVYKTDRFARNKYDSAVYKRELKRNGIQIFYAAEAIPDGPEGIILESLMEGLAEYYSAELAQKIKRGMHESALKCQSTGSGRPLGYRVDEQKHFQIDPESAQTVQTIFEQYIKGESNAAICELLNSRGLRTAQGKPFNKNSINRIIKNRKYIGEYRYHDIVVEGGMPAIISKDTFNLAQAEMERRRTRKAPKSPKAEYLLAGRLFCGHCKGPMQGVSGTGKSGNKWYYYYCGNTRGENKTCDKKQVSRDRLERAVVDFTVRYILQEEVLEELARKVHAAQERQNDTASEIAFYEKKLADNKKSIANVLRAIESGAMTQTLPARLQELENEQAVILGEISFLKGKRLAFTEDQIFFALMKHLEPYPGESEQDYRRRIISDFVSEVYLYDDRLLIYFNISSEDGKLKSADLSNIEGGEFDEGLVSSTK

SEQ ID NO: 5934 - protein, 498 aa, Unknown
  Description of Unknown: Integrase B5935 sequence
  IPR036162,PS51737,IPR011109,PTHR30461,PS00397, PF00239,G3DSA:1.10.10.2600,IPR006119,SSF53041,cd00338, SM00857,IPR025827,IPR038109,PS51736,IPR006118, PF13408,G3DSA:3.40.50.1390,PF07508,Coil
MTPPKGFTSSVHAPLPDLRIAAAYIRVSTDEQVELSPASQLVEIRKWAARNGYIVPDEFVFMDEGISGRGVKKRDEFRRMIGVAKSKPKPFDAILLWKFSRFARNRDDAVMYKSILRKQLGIDVISISEPVAEGGMGLITEALIEAMDEYYSINLAQEVKRGMEEKHRRGEVQCAPPYGYGLKDHVYVPKPPEDDYVRELFRRYLAGEGFFPLARWLNSCGQRTHRGGKFENRTIEYILRNPVYIGKLRWNAAGHTRRDYANENVVLSDGKHEPLIDEETFNAVQHRIDEQKLLYPKFSRRSGTQKYWVSGLVHCAACGGTLVANTPEYMVCNNYIRGACLVRQSIRRDVLEDALLSRLREDAARGSSPEFEVVRSGDGGMSAMAALEASRDSAARMLDRLRDAYLTGADTVEEYKASKAAVQQRIADLDAQISAMQKEDRAAANPKLLRSALRAVVKTLQSPDATAAEKNAAVRSVVDTIAWNKAANTLTVHYRLVL

SEQ ID NO: 5935 - protein, 498 aa, Unknown
  Description of Unknown: Integrase B5936 sequence
  SM00857,IPR006118,G3DSA:1.10.10.2600,IPR036162,PS51737, G3DSA:3.40.50.1390,IPR006119,IPR038109,PF07508,SSF53041, IPR011109,PF00239,PTHR30461,PS00397,PS51736, Coil,cd00338
MTPPKGFTSPVPAPLPNLRIAAAYIRVSTDEQVELSPASQLVEIRKWAARNGYIVPDEFVFMDEGISGRGVKKRDEFRRMIGVAKSKPKPFDAILLWKFSRFARNRDDAVMYKSILRKQLGIDVISISEPVAEGGMGLITEALIEAMDEYYSINLAQEVKRGMEEKHRRGEVQCAPPYGYGLKDHVYVPKPPEDDYVREIFRRYLAGEGFFPLARWLNSCGQRTHRGGKFENRTVEYILRNPVYIGKLRWNPTGRTRRDYKNENVVLSDGKHAPLIDEETFSAVQRRIDEQKLLYPKYSRQSWTQKHWVSGLVHCAACGGSLVVNTPEHLVCKNYIHGSCLVRQSIRRDVLEDALLSRFREDAARGSSPEFEVVRSGDNGVSAMAALEASRDSAARMLDRLRDAYLTGADTVEEYKASKAAVQQRIADLDAQIAAMQKEDRAAADPKLLRSALRSVVKTLQSPDATVAEKNAAVRSVAENITWNKAANTLTVHYRLVL

SEQ ID NO: 5936 - protein, 498 aa, Unknown
  Description of Unknown: Integrase B5937 sequence
  cd03768,PTHR30461:SF3,SM00857,G3DSA:1.10.10.2600,IPR036162, PF13408,PS51737,IPR025827,G3DSA:3.40.50.1390,IPR006119, IPR038109,PF07508,IPR011109,SSF53041,PTHR30461, PS51736,Coil,PF00239
MNNRIDAIYARQSVDKKDSISIESQIEFCKYELKGGNCKEYTDKGYSGKNTDRPKFQELVRDIKRGLIAKVIVYKLDRISRSILDFANMMELFQQYDVEFVSSTEKFDTSTPMGRAMLNICIVFAQLERETIQKRVADSYYSRSLKGFRMGGKAPYGFHTEPIKIDGINTKKLVANPEEAEQVKLMFEMYAEPGTSYGDIVRHFAEHGIKDFSRPALASLLCNPIYVKADLDIYEFFKSQGTVIINDAADFTGTNGCYFYRGRGMKGDTKHNLQGHTLVMAPSEGLVSSELWLKCRKKILANASYQAGRKAVNTWLAGKIKCGRCQKALKAEGSYGRWYFRCSKRSDNKSCEGAGTLRIPDTEAIIYAAMVKKLKPFQTIKGRKNAMKSNPKLTALQVELAQVQHEIETLIDTLTGANPILLSYVNSKIEELDGRKQELVKKIAELSVDTISPEQVKEISGYLDTWEEVDFDDKRRVVDLMISAIYATSESINIVWKI

SEQ ID NO: 5937 - protein, 498 aa, Unknown
  Description of Unknown: Integrase B5938 sequence
  PTHR30461:SF3,cd00338,SM00857,G3DSA:1.10.10.2600,IPR036162, PF13408,PS51737,G3DSA:3.40.50.1390,IPR025827,IPR006119, IPR038109,PF07508,IPR011109,SSF53041,PTHR30461, PS51736,Coil,PF00239
MKRAVFYGRYSSDRQTEQSIEGQRRVCEEFAKAEQIQIVGEYIDRATSGTSTEHREQFQKMLKDSKNGGWDYVLVYKLDRFARSRYDSAISKQQLKKNGVKVLSATERITDSPEGILIEGLLESMDEYFSRELSRKCKRGIRESIIKGHNFGGRVLYGYDRKDKRFVINEEQAVNVRRIFKSYLSGCTIQSIADQLNADGYRTNYGNEFKRYTVSDILHNDKYTGIHYIDGIEEPETCPAIISQTTFERVKEKLNQSAHRSREHATGHTYALSGLLQCGVCGRYVCGSSVERKYFYYACRSREHAENSVHIHADKLEQVVIDALQTFFTEEQVSTLAERLYQIYTTDMDGKPDRSKRLNEIEKQIQGTVNALIACPSSKALQEKLTQLEEQKAEIEKMPILQPQLKKEHFENYFHWLALRLEHIEDRQTFFHTVIHKVLVYPEKAVIILNMTDEMADPPKREQVEAFMSNVGEVSPCPTLYKLYVTSFAIFIRAALIK

SEQ ID NO: 5938 - protein, 498 aa, Unknown
  Description of Unknown: Integrase B5939 sequence
  IPR036162,PS51737,IPR011109,PTHR30461,PS00397, PF00239,G3DSA:1.10.10.2600,IPR006119,SSF53041,cd00338, SM00857,IPR025827,IPR038109,PS51736,IPR006118, PF13408,G3DSA:3.40.50.1390,PF07508,Coil
MTPPKGFTSSVHAPLPVIRIAAAYIRVSTDEQVELSPASQLVEIRKWAARNGYIVPDEFVFMDEGISGRGVKKRDEFRRMIGVAKSKPKPFDAILLWKFSRFARNRDDAVMYKSILRKQLGIDVISISEPVAEGGMGLITEALIEAMDEYYSINLAQEVKRGMEEKHRRGEVQCAPPYGYGLKDHVYVPKPPEDDYVRELFHRYLAGEGFFPLARWLNSCGQRTHRGGKFENRTIEYILRNPVYIGKLRWNAAGHTRRDYANENVVLSDGKHEPLIDEETFNAVQHRIDEQKLLYPKFSRRSGTQKYWVSGLVHCAACGGTLVANTPEYMVCNNYIRGACLVRQSIRRDVLEDALLSRLREDAARGSSPEFEVVRSGDGGMSAMTALEASRDSAARMLDRLRDAYLTGADTVEEYKASKAAVQQRIADLDAQIAAMQKEDKAAADPKLLRSALRSVVKTLQSPDATVAEKNAAVRSVAENITWNKAANTLTVHYRLVL

SEQ ID NO: 5939 - protein, 498 aa, Unknown
  Description of Unknown: Integrase B5940 sequence
  IPR036162,PS51737,IPR011109,PTHR30461,PS00397, PF00239,G3DSA:1.10.10.2600,IPR006119,SSF53041,cd00338, SM00857,IPR025827,IPR038109,PS51736,IPR006118, PF13408,G3DSA:3.40.50.1390,PF07508,Coil
MNQNESLKTAFGYIRVSTHMQEEISPEAQKHELQKWAKQHNILITQWFQDNGISGKKAENRTAFQNMIALAKEKDHPDYILAWKFSRFARNQEESIVYKSLLRKNGVQVVSISEPLPDGPFAPLIERIIEWMDEYYSIRLSGEVKRGMKEKAKKGGYQSAPPLGYRREKGDTVPAIYEPEAKIYRLIKKYFIQDEYNPTTIARTLNDQGYRTRQGNRFEARVIIYILRNPFYIGKIRWNRSSHGGYYENSPDEVIVSDGQHEPLCTNEEWDIISKRIKKYTPGSTGRRRSKTLLPHYLSGGLFRCPICGASMCYQRGVSKKLPRAYPYFCCWKYAKGIHSENVNVGSPKTEEALLNSLQEFVDHGHSNITYTVEKVEEPSGNDAAQYEQLLDKLAIQKQRAKEAYLDGIDTKEEYRENRELIDAEVKSIKEKLATLETAAVITTTEEFHVDIREIILKLKDDTLSTLEKHTALASILDYMEYDKERDEYSFYYKFEME

SEQ ID NO: 5940 - protein, 498 aa, Unknown
  Description of Unknown: Integrase B5941 sequence
  IPR036162,PS51737,IPR011109,PTHR30461,PS00397, PF00239,G3DSA:1.10.10.2600,IPR006119,SSF53041,cd00338, SM00857,IPR025827,IPR038109,PS51736,IPR006118, PF13408,G3DSA:3.40.50.1390,PF07508,Coil
MTPPKGFSSSAHAPLPDLRIAAAYIRVSTDDQVELSPASQLVEIRKWAARNGYIVPDEFVFMDEGISGRGVKKRDEFRRMIGVAKTKPKPFDAILLWKFSRFARNRDDAVMYKSILRKQLGIDVISISEPVAEGGMGLITEALIEAMDEYYSINLAQEVKRGMEEKHRRGEVQSNPPYGYGIKDHVFVPKPPEDGFVKELFRRYLAGEGCFPLARWMNECGQRTHRGGRFENRTIEYILRNPVYIGKLRWNPAGRTRRDFSNENVVLVDGKHEPLIDEETFNAVQRRIDEQKLLYPRYARASGTQKHWISGLVRCAACGGGLIVNTPDYMACNNYVRGSCRVRQTVRRDALEAALISRLREDAARGSSLTFDVVRSSDGSASSLSAVEAARDSAVRMLDRLRDAYLTGADTVEEYKASKAAVQQRIADLDAQIAAMQKEDRAAADPKLLRSALRAVVKTLESPDTTVAEKNAAVRSVADNITWNKAANTLTIHYRLVL

SEQ ID NO: 5941 - protein, 498 aa, Unknown
  Description of Unknown: Integrase B5942 sequence
  cd03768,PTHR30461:SF3,SM00857,G3DSA:1.10.10.2600,IPR036162, PF13408,PS51737,G3DSA:3.40.50.1390,IPR025827,IPR006119, IPR038109,PF07508,SSF53041,IPR011109,PTHR30461, PS51736,Coil,PF00239
MKIAIYTRKSVAVERSESIQTQIEMCKKYFKGKNEFEIFEDEGFSGGNTNRPSFKKMMSLVKLGKFDAVAVYKVDRIARNIVDFFKIFDELEKYNVKLISITEGFDPSTPSGKMMMVMLAGFADMERENIRQRVKDNMIALAKKGCYTGGFVPFGCVTVNIEGKSYLQVKDKDLIKLIFKKYYELGSLYSTQKYLKENGFKTLSNRSSLNRILRNPVYAKSSKEINDYFKTNGYLVHGTPNGKGYITYGKTVNESMLIVSNHSAPISSELFLKVNKMLDEKRDNVAKRFSKTYWLTGTLYCPFCEGKYTIANSNRKTYYMCSNRLNRKNDDTGLDTKKEKCINNKYINAEVLEKKVEELIKRLEASELFEKYYKTSVENNEDNEDNEIDILRKTFNENELAIKNLIDKLALVSNEASRYIVEKIDSLTEKNKEISLSIDNLKLKRLEKSVKITKEEVKELIVRFNKISDVNEKRMMLNKIFEKLAYNPFEDTLDIYFN

SEQ ID NO: 5942 - protein, 498 aa, Unknown
  Description of Unknown: Integrase B5943 sequence
  SM00857,G3DSA:1.10.10.2600,IPR036162,PF13408,IPR025827, G3DSA:3.40.50.1390,PS51737,IPR006119,IPR038109,PF07508, SSF53041,IPR011109,PTHR30461,PS51736,cd00338, PF00239
MVKNRAAIYARFSSHNQRSESIEIQVENSRAYCEREGLQVVREYCDYAQTGRNVNRAEFQRMMNDAKLGLFDFVVIYKVTRIMRNRDEMALARIMLRKAGVEILYAGEEIASGSSGVLQLGMLEVLAEWESAIDSERIRDGIQKNAARCLANGHSLYGWDIVDGRYSVNEREAALMRKMKNMLFSGHSVADIVRALEGEKTRNGKPFNQDKVTKLLRRVQNGGTYSYAGHVVEGGMPGLWPQAEQDMIESVLNDRHRPRRKVDSSKEFPLSGKLYCTKCGMPMAGMSGTSKTGKAYHYYRCRKCRRTVRRDLIEDAVVDMTLQAVARDDVRQRIAQGMALYQSEQEETKPESYYLKKELRRIDAAFERIWQAIENGIAPPGGKERTDELKRRKSEIEAQLRIVERGESLTFGVDELMLWLDEIATELTPLDILNKFVRFAEIDSKNNRVRVYFAFDKHGDGFTPNDVDKGEHLYEERCSPNSTLVEARRIELRSTKAP

SEQ ID NO: 5943 - protein, 498 aa, Unknown
  Description of Unknown: Integrase B5944 sequence
  PTHR30461:SF3,SM00857,G3DSA:1.10.10.2600,IPR036162,PF13408, IPR025827,G3DSA:3.40.50.1390,PS51737,IPR006119,IPR038109, PF07508,SSF53041,IPR011109,PTHR30461,Coil, PS51736,cd00338,PF00239
MKKAVIYARYSSDMQREESIDAQVRACTYYAHQYQFEILRTYADRAQTGKRTKNREQFLQMIADAESHEFEVILVHKLNRFGRNTLEVLEYKDSLEDMGIELISVTERLESTPEGKLMLIIIAGMNEFYSDNLSQEVMKGLKENAYQCKFTGGTPPLGYKVDPESKKLIIDEDEAVIVRLIFQRYANGYGYNSIINELTSLGYHTKSGKLFGKNSLYELLRNEKYIGVYTYNRAAKRKKDGTRNYHSYKDSSDIIRIPGGCPALVDQKTWHCVQKIMEQNKKVHLQQHGQRVYILSGKVFCGLCGAKMYGNCKTTRGKIHYYYVCSNGWRKHTCSSRHIPAEELEEEVIEILEKKIFTLEFSKEVSEQLQNNIQKNQEITQKQRGSISAQLQNVNSKIKNLLNLLARGIDFDELEETLSSLKQEKENLIRSLEVLDQQPKALLHQDFTQNLSKLRDLRPREQSTFLQQYIDKITVFAPKGSNEKVEVEIYIQSNIIQK

SEQ ID NO: 5944 - protein, 498 aa, Unknown
  Description of Unknown: Integrase B5945 sequence
  PTHR30461:SF3,cd00338,SM00857,G3DSA:1.10.10.2600,IPR036162, PF13408,IPR025827,PS51737,G3DSA:3.40.50.1390,IPR006119, IPR038109,PF07508,SSF53041,IPR011109,PTHR30461, PS51736,Coil,PF00239
MYEDIKTACLYVRFSSHNQTEQSIEGQTRVCRDFCKRHNIRIVEIYADRATSASKDIEKRVQFLKMIKDSEKGLFDAVIVYKLDRFARSRYDSATYKYRLKRNGVQLISATENISNDPEGIILESVLEGMAEFYSAELSQKINRGMRESAYKHNSIGGAIPLGYKIEDKKLVIDPKTAPIVKEAFEKYADGETVAEICRQFNARGYKTSKGTAFGKSSFTKIFRNERYIGVYTFHDYRAEDAIPAIIDKDLWDRVQLRVGKIKNAPARNKAKVVYLLSGKIFCGHCGSKMNGNCNAGNYCYYQCYGKKNGNVDCKKKNIRKEFIERLVAQDALSLLTDEYIEQIATIACEKNQHEIELDSALPTIRDRIHQVDLSLNNLLKAIESGSAPDMLVKRMGELEKEKKDLQVQAKKESEDIVELDKAQVIYWLEQFRGGSIEDEEFCRMLIDLFVNSVTVWDEDDGSYKVTVAYNLTSLPTKTYRLNKGGTLSDFTSNAPAL

SEQ ID NO: 5945 - protein, 498 aa, Unknown
  Description of Unknown: Integrase B5946 sequence
  PTHR30461:SF3,cd00338,SM00857,G3DSA:1.10.10.2600,IPR036162, PF13408,PS51737,G3DSA:3.40.50.1390,IPR025827,IPR006119, IPR038109,PF07508,IPR011109,SSF53041,PTHR30461, PS51736,Coil,PF00239
MKRAVFYGRYSSDRQTEQSIEGQRRVCEEFAKAEQIQIVGEYIDRATSGTSTEHREQFQKMLKDSKNGGWDYVLVYKLDRFARSRYDSAISKQQLKKNGVKVLSATERITDSPEGILIEGLLESMDEYFSRELSRKCKRGIRESIIKGHNFGGRVLYGYDRKDKRFVINEEQAVNVRRIFKSYLSGCTIQSIADQLNADGYRTNYGNEFKRYTVSDILHNDKYTGIHYIDGIEEPETCPAIISQTTFERVKEKLNQSAHRSREHATGHTYALSGLLQCGVCGRYVCGSSVERKYFYYACRSREHAENSVHIHADKLEQVVIDALQTFFTEEQVSTLAERLYQIYTTDMDGKPDRSKRLNEIEKQIQGTVNALIACPSSKALQEKLTQLEEQKAEIEKMPILQPQLKKEHFENYFRWLALRLEHIEDRQTFFHTVIHKVLVYPEKAVIILNMTDEMADPPKREQVEAFMSNVGEVSPCPTLYKLYVTPFAIFIHAALIK

SEQ ID NO: 5946 - protein, 498 aa, Unknown
  Description of Unknown: Integrase B5947 sequence
  PTHR30461:SF3,cd00338,SM00857,G3DSA:1.10.10.2600,IPR036162, PF13408,PS51737,G3DSA:3.40.50.1390,IPR025827,IPR006119, IPR038109,PF07508,IPR011109,SSF53041,PTHR30461, PS51736,Coil,PF00239
MKRAVFYGRYSSDRQTEQSIEGQRRVCEEFAKAEQIQIVGEYIDRATSGTSTEHREQFQKMLKDSKNGGWDYVLVYKLDRFARSRYDSAISKQQLKKNGVKVLSATERITDSPEGILIEGLLESMDEYFSRELSRKCKRGIRESIIKGHNFGGRVLYGYDRKDKRFVINEEQAVNVRRIFKSYLSGCTIQSIADQLNADGYRTNYGNEFKRYTVSDILHNDKYTGIHYIDGIEEPETCPAIISQTTFERVKEKLNQSSHRSREHATGHTYALSGLLQCGVCGRYVCGSSVERKYFYYACRSREHAENSVHIHADKLEQVVIDALQTFFTEEQVSTLAERLYQIYTTDMDGKPDRSKRLNEIEKQIQGTVNALIACPSSKALQEKLTQLEEQKAEIEKMPILQPQLKKEHFENYFRWLALRLEHIEDRQTFFHTVIHKVLVYPEKAVIILNMTDEMADPPKREQVEAFMSNVGEVSPCPTLYKLYVTPFAIFIRAALIK

SEQ ID NO: 5947 - protein, 498 aa, Unknown
  Description of Unknown: Integrase B5948 sequence
  IPR036162,PS51737,IPR011109,PTHR30461,PS00397, PF00239,G3DSA:1.10.10.2600,IPR006119,SSF53041,cd00338, SM00857,IPR025827,IPR038109,PS51736,IPR006118, PF13408,G3DSA:3.40.50.1390,PF07508,Coil
MTPPKGFSSSAHAPLPDLRIAAAYIRVSTDDQVELSPASQLVEIRKWASRNGYIVPDEFVFMDEGISGRGVKKRDEFRRMIGVAKTKPKPFDAILLWKFSRFARNRDDAVMYKSILRKQLGIDVISISEPVAEGGMGLITEALIEAMDEYYSINLAQEVKRGMEEKHRRGEVQSNPPYGYGIKDHVFVPKPPEDGFVKELFRRYLAGEGCFPLARWMNECGQRTHRGGRFENRTIEYILRNPVYIGKLRWNPAGRTRRDFANENVVLVDGKHEPLIDEETFNAVQRRIDEQKLLYPRYARASGTQKHWISGLVRCAACGGGLIVNTPDYMACNNYVRGSCRVRQTVRRDALEAALISRLREDAARGSSLTFDVVRSSDGSASSLSAVEAARDSAVRMLDRLRDAYLTGADTVEEYKASKAAVQQRIADLDAQIAAMQKEDRAAADPKLLRSALRAVVKTLESPDATVAEKNAAVRSVTDNITWNKAANTLTIHYRLVL

SEQ ID NO: 5948 - protein, 498 aa, Unknown
  Description of Unknown: Integrase B5949 sequence
  IPR036162,PS51737,IPR011109,PTHR30461,PS00397, PF00239,G3DSA:1.10.10.2600,IPR006119,SSF53041,cd00338, SM00857,IPR025827,IPR038109,PS51736,IPR006118, PF13408,G3DSA:3.40.50.1390,PF07508,Coil
MTPPKGFTSPVPAPLPDLRIAAAYIRVSTDEQVELSPASQLVEIRKWAARNGYIVPDEFVFMDEGISGRGVKKRDEFRRMIGVAKSKPKPFDAILLWKFSRFARNRDDAVMYKSILRKQLGIDVISISEPVAEGGMGLITEALIEAMDEYYSINLAQEVKRGMEEKHRRGEVQCAPPYGYGLKDHVYVPKPPEDDYVREIFRRYLAGEGFFPLARWLNSCGQRTHRGGKFENRTVEYILRNPVYIGKLRWNTTGRTRRDYANENVVLSDGKHVPLIDEETFSAVQRRIDEQKLLYPKYSRQSWTQKHWVSGLVHCAACGGSLVVNTPEYLVCKNYIHGSCLVRQSIRRDVLEDALLSRFREDAARGSSPEFEVVRSGDNGVSAMAALEASRDSAARMLDRLRDAYLTGADTVEEYKASKAAVQQRIADLDAQIAAMQKEDKAAADPKLLRSALRSVVKTLQSPDATVAEKNAAVRSVAENITWNKAANTLTVHYRLVL

SEQ ID NO: 5949 - protein, 498 aa, Unknown
  Description of Unknown: Integrase B5950 sequence
  IPR036162,PS51737,IPR011109,PTHR30461,PS00397, PF00239,G3DSA:1.10.10.2600,IPR006119,SSF53041,cd00338, SM00857,IPR025827,IPR038109,PS51736,IPR006118, PF13408,G3DSA:3.40.50.1390,PF07508,Coil
MNQNESLKTAFGYIRVSTHMQEEISPEAQKHELQKWAKQHNILITQWFQDNGISGKKAENRTAFQNMIALAKEKDHPDYILAWKFSRFARNQEESIVYKSLLRKNNVQVVSISEPLPDGPFAPLIERIIEWMDEYYSIRLSGEVKRGMKEKAKKGGYQSAPPLGYRREKGDTVPAIYEPEAKIYRLIKKYFIQDEYNPTTIARTLNDQGYRTRQGNRFEARVVIYILRNPFYIGKIRWNRSSHGGYYENSPEDVIVSDGQHEPLCTSEEWDTISKRIKKYTPGSTGRRRSKTLLPHYLSGGLFRCPICGASMCYQRGVSKKLPRAYPYFCCWKYAKGIHSENVNASAPKTEEALLNSLQEFVDHGHSDITYTVEKVEEPSGNNAAQYEQLLDKLAIRKQRAKEAYLDGIDTKEEYRENRELIDAEVKSIKEKLATLETAAVITTTEEFHVDIREIILKLKDDTLSTLEKHTALASILDYMEYDKEKDEYSFYYKFEAE

SEQ ID NO: 5950 - protein, 498 aa, Unknown
  Description of Unknown: Integrase B5951 sequence
  IPR036162,PS51737,IPR011109,PTHR30461,PS00397, PF00239,G3DSA:1.10.10.2600,IPR006119,SSF53041,cd00338, SM00857,IPR025827,IPR038109,PS51736,IPR006118, PF13408,G3DSA:3.40.50.1390,PF07508,Coil
MTPPKGFTSPAPAPLPDLRIAAAYIRVSTDEQVELSPASQLVEIRKWAARNGYIVPDEFVFMDEGISGRGVKKRDEFRRMIGVAKSKPKPFDAILLWKFSRFARNRDDAVMYKSILRKQLGIDVISISEPVAEGGMGLITEALIEAMDEYYSINLAQEVKRGMEEKHRRGEVQCAPPYGYGLKDHVYVPKPPEDDYVREIFRRYLAGEGFFPLARWLNSCGQRTHRGGKFENRTVEYILRNPVYIGKLRWNPTGRTRRDYKNENVVLSDGKHVPLIDEETFNAVQRRIDEQKLLYPKYSRQSWTQKHWVSGLVHCAACGGSLVVNTPEYLVCKNYIHGSCLVRQSIRRDVLEDALLSRFREDAARGSSPEFEVVRSGDNGVSAMAALEASRDSAVRMLDRLRDAYLTGADTVEEYKASKAAVQQRIADLDAQIAAMQKEDRAAADPKLLRSALRAVVKTLQSSDATVAEKNAAVRSVAENITWNKAANTLTVHYRLVL

SEQ ID NO: 5951 - protein, 498 aa, Unknown
  Description of Unknown: Integrase B5952 sequence
  IPR036162,PS51737,IPR011109,PTHR30461,PS00397, PF00239,G3DSA:1.10.10.2600,IPR006119,SSF53041,cd00338, SM00857,IPR025827,IPR038109,PS51736,IPR006118, PF13408,G3DSA:3.40.50.1390,PF07508,Coil
MNQNESLKTAFGYIRVSTHMQEEISPEAQKHELQKWAKQHNILITQWFQDNGISGKKAENRTAFQNMIALAKEKDHPDYILAWKFSRFARNQEESIVYKSLLRKNNVQVVSISEPLPDGPFAPLIERIIEWMDEYYSIRLSGEVKRGMKEKAKKGGYQSAPPLGYRREKGDTVPVIYEPEAKIYRLIKKYFIQDEYNPTTIARTLNDQGYRTRQGNRFEARVIIYILRNPFYIGKIRWNRSSHGGYYENSPEDVIVSDGQHEPLCTNEEWDIISKRIKKYTPGSTGRRRSKTLLPHYLSGGLFRCPICGASMCYQRGVSKKLPRAYPYFCCWKYAKGIHSENVNASAPKTEDALLNSLQEFVDHGHSNITYTVEKVEEPSGNDAAQYEQLLDKLAIRKQRAKEAYLDGIDTKEEYRENRELIDAEVKSIKEKLATLETAAVITTTEEFHVDIREIILKLKDNTLSTLEKHTALASILDYMEYDKEKDEYSFYYKFEAE

SEQ ID NO: 5952 - protein, 498 aa, Unknown
  Description of Unknown: Integrase B5953 sequence
  PTHR30461:SF3,cd00338,SM00857,G3DSA:1.10.10.2600,IPR036162, PF13408,IPR025827,PS51737,G3DSA:3.40.50.1390,IPR006119, IPR038109,PF07508,IPR011109,SSF53041,PTHR30461, PS51736,Coil,PF00239
MKRAVFYGRYSSDRQTEQSIEGQRRVCEEFAKAEQIQIVGEYIDRATSGTSTEHREQFQKMLKDSKNCGWDYVLVYKLDRFARSRYDSAISKQQLKKNGVKVLSATERITDSPEGILIEGLLESMDEYFSRELSRKCKRGIRESIIKGHNFGGRVLYGYDRKDKRFVINEEQAVNVRRIFKSYLSGCTIQSIADQLNADGYRTNYGNEFKRYTVSDILHNDKYTGIHYIDGIEEPETCPAIISQTTFERVKEKLNQSAHRSREHTTGHTYALSGLLQCGVCGRYVCGSSVERKYFYYACRSREHAENSVHIHADKLEQVVIDALQTFFTEEQVSTLAERLYQIYTTDMDGKPDRSKRLNEIEKQIQGTVNALIACPSSKALQEKLTQLEEQKAEIEKMPILQPQLKKEHFENYFRWLALRLEHIEDRQTFFHTVIHKVLVYPEKAVIILNMTDEMADPPKREQVEAFMSNVGEVSPCPTLYKLYVTPFAIFIRAALIK

SEQ ID NO: 5953 - protein, 498 aa, Unknown
  Description of Unknown: Integrase B5954 sequence
  PTHR30461:SF3,IPR036162,PS51737,IPR011109,PTHR30461, PS00397,PF00239,G3DSA:1.10.10.2600,IPR006119,SSF53041, SM00857,IPR025827,IPR038109,PS51736,cd03768, IPR006118,PF13408,G3DSA:3.40.50.1390,PF07508,Coil
MDSARLRVACYVRVSTREQAEKGYSVSEQQERLKAYCLAKDWVVAQVITDPGFSGAKLERPGMQQLISLVQTKKCGAVLVWKLDRLSRSQKDTLYLIEDVFLKNGCAFVSMNENFDTSTAFGRAMIGILSVFAQLEREQIRERMAVGRVGRAKAGLFHGGGYAPIGYDYKTIAEGGDGLVVNEYEAMQVREVFSLYLQGWPVNRIRKYMAAHYTTKDGDWGSDTTVRDVLKNPLYTGKINWAKKVYDGQHEPLISQETFDAAAARLATSSWKRTCSDGMERNSPFKSTHLLGGIIWCARCGARYFASGNYSGRGENKRYWPYYVCYSRAKSAKHMIRDPNCQNDRWAVAKLDAIIEGEIRKLAFDPAALELAVSGPQQDEDVAQRRAALQQRLNDLRAQMGRVLDLYQMGGSLPASMVGDRVAKLQAEIDGVEAALAEAVEEPPTQRLDAARAALVGAEDVLDNGTLDERRELVHSLIRRIDLDGENIDIHWSFSPEA

SEQ ID NO: 5954 - protein, 498 aa, Unknown
  Description of Unknown: Integrase B5955 sequence
  PTHR30461:SF3,IPR036162,PS51737,IPR011109,PTHR30461, PF00239,G3DSA:1.10.10.2600,IPR006119,SSF53041,cd00338, SM00857,IPR025827,IPR038109,PS51736,mobidb-lite, PF13408,G3DSA:3.40.50.1390,PF07508,Coil
MEEKLRAAAYGRVSTNSKEQTHSFENQSEYWSKKLANDAKYEYVGLYADKGISGRHLHCRPQMLALLDACRRGEVQIIFTKSVQRFARNTVELLETVRELRDMNVAVIFEKENINTLTAESELYLTIAAAVAEEDLNRYGENVAWTIKDRFEKGDISVVGIRMLGYRMKNKEFEIIPHEAEVVKEMFELYATGNYSTRVLADIMNKSGYRTMHGCLWTQQHILQTLTNEKYKGDSLLYKRTNVNGQQVMNRGVKDMLYVENSHDAIVSPELWNKVAEVINARGNMKLRGKTIDRYPFTSLIKCPICGQSYIHKINNSGTKYTCPIWKCRTLLADGKKGCSNSGIKDSVLKEKFIEAYNEFIENRNFGNDEDAAERELKKLNAEENELISLHVRGLISKHDYEHDKNDIRARRKALEQKVRDYRQAHIKRGAAKPINEFDEELVGRLIKGVTIKDYVVTFEFYNGVTISRAYTNGPSGNQKGWKEKKRLKEAQTNGSSN

SEQ ID NO: 5955 - protein, 498 aa, Unknown
  Description of Unknown: Integrase B5956 sequence
  PTHR30461:SF3,IPR036162,PS51737,IPR011109,PTHR30461, PS00397,PF00239,G3DSA:1.10.10.2600,IPR006119,SSF53041, cd00338,SM00857,IPR025827,IPR038109,PS51736, IPR006118,PF13408,G3DSA:3.40.50.1390,PF07508,Coil
MADIQPVKNGALYIRVSTHLQEELSPDAQKRLLMEYAEAHNIIVLKEHIYIDSGISGRSARQRPQFNNMIAEAKSKEHPFDVILVWKYSRFARNQEESIVYKSMLKRENVDVISVSEPISDDPFGSLIERIIEWMDEYYSIRLSGEVSRGMAENAMRGNYQARPPLGYRIPGYRQTPVIVPEEAELIQLIFDLYTEKKMGIFEIVRYLNEHGYQTGHKKPFQRRSVTYILKNPTYIGKTIWNQHDQDHKLRDKSEWIIADGKHEPIISKEQFDKAQKRIESTYKPAYRKPTSVCHHWLSSLLKCSSCGRTLVVKRTASKKKDRMYVNFQCYGYQKGICNTNQSISAIKLEPVIMHSLEDAITSGKIHFDVLNPTTLDSSQKQQLLTRLNEIEKKEERIKRAYRDGIDTLEEYKENKSIIQTEKEMLLKKIEHIEEPALSPEEAKPIMMDRIKNVYEVITNPDIGMEEKNKAARSIIEKIVFDRATGSVNIFFYLANCP

SEQ ID NO: 5956 - protein, 498 aa, Unknown
  Description of Unknown: Integrase B5957 sequence
  cd00338,SM00857,G3DSA:1.10.10.2600,IPR036162,PS51737, G3DSA:3.40.50.1390,IPR006119,IPR038109,PF07508,IPR011109, SSF53041,PTHR30461,PS51736,Coil,PF00239
MTQKTAVIYARFSCSKQREASIDDQLRVCREWCDREGYEVVREYSDYAMSGRSDDRPQFQEMIANAGESDIVLVYMMDRFSRSEYDAPIYKKELAKHGVEVVSAMEALPDGPEKILIEKIYEGLAAVESAKTSIRVKRGMGGNALKCLTNGVRIYGYRTAEDGRFEIDPDAAENVKWAYKMRLRGIAVNQIGTMLAERGVKNSTGGACNYNLARKILSDERYTGVYIWDDVRIEGGMPQIIDRGTFMEAQEVRSRKCRADESWGDYALKGKALCGECGRSLQGISGYGNKGVRYEYYSCPGKCQKNIRRDLLEGEIVHALRSMLSDRSTAMMIARALCGLQSHKALNIEKERAQKSLSDAEKSLKNLLSAVEQGIIVPGTKERIQELEAQKMRALRDLESAQSEEVDPEGFADFLMYGEELDDRNLLRAFVYQVMLMPESVVVTLNYDEENGEPARINFKRVRGKLEWCPIAMLSRTLGHQVCIAVFGKSILLRITFG

SEQ ID NO: 5957 - protein, 498 aa, Unknown
  Description of Unknown: Integrase B5958 sequence
  PTHR30461:SF3,SM00857,G3DSA:1.10.10.2600,IPR036162,PF13408, IPR025827,G3DSA:3.40.50.1390,PS51737,IPR006119,IPR038109, PF07508,SSF53041,IPR011109,PF00239, PTHR30461,PS51736,Coil,cd00338
MTAVIYARYSSDNQREESIEGQIRECTAYAEKNGITVIKHYIDRALSAKTDNRPEFQQMIKDSEKRLFDIVLVWKLDRFARNRYDSAHYEYQLERNHVKLVSATEPISEGPAGIMVKSMLTGMAEYYSAELSEKVVRGMTENVLKGKYNGGTIPIGYTVDEEKFFQIDPLKAPFVVEAFQRYNDGATMKELMNWLNDSGVTTNRNQKFTYNSIQTLLTNRRYIGENRFKDIVMPDSIPVIIEKELFDSVQDKIAKNRRAPARHKAEDDYLLTTKLFCGMCGAMMFGECGTSRNKNVHHYYKCANAKRTKTCKKKTVRKEWLEDLVVCETMKMIHDDDCIQSIVDAVMILQEQENTVLPLLEKQMKDIENGIENLLNAIQAGVLTSSTKGRLEKLEAQQKELEIRIAEEKLAKPKVSADFVKFWLTNFRKLDPNVKSHRETLINTFVNAVYLYDEKVLITFNYKDGTKTITFDEIAAKDAPEGNGSDLGCFAPPKKFNV

SEQ ID NO: 5958 - protein, 498 aa, Unknown
  Description of Unknown: Integrase B5959 sequence
  PTHR30461:SF3,SM00857,G3DSA:1.10.10.2600,IPR036162,PF13408, PS51737,G3DSA:3.40.50.1390,IPR025827,IPR006119,IPR038109, PF07508,SSF53041,IPR011109,PTHR30461,Coil, PS51736,cd00338,PF00239
MLGTLPGCAKIYHTRYNIPSAFIILSRHDGKLKEIDKNCGDIMRNKEIAPALVRVALYIRVSGEEQKIKGLSLEAQQERLEAYARERGWVIVGIYIDAAKTARKNIHKRTEFQRMMDSVKRDEVDILLFARLDRWFRSVADYYKVMEILQAHNCDWKTTDEEYDTTTANGRLYINVKLSIAQNEADIDGERIDVVFDSKIAHGTVVSGSAPFGFRVNEEKRLEVVPEDAAIVQDAFNYFENTVSQRATVRYVRETYGVNWCDATFRRMLKEKLYTGVYDRGGRYNDQFCPAIIDRQQFDRVQALLTRNVRSAPSGKVYIFTSILTCAECGHKLVGYKSSDYFYYRCNQHFQRGRCSHNHSVREDVVEAWLFDHLGEELERCQLEWDVEAAKKKASVARTDKAALKRKLTKLKELYVNDLIDIEDYKKDYQIYVSALNQIPEPAQEAPPDFAAVRRLLDNSFRTIYDTLTREEKRTLWRSVIKEIRIDNDQNITGVVFG

SEQ ID NO: 5959 - protein, 498 aa, Unknown
  Description of Unknown: Integrase B5960 sequence
  PTHR30461:SF3,IPR036162,PS51737,IPR011109,PTHR30461, PS00028,PF00239,G3DSA:1.10.10.2600,IPR006119,SSF53041, IPR013087,cd00338,SM00857,IPR025827,IPR038109, PS51736,PF13408,G3DSA:3.40.50.1390,PF07508,Coil
MKKELINGVIYARYSPGPNQTDQSIEGQVHDCEEYARRNNIRIIKIYADRHLSGKDSVHRNEFQQMLRDAESQQFSTVITWKIDRFGRNREEIALNKYRLRKSGVSVRYALENIPTGPEGIILESMLEGMAEYYSAELAQKIRRGQRESVAKGRILGVKGTYGYKKDKDLHFVVDEPAAAVVREIFQQYADGMMQKDIISLLNSKSIKKADGRPFTPNAIRRLLSNRQYIGEYRYGDNINMDAIPPIVPVELFNAVQERLATTSKTKAASQARSTVNYLLSGTISCAECGSTYQGESGTGKHGERHYYYKCHGKKNRKTVCHSKNFSKAWLEDFVVQHTVEDVLTDDMISLIADRVVELQQADSVSYAIHALEAQLAACTKKLNNLLAAIEEGIVTPTTKERLLALETEKAEISTALSEEKIKRVPFTRDHVVYWLELFRAGDINSFSFREKLIHTFINHIVIDDDMMFIAYNVSGKEACVPLNSVIEGVRLRSRGVD

SEQ ID NO: 5960 - protein, 498 aa, Unknown
  Description of Unknown: Integrase B5961 sequence
  SM00857,IPR006118,G3DSA:1.10.10.2600,IPR036162,PS51737, G3DSA:3.40.50.1390,IPR006119,IPR038109,PF07508,SSF53041, IPR011109,PF00239,PTHR30461,PS00397,PS51736, Coil,cd00338
MNQNESLKTAFGYIRVSTHMQEEISPEAQKHELQKWAKQHNILITQWFQDNGISGKKAENRTAFQNMIALAKEKDHPDYILAWKFSRFARNQEESIVYKSLLRKNNVQVVSISEPLPDGPFAPLIERIIEWMDEYYSIRLSGEVKRGMKEKAKKGGYQSAPPLGYRREKGDTVPVIYEPEAKIYRLIKKYFIQDEYNPTTIARTLNDQGYRTRQGNRFEARVVIYILRNPFYIGKIRWNRSSHGGYYENSPEDVIISDGQHEPLCTNEEWEIICKRIKKYTPGSTGRRRSKTLLPHYLSGGLFRCPICGASMCYQRGVSKKLPRAYPYFCRWKYAKGIHPENVNASAPKTEEALLNSLQEFVDHGHSDITYTVEKVEEPSGNNAAQYEQLLDKLAIRKQRAKEAYLDGIDTKEEYRENRELIDAEVKSIKEKLATLETAAVITTTEEFHVDIREIILKLKDDTLSTLEKHTALASILDYMEYDKEKDEYSFYYKFEAE

SEQ ID NO: 5961 - protein, 498 aa, Unknown
  Description of Unknown: Integrase B5962 sequence
  PTHR30461:SF3,cd00338,SM00857,G3DSA:1.10.10.2600,IPR036162, PF13408,PS51737,G3DSA:3.40.50.1390,IPR025827,IPR006119, IPR038109,PF07508,IPR011109,SSF53041,PTHR30461, PS51736,Coil,PF00239
MKTAVIYARYSSDKQTEQSIEGQLYDCYNYAKANNITVIGEYIDRAMTGRNDDRPDFQRMISDSAKHTFELVLVWKLDRFARSTEDAAYNRGKLKRNGVRLLSIKEDFGDSSAGDLMMHVMESFNEFYSADLREKTVRGMHQSALKCQSTGGQIPIGYKIEGKKYVIDESARFIPETVFRMYAEGKRLAEIARYLNEKGYRTRMGRKFTTGSFYTMLSNEKYIGVYKYGDVRIEGGYEAMIDPVLFDAVQKKLVENKKRAPKISERENFYLTGKLFCGHCGEPMNGMSGNSAKGKHLYYRCNGVRKHTGCDKRTERKEELENEIIGAIQRAFANADPEELTRKVIENYEKNFRPADQVKVMKAELQKITNKVDNVVNAIAEMGGNETLYTQLRQLTEQKEQKETEIRIAEHKADDMPTVELVKKILDLIQNADTMTDEGRQLLIDGAVSRIYVYDDSLDIYFKGGKNTEIPLNPANKDDVSDNSFACCKEWGAKLSLK

SEQ ID NO: 5962 - protein, 498 aa, Unknown
  Description of Unknown: Integrase B5963 sequence
  PTHR30461:SF3,IPR036162,PS51737,IPR011109,PTHR30461, PS00397,PF00239,G3DSA:1.10.10.2600,IPR006119,SSF53041, cd00338,SM00857,IPR025827,IPR038109,PS51736, IPR006118,PF13408,G3DSA:3.40.50.1390,PF07508,Coil
MADIQPVKNGALYIRVSTHLQEELSPDAQKRLLMEYAEAHNIIVLKEHIYIDSGISGRSARQRPQFNNMIAEAKSKEHPFDVILVWKYSRFARNQEESIVYKSMLKRENVDVISVSEPISDDPFGSLIERIIEWMDEYYSIRLSGEVSRGMAENAMRGNYQARPPLGYRIPGYRQTPVIVPEEAELIQLIFNLYTEEKMGIFEIVRYLNEHGYQTGHKKPFQRRSVTYILKNPTYIGKTIWNQHDQDHKLRDKSEWIIADGKHEPIISKEQFDKAQKRIESTYKPAYRKPTSVCHHWLSSLLKCSSCGRTLIVKRTASKQKDRMYVNFQCYGYQKGICNTNQSISAIKLEPVIMHSLEDAMTSGKIHFDVLNPTTLDSSQKQQLLTRLNEIEKKEERIKRAYRDGIDTLEEYKENKSIIQTEKEMLLKKIEHIEEPALSQEEAKPIMMDRIKNVYEVITNPDIGMEEKNKAARSIIEKIVFDRATGSVNIFFYLANCP

SEQ ID NO: 5963 - protein, 497 aa, Unknown
  Description of Unknown: Integrase B5964 sequence
  IPR036162,PS51737,IPR011109,PTHR30461,PS00397, PF00239,G3DSA:1.10.10.2600,IPR006119,SSF53041,cd00338, SM00857,IPR025827,IPR038109,PS51736,IPR006118, PF13408,G3DSA:3.40.50.1390,PF07508,Coil
MNQNESLKTAFGYIRVSTHMQEEISPEAQKHELQKWAKQHNILITQWFQDNGISGKKAENRTAFQNMIALAKEKDHPDYILAWKFSRFARNQEESIVYKSLLRKNNVQVVSISEPLPDGPFAPLIERIIEWMDEYYSIRLSGEVKRGMKEKAKKGGYQSAPPLGYRREKGDTVPAIYEPEAKIYRLIKKYFIQDEYNPTTIARTLNDQGYRTRQGNRFEARVVIYILRNPFYIGKIRWNRSSHGGYYENSPEDVIVSDGQHEPLCTNEEWDIISKRIKKYTPGSTGRRRSKTLLPHYLSGGLFRCPICGASMCYQRGVSKKLPRAYPYFCCWKYAKGIHPENVNASAPKTEEALLNSLQEFVDHGHSDITYTVEKIEEPSGNDAAQYEQLLDKLAIRKQRAKEAYLDGIDTKEEYRENRELIDAEVKSIKEKLATLETAAVITTTEEFHVDIREIILKLKDDTLSTLEKHTALASILDYMEYDKEKDEYSFYYKFEE

SEQ ID NO: 5964 - protein, 497 aa, Unknown
  Description of Unknown: Integrase B5965 sequence
  PTHR30461:SF3,IPR036162,PS51737,IPR011109,PTHR30461, PS00397,PF00239,G3DSA:1.10.10.2600,IPR006119,SSF53041, cd00338,SM00857,IPR025827,IPR038109,PS51736, IPR006118,PF13408,G3DSA:3.40.50.1390,PF07508,Coil
MSEKLKEVCAYIRVSTDKQEELSPESQIRLIKDYAEQHNMLLTRIYQEDKGISGKKADKRPAFQEMIATCKEKSHPYDAILLWKFSRFARNIDESTYYKSVLRKKCNVDVISISEPITEGMYGRLIEMVIEWSDEFYLYNLSGEVMRGMTQKALKGGYNSNVPIGYIKERGRDKIPQIEPKGAEIVRKIFNMYTEQNIPMGDIAARLNQSGYRTARGSLFETRVIGYILENPFYIGKIRWNFFDKQSNKRKNPDDVIISDGKHEAIISEEQFSKAANRRAHDRLRTGYNKKRRPAPLLANWLSGMIKCSKCGASLGFARGGSKSVPNFCCWKHSKGLCSVHNGITLKNAEKEVLSILEELSGSGYFYNYNLNVINTENTERGYILKELKSLDAKMKRIKDAYINEIDTLEEYKTNKELILKRRTELNEKLEAATITIHPASVHKDVDFQGLIDIIKDENSNDTKKHNALLEVVDHFVWDKETQEMTVVLNGNILTAK

SEQ ID NO: 5965 - protein, 497 aa, Unknown
  Description of Unknown: Integrase B5966 sequence
  IPR036162,PS51737,IPR011109,PTHR30461,PS00397, PF00239,G3DSA:1.10.10.2600,IPR006119,SSF53041,cd00338, SM00857,IPR025827,IPR038109,PS51736,IPR006118, PF13408,G3DSA:3.40.50.1390,PF07508,Coil
MNQNESLKTAFGYIRVSTHMQEEISPEAQKHELQKWAKQHNILITQWFQDNGISGKKAENRTAFQNMIALAKEKDHPDYILAWKFSRFARNQEESIVYKSLLRKNNVQVVSISEPLPDGPFAPLIERIIEWMDEYYSIRLSGEVKRGMKEKAKKGGYQSAPPLGYRREKGDTVPVIYEPEAKIYRLIKKYFIQDEYNPTTIARTLNDQGYRTRHGNRFEARVVIYILRNPFYIGKIRWNRSSHGGYYENSPEDVIVSDGQHEPLCTNEEWDIISKRIKKYTPGSTGRKRSKTLLPHYLSGGLFRCPICGASMCYQRGVSKKLPRAYPYFCCWKYAKGIHPENVNASAPKTEEALLNSLQEFVDHGHSDITYTVEKAEEPSGNDAAQYEQLLDKLAIRKQRAKEAYLDGIDTKEEYRENRELIDAEVKSIKEKLATLETAAVITTTEEFHVDIREIIMKLKDDTLSTLEKHTALASILDYMEYDKEKDEYSFYYKFEE

SEQ ID NO: 5966 - protein, 497 aa, Unknown
  Description of Unknown: Integrase B5967 sequence
  PTHR30461:SF3,SM00857,G3DSA:1.10.10.2600,IPR036162,PS51737, G3DSA:3.40.50.1390,IPR006119,IPR038109,PF07508,SSF53041, IPR011109,PTHR30461,Coil,PS51736,cd00338, PF00239
MRYAIYLRKSRADDTSEPLEVTLQRHRQMLEKYMQQHDIAVQDEDVFEEVVSGDSLYARPQMLRLLEAVEAGTYTGVLCVDIQRLGRGSMQDQGMILDAFKWSDTKIITPTRTYDLSNDMDETYTEFESFMGRQEYKMIKKRLRRGLNATIENGGYIANAPYGYDKTKIGKTPSLKINEAEAKFIHMIFDLYQGGMGALTIATTIDRLGAKPRRGEHFARSTILKILKNDVYRGKIVWNRKTCVRPGQRGNEHHLTIYNAPEKWTVVDGLHPAIIDNEQFEAVQRILAGHYHPPANTGKRINPLAGLVLCGNCGRPLQRIAIQSAGGPLLGCQVPGCIVSSKLEYVEQAVLREIQKEFDKLCANAEQKQQESQIDYAAMAKSIDAEISTAHQQLGRLYDLVEQGVYTIEVFNERRGALLSRISALEDERKNLVPPQQLDLEKMRANIEAVFDAYPTADFNTKNQLLKSIIDKIVYNKQKGVQPKGFTLEVFLHCLYL

SEQ ID NO: 5967 - protein, 497 aa, Unknown
  Description of Unknown: Integrase B5968 sequence
  PTHR30461:SF3,IPR036162,PS51737,IPR011109,PTHR30461, PS00397,PF00239,G3DSA:1.10.10.2600,IPR006119,SSF53041, cd00338,SM00857,IPR025827,IPR038109,PS51736, IPR006118,PF13408,G3DSA:3.40.50.1390,PF07508,Coil
MENIFHTAAIYARVSTKKQAREGFSLESQIKACRKKANELGITNIVEYTDETSGTTLNRPGLLKLRKEIKNGTIDIVICYDQDRLSRKLGQQLFITEEFEKFCKKLVFVYGDYKHSVDGRLSYLIKGAIAEYEREKILERCMRGKKEKFLKGEITNSHLFGYKYNKNKKTYEINDDEAKVVRRIFDLYINGMSSRQILMLFQMENIPKFFRGKSVGWNDPSVILRILKNDSYTGVFHAFKHNSPKEKNRYKDKSEWINIPIPAIIDKEQFELANKKIKENTDNSSRNEKRTHLLSRIARCTCGRSIYSRTANNKDYYICASKNYKKKDESKYNNCLTSRFMLADKVDEIFWKALSKICISKENIEKYVNQQENNIKVDSILLQIKKIEESINKKKKEQNKIIEWFTDSLIDDNLAKEKLEKISKLLINLKKQKEELTKSVNRKNKPEFIYNIFKNEKKVTLEEKRNLIRKIVDKVYVERIDDNKNSKMDIRIYIIFK

SEQ ID NO: 5968 - protein, 497 aa, Unknown
  Description of Unknown: Integrase B5969 sequence
  IPR036162,PS51737,IPR011109,PTHR30461,PS00397, PF00239,G3DSA:1.10.10.2600,IPR006119,SSF53041,cd00338, SM00857,IPR025827,IPR038109,PS51736,IPR006118, PF13408,G3DSA:3.40.50.1390,PF07508,Coil
MNQNESLKTAFGYIRVSTHMQEEISPEAQKHELQKWAKQHNILITQWFQDNGISGKKAENRTAFQNMIALAKEKDHPDYILAWKFSRFARNQEESIVYKSLLRKNNVQVVSISEPLPDGPFAPLIERIIEWMDEYYSIRLSGEVKRGMKEKAKKGGYQSAPPLGYRREKGDTVPVIYEPEAKIYRLIKKYFIQDEYNPTTIARTLNDQGYRTRQGNRFEARVVIYILRNPFYIGKIRWNRSSHGGYYENSPEDVIVSDGQHEPLCTNEEWDIISKRIKKYTPGSTGRRRSKTLLPHYLSGGLFRCPICGASMCYQRGVSKKLPRAYPYFCCWKYAKGIHPENVNASAPKTEEALLNSLQEFVDHGHSDITYTVEKVEEPSGNDAAQYEQLLDKLAIRKQRAKEAYLDGIDTKEEYRENRELIDAEVKSIKEKLATLETAAVITTTEEFHVDIREIILKLKDDTLSTLEKHTALAAILDYMEYDKEKDEYSFYYKFEE

SEQ ID NO: 5969 - protein, 497 aa, Unknown
  Description of Unknown: Integrase B5970 sequence
  PTHR30461:SF3,cd00338,SM00857,G3DSA:1.10.10.2600,IPR036162, PF13408,PS51737,G3DSA:3.40.50.1390,IPR025827,IPR006119, IPR038109,PF07508,IPR011109,SSF53041,PTHR30461, PS51736,Coil,PF00239
MKYLIYARVSERGSGFEGQTTIPMQIKICEDYIRIMGGEVFDSRSDEFISGKNIEDRPAFRSIMEELRSGTAEWDAIIVYKFSRISRSLRDSLNIVAELQEHDKGFVSATEHFDCTTTTGQLFFNMLQSFNEFERKRTADTIRDKMMSIAEAGLWPAGRTPYGYKRGGRKDNNLYVDERAAEVIRDIFNQYLSDTPVWSIVRKYRNIMSRSRIFLTLKNPVYVGAIPYGGKIFPGKHQAIINKDVFERVQAKLPTKNGNIRPKAHRYPYLLGGIIFCRCGHRMTPETAKSGRYAYYRCVDAEYCKRRISAEKVEKSVIDFFRNTMRSERIIEKTLAQIDADAAKQAENNQPEITRLKSVITTVKAERERIFRMLLSSELSQSLVNMANTKIADLDEELSGLTERLVLLENQKKIGSEAHNLAKTLLLRTRNFAEALETAGSISKEELRQILLVYIQKVVSIDDKTCDVIVKLGKSSTKDMEWYTQSVEPTTRSLSSK

SEQ ID NO: 5970 - protein, 497 aa, Unknown
  Description of Unknown: Integrase B5971 sequence
  PTHR30461:SF3,IPR036162,PS51737,IPR011109,PTHR30461, PS00397,PF00239,G3DSA:1.10.10.2600,IPR006119,SSF53041, cd00338,SM00857,IPR025827,IPR038109,PS51736, IPR006118,PF13408,G3DSA:3.40.50.1390,PF07508,Coil
MSEKLKEVCAYIRVSTDKQEELSPESQIRLIKDYAEQHNMLLTRIYQEDKGISGKKADKRPAFQEMIATCKDKAHPYDAILLWKFSRFARNIDESTYYKSVLRKKCNVDVISVSEPIVEGMYGRLIEMVIEWSDEFYLYNLSGEVMRGMTQKALKGGYNSNVPIGYIKERGRDKIPQIEPQGAEIVRKIFDMYTEQNITMGDIAARLNKSGYRTSRNSRFETRTVGYILENPFYIGKVRWNYYDRQNNQRKNPDDVIISDGKHEAIVSEEQFSKAASRRAHDRLRTGYNKKRRSAPLLANWLSGMLKCSKCGASLGFARGNSKSVPNFSCWKHSKGLCSVHNGITLKNAEKEVLAILEELSGAEYFFNYNLNVINTENAERGYILKELKSLDSKMKRIKDAYINEIDTLEEYKANKELIARRRTELNERLASATVTTHPASARRAVDFQKLIDIITDENSNDTEKHNALLEVVDHFVWDKETQEMTVVLNQDIVTCI

SEQ ID NO: 5971 - protein, 497 aa, Unknown
  Description of Unknown: Integrase B5972 sequence
  IPR036162,PS51737,IPR011109,PTHR30461,PS00397, PF00239,G3DSA:1.10.10.2600,IPR006119,SSF53041,cd00338, SM00857,IPR025827,IPR038109,PS51736,IPR006118, PF13408,G3DSA:3.40.50.1390,PF07508,Coil
MNQNESLKTAFGYIRVSTHMQEEISPEAQKHELQKWAKQHNILITQWFQDNGISGKKAENRTAFQNMIALAKEKDHPDYILAWKFSRFARNQEESIVYKSLLRKNNVQVVSISEPLPDGPFAPLIERIIEWMDEYYSIRLSGEVKRGMKEKAKKGGYQSAPPLGYRREKGDTVPVIYEPEAKIYRLIKKYFIQDEYNPTTIARTLNDQGYRTRQGNRFEARVVIYILRNPFYIGKIRWNRSSHGGYYENSPEDVIVSDGQHEPLCTNEEWDIISKRIKKYTPGSTGRRRSKTLLPHYLSGGLFRCPICGASMCYQRGVSKKLPRAYPYFCCWKYAKGIHPENVNAGAPKTEEALLNSLQEFVDHGHSDITYTVEKVEEPSGNDAAQYERLLNKLAIRKQRAKEAYLDGIDTKEEYRENRELIDAEVKSIKEKLATLETAAVITTTEEFHVDIREIILKLKDNTLSTLEKHTALASILDYMEYDKEKDEYSFYYKFEE

SEQ ID NO: 5972 - protein, 497 aa, Unknown
  Description of Unknown: Integrase B5973 sequence
  PTHR30461:SF3,SM00857,G3DSA:1.10.10.2600,IPR036162,PS51737, G3DSA:3.40.50.1390,IPR006119,IPR038109,PF07508,IPR011109, SSF53041,PTHR30461,Coil,PS51736,cd00338, PF00239
MNRYAEYIRKSRADDPHESLEETLQKHKEILAKLVLEKGYVVRPEDMYEEVVSGESLYSRPQMLKLLEAVEAGKYAGVLCVDIQRLGRGSMTDQGVILDAFKSSGTKIITPTREYDLANETDETYTEFETFMSRQEYKLIRRRLQRGLRSTIEAGGYIANAPFGYEKCKVGKTPSLRIYEPEAKFVRLAYDLYCQGVGCQHIADRLNAEGAKPHRGDQFNRNSVRFMLTNPVYIGKIVWDRKKHIRKGAKGNAKHITLYTPKDQWTVTQGLHPPLITQDKWDQVQEIFAKRYHTPSYTGVIENPLAGLMICGNCGKHMQRAAHMRGGPFLLCTNRGCIPMSKLPLVEEQALLGISKKLEELRYKADGTQDAEADTSKQEKAAIQAQIETARRQDAKLHDLLEQGVYDIDTFLQRHGVLVDRIKHYEEVLSSIRPTKQLDTDAMADRVEYVLSAYHGATPEERNHLLKSVVEKIVYHKEKGAKPADFTLDVYLLPIYL

SEQ ID NO: 5973 - protein, 497 aa, Unknown
  Description of Unknown: Integrase B5974 sequence
  IPR036162,PS51737,IPR011109,PTHR30461,PS00397, PF00239,G3DSA:1.10.10.2600,IPR006119,SSF53041,cd00338, SM00857,IPR025827,IPR038109,PS51736,IPR006118, PF13408,G3DSA:3.40.50.1390,PF07508,Coil
MNQNESLKTAFGYIRVSTHMQEEISPEAQKHELQKWAKQHNILITQWFQDNGISGKKAENRTAFQNMIALAKEKDHPDYILAWKFSRFARNQEESIVYKSLLRKNNVQVVSISEPLPDGPFAPLIERIIEWMDEYYSIRLSGEVKRGMKEKAKKGGYQSAPPLGYRREKGDTVPVIYEPEAKIYRLIKKYFIQDEYNPTTIARTLNDQGYRTRQGNRFEARVVIYILRNPFYIGKIRWNRSSHGGYYENSPEDVIVSDGQHEPLCTNEEWDIISKRIKKYTPGSTGRRRSKTLLPHYLSGGLFRCPICGASMCYQRGVSKKLPRAYPYFCCWKYAKGIHPENVNASAPKTEEALLNSLQEFVDHGHSDITYTVEKIEEPSGNDAAQYEQLLDKLAIRKQRAKEAYLDGIDTKEEYRENRELIDAEVKSIKEKLATLETAAVITTTEEFHVDIREIILKLKDDTLSTLEKHTALASILDYMEYDKEKDEYSFYYKFEE

SEQ ID NO: 5974 - protein, 497 aa, Unknown
  Description of Unknown: Integrase B5975 sequence
  PTHR30461:SF3,SM00857,G3DSA:1.10.10.2600,IPR036162,PS51737, G3DSA:3.40.50.1390,IPR006119,IPR038109,PF07508,IPR011109, SSF53041,PTHR30461,Coil,PS51736,cd00338, PF00239
MRYAIYLRKSRADDTSEPLEVTLQRHRQMLEKYMQQHDIAVQDEDVFEEVVSGDSLYARPQMLRLLEAVEAGTYTGVLCVDIQRLGRGSMQDQGMILDAFKWSDTKIITPTRTYDLSNDMDETYTEFESFMGRQEYKMIKKRLRRGLNATIENGGYIANAPYGYDKTKIGKTPSLKINEAEAKFIHMIFDLYQGGMGTATIATTIDRLGARPRRGEHFARSTVLKILKNDVYRGKIVWNRKTCVRPGQRGNEQHLTIYNAPEKWTVVDGLHPAIIDNEQFEAVQRILAGHYHPPANTGKRINPLAGLVLCGNCGRPLQRIAIQSAGGPLLGCQVPGCIVSSKLEYVEQAVLLEIQKEFDKLCANAEQKQQESQIDYAAMAKSIDAEISTAHQQLGRLYDLVEQGVYTIEVFNERRGALLSRISALEDERKNLVPPQQLDLEKMRANIEAVFDAYPTADFNTKNQLLKSIIDKIVYNKQKGVQPKGFTLEVFLHCLYL

SEQ ID NO: 5975 - protein, 497 aa, Unknown
  Description of Unknown: Integrase B5976 sequence
  PTHR30461:SF3,cd00338,SM00857,G3DSA:1.10.10.2600,IPR036162, PF13408,PS51737,IPR025827,G3DSA:3.40.50.1390,IPR006119, IPR038109,PF07508,IPR011109,SSF53041,PTHR30461, PS51736,Coil,PF00239
MPKTEEKQAIKAVIYARYSSDRQREESIEGQLRVCEDYAHRNNMTILHTYADRAMTGRSDQRPEFQMMVRDAATMTFDVVLVYKLNRFARNRYDSAKYKHKLKKYGVKVVSAMENIADDPSGILLESVIEGMAEYYSAELAENVTRGMTENALEGKWPGGYVPLGYKLDEQHHLVIDEPKAEIVRMIFQLVLEGHSQKHIIDELNRRHYTTGSGRPFTYNTLRTIFKNEKYIGRLDWGTVHRENALPAILDKRTFEAVQKQLHFRKKNHIRSCNESFLLTGKLFCGCCHSKMVGVSGTSKTGAIYYYYACSAHLKKKCKARNVRKDAIEDLVCEVTTRILSDPEAVEAIARQAIEMQKNKKDSLELQAIKNQIADINKKLQNCVRAVENGLISKTITNHINDYEKQLTRLKDDAARVKLLDGDVELTQQHIEFFFWSIAQKIKTADKYKSILLSSIVRSVIVDKDYIEIQYNYKNELPILQNPVRIESSYLNQMVTR

SEQ ID NO: 5976 - protein, 497 aa, Unknown
  Description of Unknown: Integrase B5977 sequence
  IPR036162,PS51737,IPR011109,PTHR30461,PS00397, PF00239,G3DSA:1.10.10.2600,IPR006119,SSF53041,cd00338, SM00857,IPR025827,IPR038109,PS51736,IPR006118, PF13408,G3DSA:3.40.50.1390,PF07508,Coil
MNQNESLKTAFGYIRVSTHMQEEISPEAQKHELQKWAKQHNILITQWFQDNGISGKKAENRTAFQNMIALAKEKDHPDYILAWKFSRFARNQEESIVYKSLLRKNNVQVVSISEPLPDGPFAPLIERIIEWMDEYYSIRLSGEVKRGMKEKAKKGGYQSAPPLGYRREKGDTVPVIYEPEAKIYRLIKKYFIQDEYNPTTIARTLNDQGYRTRQGNRFEARVIIYILRNPFYIGKIRWNRSSHGGYYENSPEDVIVSDGQHEPLCTNEEWDIISKRIKKYTPGSTGRRRSKTLLPHYLSGGLFRCPICGASMCYQRGVSKKLPRAYPYFCCWKYAKGIHSENVNASAPKTEDALLNSLQEFVDHGHSNITYTVEKVEEPSGNDAAQYEQLLDKLAIRKQRAKEAYLDGIDTKEEYRENRELIDAEVKSIKEKLATLETAAVITTTEEFHVDIREIILKLKDNTLSTLEKHTALASILDYMEYDKEKDEYSFYYKFEE

SEQ ID NO: 5977 - protein, 497 aa, Unknown
  Description of Unknown: Integrase B5978 sequence
  PTHR30461:SF3,SM00857,G3DSA:1.10.10.2600,IPR036162,PS51737, G3DSA:3.40.50.1390,IPR006119,IPR038109,PF07508,IPR011109, SSF53041,PTHR30461,Coil,PS51736,cd00338, PF00239
MRYAIYLRKSRADDTSEPLEVTLQRHLQMLEKYMQQHDIAVQDEDVFEEVVSGDSLYARPQMLRLLEAVEAGTYTGVLCVDIQRLGRGSMQDQGMILDAFKWSDTKIITPTRTYDLSNDMDETYTEFESFMGRQEYKMIKKRLRRGLNATIENGGYIANAPYGYDKTKIGKTPSLKINEAEAKFIHMIFDLYQGGMGTATIATTIDRLGARPRRGEHFARSTVLKILKNDVYRGKIVWNRKTCVRPGQRGNEHHLTIYNAPEKWTVVDGLHPAIIDNEQFEAVQRILAGHYHPPANTGKRINPLAGLVLCGNCGRPLQRIAIQSAGGPLLGCQVPGCIVSSKLEYVEQAVLLEIQKEFDKLCANAEQKQQESQIDYAAMAKSIDAEISTAHQQLGRLYDLVEQGVYTIEVFNERRGALLSRISALEDERKNLVPPQQLDLEKMRANIEAVFDAYPTADFNTKNQLLKSIIDKIVYNKQKGVQPKGFTLEVFLHCLYL

SEQ ID NO: 5978 - protein, 497 aa, Unknown
  Description of Unknown: Integrase B5979 sequence
  PTHR30461:SF3,cd00338,SM00857,G3DSA:1.10.10.2600,IPR036162, PF13408,IPR025827,G3DSA:3.40.50.1390,PS51737,IPR006119, IPR038109,PF07508,SSF53041,IPR011109,PTHR30461, PS51736,Coil,PF00239
MYEDIKTACLYVRFSSHNQTEQSIEGQTRVCRDFCKRHNIRIVEIYADRATSASKDIEKRVQFLKMIKDSEKGLFDAVIVYKLDRFARSRYDSATYKYRLKRNGVQLISATENISNDPEGIILESVLEGMAEFYSAELSQKINRGMRESAYKHNSIGGAVPLGYKIEDKKLVIDPKTAPIVKEAFEKYADGETVAEICRQFNARGYKTSKGTAFGKSSFTKIFRNERYIGVYTFHDYRAEDAIPAIIDKDLWDRVQLRVGKIKNAPARNKAKVVYLLSGKIFCGHCGSKMNGNCNAGNYYYYQCYGKKNGNVDCKKKNIRKEFIERLVAQDALSLLTDEYIEQIATIACEKNQHEIELDSALPTIRDRIHQVDLSLNNLLKAIESGSAPDMLVKRMGELEKEKKDLQAQAKKESEDIVELDKAQVIYWLEQFRGGSIEDEEFCRMLIDLFVNSVTVWDEDDNTYKVTVAYNLTSLPTKTYRLNKGGTLSDFTSNAPA

SEQ ID NO: 5979 - protein, 497 aa, Unknown
  Description of Unknown: Integrase B5980 sequence
  IPR036162,PS51737,IPR011109,PTHR30461,PS00397, PF00239,G3DSA:1.10.10.2600,IPR006119,SSF53041,cd00338, SM00857,IPR025827,IPR038109,PS51736,IPR006118, PF13408,G3DSA:3.40.50.1390,PF07508,Coil
MNQNESLKTAFGYIRVSTHMQEEISPEAQKHELQKWAKQHNILITQWFQDNGISGKKAENRTAFQNMIALAKEKDHPDYILAWKFSRFARNQEESIVYKSLLRKNGVQVVSISEPLPDGPFAPLIERIIEWMDEYYSIRLSGEVKRGMKEKAKKGGYQSAPPLGYRREKGDTVPAIYEPEAKIYRLIKKYFIQDEYNPTTIARTLNDQGYRTRQGNRFEARVIIYILRNPFYIGKIRWNRSSHGGYYENSPDEVIVSDGQHEPLCTNEEWDIISKRIKKYTPGSTGRRRSKTLLPHYLSGGLFRCPICGASMCYQRGVSKKLPRAYPYFCCWKYAKGIHSENVNVGSPKTEEALLNSLQEFVDHGHSNITYTVEKVEEPSGNDAAQYEQLLDKLAIRKQRAKEAYLDGIDTKEEYRENRELIDAEVKSIKEKLATLETAAVITTTEEFHVDIREIILKLKDDTLSTLEKHTALASILDYMEYDKEKDEYSFYYKFEE

SEQ ID NO: 5980 - protein, 497 aa, Unknown
  Description of Unknown: Integrase B5981 sequence
  IPR036162,PS51737,IPR011109,PTHR30461,PS00397, PF00239,G3DSA:1.10.10.2600,IPR006119,SSF53041,cd00338, SM00857,IPR025827,IPR038109,PS51736,IPR006118, PF13408,G3DSA:3.40.50.1390,PF07508,Coil
MNQNESLKTAFGYIRVSTHMQEEISPEAQKHELQKWAKQHNILITQWFQDNGISGKKAENRTAFQNMIALAKEKDHPDYILAWKFSRFARNQEESIVYKSLLRKNNVQVVSISEPLPDGPFAPLIERIIEWMDEYYSIRLSGEVKRGMKEKAKKGGYQSAPPLGYRREKGDTVPAIYEPEAKIYRLIKKYFIHDEYNPTTIARTLNDQGYRTRQGNRFEARVIIYILRNPFYIGKIRWNRSSHGGYYENSPEDVIVSDGQHEPLCTNEEWDIISKRIKKYTPGSTGRRRSKTLLPHYLSGGLFRCPICGASMCYQRGVSKKLPRAYPYFCCWKYAKGIHSENVNAGAPKTEEALLNSLQEFVDHGHSNITYTVEKVEEPSGNDAAQYEQLLDKLAIRKQRAKEAYLDGIDTKEEYRENRELIDAEVMSIKEKLATLETAAVITTTEEFHVDISEIILKLKDDTLSTLEKHTALASILDYMEYDKEKDEYSFYYKFEE

SEQ ID NO: 5981 - protein, 497 aa, Unknown
  Description of Unknown: Integrase B5982 sequence
  cd03768,PTHR30461:SF3,SM00857,G3DSA:1.10.10.2600,IPR036162, PF13408,PS51737,IPR025827,G3DSA:3.40.50.1390,IPR006119, IPR038109,PF07508,IPR011109,SSF53041,PTHR30461, PS51736,Coil,PF00239
MNAIYARQSVDRADSISIESQIEFCQYEMRGEQYKVYTDRGYSGKNTDRPAFAEMMNDIENGVIGKVVVYKLDRISRSILDFSNMMEQFGTHKVEFVSTTEKFDTSSPMGRAMLNICIVFAQLERETIQKRVADAYYSRSQKSFYMGGRVPYGFRLIPTTIDGVKTSMYEINTEEAEQVRLIYELYSKPECSYGDIIRYFQSHGILKNGKPWGRTRLADVLRNPIYVRSDLSVYEFYQNQGAIMANDPADFIGTNGCYYYKGKDSTGRKQMNLEGNHLVLAPHEGIIPADLWLKCRAKCLEAQQIKPYQKAKNTWLAGKIKCGICGYALVDKHYSTTRSRYLLCSNKMNAKACAGPGTIYTDEFEQLIYDEMRKKLTQFRKLRRCKGNRINPELTALSIQLTQAESEIAALMERLSAADDTMFRYISGRIKELDGKKQELMKRISELKLHKEADYTEISNHLTMWDELSFDDKRQTVDQLIRVIYATSDSIKIEWRI

SEQ ID NO: 5982 - protein, 497 aa, Unknown
  Description of Unknown: Integrase B5983 sequence
  IPR036162,PS51737,IPR011109,PTHR30461,PS00397, PF00239,G3DSA:1.10.10.2600,IPR006119,SSF53041,cd00338, SM00857,IPR025827,IPR038109,PS51736,IPR006118, PF13408,G3DSA:3.40.50.1390,PF07508,Coil
MNQNESLKTAFGYIRVSTHMQEEISPEAQKHELQKWAKQHNILITQWFQDNGISGKKAENRTAFQNMIALAKEKDHPDYILAWKFSRFARNQEESIVYKSLLRKNNVQVVSISEPLPDGPFAPLIERIIEWMDEYYSIRLSGEVKRGMKEKAKKGGYQSAPPLGYRREKGDTVPVIYEPEAKIYRLIKKYFIQDEYNPTTIARTLNDQGYRTRQGNRFEARVVIYILRNPFYIGKIRWNRSSHGGYYENSPEDVIVSDGQHEPLCTNEEWDIISKRIKKYTPGSTGRRRSKTLLPHYLSGGLFRCPICGASMCYQRGVSKKLPRAYPYFCCWKYAKGIHSENVNASAPKTEEALLNSLQEFVNHGHSNITYTVEKVEEPSGNDAAQYEQLLDKLAIRKQRAKEAYLDGIDTKEEYRENRELIDAEVKSIKEKLATLETAAVITTTEEFHVDIREIILKLKDDTLSTLEKHTALASILDYMEYDKEKNEYSFYYKFEE

SEQ ID NO: 5983 - protein, 497 aa, Unknown
  Description of Unknown: Integrase B5984 sequence
  PTHR30461:SF3,SM00857,G3DSA:1.10.10.2600,IPR036162,PS51737, G3DSA:3.40.50.1390,IPR006119,IPR038109,PF07508,IPR011109, SSF53041,PTHR30461,Coil,PS51736,cd00338, PF00239
MRYAIYLRKSRADDTSEPLEVTLQRHRQMLEKYMQQHDIAVQDEDVFEEVVSGDSLYARPQMLRLLEAVEAGTYTGVLCVDIQRLGRGSMQDQGMILDAFKWSDTKIVTPTRTYDLSNDMDETYTEFESFMGRQEYKMIKKRLRRGLNATIENGGYIANAPYGYDKTKIGKTPSLKINEAEAKFIHMIFDLYQGGMGTATIATTIDRLGARPHRGEHFARSTVLKILKNDVYRGKIVWNRKTCVRPGQRGNEHHLTIYNAPEKWTVVDGLHPAIIDNEQFEAVQRILAGHYHPPANTGKRINPLAGLVLCGNCGRPLQRIAIQSAGGPLLGCQVPGCIVSSKLEYVEQAVLREIQKEFDKLCANAEQKQQESQIDYAAMAKSIDAEISTAHQQLGRLYDLVEQGVYTIEVFNERRGALLSRISALEDERKNLVPPQQLDLEKMRANIEAVFDAYPTADFNTKNQLLKSIIDKIVYNKQKSVQPKGFTLEVFLHCLYL

SEQ ID NO: 5984 - protein, 497 aa, Unknown
  Description of Unknown: Integrase B5985 sequence
  PTHR30461:SF3,SM00857,G3DSA:1.10.10.2600,IPR036162,PS51737, G3DSA:3.40.50.1390,IPR006119,IPR038109,PF07508,SSF53041, IPR011109,PTHR30461,Coil,PS51736,cd00338, PF00239
MRYAIYLRKSRADDTSEPLEVTLQRHRQMLEKYMQQHDIAVQDEDVFEEVVSGDSLYARPQMLRLLEAVEAGTYTGVLCVDIQRLGRGSMQDQGMILDAFKWSDTKIITPTRTYDLSNDMDETYTEFESFMGRQEYKMIKKRLRRGLNATIENGGYIANAPYGYDKTKIGKTPSLKINEAEAKFIHMIFDLYQGGMGALTIATTIDRLGAKPRRGEHFARSTILKILKNDVYRGKIVWNRKTCVRPGQRGNEHHLTIYNAPEKWTVVDGLHPAIIDNEQFEAVQRILAGHYHPPANTGKRINPLAGLVLCGNCGRPLQRIAIQSAGGPLLGCQVPGCIVSSKLEYVEQAVLLEIQKEFDKLCANAEQKQQESQIDYAAMAKSIDAEISTAHQQLGRLYDLVEQGVYTIEVFNERRGALLGRISALEDERKNLVPPQQLDLEKMRANIEAVFDAYPTADFNTKNQLLKSIIDKIVYNKQKGVQPKGFTLEVFLHCLYL

SEQ ID NO: 5985 - protein, 497 aa, Unknown
  Description of Unknown: Integrase B5986 sequence
  PTHR30461:SF3,SM00857,G3DSA:1.10.10.2600,IPR036162,PS51737, G3DSA:3.40.50.1390,IPR006119,IPR038109,PF07508,IPR011109, SSF53041,PTHR30461,Coil,PS51736,cd00338, PF00239
MRYAIYLRKSRADDTSEPLEVTLQRHRQMLEKYMQQHDIAVQDEDVFEEVVSGDSLYARPQMLRLLEVVEAGTYTGVLCVDIQRLGRGSMQDQGMILDAFKWSDTKIITPTRTYDLSNDMDETYTEFESFMGRQEYKMIKKRLRRGLNATIENGGYIANAPYGYDKTKIGKTPSLKINEAEAKFIHMIFDLYQGGMGALTIATTIDRLGAKPRRGEHFARSTILKILKNDVYRGKIVWNRKTCVRPGQRGNEHHLTIYNAPEKWTVVDGLHPAIIDNEQFEAVQRILAGHYHPPANTGKRINPLAGLVLCGNCGRPLQRIAIQSAGGPLLGCQVPGCIVSSKLEYVEQAVLREIQKEFDKLCANAEQKQQESQIDYAAMAKSIDAEISTAHQQLGRLYDLVEQGVYTIEVFNERRGALLRRISALEDERKNLVPPQQLDLEKMRANIEAVFDAYPTADFNTKNQLLKSIIDKIVYNKQKGVQPKGFTLEVFLHCLYL

SEQ ID NO: 5986 - protein, 497 aa, Unknown
  Description of Unknown: Integrase B5987 sequence
  IPR036162,PS51737,IPR011109,PTHR30461,PS00397, PF00239,G3DSA:1.10.10.2600,IPR006119,SSF53041,cd00338, SM00857,IPR025827,IPR038109,PS51736,IPR006118, PF13408,G3DSA:3.40.50.1390,PF07508,Coil
MNQNESLKTAFGYIRVSTHMQEEISPEAQKHELQKWAKQHNILITQWFQDNGISGKKAENRTAFQNMIALAKEKDHPDYILAWKFSRFARNQEESIVYKSLLRKNNVQVVSISEPLPDGPFAPLIERIIEWMDEYYSIRLSGEVKRGMKEKAKKGGYQSAPPLGYRREKGDTVPVIYEPEAKIYRLIKKYFIQDEYNPTTIARTLNDQGYRTRQGNRFEARVIIYILRNPFYIGKIRWNRSSHGGYYENSPEDVIVSDGQHEPLCTNEEWDIISKRIKKYTPGSTGRRRSKTLLPHYLSGGLFRCPICGASMCYQRGVSKKLPRAYPYFCCWKYAKGIHSENVNASAPKTEDALLNSLQEFVDHGHSNITYTVEKVEEPSGNDAAQYEQLLDKLAIRKQRAKEAYLDGIDTKEEYRENRELIDAEVKSIKEKLATLETAAVITTTEEFHVDIREIILKLKDDTLSTLEKHTALASILDYMEYDKEKDEYSFYYKFEE

SEQ ID NO: 5987 - protein, 497 aa, Unknown
  Description of Unknown: Integrase B5988 sequence
  IPR036162,PS51737,IPR011109,PTHR30461,PS00397, PF00239,G3DSA:1.10.10.2600,IPR006119,SSF53041,cd00338, SM00857,IPR025827,IPR038109,PS51736,IPR006118, PF13408,G3DSA:3.40.50.1390,PF07508,Coil
MNQNESLKTAFGYIRVSTHMQEEISPEAQKHELQKWAKQHNILITQWFQDNGISGKKAENRTAFQNMIALAKEKDHPDYILAWKFSRFARNQEESIVYKSLLRKNNVQVVSISEPLPDGPFAPLIERIIEWMDEYYSIRLSGEVKRGMKEKAKKGGYQSAPPLGYRREKGDTVPVIYEPEAKIYRLIKKYFIQDEYNPTTIARTLNDQGYRTRQGNRFEARVVIYILRNPFYIGKIRWNRSSHGGYYENSPEDVIVSDGQHEPLCTNEEWDIISKRIKKYTPGSTGRRRSKTLLPHYLSGGLFRCPICGASMCYQRGVSKKLPRAYPYFCCWKYAKGIHSENVNASAPKTEEALLNSLQEFVDHGHSNITYTVEKVEEPSGNDAAQYEQLLDKLAIRKQRAKEAYLDGIDTKEEYRENRELIDAEVKSIKEKLATLETAAVITTTEEFHVDIREIILKLKDDTLSTLEKHTALASILDYMEYDKEKDEYSFYYKFEE

SEQ ID NO: 5988 - protein, 497 aa, Unknown
  Description of Unknown: Integrase B5989 sequence
  PTHR30461:SF3,cd00338,SM00857,G3DSA:1.10.10.2600,IPR036162, PF13408,PS51737,G3DSA:3.40.50.1390,IPR025827,IPR006119, IPR038109,PF07508,IPR011109,SSF53041,PTHR30461, Coil,PF00239
MYEEIKTACLYLRYSSSNQTEQSIEGQMHVCQDFCKRHNIRIVEMYIDRATSASKDIEKRVEFLKMIKDSEKGNFNAVIVYKLDRFARSRYDSATYKYRLKRNGVQLISATENITQDPEGIILESVLEGMAEFYSAELSQKINRGMRESAMKHNSIGGAIPLGYKTVDKKLVIDETTAPIVREAFQMYADGESVAEICRTFNNRGYKTSKGTRFGKSSFTKIFRNEKYIGVYKYHDYRAEDVIPPIIDKDLWDRVQVRVGKIKKAPARNKARHTYLLTGKLFCGHCGSAMNADGNSQGYLYYRCYGKKNLDKQCNKRNMEKNLIERLVAQDAMSFLTDEYIEKIATIACDRNKQEIESDSPIPVIRDRIRQVDVSLNNLLKAIETGSAPDMLVKRMGELETEKKDMEVQLKKEMAHQVYIDKEQVIFWLEKFREGDINDEEFCQTVIDLFVNSVTVWDEPDDKFKITIAYNLTSIPQKTYRLSKDGRLSDYASNTPL

SEQ ID NO: 5989 - protein, 497 aa, Unknown
  Description of Unknown: Integrase B5990 sequence
  PTHR30461:SF3,IPR036162,PS51737,IPR011109,PTHR30461, PS00397,PF00239,G3DSA:1.10.10.2600,IPR006119,SSF53041, cd00338,SM00857,IPR025827,IPR038109,PS51736, IPR006118,PF13408,G3DSA:3.40.50.1390,PF07508,Coil
MSEKLKEVCAYIRVSTDKQEELSPESQIRLIKDYAEQHNMLLTRIYQEDHGISGKKADKRPAFQEMIATCKDKSHPYDAILLWKFSRFARNIDESTYYKSVLRKKCNVDVISVSEPIVEGMYGRLIEMVIEWSDEFYLYNLSGEVMRGMTQKALKGGYNSNVPIGYIKERGRDKIPQIEPQGAEIVRKIFDMYTEQNIPMGDIAARLNKSGYRTSRNSRFETRTVGYILENPFYIGKVRWNYYDRQNNQRKNPDDVIISNGKHEAIISEEQFSKAASRRAHDRLRTGYNKKRRSAPLLANWLSGMLKCSKCGASLGFARGNSKSVPNFSCWKHSKGLCSVHNGITLKNAEKEVLAILEELSGAEYFFNYNLNVINTENAERGYILKELKSLDSKMKRIKDAYINEIDTLEEYKANKELIARRRTELNERLASATVTTHPASARRAVDFQKLIDIITDENSNDTEKHNALLEVVDHFVWDKETQEMTVVLNEDILAAK

SEQ ID NO: 5990 - protein, 497 aa, Unknown
  Description of Unknown: Integrase B5991 sequence
  PTHR30461:SF3,SM00857,G3DSA:1.10.10.2600,IPR036162,PS51737, G3DSA:3.40.50.1390,IPR006119,IPR038109,PF07508,SSF53041, IPR011109,PTHR30461,Coil,PS51736,cd00338, PF00239
MRYAIYLRKSRADDTSEPLEVTLQRHRQMLEKYMQQHDIAVQDEDVFEEVVSGDSLYARPQMLRLLEAVEAGTYTGVLCVDIQRLGRGSMQDQGMILDAFKWSDTKIITPTRTYDLSNDMDETYTEFESFMGRQEYKMIKKRLRRGLNATIENGGYIANAPYGYDKTKIGKTPSLKINEAEAKFIHMIFDLYQSGMGTATIATTIDRLGARPHRGEHFARSTVLKILKNDVYRGKIVWNRKTCVRPGQRGNEQHLTIYNAPEKWTVVDGLHPAIIDNEQFEAVQRILAGHYHPPANTGKRINPLAGLVLCGNCGRPLQRIAIQSAGGPLLGCQVPGCIVSSKLEYVEQAVLLEIQKEFDKLCANAEQKQQESQIDYAAMAKSIDTEISTAHQQLGRLYDLVEQGVYTIEVFNERRGALLSRISALEDERKNLVPPQQLDLEKMRANIEAVFDAYPTADFNTKNQLLKSIIDKIVYNKQKGVQPKGFTLEVFLHCLYL

SEQ ID NO: 5991 - protein, 497 aa, Unknown
  Description of Unknown: Integrase B5992 sequence
  cd00338,SM00857,G3DSA:1.10.10.2600,IPR036162,PF13408, PS51737,IPR025827,G3DSA:3.40.50.1390,IPR006119,IPR038109, PF07508,SSF53041,IPR011109,PTHR30461,PS51736, Coil,PF00239
MTAVIYARYSSDNQREESIEGQIRECTAYAEKNGITVVKHYIDRALSAKTDNRPDFQQMIKDSEKRLFDIVLVWKLDRFARNRYDSAHYEYQLERNHVKLVSATEPISDSPAGIMVKSMLTGMAEYYSAELSEKVVRGMTENVLKGKCNGGTIPIGFKVDEEKFFQIDPLKAPFVVEAFQRYNDGATMKELMNWLNDSGVTTNRNQKFTYNSVQTMLTNKRYIGENHFKDIVMPDSIPAIVDKDLFEEVQQKIKKNSRAPARHKAEDDYLLTTKLFCGMCGAMMFGECGTGRNKVVHHYYKCATAKRFKTCKKKTVRKEWLEDLVIAETMKLIQDDAVIDAIVAEVMELQDQENTTLPLLEKQMREVENGIENMLNAIQAGVLTNSTKSRLEKLEAQQKELEVRIAEEKIARPRLSENQVRFWLTRFRKLDPNVKSHRETLINTFVNAVYLHDEKVLITFNYKDGTKTITFDEIAAKDAPEGNGSDLGCFAPPKKNT

SEQ ID NO: 5992 - protein, 497 aa, Unknown
  Description of Unknown: Integrase B5993 sequence
  PTHR30461:SF3,SM00857,G3DSA:1.10.10.2600,IPR036162,PS51737, G3DSA:3.40.50.1390,IPR006119,IPR038109,PF07508,SSF53041, IPR011109,PTHR30461,Coil,PS51736,cd00338, PF00239
MRYAIYLRKSRADDTSEPLEVTLQRHRQMLEKYMQQHDIAVQDEDVFEEVVSGDSLYARPQMLRLLEAVEAGTYTGVLCVDIQRLGRGSMQDQGMILDAFKWSDTKIITPTRTYDLSNDMDETYTEFESFMGRQEYKMIKKRLRRGLNATIENGGYIANAPYGYDKTKIGKTPSLKINEAEAKFIHMIFDLYQSGMGTATIATTIDRLGARPRRGEHFARSTVLKILKNDVYRGKIVWNRKTCVRPGQRGNEHHLTIYNAPEKWTVVDGLHPAIIDNEQFEAVQRILAGHYHPPANTGKRINPLAGLVLCGNCGRPLQRIAIQSAGGPLLGCQVPGCIVSSKLEYVEQAVLLEIQKEFDKLCANAEQKQQESQIDYAAMAKSIDAEISTAHQQLGRLYDLVEQGVYTIGVFNERRGALFSRISALEDERKNLVPPQQLDLEKMRANIEAVFDAYPTADFNTKNQLLKSIIDKIVYNKQKGVQPKGFTLEVFLHCLYL

SEQ ID NO: 5993 - protein, 497 aa, Unknown
  Description of Unknown: Integrase B5994 sequence
  cd03768,PTHR30461:SF3,SM00857,IPR036162,PF13408, IPR025827,G3DSA:3.40.50.1390,PS51737,IPR006119,PF07508, SSF53041,IPR011109,PTHR30461,PS51736,Coil, PF00239
MVAIYARQSIDKKDSISIDSQIELCKREAFGEEVRTYVDKGFSGKNTDRPQFQALMNDIKSKEIHKVVVYRLDRISRALIDFAKIMEDFNKYNIEFVSTTEKFDTSTPMGKAMLSIVMVFAQLERETIQQRIKDNYYARGKKGFYLGGKPPYGFKKEKTKVDGISTSILHNNEFEIDVLTDIFDKYANSDLALGGIVKYLNNKNIPAPHGGRWESTKIARILRNPVYVKADADIYVYYKNKGCKISNELTEFTDENGCYLYGKRDRSAAKYTDVTDHVLSLAPHKGVIDSEIFLRCQHRLDTNKQVKNSGKGKHSWLTGLTKCGLCGYAMTVNATKKYKYFICRGKTSYNACEGPENTIYVDDIEEHVEKAIKDKAVSLSKMKSKVTKNESNVTNAEKIKIIEIDQQIENLLEQMAKSNAVVTEYINDKITKLHNEKNEILKTISEKNEKPNSNLEDILHKINNWDTLEFDEKKMVTKELIQKIDLSDDKINIVWKY

SEQ ID NO: 5994 - protein, 497 aa, Unknown
  Description of Unknown: Integrase B5995 sequence
  PTHR30461:SF3,cd00338,SM00857,G3DSA:1.10.10.2600,IPR036162, PF13408,PS51737,G3DSA:3.40.50.1390,IPR025827,IPR006119, IPR038109,PF07508,IPR011109,SSF53041,PTHR30461, PS51736,Coil,PF00239
MYEDIKTACLYVRFSSHNQTEQSIEGQTRVCRDFCKRHNIRIVEIYADRATSASKDIEKRVQFLKMIKDSERGLFDAVIVYKLDRFARSRYDSATYKYRLKRNGVQLISATENISNDPEGIILESVLEGMAEFYSAELSQKINRGMRESAYKHNSIGGAVPLGYKIEDKKLVIDPKTAPIVKEAFEKYADGETVAEICRQFNARGYKTSKGTTFGKSSFTKIFRNERYIGVYSFHDYRAEDAIPAIIDKDLWDRVQLRVGKIKNAPARNKAKVVYLLSGKIFCGHCGSKMNGNCNAGNYYYYQCYGKKNGNVDCKKKNIRKEFIERLVAQDALSLLTDEYIEQIATIACEKNQHEIELDSALPTIRDRIHQVDLSLNHLLKAIESGSAPDMLVKRMGELEKEKKDLQAQAKKESEDIVELDKAQVIYWLEQFRGGSIEDQEFCRMLIDLFVNSVTVWDEDDNTYKVTVAYNLTSLPTKTYRLNKGGTLSDFASNAPS

SEQ ID NO: 5995 - protein, 497 aa, Unknown
  Description of Unknown: Integrase B5996 sequence
  SM00857,G3DSA:1.10.10.2600,IPR036162,PF13408,PS51737, IPR025827,G3DSA:3.40.50.1390,IPR006119,IPR038109,PF07508, IPR011109,SSF53041,PTHR30461,PS51736,cd00338, PF00239
MEVTKIPKQKAQKPKIGVYVRVSTKREEQEDSFAFQSQYWNKRFENDSSIEYVGLFADEGISGKSMKNRKGLNSLLKKAKRGEIDKIYTKSISRFARNYTDLLTVVHELRDLGVPIIFEKENIDTLDPKCNLVLTIMSSLAEQELISMSQNQKWAARKRFAEGSIELSRILGYEYKKGKLTIIPEEAAIVRRIYELYLQGNGVEKISVILKDEGYLTVHGSTEWKKATLATILKNEKYTGNSLLQKNVYDLKVRKKNKGEAPQYYVENSHEAIISMEDFQKVQEMMREKAEKFHPNGLDYSIRKYPLSGKIKCGICGSRYKRKTAAKGTTYECIKWVCLVKEIKGKKTCDSHEIKNVVLEKLLTEAYNECLDKNFEYSGLAEEYKKLKSLLETERELKALHVKGYISDVKYKAESTKILDEIKTREQTIQTLQSNKMVEKQFTKSAVFTKDMADFLIQATVKDWKITFEFANGIKITKSYTNGRAGNVNGKLCKRKA

SEQ ID NO: 5996 - protein, 497 aa, Unknown
  Description of Unknown: Integrase B5997 sequence
  IPR036162,PS51737,IPR011109,PTHR30461,PS00397, PF00239,G3DSA:1.10.10.2600,IPR006119,SSF53041,cd00338, SM00857,IPR025827,IPR038109,PS51736,IPR006118, PF13408,G3DSA:3.40.50.1390,PF07508,Coil
MNQNESLKTAFGYIRVSTHMQEEISPEAQKHELQKWAKQHNILITQWFQDNGISGKKAENRTAFQNMIALAKEKDHPDYILAWKFSRFARNQEESIVYKSLLRKNNVQVVSISEPLPDGPFAPLIERIIEWMDEYYSIRLSGEVKRGMKEKAKKGGYQSAPPLGYRREKGDTVPVIYEPEAKIYRLIKKYFILDEYNPTTIARTLNDQGYRTRQGNRFEARVVIYILRNPFYIGKIRWNRSSHGGYYENSPEDVIISDGQHEPLCTNEEWEIICKRIKKYTPGSTGRRRSKTLLPHYLSGGLFRCPICGASMCYQRGISKKLPRAYPYFCCWKYAKGIHPENVNASAPKTEEALLNSLQEFVDHGHSNITYTVEKVEEPSGNDAAQYEQLLDKLAIRKQRAKEAYLDGIDTKEEYRENRELIDAEVKSIKEKLATLETAAVITTTEEFHVDIREIILKLKDNTLSTLEKHTALASILDYMEYDKEKDEYSFYYKFEE

SEQ ID NO: 5997 - protein, 497 aa, Unknown
  Description of Unknown: Integrase B5998 sequence
  PTHR30461:SF3,SM00857,G3DSA:1.10.10.2600,IPR036162,PS51737, G3DSA:3.40.50.1390,IPR006119,IPR038109,PF07508,IPR011109, SSF53041,PTHR30461,Coil,PS51736,cd00338, PF00239
MRYAIYLRKSRADDTSEPLEVTLQRHRQMLEKYMQQHDIAVQDEDVFEEVVSGDSLYARPQMLRLLEVVEAGTYTGVLCVDIQRLGRGSMQDQGMILDAFKWSDTKIITPTRTYDLSNDMDETYTEFESFMGRQEYKMIKKRLRRGLNATIENGGYIANAPYGYDKTKIGKTPSLKINEAEAKFIHMIFDLYQSGMGTATIATTIDRLGAKPRRGEHFARSTILKILKNDVYRGKIVWNRKTCVRPGQRGNEHHLTIYNAPEKWTVVDGLHPAIIDNEQFEAVQRILAGHYHPPANTGKRINPLAGLVLCGNCGRPLQRIAIQSAGGPLLGCQVPGCIVSSKLKYVEQAVLLEIQKEFDKLCANAEQKQQESQIDYAAMAKSIDAEISTAHQQLGRLYDLVEQGVYTIEVFNERRGALLSRISALEDERKNLVPPQQLDLEKMRANIEAVFDAYPTADFNTKNQLLKSIIDKIVYNKQKGVQPKGFTLEVFLHCLYL

SEQ ID NO: 5998 - protein, 497 aa, Unknown
  Description of Unknown: Integrase B5999 sequence
  PTHR30461:SF3,SM00857,G3DSA:1.10.10.2600,IPR036162,PS51737, G3DSA:3.40.50.1390,IPR006119,IPR038109,PF07508,IPR011109, SSF53041,PTHR30461,Coil,PS51736,cd00338, PF00239
MRYAIYLRKSRADDTSEPLEVTLQRHRQMLEKYMQQHDIAVQDEDVFEEVVSGDSLYARPQMLRLLEVVEAGTYTGVLCVDIQRLGRGSMQDQGMILDAFKWSDTKIITPTRTYDLSNDMDETYTEFESFMGRQEYKMIKKRLRRGLNATIENGGYIANAPYGYDKTKIGKTPSLKINEAEAKFIHMIFDLYQSGMGTATIATTIDRLGAKPRRGEHFARSTILKILKNDVYRGKIVWNRKTCVRPGQRGNEHHLTIYNAPEKWTVVDGLHPAIIDNEQFEAVQRILAGHYHPPANTGKRINPLAGLVLCGNCGRPLQRIAIQSAGGPLLGCQVPGCIVSSKLEYVEQAVLLEIQKEFDKLCANAEQKQQESQIDYAAMAKSIDAEISTAHQQLGRLYDLVEQGVYTIEVFNERRGALLSRISALEDERKNLVPPQQLDLEKMRANIEAVFDAYPTADFNTKNQLLKSIIDKIVYNKQKGVQPKGFTLEVFLHCLYL

SEQ ID NO: 5999 - protein, 497 aa, Unknown
  Description of Unknown: Integrase B6000 sequence
  SM00857,G3DSA:1.10.10.2600,IPR036162,PF13408,PS51737, G3DSA:3.40.50.1390,IPR025827,IPR006119,IPR038109,PF07508, IPR011109,SSF53041,PF00239,PTHR30461,PS51736, Coil,cd00338
MTAVIYARYSSDNQREESIEGQIRECTAYAEKNGITVIKHYIDRALSAKTDNRPDFQQMIKDSEKRLFDIVLVWKLDRFARNRYDSAHYEYQLERNHVKLVSATEPISDSPAGIMVKSMLTGMAEYYSAELSEKVVRGMTENVLKGKYNGGTIPIGFKVDEEKFFQIDPLKAPFVVEAFQRYNDGATMKELMNWLNDSGVTTNRNQKFTYNSVQKLLTNKRYIGENHFKDIVMPDSIPAIVDKDLFEEVQQKIKKNSRAPARHKAEDDYLLTTKLFCGMCGAMMFGECGTGRNKVVHHYYKCATAKRFKTCKKKTVRKEWLEDLVVAETMKLIQDDAVIDAIVAEVMELQDQENTTLPLLEKQMREVENGIENMLNAIQAGVLTNSTKSRLEKLEAQQKELEVRIAEEKIARPRLSENQVRFWLTRFRKLDPNVKSHRETLINTFVNAVYLYDEKVLITFNYKDGTKIITFDKIAAKDAPEGNGSDLGCFAPPKGPA

SEQ ID NO: 6000 - protein, 497 aa, Unknown
  Description of Unknown: Integrase B6001 sequence
  cd03768,PTHR30461:SF3,SM00857,G3DSA:1.10.10.2600,IPR036162, PF13408,PS51737,G3DSA:3.40.50.1390,IPR025827,IPR006119, IPR038109,PF07508,IPR011109,SSF53041,PTHR30461, PS51736,Coil,PF00239
MNAIYARQSVDRADSISIESQIEFCQYEMRGEQYKVYTDRGYSGKNTDRPAFAEMMNDIESGVIGKVVVYKLDRISRSILDFSNMMEQFGTHKVEFVSTTEKFDTSSPMGRAMLNICIVFAQLERETIQKRVADAYYSRSQKSFYMGGRVPYGFRLIPTTIDGVKTSMYEINTEEAEQVRLIYELYSKPECSYGDIIRYFQSHGILKNGKPWGRTRLADVLRNPIYVRSDLSVYEFYRDQGAIMANDPGDFIGTNGCYYYKGKDSTGRKQMNLEGNHLVLAPHEGIIPADLWLKCRAKCLEAQQIKPYQKAKNTWLAGKIKCGVCGYALVDKHYSTTRSRYLLCSNKMNAKACEGPGTIYTDEFEQIIYDEMRKKLAQFRKLRQCKGNRINPELTALSIQLTQAESEIAALMERLSAADDTMFRYISGRIKELDGKKQELMKRISERKLHKEADYTEINNHLTMWDELSFDDKRQTVDQLIRVIYATSDSIKIEWRI

SEQ ID NO: 6001 - protein, 497 aa, Unknown
  Description of Unknown: Integrase B6002 sequence
  PTHR30461:SF3,IPR036162,PS51737,IPR011109,PTHR30461, PS00397,PF00239,G3DSA:1.10.10.2600,IPR006119,SSF53041, cd00338,SM00857,IPR025827,IPR038109,PS51736, IPR006118,PF13408,G3DSA:3.40.50.1390,PF07508,Coil
MKQRYAYGYVRVSTDKQEELSPDSQEKLLREYARKNNMIILKIFFEIGVSGRKADKRPSFQEMIGSAKSKDHPVDAILVWKYSRFARNQEESIVYKSLLKKQNNVDVISVSEPLIDGPFGSLIERIIEWMDEYYSIRLSGEVFRGMKENALRGSFQARPPLGYKIVKHGEPPVIVPEEAKVVKIIFEKYVNENMSFFDIARYLNSLGFKTSRNKNFECRSIEYIIQNPIYCGMIRWNRTKNDTNEIKDRSEWIVTDGEHEAIISKELFDKAQEQYKVTYKPRGKRPPSTYKHWLSGLLKCPDCGRTLVATTLHRANGDYYAYFKCYGYCKGKCPRANGISSLVIEKAVMDSLKKVIYTRNIEFELKNYQPVEIINERSLLEERLHGLENKEERIKASYREGIDTLEEYKENKLLIQKEREEIEEQLSEFSKTESTDQQDDKDVLLKKVSNIYSIISSDKYTDAQKNAALRQVIDRIVYNRQNDTLKIYYFLYKSNCG

SEQ ID NO: 6002 - protein, 497 aa, Unknown
  Description of Unknown: Integrase B6003 sequence
  SM00857,G3DSA:1.10.10.2600,IPR036162,PF13408,IPR025827, PS51737,G3DSA:3.40.50.1390,IPR006119,IPR038109,PF07508, SSF53041,IPR011109,PF00239,PTHR30461,PS51736, Coil,cd00338
MKIHVITPTSETPEKLRVCAYCRVSTESEDQENSLDNQRNHYEELIQSNPAYEFVNVYYDFGISGFKEMRPGFHQMMSDARKGKIDLIIVKSVSRFARNTVTILKAARELKELGIGIFFELQNINTLTEAGELMLTVLAAFAQAESETYSQLSKMGIQRKYEKGEPIQRLQYSFGYAKDENGEYVLNPVEAPWVKKIYEMIADDYSSADVKRYLNDQGVKTVKGAEFTESSVLRIVESEIYKGDFIMQKYFVNADRKIVKNEGQVDSWYIENDHPAIVSRRLWQKAQDALAAKRAYLAEGSVVGENTEELYPYKNHIFCSKCGFPLYRRVYSNGNRVNWGCSGQKRYKNEFCTGINIPDSYFRKLGDFEDNLYFRESKDALGKSSFKYCTETAWSRKHRKKEPIAVPELNEKNYPYFKKLYCKECGSRLVRYIESRQHVKWICNGNKRKGTGFCKGVRVLDSTVRGWEIDTDVLVEGKVGKDGEKSYSYTCKTGQSK

SEQ ID NO: 6003 - protein, 497 aa, Unknown
  Description of Unknown: Integrase B6004 sequence
  PTHR30461:SF3,SM00857,G3DSA:1.10.10.2600,IPR036162,PS51737, G3DSA:3.40.50.1390,IPR006119,IPR038109,PF07508,SSF53041, IPR011109,PTHR30461,Coil,PS51736,cd00338, PF00239
MRYAIYLRKSRADDTSEPLEVTLQRHRQMLEKYMQQHDIAVQDEDVFEEVVSGDSLYARPQMLRLLEAVEAGTYTGVLCVDIQRLGRGSMQDQGMILDAFKWSDTKIITPTRTYDLSNDMDETYTEFESFMGRQEYKMIKKRLRRGLNATIENGGYIANAPYGYDKTKIGKTPSLKINEAEAKFIHMIFDLYQSGMGTATIATTIDRLGARPRRGEHFARSTVLKILKNDVYRGKIVWNRKTCVRPGQRGNEHHLTIYNAPEKWTVVDGLHPAIIDNEQFEAVQRILAGHYHPPANTGKRINPLAGLVLGGNCGRPLQRIAIQSAGGPLLGCQVPGCIVSSKLEYVEQAVLLEIQKEFDKLCANAEQKQQESQIDYAAMAKSIDTEISTAHQQLGRLYDLVEQGVYTIEVFNERRGALLSRISALEDERKNLVPPQQLDLEKMRANIEAVFDAYPTADFNTKNQLLKSIIDKIVYNKQKGVQPKGFTLEVFLHCLYL

SEQ ID NO: 6004 - protein, 497 aa, Unknown
  Description of Unknown: Integrase B6005 sequence
  PTHR30461:SF3,SM00857,G3DSA:1.10.10.2600,IPR036162,PS51737, G3DSA:3.40.50.1390,IPR006119,IPR038109,PF07508,SSF53041, IPR011109,PTHR30461,Coil,PS51736,cd00338, PF00239
MRYAIYLRKSRADDTSEPLEVTLQRHRQMLEKYMQQHDIAVQDEDVFEEVVSGDSLYARPQMLRLLEAVEAGTYTGVLCVDIQRLGRGSMQDQGMILDAFKWSDTKIITPTRTYDLSNDMDETYTEFESFMGRQEYKMIKKRLRRGLNATIENGGYIANAPYGYDKTKIGKTPSLKINEAESKFIHMIFDLYQGGMGTATIATTIDRLGARPRRGEHFARSTVLKILKNDVYRGKIVWNRKTCVRPGQRGNEQHLTIYNAPEKWTVVDGLHPAIIDNEQFEAVQRILAGHYHPPANTGKRINPLAGLVLCGNCGRPLQRIAIQSAGGPLLGCQVPGCIVSSKLEYVEQAVLLEIQKEFDKLCANAEQKQQESQIDYAAMAKSIDTEISTAHQQLGRLYDLVEQGVYTIEVFNERRGALLSRISALEDERKNLVPPQQLDLEKMRANIEAVFDAYPTADFNTKNQLLKSIIDKIVYNKQKGVQPKGFTLEVFLHCLYL

SEQ ID NO: 6005 - protein, 497 aa, Unknown
  Description of Unknown: Integrase B6006 sequence
  PTHR30461:SF3,SM00857,G3DSA:1.10.10.2600,IPR036162,PS51737, G3DSA:3.40.50.1390,IPR006119,IPR038109,PF07508,IPR011109, SSF53041,PTHR30461,Coil,PS51736,cd00338, PF00239
MNRYAEYIRKSRADDPHESLEETLQKHKEILAKLVLEKGYVVRPEDMYEEVVSGESLYSRPQMLKLLEAVEAGKYAGVLCVDIQRLGRGSMTDQGVILDAFKSSGTKIITPTREYDLANETDETYTEFETFMSRQEYKLIRRRLQRGLRSTIEAGGYIANAPFGYEKCKVGKTPSLRIYEPEAKFVRLAYDLYCQGVGCQHIADRLNAEGAKPHRGDQFNRNSVRFMLTNPVYIGKIVWDRKKHIRKGAKGNAKHITLYTPKDQWTVTQGLHPPLITQDKWDQVQEIFAKRYRTPSYTGVIENPLAGLMICGNCGKHMQRAAHMRGGPFLLCTNRGCIPMSKLPLVEEQALLGISKKLEELRYKADGTQDAEADTSKQEKAAIQAQIETARRQDAKLHDLLEQGVYDIDTFLQRHGVLVDRIKHYEEVLSSIRPTKQLDTDAMADRVEYVLSAYHGATPEERNHLLKSVVEKIVYHKEKGAKPADFTLDVYLLPIYL

SEQ ID NO: 6006 - protein, 497 aa, Unknown
  Description of Unknown: Integrase B6007 sequence
  SM00857,G3DSA:1.10.10.2600,IPR036162,PS51737,G3DSA:3.40.50.1390, IPR006119,IPR038109,PF07508,SSF53041,IPR011109, PF00239,PTHR30461,PS51736,Coil,cd00338
MRYAMYLRKSRADDASEPIEVTLQRHRQALENYMVQHDLTVLPEDVYEEVVSGDSLYARPQMLRMLESIEAGKYTGVLCMDIQRLGRGSMQDQGMILDAFKYSGTKIITPAKTYDLSDDIDETYTEFESFMGRQEYKMIKKRLRRGIKATIENGGYIANAPYGYDKARVGKLPSLKINEEEARFVRMMFDLYQQGMGSKTIADTVSRLGAKPRRGERFARTTVTKILKNPVYCGKIVWDRKTHLRPGQRGNEKHVTIYNAPEKWTIVDGVHPAIISQEQFDAVQVILSGHYHPPSNTGKRRNPLSGVVLCGNCGHPMQRIAIQSAGGPLLGCATPGCIVSSKLEYVEEAVLDSIQKEFNRICSEADADKKADAMNYTEMAKAIDGEIRKAKQQLGRLHDLLEQGVYDVETFSERRQRLLGRISALEDERKNLVPPKQLDLEAMRRQIEKVMEVYPNSDSDTQNHLLKSIVEKVVYHKEKGAKPKDFALEVYLRKVYL

SEQ ID NO: 6007 - protein, 497 aa, Unknown
  Description of Unknown: Integrase B6008 sequence
  IPR036162,PS51737,IPR011109,PTHR30461, PS00397,PF00239,G3DSA:1.10.10.2600,IPR006119, SSF53041,cd00338,SM00857,IPR025827,IPR038109,PS51736 ,IPR006118,PF13408,G3DSA:3.40.50.1390,PF07508,Coil
MNQNESLKTAFGYIRVSTHMQEEISPEAQKHELQKWAKQHNILITQWFQDNGISGKKAENRTAFQNMIALAKEKDHPDYILAWKFSRFARNQEESIVYKSLLRKNNVQVVSISEPLPDGPFAPLIERIIEWMDEYYSIRLSGEVKRGMKEKAKKGGYQSAPPLGYRREKGDTVPAIYEPEAKIYRLIKKYFIQDEYNPTTIARTLNDQGYRTRQGNRFEARVVIYILRNPFYIGKIRWNRSSHGGYYENSPEDVIVSDGQHEPLCTNEEWDIISKRIKKYAPGSTGRRRSKTLLPHYLSGGLFRCPICGASMCYQRGVSKKLPRAYPYFCCWKYAKGIHPENVNASAPKTEEALLNSLQEFVDHGHSDITYTVEKVEEPSGNDAAQYEQLLDKLAIRKQRAKEAYLDGIDTKEEYRENRELIDAEVKSMKEKLATLETAAVITTTEEFHVDIREIILKLKDDTLSTLEKHTALASILDYMEYDKEKDEYSFYYKFEE

SEQ ID NO: 6008 - protein, 497 aa, Unknown
  Description of Unknown: Integrase B6009 sequence
  PTHR30461:SF3,IPR036162,PS51737,IPR011109,PTHR30461, PS00397,PF00239,G3DSA:1.10.10.2600,IPR006119,SSF53041, cd00338,SM00857,IPR025827,IPR038109,PS51736, IPR006118,PF13408,G3DSA:3.40.50.1390,PF07508,Coil
MSEKLKEVCAYIRVSTDKQEELSPESQIRLIKDYAEQHNMLLTRIYQEDKGISGKKADKRPAFQEMIATCKEKSHPYDAILLWKFSRFARNIDESTYYKSVLRKKCNVDVISISEPITEGMYGRLIEMVIEWSDEFYLYNLSGEVMRGMTQKALKGGYNSNVPIGYIKERGRDKIPQIEPKGAEIVRKIFNMYTEQNIPMGDIAAKLNKSGYRTARGSLFETRVVGYILENPFYIGKIRWNFFDKQSNKRKNPDDVIISDGKHETIISEEQFSKAANRRAHDRLRTGYNKKRRPAPLLANWLSGMIKCSKCGASLGFARGGSKSVPNFCCWKHSKGLCSVHNGITLKNAEKEVLSILEELSGSGYFYNYNLNVINTENTERGYILKELKSLDAKMKRIKDAYINEIDTLEEYKTNKELILKRRTELNEKLEAATITIHPASVHKDVDFQGLIDIIKDENSNDTKKHNALLEVVDHFVWDKETQEMTVVLNGNILTAK

SEQ ID NO: 6009 - protein, 497 aa, Unknown
  Description of Unknown: Integrase B6010 sequence
  SM00857,G3DSA:1.10.10.2600,IPR036162,PF13408,PS51737, G3DSA:3.40.50.1390,IPR025827,IPR006119,IPR038109,PF07508, IPR011109,SSF53041,PF00239,PTHR30461,PS51736, Coil,cd00338
MNKKRAAAYARVSTNSRAQEHSFEFQSRYWNQTLGNNDDYDYIGLFADKGISGKYVNRRPQFLALMELCNRGDVDIIFTKSVQRFARNAEELLKYVRALREKGIEVYFEKENIHTLNPDTELYLTIAAAIAEEDLTRYSNNVAWSIKDRFERGEMILGPRIYGYRKTAENRLIVYPDEARIVRLIFEEYIKGDVSTLKIAKKLNSMGIPSPNGGEWLCSQISYIIKNEKYYGDMILQKTFVEGGVKYANRGERIRYYVENSHEPIISKEIWDKAQEVLGQRANPHLVGAKLKSYPFTGLIVCGACGANYTHKVNNSGTISQANFWKCHIAIQKGVKYCHNPGIKEKVLYDLFVDCYNEFVTEGYYKKTVDNTEALDRLARLNESETELTLLMTRGVINQNQYLEEQQRIRFEMQSIQRKLHEERTYLVQGSDFHPIKKFDEDKLYKFIKRVVVKDWTVTFEFFNGVCITRSYTNGQPGNIKDWKLKQKQRREEQNGQ

SEQ ID NO: 6010 - protein, 497 aa, Unknown
  Description of Unknown: Integrase B6011 sequence
  PTHR30461:SF3,IPR036162,PS51737,IPR011109,PTHR30461, PS00397,PF00239,G3DSA:1.10.10.2600,IPR006119,SSF53041, SM00857,IPR025827,IPR038109,PS51736,cd03768, IPR006118,PF13408,G3DSA:3.40.50.1390,PF07508,Coil
MKVKKNNEIPAATGTIRVAVYVRVSTNEQAEEGHSIGVQTEKLQAYCVARGWEVFKVYTDPGFSGSNMDRPALKSLFSDIESGLINTVLVYKLDRLSRSQRDTLYMIEDVFLAQGVDFISMTENFDTSTPLGRAMIGILSVFAQLEREQIKERMAMGNIARAASGLWRGGSGAPIGYDYIDGGLVVNEYEAMQIRLIFDLFLKGYTFHAIKVELQNRGYTNKYGSWKNAAIISKVLRNTTYIGRVRYAGKEYEGQHDPLISMDAWDATQLRLAEVTRGLSDHQKSPFVATKLLTGCIWCGDCGARYFYHGCNKKNAKGEMIHYDYYICYTRAAHKTMRRAKHCNGRTWKQPELDAIIIGEIKKLALSKDVIENMVSEHRSGSSVDARADAIGKRLEELDKQLNKVMDLYTLGSIPLASVQAKADAINQEKAALSAELESLHKEQPQLSASKAFDLASMADDIFTNGTTEEQRNLVQSLIDKIELNADGSIAIYWKFA

SEQ ID NO: 6011 - protein, 497 aa, Unknown
  Description of Unknown: Integrase B6012 sequence
  PTHR30461:SF3,cd00338,SM00857,G3DSA:1.10.10.2600,IPR036162, PF13408,PS51737,G3DSA:3.40.50.1390,IPR025827,IPR006119, IPR038109,PF07508,SSF53041,IPR011109,PTHR30461, PS51736,Coil,PF00239
MYEDIKTACLYVRFSSHNQTEQSIEGQTRVCRDFCKRHNIRIVEIYADRATSASKDIEKRVQFLKMIKDSEKGLFDAVIVYKLDRFARSRYDSATYKYRLKRNGVQLISATENISNDPEGIILESVLEGMAEFYSAELSQKINRGMRESAYKHNSIGGAVPLGYKIEDKKLVIDPKTAPIVKEAFEKYADGETVAEICRQFNARGYKTSKGTAFGKSSFTKIFRNERYIGVYSFHDYRAEDAIPAIIDKDLWDRVQLRVGKIKNAPARNKAKVVYLLSGKIFCGHCGSKMNGNCNAGNYYYYQCYGKKNGNVDCKKKNIRKEFIERLVAQDALSLLTDEYIEQIATIACEKNQHEIELDSALPTIRDRIHQVDLSLNNLLKAIESGSAPDMLVKRMGELEKEKKDLQVQAKKESEDIVELDKAQVIYWLEQFRGGSIEDEEFCRMLIDLFVNSVTVWDEDDGSYKVTVAYNLTSLPTKTYRLNKGGTLSDFTSNAPP

SEQ ID NO: 6012 - protein, 497 aa, Unknown
  Description of Unknown: Integrase B6013 sequence
  PTHR30461:SF3,IPR036162,PS51737,IPR011109,PTHR30461, PS00397,PF00239,G3DSA:1.10.10.2600,IPR006119,SSF53041, cd00338,SM00857,IPR025827,IPR038109,PS51736, IPR006118,PF13408,G3DSA:3.40.50.1390,PF07508,Coil
MSEKLKEVCAYIRVSTDKQEELSPESQIRLIKDYAEQHNMLLTRIYQEDKGISGKKADKRPAFQEMIATCKEKSHPYDAILLWKFSRFARNIDESTYYKSVLRKKCNVDVISISEPITEGMYGRLIEMVIEWSDEFYLYNLSGEVMRGMTQKALKGGYNSNVPIGYIKERGRDKIPQIEPKGAEIVRKIFDMYTEQNIPMGDIAARLNQSGYRTARGSLFETRVVGYILENPFYIGKIRWNFFDKQSNKRKNPDDVIISDGKHEAIISEEQFSKAANRRAHDRLRTGYNKKRRPAPLLANWLSGMIKCSKCGASLGFAHGGTKTVPNFCCWKYSKGLCSTRNGITLKNAEKEVLSILEELSGSGYFYNYNLNVINTENTERGYILKELKSLDAKMKRIKDAYINEIDTLEEYKTNKELILKRRTELNEKLEAATITIHPASVHKDVDFQGLIDIIKDENSNDTKKHNALLEVVDHFVWDKETQEMTVVLNGNILTAK

SEQ ID NO: 6013 - protein, 497 aa, Unknown
  Description of Unknown: Integrase B6014 sequence
  PTHR30461:SF3,IPR036162,PS51737,IPR011109,PTHR30461, PS00397,PF00239,G3DSA:1.10.10.2600,IPR006119,SSF53041, cd00338,SM00857,IPR025827,IPR038109,PS51736, IPR006118,PF13408,G3DSA:3.40.50.1390,PF07508,Coil
MGKSITKTGALYIRVSTGKQEELSPDAQKRLLLEYAAKNQIIISKEHIYIEGGISGRKADKRPEFKDMIAEAKSKEHPFDVILVWKYSRFARNQEESIVYKSMLKRENVDVISVSEPISDDPFGSLIERIIEWMDEYYSIRLSGEVSRGMAENAMRGNYQARPPLGYRIPGYRQTPVIVPEEAELIQLIFDLYTEKKMGIFEIVRYLNEHGYQTGHKKPFQRRSVTYILKNPTYIGKTIWNQHDQDHKLRDKSEWIIADGKHEPIISKEQFDKAQKRIESTYKPAYRKPTSVCHHWLSSLLKCSSCGRTLVVKRTASKKKDRMYVNFQCYGYQKGICNTNQSISAIKLEPVIMHSLEDAMTSGKIHFDVLNPTTLDSSQKQQLLTRLSEIEKKEERIKRAYRDGIDTLEEYKENKSIIQTEKEMLLKKIEHIEEPALSQEEAKPIMMDRIKNVYEVITNPDIGMEEKNKAARSIIEKIVFDRATGSVNIFFYLANCP

SEQ ID NO: 6014 - protein, 497 aa, Unknown
  Description of Unknown: Integrase B6015 sequence
  IPR036162,PS51737,IPR011109,PTHR30461,PS00397, PF00239,G3DSA:1.10.10.2600,IPR006119,SSF53041,cd00338, SM00857,IPR025827,IPR038109,PS51736,IPR006118, PF13408,G3DSA:3.40.50.1390,PF07508,Coil
MNQNESLKTAFGYIRVSTHMQEEISPEAQKHELQKWAKQHNILITQWFQDNGISGKKAENRTAFQNMIALAKEKDHPDYILAWKFSRFARNQEESIVYKSLLRKNNVQVVSISEPLPDGPFAPLIERIIEWMDEYYSIRLSGEVKRGMKEKAKKGGYQSAPPLGYRREKGDTVPAIYEPEAKIYRLIKKYFIQDEYNPTTIARTLNDQGYRTRQGNRFEARVVIYILRNPFYIGKIRWNRSSHGGYYENSPEDVIISDGQHEPLCTNEEWEIICKRIKKYTPGSTGRRRSKTLLPHYLSGGLFRCPICGASMCYQRGVSKKLPRAYPYFCCWKYAKGIHSENVNAGAPKTEEALLNSLQEFVDHGHSNITYTVEKVEEPSGNDAAQYEQLLDKLAIRKQRAKEAYLDGIDTKEEYRENRELIDAEVKSIKEKLATLETAAVITTTEEFHVDIREIILKLKDNTLSTLEKHTALASILDYMEYDKEKDEYSFYYKFEE

SEQ ID NO: 6015 - protein, 497 aa, Unknown
  Description of Unknown: Integrase B6016 sequence
  PTHR30461:SF3,cd00338,SM00857,G3DSA:1.10.10.2600,IPR036162, PS51737,G3DSA:3.40.50.1390,IPR006119,IPR038109,PF07508, SSF53041,IPR011109,PTHR30461,PS51736,Coil, PF00239
MGGRAAIYARFSSHNQRGESIEIQVEKSRAYCAENDLRVVATYCDFAQTGTNTDRAEFQRMMADAKRGLFDFVVIYKVTRIMRNRDEMAMARIMLRRCRVEILYAGEDISDGSAGVLQLGMLEVLAEYESALDGERIRDGIQKNAERCMANGCVRYGWDIVDGRYVVNEEEAAAIRLGVRMVLSGKSVADVVRAWEPYRTKRGGKWRFQTVRRILMRRENGGEYRYAGVVVPGGMPAIVPMDDEERVIRMLEDSHRPRAKTEAWDFPLTGKLYDGRDGGLMTGTSGTGKSGRPYHYYRCRSCGRTVRRDVVEKRVADAVREALGSADSRERIARMLADAEEERADEKPLSETIKGELAKIETAFSNIWAAIESGIAPPGGKERIDALKQRQALLKDELRTAEALEAARLDYDRALFWLEGMAAAEVDDAQLLRTFVARVVLGGPDDDDGLRVAFTFDDSAGLGDNPSLPGAIGPGGEVFDRMNASSTIRSPVELYPL

SEQ ID NO: 6016 - protein, 497 aa, Unknown
  Description of Unknown: Integrase B6017 sequence
  IPR036162,PS51737,IPR011109,PTHR30461,PS00397, PF00239,G3DSA:1.10.10.2600,IPR006119,SSF53041,cd00338, SM00857,IPR025827,IPR038109,PS51736,IPR006118, PF13408,G3DSA:3.40.50.1390,PF07508,Coil
MNQNESLKTAFGYIRVSTHMQEEISPEAQKHELQKWAKQHNILITQWFQDNGISGKKAENRTAFQNMIALAKEKDHPDYILAWKFSRFARNQEESIVYKSLLRKNNVQVVSISEPLPDGPFAPLIERIIEWMDEYYSIRLSGEVKRGMKEKAKKGGYQSAPPLGYRREKGDTVPVIYEPEAKIYRLIKKYFIQDEYNPTTIARTLNDQGYRTRQGNRFEARVIIYILRNPFYIGKIRWNRSSHGGYYENSPEDVIVSDGQHEPLCTNEEWDIISKRIKKYTPGSTGRRRSKTLLPHYLSGGLFRCPICGASMCYQRGVSKKLPRAYPYFCCWKYAKGIHSENVNASAPKTEDALLNSLQEFVDHGHSNITYTVEKVEEPSGNDAAQYEQLLDKLAIRKQRAKEAYLDGIDTKEEYRENRELIDAEVKSIKEKLATLETAAVITTTEEFHVDIREIILKLKDNTLSTLEKHTALASILDYMEYDKENDEYSFYYKFEE

SEQ ID NO: 6017 - protein, 497 aa, Unknown
  Description of Unknown: Integrase B6018 sequence
  IPR036162,PS51737,IPR011109,PTHR30461,PS00397, PF00239,G3DSA:1.10.10.2600,IPR006119,SSF53041,cd00338, SM00857,IPR025827,IPR038109,PS51736,IPR006118, PF13408,G3DSA:3.40.50.1390,PF07508,Coil
MNQNESLKTAFGYIRVSTHMQEEISPEAQKHELQKWAKQHNILITQWFQDNGISGKKAENRTAFQNMIALAKEKDHPDYILAWKFSRFARNQEESIVYKSLLRKNNVQVVSISEPLPDGPFAPLIERIIEWMDEYYSIRLSGEVKRGMKEKAKKGGYQSAPPLGYRREKGDTVPVIYEPEAKIYRLIKKYFIQDEYNPTTIARTLNDQGYRTRQGNRFEARVVIYILRNPFYIGKIRWNRSSHGGYYENSPEDVIISDGQHEPLCTNEEWEIICKRIKKYTPGSTGRRRSKTLLPHYLSGGLFRCPICGASMCYQRGISKKLPRAYPYFCCWKYAKGIHPENVNASAPKTEEALLNSLQEFVDHGHSDITYTVEKVEESSGNDAAQYEQLLDKLAIRKQRAKEAYLDGIDTKEEYRENRELIDAEVKSIKEKLATLETAAVITTTEEFHVDIREIILKLKDDTLSTLEKHTALASILDYMEYDKEKDEYSFYYKFEE

SEQ ID NO: 6018 - protein, 496 aa, Unknown
  Description of Unknown: Integrase B6019 sequence
  PTHR30461:SF3,cd00338,SM00857,G3DSA:1.10.10.2600,IPR036162, PF13408,PS51737,IPR025827,G3DSA:3.40.50.1390,IPR006119, IPR038109,PF07508,IPR011109,SSF53041,PTHR30461, PS51736,Coil,PF00239
MNDRKRAVAYIRVSTKSDAQLHSFGYQESYWRDTIAASNQYDFAGIYSDFGISGRSLNRRPQLQRLIADAEQKKFDVVFTKSVARFGRNVEEIVATVRKLREYGIRIFFEKEQIDTFDPNMELYMTLAASIAENDLKIYSENMTWSIRERYKKGWISIGSQIFGYRMNKEDNTLIVEPTEAETVKRIYDLYEEGLGQVAISHILEEEQRANIYGEVKWDVGAIRYIITNEKYKGCALTQKGIYVHGIKHKNDNLAPQWYMENTHEAIITPEQFNRVQELIKERARKSKRAKPGDYVFARKIECGCCGGGYSHKFNNTNKPWRNEIWICSKQNTYGAGHCTNTRIKDEVLKKLFVECYNEFVRENGNTDELMKLRDSQRKLLEQERELNALRVNRMIEISDYNTEIAKVREQITECNKQIALHEMRGARKEDLVEIKEFDDSKVEIFLEKAVVLNHTITFTFINGMSISREYTNGHGGNTAGWLDRRLDRLSKEGKQ

SEQ ID NO: 6019 - protein, 496 aa, Unknown
  Description of Unknown: Integrase B6020 sequence
  PTHR30461:SF3,IPR036162,PS51737,IPR011109,PTHR30461, PS00397,PF00239,G3DSA:1.10.10.2600,IPR006119,SSF53041, cd00338,SM00857,IPR025827,IPR038109,PS51736, IPR006118,PF13408,G3DSA:3.40.50.1390,PF07508,Coil
MEKLRNGALYIRVSTDKQEELSPDAQRRLLLDYAAKNNIILSNEYIFEEDGISGRKADKRPNFQRMIGLAKSKEHPFDVILVWKFSRFARNQEESIVYKSLLRKNNVEVISVSEPLVDGPFGTLIERIIEWMDEYYSIRLSGEVTRGMTENAMRGNFQSSPPLGYMVPAHKEVPVIVESEAAIVRLIFDMYTEQGYPLIDITRQLNALGYRTRAGNEFENRGIKYILSNEVYTGKTVWNKRDSSSRTRSKDEWIIADGSHEPIITPEQFEKARNRLSSNYRPKYAKPSGVCSHWLSGIVKCSACGRTLSISLSGANRYGKRYIYLQCYGYLKGKCNVSHRISEKKIVPMVLDALRSAITAEDLAFNVIDSEQTDNSPAALDIYQNQLNAIAKKENRIKMAYVDGIDTLEEYKKNKQLLQEERRSIEERINLLPAPAAKMNESAALRSKIKTVYDGLLDDSLSMQSKNELIKSVVEKIVFNKKSENIDVYFYTLKPL

SEQ ID NO: 6020 - protein, 496 aa, Unknown
  Description of Unknown: Integrase B6021 sequence
  PTHR30461:SF3,IPR036162,PS51737,IPR011109,PTHR30461, PS00397,PF00239,G3DSA:1.10.10.2600,IPR006119,SSF53041, cd00338,SM00857,IPR025827,IPR038109,PS51736, IPR006118,PF13408,G3DSA:3.40.50.1390,PF07508,Coil
MEKLRTGALYIRVSTDKQEELSPDAQRRLLLEYAAKNNIILSNEYIFEEDGISGRKADKRPNFQRMIGLAKSKEHPFDVILVWKFSRFARNQEESIVYKSLLRKNNVEVISVSEPLVDGPFGTLIERIIEWMDEYYSIRLSGEVTRGMTENAMRGNFQASPPLGYSITAHKATPVIVESEAEIVRMIFNLYTEQGYSIIEITRQLNALGYKTRAGKSFENRGIKYILTNEVYTGKSVWNKRDSASRPKDKTEWIIADGAHEPIISPEQFQRAKVRLESNYRPRYAKPSGVCSHWLSGIVKCSACGRSLSISLAGANKQGKRYIYLQCYGYLKGKCNVSHAISEKKIVPMVLAALKDAISSENLSFKVINTDSQSNYPAAIDIYQNQLDELAKKEKRIKMAYMDGIDTIEEYRKNKELLLEERNSIENRINALPKPAAKSDTTAALRSKIKTVYDSLLNEDLSMQTRNDLLKSVVEKIVFNKKESTIDVYFYTSNPL

SEQ ID NO: 6021 - protein, 496 aa, Unknown
  Description of Unknown: Integrase B6022 sequence
  SM00857,G3DSA:1.10.10.2600,IPR036162,PF13408,IPR025827, PS51737,G3DSA:3.40.50.1390,IPR006119,IPR038109,SSF53041, IPR011109,PTHR30461,Coil,PS51736,cd00338, PF00239
MVKNRAAIYARFSSHNQRSESIEIQVENSREYCEREGLQVVREYCDYAQTGRNVDRAEFQRMMRDAKLGLFDFVVIYKVTRIMRNRDEMALARIMLRKAGVEILYAGEEIASGSSGVLQLGMLEVLAEWESAIDSERIRDGIQKNAERCMANGRTLYGWDIVEGRYAINEREAAVLRRMKNLLFSGNSVAEIVRAVDGERSKRGAKFNQDTVTKLLKRVQNAGVYKYAGHEVEDGMPALWSQAEQDMINSILGDRHRPRRKIDSALEFPLSGKLYCARCGMPMAGTSGTSKNGSAYHYYKCRKCRRTVRRDLIEDAVVDMTYEAVKQTDVRKRIAKTLAGYEAERVTEEKPESYFIKKEIRRIDTAFERIWQAIEDGIAPPGGRERTTELKRQRAELEARLRVAEQSEALEPSVGDVLLWLDDLANDTTPLEILNEFVRFVEIDGKDVTVYFMFDELPDDFTPKQKKAEHPCYQRCSTNSLMVEVRRIELRSTKAP

SEQ ID NO: 6022 - protein, 496 aa, Unknown
  Description of Unknown: Integrase B6023 sequence
  SM00857,G3DSA:1.10.10.2600,IPR036162,PF13408,PS51737, G3DSA:3.40.50.1390,IPR025827,IPR006119,IPR038109,PF07508, IPR011109,SSF53041,PTHR30461,PS51736,cd00338, PF00239
MVKNRAAIYARFSSHNQRSESIEIQVENSRRYCEQEGLQVVREYCDYAQTGRNVDRAEFQRMMRDAKLGLFDYVVIYKVTRIMRNRDEMALARIMLRKSGVEILYAGEEIASGSSGVLQLGMLEVLAEWESAIDSERIRDGIQKNAQRCMANGRTLYGWDIVDGRYVVNEREAAVMRRMKNMLFSGSSVADIVRAVSAERSKRGAKFTNDTVSKLLRRVQNAGVYKYAGNEVEDGMPALWPQREQYMINSILDDRHRPRRKIDSAREFPLTGKLYCSTCGAPMFGTSGTSKNGSAYHYYKCRECRRTVRRDLIEGAVADMTYEAVKRNDVRARIAETLAGYEAEQGSDEKPESYFIKKEIRRIDTTFERIWHAIEDGIAPPGGKERIEELNRQKSELEARLCAIEKSESCEVSVDDVLLWLDSLANDTTPLEILNEWVRFVDIDGKDISVYFMFDDLPDDFNPTKKKAEHPCYQRCSTNSLMVEPRRIELRSTTAP

SEQ ID NO: 6023 - protein, 496 aa, Unknown
  Description of Unknown: Integrase B6024 sequence
  PTHR30461:SF3,cd00338,SM00857,G3DSA:1.10.10.2600,IPR036162, PF13408,IPR025827,G3DSA:3.40.50.1390,PS51737,IPR006119, IPR038109,PF07508,IPR011109,SSF53041,PTHR30461, PS51736,Coil,PF00239
MDDRKRAVAYIRVSTKSDAQLHSFGYQESYWRDAISASNQYDFAGIYSDFGISGRSLNRRPQLQRLIADAEQKKFDVVFTKSVARFGRNVEEIVATVRKLREFGIRIFFEKEQIDTFDPNMELYMTLAASIAENDLKIYSENMTWSIRERYKKGWISIGSQIFGYRMNKENNTLIVEPTEAETVKRIYDLYEEGLGQVAISHVLEEEQRANIYGEVKWDVGAIRYILTNEKYKGCALTQKGIYVHGIKQKNDNLAPQWYMENTHEAIITPEQFERVQELIKERARKSKGAKPGDYVFARKIECGCCGGGYSHKFNNTNKPWRNEIWICSKQNTYGAGHCTNTRIKDEVLKKLFVECYNEFVRENGNTDELMELRDSQRKLLEQERELNALRVNRMIEISDYNVEIAKVREQITECNKQIALHEMRGARKEDLVEIKEFDDSKVEIFLEKAVVLNHKITFTFINGMSISREYTNGHGGNTAGWLDRRLDRLSKEGKQ

SEQ ID NO: 6024 - protein, 496 aa, Unknown
  Description of Unknown: Integrase B6025 sequence
  PTHR30461:SF3,IPR036162,PS51737,IPR011109,PTHR30461, PS00397,PF00239,G3DSA:1.10.10.2600,IPR006119,SSF53041, cd00338,SM00857,IPR025827,IPR038109,PS51736, IPR006118,PF13408,G3DSA:3.40.50.1390,PF07508,Coil
MEKLRTGALYIRVSTDKQEELSPDAQRRLLLEYAAKNNIILSNEYIFEEDGISGRKADKRPNFQRMIGLAKSKEHPFDVILVWKFSRFARNQEESIVYKSLLRKNNVEVISVSEPLVDGPFGTLIERIIEWMDEYYSIRLSGEVTRGMTENAMRGNFQASPPLGYSITAHKATPVIVESEAEIVRMIFNLYTEQGYSIIEITRQLNALGYKTRAGKSFENRGIKYILTNEVYTGKSVWNKRDSASRPKDKTEWIIADGAHEPIISPEQFQRAKVRLESNYRPRYAKPSGVCSHWLSGIVKCSACGRSLSITLAGANKQGKRYIYLQCYGYLKGKCNVSHAISEKKIVPMVLAALKDAISSENLSFKVINTDSQSNYPAAIDIYQNQLDELAKKEKRIKMAYMDGIDTIEEYRKNKELLLEERNSIESRINALPKPAAKSDTTAALRSKIKTVYDSLLNEELSMQTRNDLLKSVVEKIVFNKKEATIDVYFYTSNPL

SEQ ID NO: 6025 - protein, 496 aa, Unknown
  Description of Unknown: Integrase B6026 sequence
  PTHR30461:SF3,IPR036162,PS51737,IPR011109,PTHR30461, PS00397,PF00239,G3DSA:1.10.10.2600,IPR006119,SSF53041, cd00338,SM00857,IPR025827,IPR038109,PS51736, IPR006118,PF13408,G3DSA:3.40.50.1390,PF07508,Coil
MEKLRNGALYIRVSTDKQEELSPDAQRRLLLEYAAKNNIILSNEYIFEEDGISGRKADKRPNFQRMIGLAKSKEHPFDVILVWKFSRFARNQEESIVYKSLLRKNNVEVISVSEPLVDGPFGTLIERIIEWMDEYYSIRLSGEVTRGMTENAMRGNFQSSPPLGYMVPAHKEVPVIVEREAAIVRLIFDMYTEQGYPLIDITRQLNALGYRTRAGNEFENRGIKYILSNEVYTGKTVWNKRDSSSRTKSKDEWIIADGSHQPIITPEQFEKAHNRLSSNYRPKYAKPSGVCSHWLSGIVKCSACGRSLSISLAGANKQGKRYIYLQCYGYLKGKCNVSHAISEKKIVPMVLAALKDAISSENLSFKVINTDSQSNYPAAIDIYQNQLDELIKKEKRIKMAYMDGIDTIEEYRKNKELLLEERNSIESRINALPKPAAKSDTTAALRSKIKTVYDSLLNEDLSMQTRNDLLKSVVEKIVFNKKEATIDVYFYTSNPL

SEQ ID NO: 6026 - protein, 496 aa, Unknown
  Description of Unknown: Integrase B6027 sequence
  PTHR30461:SF3,IPR036162,PS51737,IPR011109,PTHR30461, PS00397,PF00239,G3DSA:1.10.10.2600,IPR006119,SSF53041, cd00338,SM00857,IPR025827,IPR038109,PS51736, IPR006118,PF13408,G3DSA:3.40.50.1390,PF07508,Coil
MEKLRNGALYIRVSTDKQEELSPDAQRRLLLDYAAKNNIILSNEYIFEEDGISGRKADKRPNFQRMIGLAKSKEHPFDVILVWKFSRFARNQEESIVYKSLLRKNNVEVISVSEPLVDGPFGTLIERIIEWMDEYYSIRLSGEVTRGMTENAMRGNFQSSPPLGYMVPAHKEVPVIVESEAAIVRLIFDMYTKQGYPLIDITRQLNALGYRTRAGNAFENRGIKYILSNEVYTGKTVWNKRDSSSRTRSKDEWIIADGSHEPIITPEQFEKARNRLSSNYRPKYAKPSGVCSHWLSGIVKCSACGRTLSISLSGANRYGKRYIYLQCYGYLKGKCNVSHRISEKKIVPMVLDALRSAITAEDLAFNVIDSEQTDNSPAALDIYQNQLDAIAKKENRIKMAYVDGIDTLEEYKKNKQLLQEERRSIEERINLLPAPAAKMNESAALRSKIRTVYDGLLDDSLSMQSKNELIKSVVEKIVFNKKSENIDVYFYTLKPL

SEQ ID NO: 6027 - protein, 496 aa, Unknown
  Description of Unknown: Integrase B6028 sequence
  PTHR30461:SF3,IPR036162,PS51737,IPR011109,PTHR30461, PS00397,PF00239,G3DSA:1.10.10.2600,IPR006119,SSF53041, cd00338,SM00857,IPR025827,IPR038109,PS51736, IPR006118,PF13408,G3DSA:3.40.50.1390,PF07508,Coil
MEKLRTGALYIRVSTDKQEELSPDAQRRLLLEYAAKNNIILSNEYIFEEDGISGRKADKRPNFQRMIGLAKSKEHPFDVILVWKFSRFARNQEESIVYKSLLHKNNVEVISVSEPLVDGPFGTLIERIIEWMDEYYSIRLSGEVTRGMTENAMRGNFQASPPLGYSITAHKATPVIVKSEAEIVRMIFNLYTEQGYSIIDITRQLNALGYKTRAGKSFENRGIKYILTNEVYTGKSVWNKRDSASRPKDKTEWIIADGAHEPIISPEQFQRAKVRLESNYRPRYAKPSGVCSHWLSGIVKCSACGRSLSISLAGANKQGKRYIYLQCYGYLKGKCNVSHAISEKKIVPMVLAALKDAISSENLSFKVINTDSQSNYPAAIDIYQNQLDELIKKEKRIKMAYMDGIDTIEEYRKNKELLLEERNSIESRINALPKPAAKSDTTAALRSKIKTVYDSLLNENLSMQTRNDLLKSVVEKIVFNKKESTIDVYFYTSNPL

SEQ ID NO: 6028 - protein, 496 aa, Unknown
  Description of Unknown: Integrase B6029 sequence
  PTHR30461:SF3,IPR036162,PS51737,IPR011109,PTHR30461, PS00397,PF00239,G3DSA:1.10.10.2600,IPR006119,SSF53041, cd00338,SM00857,IPR025827,IPR038109,PS51736, IPR006118,PF13408,G3DSA:3.40.50.1390,PF07508,Coil
MEKLRTGALYIRVSTDKQEELSPDAQRRLLLEYAAKNNIILSNEYIFEEDGISGRKADKRPNFQRMIGLAKSKEHPFDVILVWKFSRFARNQEESIVYKSLLRKNNVEVISVSEPLVDGPFGTLIERIIEWMDEYYSIRLSGEVTRGMTENAMRGNFQASPPLGYSITAHKATPVIVESEAEIVRMIFNLYTEQGYSIIEITRQLNALGYKTRAGKSFENRGIKYILTNEVYTGKSVWNKRDSASRPKDKTEWIIADGAHEPIISPEQFQRAKVRLESNYRPRYAKPSGVCSHWLSGIVKCSACGRSLSISLAGANKQGKRYIYLQCYGYLKGKCNVSHAISEKKIVPMVLAALKDAISSENLSFKVINTDSQSNYPAAIDIYQNQLDELAKKEKRIKMAYMDGIDTIEEYRKNKELLLEERNSIESRINALPKPAAKSDTTAALRSKIKTVYDSLLNEDLSMQTRNDLLKSVVEKIVFNKKESTIDVYFYTSNPL

SEQ ID NO: 6029 - protein, 496 aa, Unknown
  Description of Unknown: Integrase B6030 sequence
  PTHR30461:SF3,cd00338,SM00857,G3DSA:1.10.10.2600,IPR036162, PF13408,IPR025827,G3DSA:3.40.50.1390,PS51737,IPR006119, IPR038109,PF07508,SSF53041,IPR011109,PTHR30461, PS51736,Coil,PF00239
MYEDIKTACLYVRFSSHNQTEQSIEGQTRVCRDFCKRHNIRIVEIYADRATSASKDIEKRVQFLKMIKDSEKGLFDAVIVYKLDRFARSRYDSATYKYRLKRNGVQLISATENISNDPEGIILESVLEGMAEFYSAELSQKINRGMRESAYKHNSIGGAVPLGYKIEDKKLVIDPKTAPIVKEAFEKYADGETVAEICRQFNARGYKTSKGTAFGKSSFTKIFRNERYIGVYTFHDYRAEDAIPAIIDKDLWDRVQLRVGKIKNAPARNKAKVVYLLSGKIFCGHCGSKMNGNCNAGNYCYYQCYGKKNGNVDCKKKNIRKEFIERLVAQDALSLLTDEYIEQIATIACEKNQHEIELDSAIPTIRDRIHQVDLSLNHLLKAIESGSAPDMLVKRMGELEKEKKDLQAQAKKESEDIVELDKAQVIYWLEQFRGGSIEDEEFCRMLIDLFVNSVTVWDEDDNTYKVTVAYNLTSLPTKTYRLNKGGTLSDFASNAP

SEQ ID NO: 6030 - protein, 496 aa, Unknown
  Description of Unknown: Integrase B6031 sequence
  PTHR30461:SF3,IPR036162,PS51737,IPR011109,PTHR30461, PS00397,PF00239,G3DSA:1.10.10.2600,IPR006119,SSF53041, cd00338,SM00857,IPR025827,IPR038109,PS51736, IPR006118,PF13408,G3DSA:3.40.50.1390,PF07508,Coil
MEKLRTGALYIRVSTDKQEELSPDAQRRLLLEYAAKNNIILSNEYIFEEDGISGRKADKRPNFQRMIGLAKSKEHPFDVILVWKFSRFARNQEESIVYKSLLRKNNVEVISVSEPLVDGPFGTLIERIIEWMDEYYSIRLSGEVTRGMTENAMRGNFQASPPLGYSITAHKATPVIVESEAEIVRMIFNLYTEQGYSIIEITRQLNALGCKTRAGKSFENRGIKYILTNEVYTGKSVWNKRDSASRPKDKTEWIIADGAHEPIISPEQFQRAKVRLESNYRPRYAKPSGVCSHWLSGIVKCSACGRSLSISLAGANKQGKRYIYLQCYGYLKGKCNVSHAISEKKIVPMVLAALKDAISSENLSFKVINTDSQSNYPAAIDIYQNQLDELAKKKKRIKMAYMDGIDTIEEYRKNKELLLEERNSIESRINALPKPAAKSDTTAALRSKIKTVYDSLLNEDLSMQTRNDLLKSVVEKIVFNKKESTIDVYFYTSNPL

SEQ ID NO: 6031 - protein, 496 aa, Unknown
  Description of Unknown: Integrase B6032 sequence
  PTHR30461:SF3,IPR036162,PS51737,IPR011109,PTHR30461, PS00397,PF00239,G3DSA:1.10.10.2600,IPR006119,SSF53041, cd00338,SM00857,IPR025827,IPR038109,PS51736, IPR006118,PF13408,G3DSA:3.40.50.1390,PF07508,Coil
MEKLRTGALYIRVSTDKQEELSPDAQRRLLLEYAAKNNIILSNEYIFEEDGISGRKADKRPNFQRMIGLAKSKEHPFDVILVWKFSRFARNQEESIVYKSLLRKNNVEVISVSEPLVDGPFGTLIERIIEWMDEYYSIRLSGEVTRGMTENAMRGNFQASPPLGYSITAHKATPVIVESEAEIVRMIFNLYTEQGYSIIEITRQLNALGYKTRAGKSFENRGIKYILTNEVYTGKSVWNKRDSASRPKDKTEWIIADGAHEPIISPEQFQRAKVRLESNYRPRYAKPSGVCSHWLSGIVKCSACGRSLSISLAGANKQGKRYIYLQCYGYLKGKCNVSHAISEKKIVPMVLAALKDAISSENLSFKVINTDSQSNYPAAIDIYQNQLDELAKKEKRIKMAYMDGIDTIEEYRKNKELLLEERNSIESRINALPKPAAKSDTTAALRSKIKTVYDSLLNEELSMQTRNDLLKSVVEKIVFNKKEATIDVYFYTSNPL

SEQ ID NO: 6032 - protein, 496 aa, Unknown
  Description of Unknown: Integrase B6033 sequence
  PTHR30461:SF3,IPR036162,PS51737,IPR011109,PTHR30461, PS00397,PF00239,G3DSA:1.10.10.2600,IPR006119,SSF53041, cd00338,SM00857,IPR025827,IPR038109,PS51736, IPR006118,PF13408,G3DSA:3.40.50.1390,PF07508,Coil
MEKLRTGALYIRVSTDKQEELSPDAQRRLLLEYAAKNNIILSNEYIFEEDGISGRKADKRPNFQRMIGLAKSKEHPFDVILVWKFSRFARNQEESIVYKSLLRKNNVEVISVSEPLVDGPFGTLIERIIEWMDEYYSIRLSGEVTRGMTENAMRGNFQASPPLGYSITAHKATPVIVESEAEIVRMIFNLYTEQGYSIIEITRQLNALGYKTRAGKSFENRGIKYILTNEVYTGKSVWNKRDSASRPKDKTEWIIADGAHEPIISPEQFQRAKVRLESNYRPRYAKPSGVCSHWLSGIVKCSACGRSLSISLAGANKQGKRYIYLQCYGYLKGKCNVSHAISEKKIVPMVLAALKDAISSENLSFKVINTDSQSNYPAAIDIYQNQLDELAKKEKRIKMAYMDGIDTIEEYRKNKELLLEERNSIESRINALPKPAAKSDTTAALRSKIKTVYDSLLNENLSMQTRNDLLKSVVEKIVFNKKEATIDVYFYTSNPL

SEQ ID NO: 6033 - protein, 496 aa, Unknown
  Description of Unknown: Integrase B6034 sequence
  PTHR30461:SF3,cd00338,SM00857,G3DSA:1.10.10.2600,IPR036162, PF13408,IPR025827,PS51737,G3DSA:3.40.50.1390,IPR006119, IPR038109,PF07508,SSF53041,IPR011109,PTHR30461, PS51736,Coil,PF00239
MYEDIKTACLYVRFSSHNQTEQSIEGQTRVCRDFCKRHNIRIVEIYADRATSASKDIEKRVQFLKMIKDSEKGLFDAVIVYKLDRFARSRYDSATYKYRLKRNGVQLISATENISNDPEGIILESVLEGMAEFYSAELSQKINRGMRESAYKHNSIGGAVPLGYKIEDKKLVIDPKTAPIVKEAFEKYADGETVAEICRQFNARGYKTSKGTAFGKSSFTKIFRNERYIGVYTFHDYRAEDAIPAIIDKDLWDRVQLRVGKIKNAPARNKAKVVYLLSGKIFCGHCGSKMNGNCNAGNYCYYQCYGKKNGNVDCKKKNIRKEFIERLVAQDALSLLTDEYIEQIATIACEKNQHEIELDSALPTIRDRIHQVDLSLNHLLKAIESGSAPDMLVKRMGELEKEKKDLQAQAKKESEDIVELDKAQVIYWLEQFRGGSIKDEEFCRMLIDLFVNSVTVWDEDDNTYKVTVAYNLTSLPTKTYRLNKGGTLSDFASNAP

SEQ ID NO: 6034 - protein, 496 aa, Unknown
  Description of Unknown: Integrase B6035 sequence
  PTHR30461:SF3,IPR036162,PS51737,IPR011109,PTHR30461, PS00397,PF00239,G3DSA:1.10.10.2600,IPR006119,SSF53041, cd00338,SM00857,IPR025827,IPR038109,PS51736, IPR006118,PF13408,G3DSA:3.40.50.1390,PF07508,Coil
MEKLRTGALYIRVSTDKQEELSPDAQRRLLLEYAAKNNIILSNEYIFEEDGISGRKADKRPNFQRMIGLAKSKEHPFDVILVWKFSRFARNQEESIVYKSLLRKNNVEVISVSEPLVDGPFGTLIERIIEWMDEYYSIRLSGEVTRGMTENAMRGNFQASPPLGYSITAHKATPVIVESEAEIVRMIFNLYTEQGYSIIEITRQLNALGYKTRAGKSFENRGIKYILTNEVYTGKSVWNKRDSASRPKDKTEWIIADGAHEPIISPEQFQRAKVRLESNYRPRYAKPSGVCSHWLSGIVKCSACGRSLSISLAGANKQGKRYIYLQCYGYLKGKCNVSHAISEKKIVPMVLAALKDAISSENLSFKVINTDSQSNYPAAIDIYQNQLDELAKKEKRIKMAYMDGIDTIEEYRKNKELLIEERNNIESRINALPKPAAKSDTTAALRSKIKTVYDSLLNEDLSMQTRNDLLKSVVEKIVFNKKESTIDVYFYTSNPL

SEQ ID NO: 6035 - protein, 496 aa, Unknown
  Description of Unknown: Integrase B6036 sequence
  PTHR30461:SF3,IPR036162,PS51737,IPR011109,PTHR30461, PS00397,PF00239,G3DSA:1.10.10.2600,IPR006119,SSF53041, cd00338,SM00857,IPR025827,IPR038109,PS51736, IPR006118,PF13408,G3DSA:3.40.50.1390,PF07508,Coil
MEKLRTGALYIRVSTDKQEELSPDAQRRLLLEYAAKNNIILSNEYIFEEDGISGRKADKRPNFQRMIGLAKSKEHPFDVILVWKFSRFARNQEESIVYKSLLRKNNVEVISVSEPLVDGPFGTLIERIIEWMDEYYSIRLSGEVTRGMTENAMRGNFQASPPLGYSITAHKATPVIVESEAEIVRMIFNLYTEQGYSIIEITRHLNTLGYKTRAGKSFENRGIKYILTNEVYTGKSVWNKRDSASRPKDKTEWIIADGAHEPIISPEQFQRAKVRLESNYRPRYAKPSGVCSHWLSGIVKCSACGRSLSISLAGANKQGKRYIYLQCYGYLKGKCNVSHAISEKKIVPMVLAALKDAISSENLSFKVINTDSQSNYPAAIDIYQNQLDELAKKEKRIKMAYMDGIDTIEEYRKNKKLLLEERNSIESRINALPKPAAKSDTTAALRSKIKTVYDSLLNEELSMQTRNDLLKSVVEKIVFNKKEATIDVYFYTSNPL

SEQ ID NO: 6036 - protein, 496 aa, Unknown
  Description of Unknown: Integrase B6037 sequence
  PTHR30461:SF3,IPR036162,PS51737,IPR011109,PTHR30461, PS00397,PF00239,G3DSA:1.10.10.2600,IPR006119,SSF53041, cd00338,SM00857,IPR025827,IPR038109,PS51736, IPR006118,PF13408,G3DSA:3.40.50.1390,PF07508,Coil
MEKLRTGALYIRVSTDKQEELSPDAQRRLLLEYAAKNNIILSNEYIFEEDGISGRKADKRPNFQRMIGLAKSKEHPFDVILVWKFSRFARNQEESIVYKSLLRKNNVEVISVSEPLVDGPFGTLIERIIEWMDEYYSIRLSGEVTRGMTENAMRGNFQASPPLGYSITAHKATPVIVESEAEIVRLIFNLYTEQGYSIIEITRQLNALGYKTRAGKSFENRGIKYILTNEVYTGKSVWNKRDSASRPKDKTEWIIADGAHEPIISPEQFQRAKVRLESNYRPRYAKPSGVCSHWLSGIVKCSACGRSLSISLAGANKQGKRYIYLQCYGYLKGKCNVSHAISEKKIVPMVLAALKDAISSENLSFKVINTDSQSNYPAAIDIYQNQLDELAKKEKRIKMAYMDGIDTIEEYRKNKELLLEERNSIESRINALPKPAAKSDTTAALRSKIKTVYDSLLNEDLSMQTRNDLLKSVVEKIVFNKKESTIDVYFYTSNPL

SEQ ID NO: 6037 - protein, 496 aa, Unknown
  Description of Unknown: Integrase B6038 sequence
  PTHR30461:SF3,SM00857,G3DSA:1.10.10.2600,IPR036162,PF13408, PS51737,G3DSA:3.40.50.1390,IPR025827,IPR006119,IPR038109, PF07508,IPR011109,SSF53041,PTHR30461,Coil, PS51736,cd00338,PF00239
MQAAAYARYSTEHQTDSSIAYQMRKIEEYCAENGITISARYADEAMSGTNTQRPAFQSLCRDAAQRKFDAVVIYDISRGSRDVADWFGFRKQMAVLGIQVISVEDHIGDILNPADYLTELITVGLGQHHVLTSRQKSMDSIATKAKTGQFLGGTPNFGYDIVDGKYVINPAESKIVQTIFQMYAAGKSYGEILGEIGEVRGKRGKIMGKNSLYYILRNERYAGVYSWCKYHSKIMGKYAGRTPNENAVRIEDSIPAIIDKDTWEAVQMRMEDKKHRACNKAKRSYLLSGLIECTECGASYVGHTSTNKRGYSTRYYCCGNKYRNHTCHSQNINAEELEVFVVQNLRQYLVNLDYEQMAQQIAGQINGATADLKAERKELANIIFQLENGTKAILKGIDYPELQEEMLRLRVRKSELEDIIQRGKEKNPVSVEKLVQLFRDAMERLDTDTKQVCKAMVKVYAHSNGDCDLEVGVHMDGCGSQQHALCTIIYFIKEMA

SEQ ID NO: 6038 - protein, 496 aa, Unknown
  Description of Unknown: Integrase B6039 sequence
  PTHR30461:SF3,IPR036162,PS51737,IPR011109,PTHR30461, PS00397,PF00239,G3DSA:1.10.10.2600,IPR006119,SSF53041, cd00338,SM00857,IPR025827,IPR038109,PS51736, IPR006118,PF13408,G3DSA:3.40.50.1390,PF07508,Coil
MNAAIYARVSTDWQAEHGYSIETQLESCRAKAKEIGATVIKEYVDDGYSGGFLERPGLDALRDAVSDGLYDVVIFHDPDRMARKLIHQLIITEELEKAGASPVFVLERFDSSPEGQMNYQMKGVFAEYERAKIRERTMRGKRAKLRAGKAICDSHIYGYDFDRAASSYVVNPAEAAVVRRVYHLYVVERVGGCETIAEILNADNIPSPTGRKWSPSSVRNMLSRPHYTGHYYANTTYHKKTGPHSEKRLPRPREEWIEMSCPQIIPAEMHEKALAIKAGQRTYKVWKRNAKVALLQGIAYCGSCGSRIYVSGGGKRGRRFYECGAARASSYCPARLMEVPVADDLFWNILERICKSPAALEKYIGENVAEKGSRPAAAEKPEKIARRLEKIAGEKKAIMSWFSQSLLTQSEATERLSALKTEELRLQSELADLRAKSSREPEKIAPSDICAAVAACSVDLAARRRVVLAVVERVDVLRRDFNYGHKYIVDFKIKFK

SEQ ID NO: 6039 - protein, 496 aa, Unknown
  Description of Unknown: Integrase B6040 sequence
  PTHR30461:SF3,IPR036162,PS51737,IPR011109,PTHR30461, PS00397,PF00239,G3DSA:1.10.10.2600,IPR006119,SSF53041, cd00338,SM00857,IPR025827,IPR038109,PS51736, IPR006118,PF13408,G3DSA:3.40.50.1390,PF07508,Coil
MEKLRTGALYIRVSTDKQEELSPDAQRRLLLEYAAKNNIILSNEYIFEEDGISGRKADKRPNFQRMIGLAKSKEHPFDVILVWKFSRFARNQEESIVYKSLLRKNNVEVISVSEPLVDGPFGTLIERIIEWMDEYYSIRLSGEVTRGMTENAMRGNFQASPPLGYSITAHKATPVIVESEAEIVRMIFNLYTEQGYSIIEITRQLNSLGYKTRAGKSFENRGIKYILTNEVYTGKSVWNKRDSASRPKDKTEWIIADGAHEPIISPEQFQRAKVRLESNYRPRYAKPSGVCSHWLSGIVKCSACGRSLSITLAGANKQGKRYIYLQCYGYLKGKCNVSHAISEKKIVPMVLAALKDAISSENLSFKVINTDSQSNYPATIDIYQNQLDELAKKEKRIKMAYMDGIDTIEEYRKNKELLLEERNSIENRINALPKPAAKSDTTAALRSKIKTVYDSLLNEELSMQTRNDLLKSVVEKIVFNKKESTIDVYFYTSNPL

SEQ ID NO: 6040 - protein, 496 aa, Unknown
  Description of Unknown: Integrase B6041 sequence
  PTHR30461:SF3,IPR036162,PS51737,IPR011109,PTHR30461, PS00397,PF00239,G3DSA:1.10.10.2600,IPR006119,SSF53041, cd00338,SM00857,IPR025827,IPR038109,PS51736, IPR006118,PF13408,G3DSA:3.40.50.1390,PF07508,Coil
MEKLRNGALYIRVSTDKQEELSPDAQRRLLLDYAAKNNIILSNEYIFEEDGISGRKADKRPNFQRMIGLAKSKEHPFDVILVWKFSRFARNQEESIVYKSLLRKNNVEVISVSEPLVDGPFGTLIERIIEWMDEYYSIRLSGEVTRGMTENAMRGNFQSSPPLGYMVPAHKEVPVIVESEAAIVRLIFDMYTEQGYPLIDITRQLNALGYRTRAGNEFENRGIKYILSNEVYTGKTVWNKRDSSSRTKSKDEWIIADGSHEPIITPEQFEKARNRLSSNYRPKYAKPSGVCSHWLSGIVKCSACGRTLSISLSGANRYGKRYIYLQCYGYLKGKCNVSHRISEKKIVPMVLDALRSAITAEDLAFNVIDSEQTDNSPAALDIYQNQLDAIAKKENRIKMAYVDGIDTLEEYKKNKQLLQEERRSIEERINLLPAPAAKMNESAALRSKIKTVYDGLLDDSLSMQSKNELIKSVVEKIVFNKKLQNIDVYFYTLKPL

SEQ ID NO: 6041 - protein, 496 aa, Unknown
  Description of Unknown: Integrase B6042 sequence
  PTHR30461:SF3,IPR036162,PS51737,IPR011109,PTHR30461, PS00397,PF00239,G3DSA:1.10.10.2600,IPR006119,SSF53041, cd00338,SM00857,IPR025827,IPR038109,PS51736, IPR006118,PF13408,G3DSA:3.40.50.1390,PF07508,Coil
MEKLRTGALYIRVSTDKQEELSPDAQRRLLLDYAAKNNIILSNEYIFEEDGISGRKADKRPNFQRMIGLAKSKEHPFDVILVWKFSRFARNQEESIVYKSLLRKNNVEVISVSEPLVDGPFGTLIERIIEWMDEYYSIRLSGEVTRGMTENAMRGNFQASPPLGYSITAHKAIPVIVESEAEIVRMIFNLYTEQGYSIIEITRQLNALGYKTRAGKSFENRGIKYILTNEVYTGKSVWNKRDSASRPKDKTEWIIADGAHEPIISPEQFQRAKVRLESNYRPRYAKPSGVCSHWLSGIVKCSACGRSLSISLAGANKQGKRYIYLQCYGYLKGKCNVSHAISEKKIVPMVLAALKDAISSENLSFKVINTDSQNNYPAAIDIYQNQLDELAKKEKRIKMAYMDGIDTIEEYRKNKELLLEERNSIESRINALPKPAAKSDTTAALRSKIKTVYDSLLNEDLSMQTRNDLLKSVVEKIVFNKKESTIDVYFYTSNPL

SEQ ID NO: 6042 - protein, 496 aa, Unknown
  Description of Unknown: Integrase B6043 sequence
  PTHR30461:SF3,IPR036162,PS51737,IPR011109,PTHR30461, PS00397,PF00239,G3DSA:1.10.10.2600,IPR006119,SSF53041, cd00338,SM00857,IPR025827,IPR038109,PS51736, IPR006118,PF13408,G3DSA:3.40.50.1390,PF07508,Coil
MEKLRTGALYIRVSTDKQEELSPDAQRRLLLEYAAKNNIILSNEYIFEEDGISGRKADKRPNFQRMIGLAKSKEHPFDVILVWKFSRFARNQEESIVYKSLLRKNNVEVISVSEPLVDGPFGTLIERIIEWMDEYYSIRLSGEVTRGMTENAMRGNFQASPPLGYSITAHKATPVIVESEAEIVRMIFNLYTEQGYSIIEITRQLNALGYKTRAGKSFENRGIKYILTNEVYTGKSVWNKRDSASRPKDKTEWIIADGAHDPIISPEQFQRAKVRLESNYRPRYAKPSGVCSHWLSGIVKCSACGRSLSISLAGANKQGKRYIYLQCYGYLKGKCNVSHAISEKKIVPMVLAALKDAISSENLSFKVINTDSQSNYPAAIDIYQNQLDELAKKEKRIKMAYMDGIDTIEEYRKNKKLLLEERNSIESRINALPKPAAKSDTTAALRSKIKTVYDSLLNEELSMQTRNDLLKSVVEKIVFNKKEATIDVYFYTSNPL

SEQ ID NO: 6043 - protein, 496 aa, Unknown
  Description of Unknown: Integrase B6044 sequence
  PTHR30461:SF3,cd00338,SM00857,G3DSA:1.10.10.2600,IPR036162, PF13408,PS51737,G3DSA:3.40.50.1390,IPR025827,IPR006119, IPR038109,PF07508,IPR011109,SSF53041,PTHR30461, PS51736,Coil,PF00239
MKKAVIYARYSSDMQREESIDAQVRACTYYARQYQYEIVHVYADRAQSGKRTKNREQFLQMINDASDGEFEVILVHKLNRFGRNTLEVLEYKNNLEDMGIELISVTERLESTPEGKLMLIIIAGMNEFYSDNLSQEVMKGLKENAYQCKFTGGVPALGYKVDPESKKLIIDEREAPIVQLIFRRYANGWSYNMIIDELTRLGYHTKYGKPFGKNSLFELLRNEKYIGVYTFNRAAKRKRDGTRNYHATKDPSEIIRIPGGCPALIDKETFEKVQNIMSENRKMSLQQHGQKVYILSGKLFCANCGARMYGNCKTTRGKTHFYYVCSNSWRKHKCSSRHIPAEELEDEIIEMLQTLICSPEFLQKVSQQLQNDAQKNQEITRKQRKSAAKRLQSINFKIKNLLNLVSQGIDFEEVAETLSTLKQEKETLMNTLDILDNLPPTAEETLPHKLSRLSSLEAAEQAALIRQYVDKIFVLAPKESQFPVKVDIYLRSDLFE

SEQ ID NO: 6044 - protein, 496 aa, Unknown
  Description of Unknown: Integrase B6045 sequence
  PTHR30461:SF3,IPR036162,PS51737,IPR011109,PTHR30461, PS00397,PF00239,G3DSA:1.10.10.2600,IPR006119,SSF53041, cd00338,SM00857,IPR025827,IPR038109,PS51736, IPR006118,PF13408,G3DSA:3.40.50.1390,PF07508,Coil
MEKLRTGALYIRVSTDKQEELSPDAQRRLLLEYAAKNNIILSNEYIFEEDGISGRKADKRPNFQRMIGLAKSKEHPFDVILVWKFSRFARNQEESIVYKSLLRKNNVEVISVSEPLVDGPFGTLIERIIEWMDEYYSIRLSGEVTRGMTENAMRGNFQASPPLGYSITAHKATPVIVESEAEIVRMIFNLYTEQGYSIIEITRHLNALGYKTRAGKSFENRGIKYILTNEVYTGKSVWNKRDSASRPKDKTEWIIADGAHEPIISPEQFQRAKVRLESNYRPRYAKPSGVCSHWLSGIVKCSACGRSLSISLAGANKQGKRYIYLQCYGYLKGKCNVSHAISEKKIVPMVLAALKDAISSENLSFKVINTDSQSNYPAAIDIYQNQLDELTKKEKRIKMAYMDGIDTIEEYRKNKELLLEERNSIENRINALPKPAAKSDTTAALRSKIKTVYDSLLNEELSMQTRNDLLKSVVEKIVFNKKESTIDVYFYTSNPL

SEQ ID NO: 6045 - protein, 496 aa, Unknown
  Description of Unknown: Integrase B6046 sequence
  PTHR30461:SF3,SM00857,G3DSA:1.10.10.2600,IPR036162,PF13408, PS51737,IPR025827,G3DSA:3.40.50.1390,IPR006119,IPR038109, PF07508,SSF53041,IPR011109,PF00239,PTHR30461, PS51736,Coil,cd00338
MKNAVIYARYSSDKQRDESITGQLRECRAFAEKECLVIVHEYIDRAMSARTDKRPDFLRMIADSSRHRFEFVIVYQLDRFARNRYDSAIYKRKLKLNGVRVLSAKEHITSDPSGIIMESLLEGWAEYYSAELSQKVERGMTDNLLEKKWPGGTIPYGFMLDERHHLVQDPAASQAVHSIVDMYISGCTEPEVRQWLADHGYTYRSGRKFSRGFLLKFVKNRLLIGDFTWGGKTYPDFVEPYLSPADWERLQAAIRRRHTPGYKNHRRRRCANYALVGKLFCGVCGRPMTGTCGTSRNGSRHYYYTCSSHNNQKGSGNVACACRNVQKERLENAVLVATVNMLSNPEMIHTIAAAAAAAQKKYGSARQKISDLKNQLRDVQKKLQNSVKAVEAGVVSETLAANIPRYEQKAKELRLELERTKFDVPEKIDPDFIEFYLTRILKKAESEKRRWNVFSTFISRILLCTDHVEIDYTYGQPSSAILPIPGGSDDALVVTQ

SEQ ID NO: 6046 - protein, 496 aa, Unknown
  Description of Unknown: Integrase B6047 sequence
  PTHR30461:SF3,IPR036162,PS51737,IPR011109,PTHR30461, PS00397,PF00239,G3DSA:1.10.10.2600,IPR006119,SSF53041, cd00338,SM00857,IPR025827,IPR038109,PS51736, IPR006118,PF13408,G3DSA:3.40.50.1390,PF07508,Coil
MEKLRTGALYIRVSTDKQEELSPDAQRRLLLEYAAKNNIILSNEYIFEEDGISGRKADKRPNFQRMIGLAKSKEHPFDVILVWKFSRFARNQEESIVYKSLLRKNNVEVISVSEPLVDGPFGTLIERIIEWMDEYYSIRLSGEVTRGMTENAMRGNFQASPPLGYSITAHKATPVIVESEAEIVRMIFNLYTEQGYSIIEITRQLNALGYKTRVGKSFENRGIKYILTNEVYTGKSVWNKRDSASRPKDKTEWIIADGAHEPIISPEQFQRAKVRLESNYRPRYAKPSGVCSHWLSGIVKCSACGRSLSISLAGANKQGKRYIYLQCYGYLKGKCNVSHAISEKKIVPMVLAALKDAISSENLSFKVINTDSQSNYPAAIDIYQNQLDELAKKEKRIKMAYMDGIDTIEEYRKNKELLLEERNSIESRINALPKPAAKSDTTAALRSKIKTVYDSLLNEDLSMQTRNDLLKSVVEKIVFNKKESTIDVYFYTSNPL

SEQ ID NO: 6047 - protein, 496 aa, Unknown
  Description of Unknown: Integrase B6048 sequence
  PTHR30461:SF3,IPR036162,PS51737,IPR011109,PTHR30461, PS00397,PF00239,G3DSA:1.10.10.2600,IPR006119,SSF53041, SM00857,IPR025827,IPR038109,PS51736,cd03768, IPR006118,PF13408,G3DSA:3.40.50.1390,PF07508,Coil
MKHILSPASVLDNVVDLYIRVSSTEQAEEGYSVGEQEARLRNYSAAMGYTIHAVHVDPGFSGASLHRPGIQRVIEDVNNGSCKKVIVWKLDRLSRSQKDTLILLEDVFLANDCHFISLMESFDTSTPFGRCIVGILAAFAQMERENIKLRTTMGRQARIRAGHFHGSHAPIGYKFERTADGTLLSNDLVVDPYASILIKEVYQLFLSGKSLNQISQYMASTYGSQLYDWGHNTAVRRVLANPVYCGKVKAGKEWFPGIHEALVSESDWYMAAALLEHNRAINKRTYTYRNPDGYFSDNLLTGLLYCGDCGARMYARKVSSKKKKYICHSVARTAPAMIKSDHCTNRLHPFTVEQLDALVLGEVEKLALDRSYFDALTSSEAPAPDNDSEVFKDRLAEVQRQIDRLLNLYQTGLVDLPAISSRLGDLNREKEQLEINIESLSHQNYIDLKEAAWETVSDFPAVLESGDMESVHRIIHTLIDKVVVLNTDVTIYWSFC

SEQ ID NO: 6048 - protein, 496 aa, Unknown
  Description of Unknown: Integrase B6049 sequence
  PTHR30461:SF3,IPR036162,PS51737,IPR011109,PTHR30461, PS00397,PF00239,G3DSA:1.10.10.2600,IPR006119,SSF53041, cd00338,SM00857,IPR025827,IPR038109,PS51736, IPR006118,PF13408,G3DSA:3.40.50.1390,PF07508,Coil
MEKLRTGALYIRVSTDKQEELSPDAQRRLLLEYAAKNNIILSNEYIFEEDGISGRKADKRPNFQRMIGLAKSKEHPFDVILVWKFSRFARNQEESIVYKSLLRKNNVEVISVSEPLVDGPFGTLIERIIEWMDEYYSIRLSGEVTRGMTENAMRGNFQASPPLGYSITAHKTTPVIVESEAEIVRLIFNLYTEQGYSIIEITRQLNALGYKTRAGKSFENRGIKYILTNEVYTGKSVWNKRDSASRPKDKTEWIIADGAHEPIISPEQFQRAKVRLESNYRPRYAKPSGVCSHWLSGIVKCSACGRSLSITLAGANKQGKRYIYLQCYGYLKGKCNVSHAISEKKIVPMVLAALKDAISSENLSFKVINTDSQSNYPAAIDIYQNQLDELAKKEKRIKMAYMDGIDTIEEYRKNKELLLEERNSIESRINALPKPAAKSDTTAALRSKIKTVYDSLLNEDLSMQTRNDLLKSVVEKIVFNKKEATIDVYFYTSNPL

SEQ ID NO: 6049 - protein, 496 aa, Unknown
  Description of Unknown: Integrase B6050 sequence
  cd03768,SM00857,G3DSA:1.10.10.2600,IPR036162,PF13408, PS51737,G3DSA:3.40.50.1390,IPR025827,IPR006119,IPR038109, PF07508,IPR011109,SSF53041,PTHR30461,PS51736, Coil,PF00239
  MOD_RES (491)..(494): Any amino acid
MNNRIDAIYARQSVDKKDSISIESQIEFCKYELKGGNCKEYTDKGYSGKNTDRPKFQELVRDIKRGLIAKVVVYKLDRISRSILDFANMMELFQQYNVEFVSSTEKFDTSTPMGRAMLNICIVFAQLERETIQKRVTDAYYSRSQRGFKMGGKAPYGFHTEPIKMDGINTKKLVVNPDEAANIRLMFEMYAQPTTSYGDITRYFAEQGILFNGKELIRPTLAQMLRNPVYVQADLDVYEFFKSQGTVIVNDAADFTGMNGCYLYQGRDVKPSKKNDLKDQMLVLAPHEGIVPSDIWLTCRKKLMNNMKIQSARKATHTWLAGKIKCGNCGYALMSIFNPSGKQYLRCTKRLDNKSCPGCGKIITSELEAVVYQQMIKKLASYKTLTGRKKAAKANPKIAALQVELLHVDSEIEKLVDSLTGANNVLLSYVNVKIAELDGRKQELVKQIAELTVEAISPEQVNQISGYLDTWDNVSFDDKRRVVDLMITTVXXXXIL

SEQ ID NO: 6050 - protein, 496 aa, Unknown
  Description of Unknown: Integrase B6051 sequence
  PTHR30461:SF3,IPR036162,PS51737,IPR011109,PTHR30461, PS00397,PF00239,G3DSA:1.10.10.2600,IPR006119,SSF53041, cd00338,SM00857,IPR025827,IPR038109,PS51736, IPR006118,PF13408,G3DSA:3.40.50.1390,PF07508,Coil
MEKLRTGALYIRVSTDKQEELSPDAQRRLLLEYAAKNNIILSNEYIFEEDGISGRKADKRPNFQRMIGLAKSKEHPFDVILVWKFSRFARNQEESIVYKSLLRKNNVEVISVSEPLVDGPFGTLIERIIEWMDEYYSIRLSGEVTRGMTENAMRGNFQASPPLGYSITAHKATPVIVESEAEIVRMIFNLYTEQGYSIIEITRQLNALGYKTRAGKSFENRGIKYILTNEVYTGKSVWNKRDSASRPKDKTEWIIADGAHEPIISPEQFERAKVRLESNYRPRYAKPSGVCSHWLSGIVKCSACGRSLSISLAGANKQGKRYIYLQCYGYLKGKCNVSHAISEKKIVPMVLAALKDAISSENLSFKVINTDSQSNYPAAIDIYQNQLDELAKKEKRIKMAYMDGIDTIEEYRKNKELLLEERNSIESRINALPKPAAKSDTTAALRSKIKTVYDSLLNEDLSMQTRNDLLKSVVEKIVFNKKESTIDVYFYTSNPL

SEQ ID NO: 6051 - protein, 496 aa, Unknown
  Description of Unknown: Integrase B6052 sequence
  PTHR30461:SF3,SM00857,G3DSA:1.10.10.2600,IPR036162,PF13408, IPR025827,G3DSA:3.40.50.1390,PS51737,IPR006119,IPR038109, PF07508,SSF53041,IPR011109,PF00239,PTHR30461, PS51736,Coil,cd00338
MPKADKQPVKAVIYARYSSDRQREESIEGQLRVCEDYARRNNITILHTYADRAMTGRSDQRPEFQMMIRDAATMAFDIVLVYKLNRFARNRYDSARYKHKLKQYGVRVVSAMENITDDPSGILLESVIEGLSEYYSVELAENVTRGMTENALEGKWPGGIVPLGYKLDEHHHLIIDKAKAEIVRKIYHLALEGHNQKYIIDELNSHHYTNSAGGLFSYNTLRTILKNERYTGVLVWGNVRKENALPVIIDKMTFEAVQKHLQFRKKNKIRSCNEDFHLTGKLFCGQCGSKMVGISGTSKGGSIYYYYACTSHLKKKCQAKSIRRDILENLVCEVTTRILSSPEAIKAIAKQAIKMQKEKKESLEIQSFKAQIADISKKLKNCIKAVENGLVSDVMINHIKDYEKRLEGLKEEVTRLKLLEGTTELTEQHIEFFFWSISQKIKTADRYKSILLSSIVRSVVIQDGYIEIQYNYKNELPILQNPVKVESSYLNQMVTR

SEQ ID NO: 6052 - protein, 496 aa, Unknown
  Description of Unknown: Integrase B6053 sequence
  PTHR30461:SF3,SM00857,G3DSA:1.10.10.2600,IPR036162,PF13408, PS51737,IPR025827,G3DSA:3.40.50.1390,IPR006119,IPR038109, PF07508,IPR011109,SSF53041,PTHR30461,IPR011578, cd00338,G3DSA:3.40.91.30,PF00239
MNEIRAIQTEYRGYLFRSRLEVRWAVFFDACGVDWEYEPEGYDLGNGLYYLPDFLLHGVTINHGYFKKNCDIYVEVKGQMNDADAEKINRFYAAGYPEGNDWGVSHTAVLVVGNIPDGEDMCEILDNLQTEAYHDHHGWPNLYNFETVDEDYFGAYPGVDKHGKFNLFGDDSTYLWSMNSDVTERAYRLARQARFREFGFIKIDMIITKSISRFSRNTVDCLKYTRQLKELNIAVFFEKENINTLDAKGEVLMTIMAALAQQESESLSANVRLGIQFRNQQGKVQINHNWFLGYTKDEDGKLVIVPEEAAVVRRIYAEYLEGASFLQIKRSLEADGIQNGAKHDKWYESNIKQILTNEKYIGDALLQKTYTVSILDKKRATNKGNLPKYYVEGSHEAIIAKDIFLRVQAEIARRANITPDGKKRIYSSRYALSSIVFCGHCGDIYRRIKWNNRGCKSTVWRCVSRVLKKDSGIDCPARTLREEDLHAAVLTAINDA

SEQ ID NO: 6053 - protein, 496 aa, Unknown
  Description of Unknown: Integrase B6054 sequence
  PTHR30461:SF3,IPR036162,PS51737,IPR011109,PTHR30461, PS00397,PF00239,G3DSA:1.10.10.2600,IPR006119,SSF53041, cd00338,SM00857,IPR025827,IPR038109,PS51736, IPR006118,PF13408,G3DSA:3.40.50.1390,PF07508,Coil
MEKLRTGALYIRVSTDKQEELSPDAQRRLLLEYAAKNNIILSNEYIFEEDGISGRKADKRPNFQRMIGLAKSKEHPFDVILVWKFSRFARNQEESIVYKSLLRKNNVEVISVSEPLVDGPFGTLIERIIEWMDEYYSIRLSGEVTRGMTENAMRGNFQASPPLGYSITAHKATPVIVESEAEIVRLIFNLYTEQGYSIIEITRQLNALGYKTRAGKSFENRGIKYILTNEVYTGKSVWNKRDSASRPKDKAEWIIADGAHEPIISPEQFQRAKVRLESNYRPRYAKPSGVCSHWLSGIVKCSACGRSLSITLAGANKQGKRYIYLQCYGYLKGKCNVSHAISEKKIVPMVLAALKDAISSENLSFKVINTDSQSNYPAAIDIYQNQLDELAKKEKRIKMAYMDGIDTIEEYRKNKELLLEERNSIESRINALPKPAAKSDTTAALRSKIKTVYDSLLNEDLSMQTRNDLLKSVVEKIVFNKKESTIDVYFYTSNPL

SEQ ID NO: 6054 - protein, 496 aa, Unknown
  Description of Unknown: Integrase B6055 sequence
  PTHR30461:SF3,cd00338,SM00857,G3DSA:1.10.10.2600,IPR036162, PF13408,IPR025827,G3DSA:3.40.50.1390,PS51737,IPR006119, IPR038109,PF07508,SSF53041,IPR011109,PTHR30461, Coil,PF00239
MFYYIMYLRKSRADDPNESIDEVLAKHERILQNYALLNYKDKIPEENIYREVVSGETIDDRPEINHVFERMQDKECRGVLVVDPQRLSRGDLIDCGTILRLFKYTNTLIVTPRKSFDLSDKYDEKSIKNELMQGSEYLDYIKEIMARGREQSVLLENNYIWPVPPYGYKKVVEGKHQKLVVDPIEGPYVTYAFKRSAEGVGARRIGNEIEAMGARPRKAEHFLPDYINRILQNKVYLGHLCWQKTKTIKRVDGKNLVSKRICNQEYLVIEDTHEALIDEETFNLVQEKHRAPRVKSSKVLQNPLAGLLKCKKCGSSVERKTIKGKRPRYFCRRTQYCKNRSVYMDAVINAVIKGLKEKLEDFEIKVTSNDGSEMDQKVKMITSIDLKLESLEEKQNRLYDFLENGIYTKDVFMNRNELIEKEKKTLINEKKNVEQIISSFKPTKEKIASLHKAIDMLSDPSLPAENVNIFLKSFIKVMYYEKGCTSEDIQLEILLK

SEQ ID NO: 6055 - protein, 496 aa, Unknown
  Description of Unknown: Integrase B6056 sequence
  SM00857,G3DSA:1.10.10.2600,IPR036162,PF13408,PS51737, IPR025827,G3DSA:3.40.50.1390,IPR006119,IPR038109,PF07508, IPR011109,SSF53041,PF00239,PTHR30461,PS51736, Coil,cd00338
MDDRKRAVAYIRVSTKSDAQLHSFGYQESYWRDAIAASNQYDFAGIYSDFGISGRSLNRRPQLQRLIADAEQKKFDVVFTKSVARFGRNVEEIVATVRKLREYGIRIFFEKEQIDTFDPNMELYMTLAASIAENDLKIYSENMTWSIRERYKKGWISIGSQIFGYRMNKENNTLIVEPTEAETVKRIYDLYEEGLGQVAISHILEEEQRANIYGKVKWDVGAIRYILTNEKYKGCALTQKGIYVHGIKQKNDNLAPQWYMENTHEAIITPEQFERVQELIKERARKSKGAKPGDYVFARKIECGCCGGGYSHKFNNTNKPWRNEIWICSKQNTYGAGHCTNTRIKDEVLKNLFVECYNEFVRENGNTDELMELRDSQRKLLEQERELNALRVNRMIEISDYNAEIAKVREQITECNKQIALHEMRGARKEDLVEIKEFDDSKVEIFLEKAVVLNHTITFTFINGMSISREYTNGHGGNTAGWLDRRLDRLSKEGKQ

SEQ ID NO: 6056 - protein, 496 aa, Unknown
  Description of Unknown: Integrase B6057 sequence
  PTHR30461:SF3,IPR036162,PS51737,IPR011109,PTHR30461, PS00397,PF00239,G3DSA:1.10.10.2600,IPR006119,SSF53041, cd00338,SM00857,IPR025827,IPR038109,PS51736, IPR006118,PF13408,G3DSA:3.40.50.1390,PF07508,Coil
MEKLRTGALYIRVSTDKQEELSPDAQRRLLLEYAAKNNIILSNEYIFEEDGISGRKADKRPNFQRMIGLAKSKEHPFDVILVWKFSRFARNQEESIVYKSLLRKNNVEVISVSEPLVDGPFGTLIERIIEWMDEYYSIRLSGEVTRGMTENAMRGNFQASPPLGYSITAHKATPVIVESEAEIVRMIFNLYTEQGYSIIEITRQLNALGYKTRAGKSFENRGIKYILTNEVYTGKSVWNKRDSASRQKDKTEWIIADGAHEPIISPEQFQRAKVRLESNYRPRYAKPSGVCSHWLSGIVKCSACGRSLSITLAGANKQGKRYIYLQCYGYLKGKCNVSHAISEKKIVPMVLAALKDAISSENLSFKVINTDSQSNYPAAIDIYQNQLDELAKKEKRIKMAYMDGIDTIEEYRKNKELLLEERNSIENRINALPKPAAKSDTTAALRSKIKTVYDSLLNDDLSMQTRNDLLKSVVEKIVFNKKESTIDVYFYTSNPL

SEQ ID NO: 6057 - protein, 496 aa, Unknown
  Description of Unknown: Integrase B6058 sequence
  PTHR30461:SF3,SM00857,G3DSA:1.10.10.2600,IPR036162,PF13408, IPR025827,PS51737,G3DSA:3.40.50.1390,IPR006119,IPR038109, PF07508,SSF53041,IPR011109,PTHR30461,Coil, PS51736,cd00338,PF00239
MDRKLKVAAYGRVSTNSKQQSHSFDNQSDYWNKRLAEDPRYEYVGLYADKGISGKYMKYRPQMLGMLDACRCGKIDMIFTKSVQRFARNTIELLEVVRELRDMNIAVYFEKENINTLTAESELYLTIAAAVAEEDLNRYGQNVAWTIQDRFEKGDISVVGIRMLGYETRNKKLHIIPSEAAVVQQMFELYSTGNYSTRQMAELLNSRGYKTAKGNEWTSQTILGILTNEKYKGDALLYKRINVNGQQLMNHGLRDMLYVENSHDAIISKELWDKVRDVLDKKGNKKLRGKTIDNYPFTSLITCPICGKSYIHKVNNAGTKYACPIWRCKMQLTYGKSACSNTGIKDSVLKEKFIDVYNEFIESKRFGETNSEAEQQLKKFINDENELIALHVRGLINKIDLENERVELRKQRILLEQQINEYRQSHIKNLELKPITEFNEELVGRVLKQVTIQDWIITFEFYNGVKISRQYTNGPSGNQKGWKEKIKGGLRAKWKR

SEQ ID NO: 6058 - protein, 496 aa, Unknown
  Description of Unknown: Integrase B6059 sequence
  PTHR30461:SF3,SM00857,G3DSA:1.10.10.2600,IPR036162,PF13408, IPR025827,PS51737,G3DSA:3.40.50.1390,IPR006119,IPR038109, PF07508,IPR011109,SSF53041,PTHR30461,PS51736, cd00338,PF00239
MLGTLPGRAKICHTRYNNTVCNFDYITSRRETKGNAGDTIVKKIDLSPELVRVALYIRVSGEEQKIKGLSLEAQQERLEAYARERGWVIVGIYIDAAKTARKNIHKRTDFQRMMDSVKRDEVNILLFCRLDRWFRSVADYYKIMEVLEAHNCDWKTTDEEYDTTTANGRLYINVKLSIAQNEADIDGERIDVVFDSKIAHGTVVSGSAPFGFRVNEEKRLEVVPEDAAIVQDAFNYFETSISQRATVRYIRETYGVNWCDATFRRMLKEKLYTGVYDRGGRFNDHFCPAIISKQQFDRVQALLERNARSVPSGKVYIFTSILTCAECGHKLVGYKSSDYYYYRCNQHFQRGRCSHNHSAREDVVEKWLFEHLTEELERCQLEWEVAAAKKKASVARTDKAALKRKLTKLKELYVNDLIDIEDYKRDYQIYTAALKQIPEPSIEPPPDFAAVRRLLDNDFKTIYENLTREEKRTLWRSAIKEIRIDNDQNITGVVFG

SEQ ID NO: 6059 - protein, 496 aa, Unknown
  Description of Unknown: Integrase B6060 sequence
  PTHR30461:SF3,IPR036162,PS51737,IPR011109,PTHR30461, PS00397,PF00239,G3DSA:1.10.10.2600,IPR006119,SSF53041, cd00338,SM00857,IPR025827,IPR038109,PS51736, IPR006118,PF13408,G3DSA:3.40.50.1390,PF07508,Coil
MEKLRTGALYIRVSTDKQEELSPDAQRRLLLEYAAKNNIILSNEYIFEEDGISGRKADKRPNFQRMIGLAKSKEHPFDVILVWKFSRFARNQEESIVYKSLLRKNNVEVISVSEPLVDGPFGTLIERIIEWMDEYYSIRLSGEVTRGMTENAMRGNFQASPPLGYSITAHKATPVIVESEAEIVRMIFNLYTEQGYSIIEITRQLNALGYKTRAGKSFENRGIKYILTNEVYTGKSVWNKRDSASRPKDKTEWIIADGAHEPIISPEQFQRAKVRLESNYRPRYAKPSGVCSHWLSGIVKCSACGRSLSISLAGANKQGKRYIYLQCYGYLKGKCNVSHAISEKKIVPMVLAALKDAISSENLSFKVINTDSQSNYPAAIDIYQNQLDELAKKEKRIKMAYMDGIDTIEEYRKNKELLLEERNSIESRINALPKPAAKSDTTAALRSKIKTVYDSLLNEELSMQTRNDLLKSVVEKIVFNKKESTIDVYFYTSNPL

SEQ ID NO: 6060 - protein, 496 aa, Unknown
  Description of Unknown: Integrase B6061 sequence
  PTHR30461:SF3,cd00338,SM00857,G3DSA:1.10.10.2600,IPR036162, PF13408,PS51737,G3DSA:3.40.50.1390,IPR025827,IPR006119, IPR038109,PF07508,IPR011109,SSF53041,PTHR30461, PS51736,Coil,PF00239
MKTAVIYARYSSDKQTEQSIEGQLYDCYNYAKANNITVIGEYIDRAMTGRNDDRPDFQRMIADSAKHTFELVLVWKLDRFARSTEDAAYNRGKLKRNGVRLLSIKEDFGDSSAGDLMMHVMESFNEFYSADLREKTVRGMHQSALKCQSTGGQIPIGYKIEGKKYVIDEATRFIPETVFRMYAEGKRLAEIARYLNEKGYRTRMGRKFTTGSFYTMLSNEKYIGVYKYGDVRIEGGYEAMIDPVLFDAVQKKLVENKKRAPKISERENFYLTGKLFCGHCGEPMNGMSGNSTKGKHLYYRCNGVRKHTGCDKRTERKEELENEIIGAIQRAFANADPEELTRKVIENYEKNSRPADQVKVMKAELQKITNKVDNVVNAIAEMGGNETLYTQLRQLTEQKEQKETEIRIAEHKADDMPTVELVKKILDLIQNADTMTDEGRQLLIDGAVSRIYVYDDSLDIYFKGGKNTEIPLNPANKDDVSDNSFACCKEWGANHA

SEQ ID NO: 6061 - protein, 496 aa, Unknown
  Description of Unknown: Integrase B6062 sequence
  PTHR30461:SF3,IPR036162,PS51737,IPR011109,PTHR30461, PS00397,PF00239,G3DSA:1.10.10.2600,IPR006119,SSF53041, cd00338,SM00857,IPR025827,IPR038109,PS51736, IPR006118,PF13408,G3DSA:3.40.50.1390,PF07508,Coil
MNAAIYARVSTDWQAEHGYSIETQLESCRAKAKEIGATVIKEYIDDGYSGGFLERPGLDALRDAVSDGLYDVVIFHDPDRMARKLIHQLIITEELEKAGASPVFVLERFDSSPEGQMNYQMKGVFAEYERAKIRERTMRGKRAKLRAGKAICDSHIYGYDFDRASSSYVVNPAEAAVVRRVYQLYVVERVGGCETIADILNADNIPSPTGRKWSPSSVRNMLSRPHYTGHYYANTTYHKKTGPRSEKRLPRPREEWIEMSCPQIIPAEMHEKALAIKAGQRTYKVWKRNAKVALLQGIAYCGSCGSRIYVSGGGKRGRRFYECGAARAPSYCPARLMEVPVADDLFWSVLEKICKSPAALEKYIGENVAEKGSRPAAAEKPVKIARRLERIAGEKKAVMAWFSQSLLTQSEATERLSALKSEELRLQSELADLRAKSSREPEKIDPSDICAAVATCSVDLAARRRVVLAVVERVDVLRRDFNYGHKYIVDFKIKFK

SEQ ID NO: 6062 - protein, 496 aa, Unknown
  Description of Unknown: Integrase B6063 sequence
  PTHR30461:SF3,IPR036162,PS51737,IPR011109,PTHR30461, PS00397,PF00239,G3DSA:1.10.10.2600,IPR006119,SSF53041, cd00338,SM00857,IPR025827,IPR038109,PS51736, IPR006118,PF13408,G3DSA:3.40.50.1390,PF07508,Coil
MEKLRNGALYIRVSTDKQEELSPDAQRRLLLDYAAKNNIILSNEYIFEEDGISGRKADKRPNFQRMIGLAKSKEHPFDVILVWKFSRFARNQEESIVYKSLLRKNNVEVISVSEPLVDGPFGTLIERIIEWMDEYYSIRLSGEVTRGMTENAMRGNFQASPPLGYSITAHKATPVIVESEAEIVRMIFNLYTEQGYSIIEITRQLNALGYKTRAGKSFENRGIKYILTNEVYTGKSVWNKRDSASRPKDKTEWIIADGAHEPIISPEQFQRAKVRLESNYRPRYAKPSGVCSHWLSGIVKCSACGRSLSISLAGANKQGKRYIYLQCYGYLKGKCNVSHAISEKKIVPMVLAALKDAISSENLSFKVINTDSQSNYPAAIDIYQNQLDELAKKEKRIKMAYMDGIDTIEEYRKNKELLLEERNSIENRINALPKPAAKSDTTAALRSKIKTVYDSLLNEDLSMQTRNDLLKSVVEKIVFNKKEATIDVYFYTSNPL

SEQ ID NO: 6063 - protein, 496 aa, Unknown
  Description of Unknown: Integrase B6064 sequence
  PTHR30461:SF3,IPR036162,PS51737,IPR011109,PTHR30461, PS00397,PF00239,G3DSA:1.10.10.2600,IPR006119,SSF53041, cd00338,SM00857,IPR025827,IPR038109,PS51736, IPR006118,PF13408,G3DSA:3.40.50.1390,PF07508,Coil
MEKLRTGALYIRVSTDKQEELSPDAQRRLLLEYAAKNNIILSNEYIFEEDGISGRKADKRPNFQRMIGLAKSKEHPFDVILVWKFSRFARNQEESIVYKSLLRKNNVEVISVSEPLVDGPFGTLIERIIEWMDEYYSIRLSGEVTRGMTENAMRGNFQASPPLGYSITARKSTPVIVESEAEIVRMIFNLYTEQGYSIIEITRQLNALGYKTRAGKSFENRGIKYILTNEVYTGKSVWNKRDSASRPKDKTEWIIADGAHEPIISPEQFQRAKVRLESNYRPRYAKPSGVCSHWLSGIVKCSACGRSLSISLAGANKQGKRYIYLQCYGYLKGKCNVSHAISEKKIVPMVLAALKDAISSENLSFKVINTDSQSNYPAAIDIYQNQLDELAKKEKRIKMAYMDGIDTIEEYRKNKELLLEERNSIENRINALPKPAAKSDTTAALRSKIKTVYDSLLNEDLSMQTRNDLLKSVVEKIVFNKKEATIDVYFYTSNPL

SEQ ID NO: 6064 - protein, 496 aa, Unknown
  Description of Unknown: Integrase B6065 sequence
  PTHR30461:SF3,cd00338,SM00857,G3DSA:1.10.10.2600,IPR036162, PS51737,G3DSA:3.40.50.1390,IPR006119,IPR038109,PF07508, IPR011109,SSF53041,PTHR30461,PS51736,Coil, PF00239
MAEKAVIYARFSSDKQREESIEDQVRVCSQFAASKGFEIIKTYTDEARSGTNAAGRPGFQKMILDAQAQRWTKVIVYKTDRFARSRYDSAVYKAKLRKCGVEIVTAAESVPDGPDGIILESVLEGMAEYYSANLAQNVKRGMEGNALKCKHNGVSIFGYDRGADGYYAVNEHEAAGVRMAFDMCAAGETKAEIMRRLNGLGYKTVTGRSFSNEAVSRLLNCERYIGTYTWGDFKKENGMPSIINRDLWDSAHAHMASRGRKRRGKMNAEYLLSGKIYDADGNQFESDCGYGENGKRYHYYRCRKTKVSMRRDEVEDKVIGACARLLNENPDLDERIVDMVLARQDKDAEQEISAREALRRRITDVEREIDNAIDLACKLGSTDRMAVKINGLQDELTALKAELDEIKRGAPLIDRDMILFALYKMRQSDGPRGMVAAFVDRVTVNEDGSLLVQFILCRPTCENKKPEPSNGEFGKLSCGSPYQIRTGDLRLERAAS

SEQ ID NO: 6065 - protein, 496 aa, Unknown
  Description of Unknown: Integrase B6066 sequence
  PTHR30461:SF3,SM00857,G3DSA:1.10.10.2600,IPR036162,PF13408, IPR025827,G3DSA:3.40.50.1390,PS51737,IPR006119,IPR038109, PF07508,SSF53041,IPR011109,PTHR30461,PS51736, cd00338,PF00239
MLGTLPRHAKICHTRYNNTVCNFDYITSRRETKGNAGDTIVKKIDLSPELVRVALYIRVSGEEQKIKGLSLEAQQERLEAYARERGWVIVGIYIDAAKTARKNIHKRTDFQRMMDSVKRDEVDILLFCRLDRWFRSVADYYKIMEVLEAHNCDWKTTDEEYDTTTANGRLYINVKLSIAQNEADIDGERIDVVFDSKIAHGTVVSGSAPFGFRVNEEKRLEVVPEDAAIVQDAFNYFETSISQRATVRYIRETYGVNWCDATFRRMLKEKLYTGVYDRGGRFNDHFCPAIISKQQFDRVQALLERNARSVPSGKVYIFTSILTCAECGHKLVGYKSSDYYYYRCNQHFQRGRCSHNHSAREDVVEKWLFEHLAEELERCQLEWEVAAAKKKASVARTDKAALKRKLTKLKELYVNDLIDIEDYKRDYQIYTAALKQIPEPSIEPPPDFAAVRRLLDNDFKTIYENLTREEKRTLWRSVIKEIRIDNDQNITGVVFG

SEQ ID NO: 6066 - protein, 495 aa, Unknown
  Description of Unknown: Integrase B6067 sequence
  PTHR30461:SF3,IPR036162,PS51737,IPR011109,PTHR30461, PS00397,PF00239,G3DSA:1.10.10.2600,IPR006119,SSF53041, cd00338,SM00857,IPR025827,IPR038109,PS51736, IPR006118,PF13408,G3DSA:3.40.50.1390,PF07508,Coil
MSLKYAYGYIRVSTHDQEEISPDSQEHLLRDYAAKNNIVILKIFTDLGISGRKADKRPGFQEMIGLAKGSDHPVDCILVWKFSRFARNQEESIVYKSLLKKQHNVDVISISEPLADGPFGSLIERIIEWMDEYYSIRLSGEVFRGMKENATRGAYQARPPLGYKVIERGKPPVIVPEEAAIVRMIFDKYVNGKMSFFDIARHLNSLGLKTSHGKAFERRSIEYIIQNPSYCGMIRWNRMENATNRIKDQDEWIIADGMQEAIISKELFDASQERLKKIYKPVGKRPSSTYKHWLSGLLKCPVCGRTLTATTMKRANGEKYAYFSCYGYSKGKCDKPHGVSSLVIEKEVLKALEEALGSNSIVYEMREIRPQELSNERTLISERLASLKSKEDRIRASYREGIDTLEEYKENKALIAKERDSLERQLAELEENTPDKIPDDPTPKMLDRVSSVHDILVSDSYSLVQKNEALKQIIDKIVYDRESDTLKIHFFLYHS

SEQ ID NO: 6067 - protein, 495 aa, Unknown
  Description of Unknown: Integrase B6068 sequence
  PTHR30461:SF3,IPR036162,PS51737,IPR011109,PTHR30461, PS00397,PF00239,G3DSA:1.10.10.2600,IPR006119,SSF53041, cd00338,SM00857,IPR025827,IPR038109,PS51736, IPR006118,PF13408,G3DSA:3.40.50.1390,PF07508,Coil
MMSELRYAYGYIRVSTHDQEEISPDSQENLLREYAARNNIVILKIFSDLGISGRKAEKRPGFQEMVGLAKGSDHPVDLILVWKFSRFARNQEESIVYKSLLKKQHNVEVVSISEPLSDNPFGSLIERIIEWMDEYYSIRLSGEVFRGMKENATRGAYQARPPLGYKVVEHGKPPVIIPEEAEIVRMIFNWYVNEGIGFFDIARRLNNLGLKTSQGKPFERRSIEYIIQNPSYCGMIRWNRTENSTNRIKDKDEWIVTEGQQPAIITKELFDAAQKRFETTYSPSGKRPSSTYKHWLSGLLKCPACGRTLTAATMKRANGEKYSYFSCYGYHKGKCEKPHGISSLILEKEVLACVKESLSSGNISYTLKERQPIEVSNEKNILTSRLESLSGKEERIKASYREGIDTLEEYKANKTLLQKERIHLEEQLKELEDNTPKDAPDPAANMMLRVQGVYDILVSDSFTAAQKNEALKQIVDKIIYNREQDSLKIYYFLYQ

SEQ ID NO: 6068 - protein, 495 aa, Unknown
  Description of Unknown: Integrase B6069 sequence
  PTHR30461:SF3,IPR036162,PS51737,IPR011109,PTHR30461, PS00397,PF00239,G3DSA:1.10.10.2600,IPR006119,SSF53041, cd00338,SM00857,IPR025827,IPR038109,PS51736, IPR006118,PF13408,G3DSA:3.40.50.1390,PF07508,Coil
MSLKYAYGYIRVSTHDQEEISPDSQEHLLRDYAAKNNIVILKIFTDLGISGRKADKRPGFQEMIGLAKGPDHPVDCILVWKFSRFARNQEESIVYKSLLKKQHNVDVISISEPLADGPFGSLIERIIEWMDEYYSIRLSGEVFRGMKENATRGAYQARPPLGYKVIERGKPPVIVPEEAAIVRMIFDKYVNGKMSFFDIARYLNSLGLKTSHGKAFERRSIEYIIQNPSYCGMIRWNRMENATNRIKDQDEWIIADGMQEAIISKELFDAAQERLKKIYKPVGKRPSSTYKHWLSGLLKCPVCGRTLTATTMERANGEKYAYFSCYGYSKGKCDKPHGVSSLVIEKEVLKALEEALGSNSIVYEMREIRPQELSNERTLISERLASLKGKEDRIRASYREGIDTLEEYKENKALIAKERDSLERQLAELEENTPDKIPDDPTPKMLDRVSSVHDILVSDSYSLVQKNEALKQIIDKIVYDRESDTLKIHFFLYHS

SEQ ID NO: 6069 - protein, 495 aa, Unknown
  Description of Unknown: Integrase B6070 sequence
  PTHR30461:SF3,IPR036162,PS51737,IPR011109,PTHR30461, PS00397,PF00239,G3DSA:1.10.10.2600,IPR006119,SSF53041, cd00338,SM00857,IPR025827,IPR038109,PS51736, IPR006118,PF13408,G3DSA:3.40.50.1390,PF07508,Coil
MSLKYAYGYIRVSTHDQEEISPDSQEHLLRDYAAKNNIVILKIFTDLGISGRKADKRPGFQEMIGLAKGPDHPVDCILVWKFSRFARNQEESIVYKSLLKKQHNVDVISISEPLADGPFGSLIERIIEWMDEYYSIRLSGEVFRGMKENATRGAYQARPPLGYKVVERGKPPVIVPEEAAIVRMIFDKYVNGKMSFFDIARHLNSLGLKTSHGKAFERRSIEYIIQNPSYCGMIRWNRMENATNRIKDQDEWIIADGMQEAIISKELFDAAQERLKKIYKPVGKRPSSTYKHWLSGLLKCPVCGRTLTATTMKRANGEKYAYFSCYGYSKGKCDKPHGVSSLVIEKEVLKALEEALGSNSIVYEMREIRPQELSNERTLISERLASLKGKEDRIRASYREGIDTLEEYKENKALIAKERDSLERQLAELEENTPDKIPDDPTPKMLDRVSSVHDILVSDSYSLVQKNEALKQIIDKIVYDRESDTLKIHFFLYHS

SEQ ID NO: 6070 - protein, 495 aa, Unknown
  Description of Unknown: Integrase B6071 sequence
  PTHR30461:SF3,IPR036162,PS51737,IPR011109,PTHR30461, PS00397,PF00239,G3DSA:1.10.10.2600,IPR006119,SSF53041, cd00338,SM00857,IPR025827,IPR038109,PS51736, IPR006118,PF13408,G3DSA:3.40.50.1390,PF07508,Coil
MMSELRYAYGYIRVSTHDQEEISPDSQENLLREYATRNNIVILKIFSDLGISGRKAEKRPGFQEMVGLAKGSDHPVDLILVWKFSRFARNQEESIVYKSLLKKQHNVEVVSISEPLSDNPFGSLIERIIEWMDEYYSIRLSGEVFRGMKENATRGAYQARPPLGYKVVEHGKPPMIVPEEAEIIRMIFNWYANEGIGFFDIARRLNNLGLKTSQGKPFERRSIEYIIQNPSYCGMIRWNRTENSTNRIKDKDEWIVTEGQQPAIITKELFDAAQKRFETTYRPSGKRPSSTYKHWLSGLLKCPACGRTLTAATMKRANGEKYSYFSCYGYHKGKCEKPHGISSLVLEKEVLACVKESLSSGNISYTLKERQPIEVSNEKNILTSRLESLSGKEERIKASYREGIDTLEEYKANKALLQKERIHLEEQLKELEDNAPKDTPDPAANMLLRVQGVYDILVSDSFTAAQKNEALKQIVDKIVYDREQDSLKIYYFLYQ

SEQ ID NO: 6071 - protein, 495 aa, Unknown
  Description of Unknown: Integrase B6072 sequence
  PTHR30461:SF3,IPR036162,PS51737,IPR011109,PTHR30461, PS00397,PF00239,G3DSA:1.10.10.2600,IPR006119,SSF53041, cd00338,SM00857,IPR025827,IPR038109,PS51736, IPR006118,PF13408,G3DSA:3.40.50.1390,PF07508,Coil
MSLKYAYGYIRVSTHDQEEISPDSQEHLLRDYAAKNNIVILKIFTDLGISGRKADKRPGFQEMIGLAKGPDHPVDCILVWKFSRFARNQEESIVYKSLLKKQHNVDVISISEPLADGPFGSLIERIIEWMDEYYSIRLSGEVFRGMKENATRGAYQARPPLGYKVVERGKPPVIVPEEAAIVRMIFDKYVNGKMSFFDIARHLNSLGLKTSHGKAFERRSIEYIIQNPSYCGMIRWNRMENATNRIKNQDEWIIADGMQEAIISKELFDAAQERLKKIYKPVGKRPSSTYKHWLSGLLKCPVCGRTLTATTMERANGEKYAYFSCYGYSKGKCDKPHGVSSLVIEKEVLKALEEALGSNSIVYEMREIRPQELSNERTLISERLASLKGKEDRIRASYREGIDTLEEYKENKALIAKERDALEQQLAELEENAPDKTPEDSTPKMLDRVSSVHDILVSDSYSLVQKNEALKQIIDKIVYDRESDTLKIHFFLYHS

SEQ ID NO: 6072 - protein, 495 aa, Unknown
  Description of Unknown: Integrase B6073 sequence
  PTHR30461:SF3,IPR036162,PS51737,IPR011109,PTHR30461, PS00397,PF00239,G3DSA:1.10.10.2600,IPR006119,SSF53041, cd00338,SM00857,IPR025827,IPR038109,PS51736, IPR006118,PF13408,G3DSA:3.40.50.1390,PF07508,Coil
MSLKYAYGYIRVSTHDQEEISPDSQEHLLRDYAAKNNIVILKIFTDLGISGRKADKRPGFQEMIGLAKGSDHPVDCILVWKFSRFARNQEESIVYKSLLKKQHNVDVISISEPLADGPFGSLIERIIEWMDEYYSIRLSGEVFRGMKENATRGAYQARPPLGYKVVERGKPPVIVPEEAAIVRMIFDKYVNGKMSFFDIARHLNSLGLKTSHGKAFERRSIEYIIQNPSYCGMIRWNRMENATNRIKDQDEWIIADGMQKAIISKELFDAAQERLKKIYKPVGKRPSSTYKHWLSGLLKCPVCGRTLTATTMKRANGEKYAYFSCYGYSKGKCDKPHGVSSLVIEKEVLKALEEALGSNSIVYEMREIRPQELSNERTLISERLASLKGKEDRIRASYREGIDTLEEYKENKALIAKERDSLERQLAELEENAPDKTPEDPTPKMLDRVSSVHDILVSDSYSLVQKNEALKQIIDKIVYDRESDTLKIHFFLYHS

SEQ ID NO: 6073 - protein, 495 aa, Unknown
  Description of Unknown: Integrase B6074 sequence
  PTHR30461:SF3,IPR036162,PS51737,IPR011109,PTHR30461, PS00397,PF00239,G3DSA:1.10.10.2600,IPR006119,SSF53041, cd00338,SM00857,IPR025827,IPR038109,PS51736, IPR006118,PF13408,G3DSA:3.40.50.1390,PF07508,Coil
MSVKYAYGYIRVSTHDQEEISPDSQEHLLRDYAAKNNIVILKIFTDLGISGRKADKRPGFQEMIGLAKGPDHPVDCILVWKFSRFARNQEESIVYKSLLKKQHNVDVISISEPLADGPFGSLIERIIEWMDEYYSIRLSGEVFRGMKENATRGAYQARPPLGYQVIERGKPPVIVPEEAAIVRMIFDKYVNGKMSFFDIARHLNSLGLKTSHGKAFERRSIEYIIQNPSYCGMIRWNRMENATNRIKDQDEWIIADGMQEAIISKELFDAAQERLKKIYKPVGKRPSSTYKHWLSGLLKCPVCGRTLTATTMKRANGEKYAYFSCYGYSKGKCDKPHGVSSLVIEKEVLKALEEALGSNSIVYEMREIRPQELSNERTLISERLASLKGKEDRIRASYREGIDTLEEYKENKALIAKERDSLERQLAELEENAPDKTPEDPTPKMLDRVSSVHDILVSDSYSLVQKNEALKQIIDKIVYDRESDTLKIHFFLYHS

SEQ ID NO: 6074 - protein, 495 aa, Unknown
  Description of Unknown: Integrase B6075 sequence
  PTHR30461:SF3,IPR036162,PS51737,IPR011109,PTHR30461, PS00397,PF00239,G3DSA:1.10.10.2600,IPR006119,SSF53041, cd00338,SM00857,IPR025827,IPR038109,PS51736, IPR006118,PF13408,G3DSA:3.40.50.1390,PF07508,Coil
MMSELRYAYGYIRVSTHDQEEISPDSQENLLREYATRNNIVILKIFSDLGISGRKAEKRPGFQEMVGLAKGSDHPVDLILVWKFSRFARNQEESIVYKSLLKKQHNVEVVSISEPLSDNPFGSLIERIIEWMDEYYSIRLSGEVFRGMKENATRGAYQARPPLGYKVVEHGKPPVIIPEEAEIVRMIFNWYANEGIGFFDIARRLNNLGLKTSQGKPFERRSIEYIIQNPSYCGMIRWNRTENSTNRIKDKDEWIVTEGQQPAIITKELFDAAQKRFETTYRPSGKRPSSTYKHWLSGLLKCPACGRTLTAATMKRANGEKYSYFSCYGYHKGKCEKPHGISSLVLEKEVLACVKESLSSGNISYTLKERQPIEISNEKNILTSRLESLSGKEERIKASYREGIDTLEEYKANKALLQKERIHLEEQLKELEDNAPKDTPDPAANMLLRVQGVYDILVSDSFTVAQKNEALKQIVDKIVYDREQDSLKIYYFLYQ

SEQ ID NO: 6075 - protein, 495 aa, Unknown
  Description of Unknown: Integrase B6076 sequence
  PTHR30461:SF3,IPR036162,PS51737,IPR011109,PTHR30461, PS00397,PF00239,G3DSA:1.10.10.2600,IPR006119,SSF53041, cd00338,SM00857,IPR025827,IPR038109,PS51736, IPR006118,PF13408,G3DSA:3.40.50.1390,PF07508,Coil
MSLKYAYGYIRVSTHDQEEISPDSQEHLLRDYAAKNNIVILKIFTDLGISGRKADKRPSFQEMIGLAKGPDHPVDCILVWKFSRFARNQEESIVYKSLLKKQHNVDVISISEPLADGPFGSLIERIIEWMDEYYSIRLSGEVFRGMKENATRGAYQARPPLGYKVVERGKPPVIVPEEAAIVRMIFDKYVNGKMSFFDIARHLNSLGLKTSHGKAFERRSIEYIIQNPSYCGMIRWNRTENATNRIKDQDEWIITDGMQEAIISKELFDAAQERLKKIYKPVGKRPSSTYKHWLSGLLKCPVCGRTLTATTMKRANGEKYAYFSCYGYSKGKCDKPHGVSSLLIEKEVLKALEEALGSNSIVYEMREIRPQELSNERTLISERLVSLKGKEDRIRASYREGIDTLEEYKENKALIAKERDSLERQLAELEENTSDKIPDDPTPKMLDRVSSVHDILVSDSYSLVQKNEALKQIIDKIVYDRESDTLKIHFFLYHS

SEQ ID NO: 6076 - protein, 495 aa, Unknown
  Description of Unknown: Integrase B6077 sequence
  PTHR30461:SF3,IPR036162,PS51737,IPR011109,PTHR30461, PS00397,PF00239,G3DSA:1.10.10.2600,IPR006119,SSF53041, cd00338,SM00857,IPR025827,IPR038109,PS51736, IPR006118,PF13408,G3DSA:3.40.50.1390,PF07508,Coil
MSLKYAYGYIRVSTHDQEEISPDSQEHLLRDYAAKNNIVILKIFTDLGISGRKADKRPGFQEMIGLAKGPDHPVDCILVWKFSRFARNQEESIVYKSLLKKQHNVDVISISEPLADGPFGSLIERIIEWMDEYYSIRLSGEVFRGMKENATRGAYQARPPLGYKVIERGKPPVIVPEEAAIVRMIFDKYVNGKMSFFDIARHLNSLGLKTSHGKTFERRSIEYIIQNPSYCGMIRWNRMENATNRIKDQDEWIIADGMQEAIISKELFDAAQERLKKIYKPVGKRPSSTYKHWLSGLLKCPVCGRTLTATTMKRANGEKYAYFSCYGYSKGKCDKPHGVSSLVIEKEVLKALEEALGSNSIVYEMREIRPQELSNERTLISERLASLKGKEDRIRASYREGIDTLEEYKENKTLIAKERNSLEQQLAELEENTPDKIPDDPTPKMLDRVSSVHDILVSDSYSLVQKNEALKQIIDKIVYDRESDTLKIHFFLYHS

SEQ ID NO: 6077 - protein, 495 aa, Unknown
  Description of Unknown: Integrase B6078 sequence
  PTHR30461:SF3,IPR036162,PS51737,IPR011109,PTHR30461, PS00397,PF00239,G3DSA:1.10.10.2600,IPR006119,SSF53041, cd00338,SM00857,IPR025827,IPR038109,PS51736, IPR006118,PF13408,G3DSA:3.40.50.1390,PF07508,Coil
MSLKYAYGYIRVSTHDQEEISPDSQEHLLRDYAAKNNIVILKIFTDLGISGRKADKRPGFQEMIGLAKGPDHPVDCILVWKFSRFARNQEESIVYKSLLKKQHNVDVISISEPLADGPFGSLIERIIEWMDEYYSIRLSGEVFRGMKENATRGAYQARPPLGYKVIERGKPPVIVPEEAAIVRMIFDKYVNGKMSFFDIARHLNSLGLKTSHGKAFERRSIEYIIQNPSYCGMIRWNRMENATNRIKDQDEWIIADGMQEAIISKELFDAAQERLKKIYKPVGKRPSSTYKHWLSGLLKCPVCGRTLTATTMKRANGEKYAYFSCYGYSKGKCDKPHGVSSLVIEKEVLKALEEALGSNSIVYEMREIRPQELSNERTLISERLASLKGKEDRIRASYREGIDTLEEYKENKALIAKERDSLERQLAELEENTPDKIPDDPTPKMLDRVSSVHDILVSDSYSLVQKNEALKQIIDKIVYDRESDTLKIHFFLYHS

SEQ ID NO: 6078 - protein, 495 aa, Unknown
  Description of Unknown: Integrase B6079 sequence
  PTHR30461:SF3,cd00338,SM00857,G3DSA:1.10.10.2600,IPR036162, PF13408,PS51737,G3DSA:3.40.50.1390,IPR025827,IPR006119, IPR038109,PF07508,SSF53041,IPR011109,PTHR30461, PS51736,Coil,PF00239
MSNAVIYARYSSDKQSEDSIEAQLRACRQYAATKGYNIVAVYADEAISGKGSMTASRAQYQKMLRDCNKGTFDTILIHKYDRVARSLGEHVNLDTRLQKMGITLIAVGQDFGFGPESKIMRALMWSMSEYYIDNLASETKKGEREIALKGLHNGGYPPFGYDIVNQKYVINPYEAEYVRKIFAAVKNHEGTKDIIAEMAAVGIVGKRGKPLKYSAVYEILRNEKYTGTYIYCVDEEKDRSKRRSKPNAIRIENALPIIIDKATFDEVQKIMDSRKQSGPKTSYLCSGLVYCSCGAKMHAHISTKKGHIYHYYRCSKKCGAPMISMDIVDDAAKTYLRTLLSEENQKAIAKAMRKYKCGEPERAADFKKIVASKISEKQKQYDTLMTNMSSGVLPADVIKDIGAKMNQLRSEIEALKKTEMPKDYTSDQISIWLKALHDSPDDKAIRLLISRIDIKNTTEINIQSTLTSVVGTIGCGRPQHIFPTILFKFLYFFQR

SEQ ID NO: 6079 - protein, 495 aa, Unknown
  Description of Unknown: Integrase B6080 sequence
  PTHR30461:SF3,SM00857,G3DSA:1.10.10.2600,IPR036162,PF13408, IPR025827,G3DSA:3.40.50.1390,PS51737,IPR006119,IPR038109, PF07508,IPR011109,SSF53041,PF00239,PTHR30461, PS51736,Coil,cd00338
MSQKTAVLYARFSCSKQREASIEDQLRVCRAWCAQNGYAIVAEYCDYAISGRTDDRPQFQRMIANAGESDIVLVYMMDRFSRDPFDAPIYKRELQRKGVKLVSALEAIPDSPEGIIYEKLLEGLAACESRKTSIRSRRGMEGNALKCKTNGVRCFGYRTGDDGRYEIDPEEAEIVREVFCRRILGESVNSIATDLRQRGVVSRACNPIKDTFVNNMLHNDKYRGIYSWGGITKKDGMPRIISEEVFMKAQKVKGKKQRRNEEWGEFALSGRVICSACGRNMRGVSGRGSSKRKYEYYSCGSCKEVKPARRDWLEEQIVEALRELLSKPEEARRIAEMCVEAGEPKEIAEGRKRAADSHRAAQTGLSNILKAVEQGIVVPGTKERAEELEDQKERAERELAMYNRKRIDPENFARFLQFGATLTDELLLDAFVYQVMVSNEAVVVTMNFDAENNEPARLEVSRVRTSCKWCPVCKNTRTMMTVVNGAVYLMLQRAA

SEQ ID NO: 6080 - protein, 495 aa, Unknown
  Description of Unknown: Integrase B6081 sequence
  PTHR30461:SF3,IPR036162,PS51737,IPR011109,PTHR30461, PS00397,PF00239,G3DSA:1.10.10.2600,IPR006119,SSF53041, cd00338,SM00857,IPR025827,IPR038109,PS51736, IPR006118,PF13408,G3DSA:3.40.50.1390,PF07508,Coil
MSLKYAYGYIRVSTHDQEEISPDSQEHLLRDYAAKNNIVILKIFTDLGISGRKADKRPGFQEMIGLAKGPDHPVDCILVWKFSRFARNQEESIVYKSLLKKQHNVDVISISEPLADGPFGSLIERIIEWMDEYYSIRLSGEVFRGMKENATRGAYQARPPLGYKVIERGKPPVIVPEEAAIVRMIFDKYVNGKMNFFDIARYLNSLGLKTSHGKAFERRSIEYIIQNPSYCGMIRWNRMENATNRIKDQDEWIIADGMQEAIISKELFDAAQERLKKIYKPVGKRPSSTYKHWLSGLLKCPVCGRTLTATTMERANGEKYAYFSCYGYSKGKCDKPHGVSSLVIEKEVLKALEEALGSNSIVYEMREIRPQELSNERTLISERLASLKGKEDRIRASYREGIDTLEEYKENKALIAKERDSLERQLAELEENTPDKIPDDPTPKMLDRVSSVHDILVSDSYSLVQKNEALKQIIDKIVYDRESDTLKIHFFLYHS

SEQ ID NO: 6081 - protein, 495 aa, Unknown
  Description of Unknown: Integrase B6082 sequence
  PTHR30461:SF3,IPR036162,PS51737,IPR011109,PTHR30461, PS00397,PF00239,G3DSA:1.10.10.2600,IPR006119,SSF53041, cd00338,SM00857,IPR025827,IPR038109,PS51736, IPR006118,PF13408,G3DSA:3.40.50.1390,PF07508,Coil
MSLKYAYGYIRVSTHDQEEISPDSQEHLLRDYAAKNNIVILKIFTDLGISGRKADKRPGFQEMIGLAKGPDHPVDCILVWKFSRFARNQEESIVYKSLLKKQHNVDVISISEPLADGPFGSLIERIIEWMDEYYSIRLSGEVFRGMKENATRGAYQARPPLGYKVIERGKPPVIIPEEAAIVRMIFDKYVNGKMSFFDIARHLNSLGLKTSHGKAFERRSIEYIIQNPSYCGMIRWNRMENATNRIKDQDEWIIADGMQEAIISKELFDAAQERLKKIYKPVGKRPSSTYKHWLSGLLKCPVCGRTLTATTMKRANGEKYAYFSCYGYSKGKCDKPHGVSSLVIEKEVLKALEEALGSNSIVYEMREIRPQELSNERTLISERLASLKGKEDRIRASYREGIDTLEEYKENKTLIAKERDSLEQQLAELEENTPDKIPDDPTPKMLDRVSSVHDILVSDSYSLVQKNEALKQIIDKIIYDRESDTLKIHFFLYHS

SEQ ID NO: 6082 - protein, 495 aa, Unknown
  Description of Unknown: Integrase B6083 sequence
  PTHR30461:SF3,IPR036162,PS51737,IPR011109,PTHR30461, PS00397,PF00239,G3DSA:1.10.10.2600,IPR006119,SSF53041, cd00338,SM00857,IPR025827,IPR038109,PS51736, IPR006118,PF13408,G3DSA:3.40.50.1390,PF07508,Coil
MSLKYAYGYIRVSTHDQEEISPDSQEHLLRDYAAKNNIVILKIFTDLGISGRKADKRPGFQEMIGLAKAPDHPVDCILVWKFSRFARNQEESIVYKSLLKKQHNVDVISISEPLADGPFGSLIERIIEWMDEYYSIRLSGEVFRGMKENATRGAYQARPPLGYKVIERGKPPVIVPEEAAIVRMIFDKYVNGKMSFFDIARHLNSLGLKTSHGKAFERRSIEYIIQNPSYCGMIRWNRMENATNRIKDQDEWIIADGMQEAIISKELFDAAQERLKKIYKPVGKRPSSTYKHWLSGLLKCPVCGRTLTATTMKRANGEKYAYFSCYGYSKGKCDKPHGVSSLVIEKEVLKALEEALGSNSIVYEMREIRPQELSNERILISERLASLKGKEDRIRASYREGIDTLEEYKENKALIAKERGSLERQLAELEENTPDKIPDDPTPKMLDRVSSVHDILVSDSYSLVQKNEALKQIIDKIVYDRESDTLKIHFFLYHS

SEQ ID NO: 6083 - protein, 495 aa, Unknown
  Description of Unknown: Integrase B6084 sequence
  PTHR30461:SF3,SM00857,G3DSA:1.10.10.2600,IPR036162,PF13408, IPR025827,G3DSA:3.40.50.1390,PS51737,IPR006119,IPR038109, PF07508,IPR011109,SSF53041,PF00239,PTHR30461, PS51736,Coil,cd00338
MSQKTAVLYARFSCSKQREASIEDQLRVCRDWCSREGYAIVAEYCDYAISGRTDDRPQFQKMIANAGESDIVLVYMMDRFSRDPFDAPIYKRELQAHGVRLVSALEAIPDSPEGIIYEKLLEGLAACESRKTSIRSRRGMEGNALQCKTNGVRCFGYRTGEDGRYEIVPEEAEIVREVFRRRTHGESVNSIAMDLRQRGVVSRAGNPIKDTFVNNMLHNDKYRGIYSWGGITQKDGMPRIISEEVFMKAQRVKGKKQRQNEQWGDFALSGRVICSACGRNMRGVSGRGSSKRKYEYYACGSCKEVKPVRRDWLEGQIVKALRELLSQPEEARRIAEMCVDGGEPKEIAEGRKRAAAALRAAQTGLSNILKAVEQGIVVPGTKERAEELEAQKDRAERELAMYDRKRIDPENFARFLQFGATLTDELLLDAFVYQVMVSDEAVVVTMNFDAESNEPARLEVSRVRTFFKWCPVCKNTRTMMTVVNGAVYLMMPRAA

SEQ ID NO: 6084 - protein, 495 aa, Unknown
  Description of Unknown: Integrase B6085 sequence
  PTHR30461:SF3,IPR036162,PS51737,IPR011109,PTHR30461, PS00397,PF00239,G3DSA:1.10.10.2600,IPR006119,SSF53041, cd00338,SM00857,IPR025827,IPR038109,PS51736, IPR006118,PF13408,G3DSA:3.40.50.1390,PF07508,Coil
MSLKYAYGYIRVSTHDQEEISPDSQEHLLRDYAAKNNIVILKIFTDLGISGRKADKRPGFQEMIGLSKGPDHPVDCILVWKFSRFARNQEESIVYKSLLKKQHNVDVISISEPLADGPFGSLIERIIEWMDEYYSIRLSGEVFRGMKENATRGAYQARPPLGYKVVERGKPPVIVPEEAAIVRMIFDKYVNGKMSFFDIARYLNSLGLKTSHGKAFERRSIEYIIQNPSYCGMIRWNRMENATNRIKDKDEWIIADGMQEAIISKELFDAAQERLKKIYKPVGKRPSSTYKHWLSGLLKCPVCGRTLTATTMKRANGEKYAYFSCYGYSKGKCDKPHGVSSLVIEKEVLKALEEALGSNSIVYEMREIRPQELSNERTLISERLASLKGKEDRIRASYREGIDTLEEYKENKALIAKERDSLERQLAELEENTPDKIPDDPTPKMLDRVSSVHDILVSDSYSLVQKNEALKQIIDKIVYDRESDTLKIHFFLYHS

SEQ ID NO: 6085 - protein, 495 aa, Unknown
  Description of Unknown: Integrase B6086 sequence
  SM00857,G3DSA:1.10.10.2600,IPR036162,PS51737,G3DSA:3.40.50.1390, IPR006119,IPR038109,PF07508,IPR011109,SSF53041, PTHR30461,Coil,PS51736,cd00338,PF00239
MPTARTAVIYARFSCNKQREASIDDQLRICRQWCQREKYAIVAEYCDYAISGRTDDRPEFQRMVANAGESDIVLVYMMDRFSRGEYDAPIYKRELAQHGVKLVSALEQIPDSPEGIIYEKLLEGLAACESKKTAIRTRRGMEGNALKCKTNGVRVFGYASNEADEYVINEDEAAFVREAFKRRIAKETTNSIARDFAARGVKTSQGNPCGYSMVERMVKNRKYTGRYEWGGVVKEGGMPAIIDEVTFMEAQGIRAAKERSAESWGDFALSGKAICAGCGRNLQGVSGRGRGNRKYEYYRCHDGCVKPVRREELEGEIVKALRALLQDREEALRIARMVAESSDGAEVAARRKQAAQSLSAAERGLRNILNAIEQGIIAPGAKERIAELEHQRDRAKLDLEAIRDDQIDPERLADFLQCGSALDDATLLKAFVYQASVSDEECIVTLNYDVENNEPARLDVQRVRTKCKWCTVCASPRTEVCAVGTIIFVRIPRAA

SEQ ID NO: 6086 - protein, 495 aa, Unknown
  Description of Unknown: Integrase B6087 sequence
  PTHR30461:SF3,IPR036162,PS51737,IPR011109,PTHR30461, PS00397,PF00239,G3DSA:1.10.10.2600,IPR006119,SSF53041, cd00338,SM00857,IPR025827,IPR038109, PS51736,IPR006118,PF13408,G3DSA:3.40.50.1390,PF07508,Coil
MEKLRTGALYIRVSTDKQEELSPDAQRRLLLEYAAKNNIILSNEYIFEEDGISGRKADKRPNFQRMIGLAKSKEHPFDVILVWKFSRFARNQEESIVYKSLLRKNNVEVISVSEPLVDGPFGTLIERIIEWMDEYYSIRLSGEVTRGMTENAMRGNFQASPPLGYSITAHKATPVIVESEAEIVRMIFNLYTEQGYSIIEITRQLNALGYKTRAGKSFENRGIKYILTNEVYTGKSVWNKRDSASHPKDKTEWIIADGAHEPIISPEQFQRAKVRLESNYRPRYAKPSGVCSHWLSGIVKCSACGRSLSISLAGANKQGKRYIYLQCYGYLKGKCNVSHAISEKKIVPMVLAALKDAISSENLSFKVINDSQSNYPAAIDIYQNQLDELAKKEKRIKMAYMDGIDTIEEYRKNKELLLEERNSIESRINALPKPAAKSDTTAALRSKIKTVYDSLLNEDLSMQTRNDLLKSVVEKIVFNKKESTIDVYFYTSNPL

SEQ ID NO: 6087 - protein, 495 aa, Unknown
  Description of Unknown: Integrase B6088 sequence
  PTHR30461:SF3,IPR036162,PS51737,IPR011109,PTHR30461, PS00397,PF00239,G3DSA:1.10.10.2600,IPR006119,SSF53041, cd00338,SM00857,IPR025827,IPR038109,PS51736, IPR006118,PF13408,G3DSA:3.40.50.1390,PF07508,Coil
MMSELRYAYGYIRVSTHDQEEISPDSQENLLREYATRNNIVILKIFSDLGISGRKAEKRPGFQEMVGLAKGSDHPVDLILVWKFSRFARNQEESIVYKSLLKKQHNVEVVSISEPLSDNPFGSLIERIIEWMDEYYSIRLSGEVFRGMKENATRGAYQARPPLGYKVVEHGKPPVIIPEEAEIVRMIFNWYANEGIGFFDIARRLNNLGLKTSQGKPFERRSIEYIIQNPSYCGMIRWNRTENSTNRIKDKDEWIVTEGQQPAIIAKELFDAAQKRFETTYRPSGKRPSSTYKHWLSGLLKCPACGRTLTAATMKRANGEKYSYFSCYGYHKGKCEKPHGISSLVLENEVLACVKESLSSGSISYTLKERQPIEVSNEKNILTSRLESLSGKEERIKASYREGIDTLEEYKANKALLQKERIHLEEQLKELEDNAPKDAPDPAANMLLRVQGVYDILVSDSFTAAQKNEALKQIVDKIIYDREQDSLKIYYFLYQ

SEQ ID NO: 6088 - protein, 495 aa, Unknown
  Description of Unknown: Integrase B6089 sequence
  SM00857,G3DSA:1.10.10.2600,PS51736,IPR036162,PS51737, G3DSA:3.40.50.1390,PF13408,IPR025827,IPR006119,IPR038109, PF07508,IPR011109,SSF53041,PF00239,PTHR30461, mobidb-lite,Coil,cd00338
MVKNRAAIYARFSSHNQRSESIEIQVENSRAYCEREGLQVVREYCDYAQTGRNIDRAEFQRMMSDARHGLFDYVVIYKVTRIMRNRDEMSLARIMLRKAGVEILYAGEDISSGSSGVLQLGMLEVLAEYESALDSERIRDGIQKNAQRCMANGRTLYGWDIVEGRYVINEREASVLRRMKNMLFAGSSVADIVRAVSTERSKRGAKFNQDTVTKLLKRVQNAGVYKYAGHEVPDGMPAIWSQVEQDMIDNILGDRHKPRRKINSTLEFPLSGKLYCAKCGAPMAGTSGTSCTGATYHYYKCRKCRRTVRRDLVEDVVCDMTLQAVAREDVRQRIASGMVAFQAEQPKEQSRSYAIKKELKRIDRTFERIWQAIEDGIAPPGGRERTEELKQRKSELEAELRIAEREETFNIGVDELMLWLDDAAENLTPEVILGTFVRFVEIDGKTLNIYFAFDHYGDDFRPKQKKAEPCPEGHSSTNSPMVEARRIELRSTKAP

SEQ ID NO: 6089 - protein, 495 aa, Unknown
  Description of Unknown: Integrase B6090 sequence
  PTHR30461:SF3,IPR036162,PS51737,IPR011109,PTHR30461, PS00397,PF00239,G3DSA:1.10.10.2600,IPR006119,SSF53041, cd00338,SM00857,IPR025827,IPR038109,PS51736, IPR006118,PF13408,G3DSA:3.40.50.1390,PF07508,Coil
MSLKYAYGYIRVSTHDQEEISPDSQEHLLRDYAAKNNIVILKIFTDLGISGRKADKRPGFQEMIGLSKGPDHPVDCILVWKFSRFARNQEESIVYKSLLKKQHNVDVISISEPLADGPFGSLIERIIEWMDEYYSIRLSGEVFRGMKENATRGAYQARPPLGYQVIERGKPPVIVPEEAAIVRMIFDKYVNGKMSFFDIARHLNSLGLKTSHGKAFERRSIEYIIQNPSYCGMIRWNRMENATNRIKDQDEWIIADGMQEAIISKELFDAAQERLKKIYKPVGKRPSSTYKHWLSGLLKCPVCGRTLTATTMERANGEKYAYFSCYGYSKGKCDKPHGVSSLVIEKEVLKALEEALGSNSIVYEMREIRPQELSNERTLISERLASLKGKEDRIRASYREGIDTLEEYKENKALIAKERDSLERQLAELEENTPDKIPDDPTPKMLDRVSSVHDILVSDSYSLVQKNEALKQIIDKIVYDRESDTLKIHFFLYHS

SEQ ID NO: 6090 - protein, 495 aa, Unknown
  Description of Unknown: Integrase B6091 sequence
  PTHR30461:SF3,SM00857,G3DSA:1.10.10.2600,IPR036162,PF13408, PS51737,IPR025827,G3DSA:3.40.50.1390,IPR006119,IPR038109, PF07508,SSF53041,IPR011109,PF00239,PTHR30461, PS51736,Coil,cd00338
MSNAVIYARYSSDKQSEDSIEAQLRACRQYAATKGYNIVAVYADEAISGKGSMTASRAQYQKMLRDCNKGTFDTILIHKYDRVARSLGEHVNLDARLQKMGITLIAVGQDFGFGPESKIMRALMWSMSEYYIDNLANETKKGEREVALKGLHNGGYPPFGYDIVDQKYVINPYEAEYVRKIFAAVKNHEGTKDIIAEMAAVGIVGKRGKPLKYSAVYEILRNEKYTGTYIYCVDEEKDRSKRRSKPNAIRIENALPMIIDKATFDEVQKIMDSRKQSGPKTSYLCSGLVYCSCGAKMHAHISTKKGHVYHYYRCSKKCGAPMISMDIVDDAAKTYLRTLLNEENQKAIAKAMRKYKCGEPERAADFKKIVASKISEKQKQYDTLMTNMSSGVLPADVIEDIGAKMNQLRSEIEALKKTEMPKDYTTDQISLWLKALHDSPDDKAIRLLISRIDIKNTTEINIQSTLTSVVGTIGCGRPQHIFPTILFKFLYFFQR

SEQ ID NO: 6091 - protein, 495 aa, Unknown
  Description of Unknown: Integrase B6092 sequence
  PTHR30461:SF3,IPR036162,PS51737,IPR011109,PTHR30461, PS00397,PF00239,G3DSA:1.10.10.2600,IPR006119,SSF53041, cd00338,SM00857,IPR025827,IPR038109,PS51736, IPR006118,PF13408,G3DSA:3.40.50.1390,PF07508,Coil
MSLKYAYGYIRVSTHDQEEISPDSQEHLLRDYAAKNNIVILKIFTDLGISGRKADKRPGFQEMIGLAKGPDHPVDCILVWKFSRFARNQEESIVYKSLLKKQHNVDVISISEPLADGPFGSLIERIIEWMDEYYSIRLSGEVFRGMKENATRGAYQARPPLGYKVVERGKPPVIVPEEAAIVRMIFDKYVNGKMSFFDIARHLNSLGLKTSHGKAFERRSIEYIIQNPSYCGMIRWNRMENATNRIKNQDEWIIADGMQEAIISKELFDAAQERLKKIYKPVGKRPSSTYKHWLSGLLKCPVCGRTLTATTMERANGEKYAYFSCYGYSKGKCDKPHGVSSLVIEKEVLKALEEALGSNSIVYEMREIRPQELSNERTLISERLASLKGKEDRIRASYREGIDTLEEYKENKALIAKERDSLERQLAELEENAPDKTPEDPTPKMLDRVSSVHDILVSDSYSLVQKNEALKQIIDKIVYDRESDTLKIHFFLYHS

SEQ ID NO: 6092 - protein, 495 aa, Unknown
  Description of Unknown: Integrase B6093 sequence
  PTHR30461:SF3,cd00338,SM00857,G3DSA:1.10.10.2600,IPR036162, PF13408,IPR025827,G3DSA:3.40.50.1390,PS51737,IPR006119, IPR038109,PF07508,IPR011109,SSF53041,PTHR30461, PS51736,Coil,PF00239
MRGVIYARYSPGPHQTEQSIEGQVADCQQYAEEHGIDIIEIYADRHVSGKSVVGRDEFQRMLRDAEKGRFDCVLVWKIDRFGRDRQDIAMGKMALKRAGVKLMYARESVPEGPEGIILESVLEGLAEYYSADLRQKVIRGMKETAKKGQYCGQSLPIGYKVDAERHIVVDEREAAAVREAFKLHIAGGQIRDIVQLFADRGIMGRRGKPVSNAVVYRMLRNEKYLGEFYIQDVKLNVEPIIDQATFLEAARHFKTSRNNAAGRAKVNYLLSCKMFCGYCGSMISAEAGTGKLGKVYRYYKCGDKKRGKKCELKPFPKDHLEDAIILATVNDMLTDEMIEKLTVRILEVQEQENADDPVVGLRRRLDSNKKRQRNLLDAIEEGGARGLVSRLAALEEEEEQLVLEIQRAEIKRPRLTHEVVEAWLRSFRVGDVTDDDFRARLVDTFIARVELRNDEALIFYNIREKGPHSRVRVRPEWWSRGESNPINKFKKLLRH

SEQ ID NO: 6093 - protein, 495 aa, Unknown
  Description of Unknown: Integrase B6094 sequence
  PTHR30461:SF3,IPR036162,PS51737,IPR011109,PTHR30461, PS00397,PF00239,G3DSA:1.10.10.2600,IPR006119,SSF53041, cd00338,SM00857,IPR025827,IPR038109,PS51736, IPR006118,PF13408,G3DSA:3.40.50.1390,PF07508,Coil
MEKLRTGALYIRVSTDKQEELSPDAQRRLLLEYAAKNNIILSNEYIFEEDGISGRKADKRPNFQRMIGLAKSKEHPFDVILVWKFSRFARNQEESIVYKSLLRKNNVEVISVSEPLVDGPFGTLIERIIEWMDEYYSIRLSGEVTRGMTENAMRGNFQSSPPLGYMVPAHKEVPVIVESEAAIVRLIFDMYTEQGYPLIDITRQLNALGYRTRAGNEFENRGIKYILSNEVYTGKTVWNKRDSSSRTKSKDEWIIADGSHQPIITPEQFEKAHNRLSSNYRPKYAKPSGVCSHWLSGIVKCSACGRSLSISLAGANKQGKRYIYLQCYGYLKGKCNVSHAISEKKIVPMVLAALKDAISSENLSFKVINDSQSNYPAAIDIYQNQLDELAKKEKRIKMAYMDGIDTIEEYRKNKELLLEERNSIEGRINALPKPAAKPDTTAALRSKIKTVYDSLLNEELSMQTRNDLLKSVVEKIVFNKKESTIDVYFYTSNPL

SEQ ID NO: 6094 - protein, 495 aa, Unknown
  Description of Unknown: Integrase B6095 sequence
  PTHR30461:SF3,IPR036162,PS51737,IPR011109,PTHR30461, PS00397,PF00239,G3DSA:1.10.10.2600,IPR006119,SSF53041, cd00338,SM00857,IPR025827,IPR038109,PS51736, IPR006118,PF13408,G3DSA:3.40.50.1390,PF07508,Coil
MSLKYAYGYIRVSTHDQEEISPDSQEHLLRDYAAKNNIVILKIFTDLGISGRKADKRPGFQEMIGLAKGPDHPVDCILVWKFSRFARNQEESIVYKSLLKKQHNVDVISISEPLADGPFGSLIERIIEWMDEYYSIRLSGEVFRGMKENATRGAYQARPPLGYKVIERGKPPVIVPEEAAIVRMIFDKYVNGKMSFFDIARHLNSLGLKTSHGKAFERRSIEYIIQNPSYCGMIRWNRMENATNRIKDQDEWIIADGMQEAIISKELFDAAQERLKKIYKPVGKRPSSTYKHWLSGLLKCPVCGRTLTATTMKRANGEKYAYFSCYGYSKGKCDKPHGVSSLVIEKEVLKALEEALGSNSIVYEMREIRPQELSNERTLISERLASLKGKEDRIRASYREGIDTLEEYKENKALIAKERDSLERQLAELEENTPDKIPDDPTLKMLDRVSSVHDILVSDSYSLVQKNEALKQIIDKIVYDRESDTLKIHFFLYHS

SEQ ID NO: 6095 - protein, 495 aa, Unknown
  Description of Unknown: Integrase B6096 sequence
  PTHR30461:SF3,IPR036162,PS51737,IPR011109,PTHR30461, PS00397,PF00239,G3DSA:1.10.10.2600,IPR006119,SSF53041, cd00338,SM00857,IPR025827,IPR038109,PS51736, IPR006118,PF13408,G3DSA:3.40.50.1390,PF07508,Coil
MSLKYAYGYIRVSTHDQEEISPDSQEHLLRDYAAKNNIVILKIFTDLGISGRKADKRPGFQEMIGLAKGPDHPVDCILVWKFSRFARNQEESIVYKSLLKKQHNVDVISISEPLADGPFGSLIERIIEWMDEYYSIRLSGEVFRGMKENATRGAYQARPPLGYKVIERGKPPVIVPEEAAIVRMIFDKYVNGKMSFFDIARYLNSLGLKTSHGKAFERRSIEYIIQNPSYCGMIRWNRMENATNRIKDQDEWIIADGMQEAIISKELFDAAQERLKKIYKPVGKRPSSTYKHWLSGLLKCPVCGRTLTATTMERANGEKYAYFSCYGYSKGKCDKPHGVSSLVIEKEVLKALEEALGSNSIVYEMREIRPQELSNERTLISERLASLKGKEDRIRASYREGIDTLEEYKENKALIAKERDSLERQLAELEENTPDKISDDPTPKMLDRVSSVHDILVSDSYSLVQKNEALKQIIDKIVYDRESDTLKIHFFLYHS

SEQ ID NO: 6096 - protein, 495 aa, Unknown
  Description of Unknown: Integrase B6097 sequence
  PTHR30461:SF3,IPR036162,PS51737,IPR011109,PTHR30461, PS00397,PF00239,G3DSA:1.10.10.2600,IPR006119,SSF53041, cd00338,SM00857,IPR025827,IPR038109,PS51736, IPR006118,PF13408,G3DSA:3.40.50.1390,PF07508,Coil
MSLKYAYGYIRVSTHDQEEISPDSQEHLLRDYAAKNNIVILKIFTDLGISGRKADKRPGFQEMIGLAKGPDHPVDCILVWKFSRFARNQEESIVYKSLLKKQHNVDVISISEPLADGPFGSLIERIIEWMDEYYSIRLSGEVFRGMKENATRGAYQARPPLGYKVIERGKPPVIVPEEAAIVRMIFDKYVNGKMSFFDIARHLNSLGLKTSHGKAFERRSIEYIIQNPSYCGMIRWNRMENATNRIKDQDEWIIADGMQEAIISKELFDAAQERLKKSYKPVGMRPSSTYKHWLSGLLKCPVCGRTLTATTMKRANGEKYAYFSCYGYSKGKCDKPHGVSSLVIEKEVLKALEEALGSNSIVYEMREIRPQELSNERTLISERLASLKGKEDRIRASYREGIDTLEEYKENKVLIAKERDSLERQLAELEENTPDKIPDDPTPKMLDRVSSVHDILVSDSYSLVQKNEALKQIIDKIVYDRESDTLKIHFFLYHS

SEQ ID NO: 6097 - protein, 495 aa, Unknown
  Description of Unknown: Integrase B6098 sequence
  PTHR30461:SF3,IPR036162,PS51737,IPR011109,PTHR30461, PS00397,PF00239,G3DSA:1.10.10.2600,IPR006119,SSF53041, cd00338,SM00857,IPR025827,IPR038109,PS51736, IPR006118,PF13408,G3DSA:3.40.50.1390,PF07508,Coil
MSLKYAYGYIRVSTHDQEEISPDSQEHLLRDYAAKNNIVILKIFTDLGISGRKADKRPGFQEMISLAKGPDHPVDCILVWKFSRFARNQEESIVYKSLLKKQHNVDVISISEPLADGPFGSLIERIIEWMDEYYSIRLSGEVFRGMKENATRGAYQARPPLGYKVIERGKPPVVVPEEAAIVRMIFDKYVNGKMSFFDIARHLNSLGLKTSHGKAFERRSIEYIIQNPSYCGMIRWNRMENATNRIKDQDEWIIADGMQEAIISKELFDTAQERLKKIYKPVGKRPSSTYKHWLSGLLKCPVCGRTLTATTMKRANGEKYAYFSCYGYSKGKCDKPHGVSSLVIEKEVLKALEEALGSNSIVYEMREIRPQELSNERTLISERLASLKGKEDRIRASYREGIDTLEEYKENKALIAKERDSLERQLAELEENTPDKIPDDPTPKMLDRVSSVHDILVSDSYSLVQKNEALKQIIDKIVYDRESDTLKIHFFLYHS

SEQ ID NO: 6098 - protein, 495 aa, Unknown
  Description of Unknown: Integrase B6099 sequence
  PTHR30461:SF3,SM00857,G3DSA:1.10.10.2600,IPR036162,PS51737, G3DSA:3.40.50.1390,IPR006119,IPR038109,PF07508,IPR011109, SSF53041,PTHR30461,Coil,PS51736,cd00338, PF00239
MDAAQYLRKSRMEEGMDTEEVLAKHRKALAEYAAAHGIHIIETYYEVVSGESLYARPEMLRLLEDVEDGKYDAVLCMDLDRLSRGRMKDQGIILDAFKDSGTLIVTPEKTYDLSDEIDDELAEFKTFMSRREYKIINKRLQRGKAQTIRDGCYVANAPYGYRKVTIDRKPTLEIVESEAAYVRMMFEMYADGYGCVAIARHINTLGAKPRRCDAFNRSTVALILKNPVYIGKVVWDRTKHVRKGARGNPKHITIQQPRDHWVIVDGLHPAIIDKELFGQVQDIMAGRYIPPANDGTIKSPLAGLVKCAVCGRNMQRMGMNTDTLYLLCNTPGCCAGAKLAFVELRILQHLQRTLAELSIETPAVRIKDTSAQEASLAVIRKEQKAADAQKSRLYDLLEMGEYDIPTFRERMAKVKDKIAALEQKEAELLRVIDQAHTADPAELARRIKAVLDAYDTSDAAHRNALLKGVIQTVWYRKKKKTAPSDFQLTIDLKYN

SEQ ID NO: 6099 - protein, 495 aa, Unknown
  Description of Unknown: Integrase B6100 sequence
  PTHR30461:SF3,IPR036162,PS51737,IPR011109,PTHR30461, PS00397,PF00239,G3DSA:1.10.10.2600,IPR006119,SSF53041, cd00338,SM00857,IPR025827,IPR038109,PS51736, IPR006118,PF13408,G3DSA:3.40.50.1390,PF07508,Coil
MSLKYAYGYIRVSTHDQEEISPDSQEHLLRDYAAKNNIVILKIFTDLGISGRKADKRPGFQEMIGLAKGPDHPVDCILVWKFSRFARNQEESIVYKSLLKKQHNVDVISISEPLADGPFGSLIERIIEWMDEYYSIRLSGEVFRGMKENATRGAYQARPPLGYKVIERGKPPVIVPEEAAIVRMIFDKYVNGKMSFFDIARHLNSLGLKTSHGKAFERRSIEYIIQNPSYCGMIRWNRMENATNRIKDQDEWIIADGMQEAIISKELFDAAQERLKKIYKPVGKRPSSTYKHWLSGLLKCPVCGRTLTATTMKRANGKKYAYFSCYGYSKGKCDKPHGVSSLVIEKEVLKALEEALGSNSIVYEMREIRPQELSNERTLISERLASLKGKEDRIRASYREGIDTLEEYKENKALIAKERDSLERQLAELEENTPDKIPDDPTPKMLDRVSSVHDILVSDSYSLVQKNEALKQIIDKIVYDRESDTLKIHFFLYHS

SEQ ID NO: 6100 - protein, 495 aa, Unknown
  Description of Unknown: Integrase B6101 sequence
  PTHR30461:SF3,cd00338,SM00857,G3DSA:1.10.10.2600,IPR036162, PF13408,IPR025827,G3DSA:3.40.50.1390,PS51737,IPR006119, IPR038109,PF07508,IPR011109,SSF53041,PTHR30461, PS51736,Coil,PF00239
MIALYGRVSTEEQATKGYSLRNQIEECRRKANTKEIVEYVDDGYSGEFLERPALTKLREDVKGNRITKVYCYDPDRLSRKLMNALIIDDEFRSKGVDIIYINGEYADSPEGKLFYSLRGAISEFEKAKITERMSSGRKRKAQEGKIVKNHKMYGYDYDKEKAMYVVNEHEASVVKMIFHKFVVEQIGMNSIAKELTAKGVKTKTGKDVWHRQVVRQILMNESYTGDYYQNKWNTEGMIRNKYTDNPDNKIKMRHRDKSEWIPINIPQIIERTQYEEAAELLKQSRRRYAKAAVNQYLLSGLLRCGTCGNTMVGTKTTWWGKPHFIYTDRKSHAGAKHPGCVLDIKMEKLDEEVWKDVEQFVYNPELLFKYDNTKDVSMELKQAEKLKEDIKKAEKGRKKLYSLFAISDDLDEEELKKEIVELQDKQRKAEERLMEVEKEINKNKNDRDIDSIKETINELISKEDRITFDVKKSLIRVLVKEVIVEGKEKININYF

SEQ ID NO: 6101 - protein, 495 aa, Unknown
  Description of Unknown: Integrase B6102 sequence
  PTHR30461:SF3,IPR036162,PS51737,IPR011109,PTHR30461, PS00397,PF00239,G3DSA:1.10.10.2600,IPR006119,SSF53041, cd00338,SM00857,IPR025827,IPR038109,PS51736, IPR006118,PF13408,G3DSA:3.40.50.1390,PF07508,Coil
MSLKYAYGYIRVSTHDQEEISPDSQEHLLRDYAAKNNIVILKIFTDLGISGRKADKRPGFQEMIGLAKGPDHPVDCILVWKFSRFARNQEESIVYKSLLKKQHNVDVISISEPLADGPFGSLIERIIEWMDEYYSIRLSGEVFRGMKENATRGAYQARPPLGYKVIERGKPPVIVPEEAAIVRMIFDKYVNGKMSFFDIARHLNSLRLKTSHGKAFERRSIEYIIQNPSYCGMIRWNRMENATNRIKDQDEWIIADGMQEAIISKELFDAAQERLKKIYKPVGKRPSSTYKHWLSGLLKCPVCGRTLTATTMKRANGEKYAYFSCYGYSKGKCDKPHGVSSLVIEKEVLKALEEALGSNSIVYEMREIRPQELSNERTLISERLASLKGKEDRIRASYREGIDTLEEYKENKALIAKERDSLERQLAELEENTPDKIPDDPTPKMLDKVSSVHDILVSDSYSLVQKNEALKQIIDKIVYDRESDTLKIHFFLYHS

SEQ ID NO: 6102 - protein, 495 aa, Unknown
  Description of Unknown: Integrase B6103 sequence
  PTHR30461:SF3,IPR036162,PS51737,IPR011109,PTHR30461, PS00397,PF00239,G3DSA:1.10.10.2600,IPR006119,SSF53041, cd00338,SM00857,IPR025827,IPR038109,PS51736, IPR006118,PF13408,G3DSA:3.40.50.1390,PF07508,Coil
MMSELRYAYGYIRVSTHDQEEISPDSQENLLREYATRNNIVILKIFSDLGISGRKAEKRPGFQEMVGLAKGSDHPVDLILVWKFSRFARNQEESIVYKSLLKKQHNVEVVSISEPLSDNPFGSLIERIIEWMDEYYSIRLSGEVFRGMKENATRGAYQARPPLGYKVVEHGKPPMIVPEEAEIIRMIFNWYANEGIGFFDIARRLNNLGLKTSQGKPFERRSIEYIIQNPSYCGMIRWNRTENSTNRIKDKDEWIVTEGQQPAIITKELFDAAQKRFETTYRPSGKRPSSTYKHWLSGLLKCPACGRTLTAATMKRANGEKYSYFSCYGYHKGKCEKPHGISSLVLEKEVLACVKESLSSGNISYTLKERQPIEISNEKNILTSRLESLSGKEERIKASYREGIDTLEEYKANKALLQKERIHLEEQLKKLEDNAPKDTQDPAANMLLRVQGVYDILVSDSFTAAQKNEALKQIVDKIVYNREQDSLKIYYFLYQ

SEQ ID NO: 6103 - protein, 495 aa, Unknown
  Description of Unknown: Integrase B6104 sequence
  PTHR30461:SF3,IPR036162,PS51737,IPR011109,PTHR30461, PS00397,PF00239,G3DSA:1.10.10.2600,IPR006119,SSF53041, cd00338,SM00857,IPR025827,IPR038109,PS51736, IPR006118,PF13408,G3DSA:3.40.50.1390,PF07508,Coil
MMSELRYAYGYIRVSTHDQEEISPDSQENLLREYATRNNIVILKIFSDLGISGRKAEKRPGFQEMVGLAKGSDHPVDLILVWKFSRFARNQEESIVYKSLLKKQHNVEVVSISEPLSDNPFGSLIERIIEWMDEYYSIRLSGEVFRGMKENATRGAYQARPPLGYKVVEHGKPPMIVPEEAEIIRMIFNWYANEGIGFFDIARRLNNLGLKTSQGKPFERRSIEYIIQNPSYCGMIRWNRTENSTNRIKDKDEWIVTEGQHPAIITKELFDAAQKRFETTYRPSGKRPSSTYKHWLSGLLKCPACGRTLTAATMKRANGEKYSYFSCYGYHKGKCEKPHGISSLVLEKEVLACVKESLSSGNISYTLKERQPIEVSNEKNILTSRLESLSGKEERIKASYREGIDTLEEYKANKALLQKERIHLEEQLKELEDNAPKDTPDPAANILLRVQGVYDILVSDSFTAAQKNEALKQIVDKIVYDREQDSLKIYYFLYQ

SEQ ID NO: 6104 - protein, 495 aa, Unknown
  Description of Unknown: Integrase B6105 sequence
  SM00857,G3DSA:1.10.10.2600,IPR036162,PF13408,IPR025827, PS51737,G3DSA:3.40.50.1390,IPR006119,IPR038109,IPR011109, SSF53041,PF00239,PTHR30461,PS51736,Coil, cd00338
MVKNRAAIYARFSSHNQRSESIEIQVENSRAFCEREGLQVVREYCDYAQTGRNIDRAEFQRMMNDARHGLFDYVVIYKVTRIMRNRDEMSLARIMLRKAGVEILYAGEDISSGSSGVLQLGMLEVLAEYESALDSERIRDGIQKNAQRCMANGRTLYGWDIVEGRYVINEREASVLRKMKNMLFAGSSVADIVRAVSAERSKRGAKFNQDTVTKLLKRVQNAGVYKYAGHEVPDGMPAIWSQVEQDMIDNILCDRHKPRRKINSTLEFPLSGKLYCSKCGSPMAGTSGTSCTGATYHYYKCRNCRRTVRRDLVEDVVCDMTLQAVAREDVRRRIVSGMVEFQEEQPKEQSRSYAIKKELKRIDRTFERIWQAIEDGIAPPGGRERTEELKQRKSELEAELRIAEREEAFNIGVDELMLWLDDAAENLTPEVILGTFVRFVEIDGKTLNVYFAFDHYGDGFRPKQKKAELCPEGHSSTNSLMVEARRIELRSTKVP

SEQ ID NO: 6105 - protein, 495 aa, Unknown
  Description of Unknown: Integrase B6106 sequence
  PTHR30461:SF3,IPR036162,PS51737,IPR011109,PTHR30461, PS00397,PF00239,G3DSA:1.10.10.2600,IPR006119,SSF53041, cd00338,SM00857,IPR025827,IPR038109,PS51736, IPR006118,PF13408,G3DSA:3.40.50.1390,PF07508,Coil
MSLKYAYGYIRVSTHDQEEISPDSQEHLLRDYAAKNNIVILKIFTDLGISGRKADKRPGFQEMIGLAKGPDHPVDCILVWKFSRFARNQEESIVYKSLLKKQHNVDVISISEPLADGPFGSLIERIIEWMDEYYSIRLSGEVFRGMKENATRGAYQARPPLGYKVIERGKPPVIVPEEAAIVRMIFDKYVNGKMSFFDIARHLNSLGLKTSHGKAFERRSIEYIIQNPSYCGMIRWNRMENATNRIKDQDEWIIADGMQEAIISKELFDAAQERLKKIYKPVGKRPSSTYKHWLSGLLKCPVCGRTLTATTMERANGEKYAYFSCYGYSKGKCDKPHGVSSLVIEKEVLKALEEALGSNSIVYEMREIRPQELSNERTLISERLVSLKGKEDRIRASYREGIDTLEEYKENKALIAKERDSLERQLAELEENTPDKIPDDPTPKMLDRVSSVHDILVSDSYSLVQKNEALKQIIDKIVYDRESDTLKIHFFLYHS

SEQ ID NO: 6106 - protein, 495 aa, Unknown
  Description of Unknown: Integrase B6107 sequence
  PTHR30461:SF3,cd00338,SM00857,G3DSA:1.10.10.2600,IPR036162, PF13408,PS51737,IPR025827,G3DSA:3.40.50.1390,IPR006119, IPR038109,PF07508,SSF53041,IPR011109,PTHR30461, PS51736,Coil,PF00239
MSNAVIYARYSSDKQSEDSIEAQLRACRQYAATRGYNIVAVYADEAISGKGSMTASRAQYQKMLRDCNKGTFDTILIHKYDRVARSLGEHVNLDARLQKMGITLIAVGQDFGFGPESKIMRALMWSMSEYYIDNLANETKKGEREVALKGLHNGGYPPFGYDIVDQKYVINPYEAEYVRKIFAAVKNHEGTKDIIAEMAAVGIVGKRGKPLKYSAVYEILRNEKYTGTYIYCVDEEKDRSKRRSKPNAIRIENALPMIIDKATFDEVQKIMDSRKQSGPKTSYLCSGLVYCSCGAKMHAHISTKKGHVYHYYRCSKKCGAPMISMDIVDDAAKTYLRTLLNEENQKAIATAMRKYKCGEPERAADFKKIVASKISEKQKQYDTLMTNMSSGVLPADVIEDIGAKMNQLRSEIEALKKTEMPKDYTTDQISLWLKALHDSPDDKAIRLLISRIDIKNTTEINIQSTLTSVVGTIGCGRPQHIFPTILFKFLYFFQR

SEQ ID NO: 6107 - protein, 495 aa, Unknown
  Description of Unknown: Integrase B6108 sequence
  PTHR30461:SF3,IPR036162,PS51737,IPR011109,PTHR30461, PS00397,PF00239,G3DSA:1.10.10.2600,IPR006119,SSF53041, cd00338,SM00857,IPR025827,IPR038109,PS51736, IPR006118,PF13408,G3DSA:3.40.50.1390,PF07508,Coil
MSLKYAYGYIRVSTHDQEEISPDSQEHLLRDYAAKNNIVILKIFTDLGISGRKADKRPGFQEMIGLAKGPDHPVDCILVWKFSRFARNQEESIVYKSLLKKQHNVDVISISEPLADGPFGSLIERIIEWMDEYYSIRLSGEVFRGMKENATRGAYQARPPLGYKVIERGKPPVIVPEEAAIVRMIFDKYVNGKMSFFDIARHLNSLGLKTSHGKAFERRSIEYIIQNPSYCGMIRWNRMENATNRIKDQDEWIIADGMQEAIISKELFDAAQERLKKIYKPVGKRPSSTYKHWLSGLLKCPVCGRTLTATTMKRANGEKYAYFSCYGYSKGKCDKPHGVSSLVIEKEVLKALEEALGSNSIVYEMREIRPQELSNERTLISERLASLKGKEDRIRASYREGIDTLEEYKENKALIAKERDSLERQLTELEENTPDKIPDDPTPKMLDRVSSVHDILVSDSYSLVQKNEALKQIIDKIVYDRESDTLKIHFFLYHS

SEQ ID NO: 6108 - protein, 495 aa, Unknown
  Description of Unknown: Integrase B6109 sequence
  PTHR30461:SF3,IPR036162,PS51737,IPR011109,PTHR30461, PS00397,PF00239,G3DSA:1.10.10.2600,IPR006119,SSF53041, cd00338,SM00857,IPR025827,IPR038109,PS51736, IPR006118,PF13408,G3DSA:3.40.50.1390,PF07508,Coil
MSLKYAYGYIRVSTHDQEEISPDSQEHLLRDYAAKNNIVILKIFTDLGISGRKADKRPGFQEMIGLAKGSDHPVDCILVWKFSRFARNQEESIVYKSLLKKQHNVDVISISEPLADGPFGSLIERIIEWMDEYYSIRLSGEVFRGMKENATRGAYQARPPLGYKVIERGKPPVIVPEEAAIVRMIFDKYVNGKMSFFDIARHLNSLGLKTSNGKAFERRSIEYIIQNPSYCGMIRWNRMENATNRIKDQDEWIIADGMQEAIISKELFDAAQERLKKIYKPVGKRPSSTYKHWLSGLLKCPVCGRTLTATTMKRANGEKYAYFSCYGYSKGKCDKPHGVSSLVIEKEVLKALEEALGSNSIVYEMREIRPQELSNERTLISERLAGLKGKEDRIRASYREGIDTLEEYKENKALIAKERDSLERQLAELEENTPDKIPDDPTPKMLDRVSSVHDILVSDSYSLVQKNEALKQIIDKIVYDRESDTLKIHFFLYHS

SEQ ID NO: 6109 - protein, 495 aa, Unknown
  Description of Unknown: Integrase B6110 sequence
  PTHR30461:SF3,IPR036162,PS51737,IPR011109,PTHR30461, PS00397,PF00239,G3DSA:1.10.10.2600,IPR006119,SSF53041, cd00338,SM00857,IPR025827,IPR038109,PS51736, IPR006118,PF13408,G3DSA:3.40.50.1390,PF07508,Coil
MMSELRYAYGYIRVSTHDQEEISPDSQENLLREYAARNNIVILKIFSDLGISGRKAEKRPGFQEMVGLAKGSDHPVDLILVWKFSRFARNQEESIVYKSLLKKQHNVEVVSISEPLSDNPFGSLIERIIEWMDEYYSIRLSGEVFRGMKENAIRGAYQARPPLGYKVVEHGKPPMIVPKEAEIVRMIFNWYANEGIGFFDIARRLNNLGLKTSQGKPFERRSIEYIIQNPSYCGMIRWNRTENSTNRIKDKDEWIVTEGQQPAIITKELFDAAQKRFETTYRPSGKRPSSTYKHWLSGLLKCPACGRTLTAATMKRANGEKYSYFSCYGYHKGKCEKPHGISSLVLEKEVLACVKESLSSGNISYTLKERQPIEVSNEKNILTSRLESLSGKEERIKASYREGIDTLEEYKTNKALLQKERIHLEEQLKELEDHAPKDTPDPAANMMLRVQGVYDILVSDSFTAAQKNEALKQIVDKIVYEREQDSLKIYYFLYL

SEQ ID NO: 6110 - protein, 495 aa, Unknown
  Description of Unknown: Integrase B6111 sequence
  PTHR30461:SF3,IPR036162,PS51737,IPR011109,PTHR30461, PS00397,PF00239,G3DSA:1.10.10.2600,IPR006119,SSF53041, cd00338,SM00857,IPR025827,IPR038109,PS51736, IPR006118,PF13408,G3DSA:3.40.50.1390,PF07508,Coil
MSLKYAYGYIRVSTHDQEEISPDSQEHLLRDYAAKNNIVILKIFTDLGISGRKADKRPGFQEMISLAKGPDHPVDCILVWKFSRFARNQEESIVYKSLLKKQHNVDVISISEPLADGPFGSLIERIIEWMDEYYSIRLSGEVFRGMKENATRGAYQARPPLGYKVIERGKPPVIVPEEAAIVRMIFDKYVNGKMNFFDIARYLNSLGLKTSHGKAFERRSIEYIIQNPSYCGMIRWNRMENATNRIKDQDEWIIADGMQEAIISKELFDAAQERLKKIYKPIGKRPSSTYKHWLSGLLKCPVCGRTLTATTMERANGEKYAYFSCYGYSKGKCDKPHGISSLVIEKEVLKALEEALGSNSIVYEMREIRPQELSNERTLISERLASLKGKEDRIRASYREGIDTLEEYKENKALIAKERDSLERQLAELEENTPDKIPDDPTPKMLDRVSSVHDILVSDSYSLVQKNEALKQIIDKIVYDRESDTLKIHFFLYHS

SEQ ID NO: 6111 - protein, 495 aa, Unknown
  Description of Unknown: Integrase B6112 sequence
  PTHR30461:SF3,IPR036162,PS51737,IPR011109,PTHR30461, PS00397,PF00239,G3DSA:1.10.10.2600,IPR006119,SSF53041, cd00338,SM00857,IPR025827,IPR038109,PS51736, IPR006118,PF13408,G3DSA:3.40.50.1390,PF07508,Coil
MSLKYAYGYIRVSTHDQEEISPDSQEHLLRDYAAKNNIVILKIFTDLGISGRKADKRPGFQEMIGLAKGPDHPVDCILVWKFSRFARNQEESIVYKSLLKKQHNVDVISISEPLADGPFGSLIERIIEWMDEYYSIRLSGEVFRGMKENATRGAYQARPPLGYKVVERGKPPVIVPEEAAIVRMIFDKYVNGKMSFFDIARHLNSLGLKTSHGKAFERRSIEYIIQNPSYCGMIRWNRMENATNRIKDQDEWIIADGMQEAIISKELFDAAQERLKKIYKPVGKRPSSTYKHWLSGLLKCPVCGRTLTATTMKRANREKYAYFSCYGYSKGKCDKPHGVSSLVIEKEVLKALEEALGSNSIVYEMREIRPQELSNERTLISERLASLKGKEDRIRASYREGIDTLEEYKENKALIAKERDSLERQLAELEENTPDKIPDDPTPKMLDRVSSVHDILVSDSYSLVQKNEALKQIIDKIVYDRESDTLKIHFFLYHS

SEQ ID NO: 6112 - protein, 495 aa, Unknown
  Description of Unknown: Integrase B6113 sequence
  PTHR30461:SF3,IPR036162,PS51737,IPR011109,PTHR30461, PS00397,PF00239,G3DSA:1.10.10.2600,IPR006119,SSF53041, cd00338,SM00857,IPR025827,IPR038109,PS51736, IPR006118,PF13408,G3DSA:3.40.50.1390,PF07508,Coil
MSLKYAYGYIRVSTHDQEEISPDSQEHLLRDYAAKNNIVILKIFTDLGISGRKADKRPGFQEMISLAKGPDHPVDCILVWKFSRFARNQEESIVYKSLLKKQHNVDVISISEPLADGPFGSLIERIIEWMDEYYSIRLSGEVFRGMKENATRGAYQARPPLGYKVIERGKPPVIVPEEAAIVRMIFDKYVNGKMSFFDIARHLNSLGLKTSHGKAFERRSIEYIIQNPSYCGMIRWNRTENATNRIKDQDEWIIADGMQEAIISKELFDAAQERLKKIYKPVGKRPSSTYKHWLSGLLKCPVCGRTLTATTMKRANGEKYAYFSCYGYGKGKCDKPHGVSSLVIEKEVLKALEEALGSNSIVYEMREIRPQELSNERTLISERLASLKGKEDRIRASYREGIDTLEEYKENKALIAKERDSLERQLVELEENAPDKTPEDPTPKMLDRVSSVHDILVSDSYSLVQKNEALKQIIDKIVYDRESDTLKIHFFLYHS

SEQ ID NO: 6113 - protein, 495 aa, Unknown
  Description of Unknown: Integrase B6114 sequence
  PTHR30461:SF3,IPR036162,PS51737,IPR011109,PTHR30461, PS00397,PF00239,G3DSA:1.10.10.2600,IPR006119,SSF53041, cd00338,SM00857,IPR025827,IPR038109,PS51736, IPR006118,PF13408,G3DSA:3.40.50.1390,PF07508,Coil
MSLKYAYGYIRVSTHDQEEISPDSQEHLLRDYAAKNNIVILKIFTDLGISGRKADKRPGFQEMIGLAKGPDHPVDCILVWKFSRFARNQEESIVYKSLLKKQHNVDVISISEPLADGPFGSLIERIIEWMDEYYSIRLSGEVFRGMKENATRGAYQARPPLGYKVIERGKPPVIVPEEAAIVRMIFDKYVNGKMNFFDIARYLNSLGLKTSHGKAFERRSIEYIIQNPSYCGMIRWNRMENATNRIKDQDEWIIADGMQEAIISKELFDAAQERLKKIYKPVGKRPSSTYKHWLSGLLKCPVCGRTLTATTMERANGEKYAYFSCYGYSKGKCDKPHGVSSLVIEKEVLKALEEALGSNSIVYEMREIRPQELSNERTLISERLASLKGKEDRIRASYREGIDTLEEYKENKALIAKERGSLERQLAELEENTPDKIPDNPTPKMLDRVSSVHDILVSDSYSLVQKNEALKQIIDKIVYDRESDTLKIHFFLYHS

SEQ ID NO: 6114 - protein, 495 aa, Unknown
  Description of Unknown: Integrase B6115 sequence
  PTHR30461:SF3,IPR036162,PS51737,IPR011109,PTHR30461, PS00397,PF00239,G3DSA:1.10.10.2600,IPR006119,SSF53041, cd00338,SM00857,IPR025827,IPR038109,PS51736, IPR006118,PF13408,G3DSA:3.40.50.1390,PF07508,Coil
MMSELRYAYGYIRVSTHDQEEISPDSQENLLREYAARNNIVILKIFSDLGISGRKAEKRPGFQEMVGLAKGSDHPVDLILVWKFSRFARNQEESIVYKSLLKKQHNVEVVSISEPLSDNPFGSLIERIIEWMDEYYSIRLSGEVFRGMKENATRGAYQARPPLGYKVVEHGKPPVIIPEEAEIVRIIFNWYANEGIGFFDIARRLNNLGLKTSQGKPFERRSIEYIIQNPSYCGMIRWNRTENSTNRIKDKDEWIVTEGQQPAIITKELFDAAQKRFETTYRPSGKRPSSTYKHWLSGLLKCPACGRTLTAATMKRANGEKYSYFSCYGYHKGKCEKPHGISSLVLEKEVLTCVKESLSSGNISYTLKERQPIEISNEKNILTSRLESLSGKEERIKASYREGIDTLEEYKANKALLQKERIHLEEQLKELEDNAPKDTPDPAANMLLRVQGVYDILVSDSFTVAQKNEALKQIVDKIVYDREQDSLKIYYFLYQ

SEQ ID NO: 6115 - protein, 495 aa, Unknown
  Description of Unknown: Integrase B6116 sequence
  SM00857,G3DSA:1.10.10.2600,IPR036162,PF13408,PS51737, G3DSA:3.40.50.1390,IPR025827,IPR006119,IPR038109,PF07508, IPR011109,SSF53041,PTHR30461,Coil,PS51736, cd00338,PF00239
MVKNRAAIYARFSSHNQRSESIEIQVENSRAFCEREGLQVVHEYCDYAQTGRNIDRAEFQRMMSDARHGLFDYVVIYKVTRIMRNRDEMSLARIMLRKAGVEILYAGEDISSGSSGVLQLGMLEVLAEYESALDSERIKDGIQKNAQRCMANGRTLYGWDIVEGRYVINEREASVLRKMKNMLFSGSSVADIVRAVSTERSKRGAKFNQDTVTKLLKRVQNAGVYKYAGHEIEDGMPAIWTQDEQDMINNILGDRHRPRRKVNSTLEFPLSGKLYCSKCGAPMAGTSGTSCTGATYHYYKCRKCRRTVRRDLIEDVVCDMTLQAVAREDVRRRIASGMVEFQEEQPKEQSRSYAIKKELKRIDRTFERIWQAIEDGIAPPGGRERTEELKQRKSELEAELRIAEREEAFNIGVDELMLWLDDAAENLTPEVILNSFVRFAEIDGKTLNVYFAFDHYGNDFSPKKKKAEPCPEGHSSTNSCMVEVRRIELRSKASP

SEQ ID NO: 6116 - protein, 495 aa, Unknown
  Description of Unknown: Integrase B6117 sequence
  PTHR30461:SF3,IPR036162,PS51737,IPR011109,PTHR30461, PS00397,PF00239,G3DSA:1.10.10.2600,IPR006119,SSF53041, cd00338,SM00857,IPR025827,IPR038109,PS51736, IPR006118,PF13408,G3DSA:3.40.50.1390,PF07508,Coil
MMSELRYAYGYIRVSTHDQEEISPDSQENLLREYATRNNIVILKIFSDLGISGRKAEKRPGFQEMVGLAKGSDHPVDLILVWKFSRFARNQEESIVYKSLLKKQHNVEVVSISEPLSDNPFGSLIERIIEWMDEYYSIRLSGEVFRGMKENATRGAYQARPPLGYKVVEHGKPPMIVPEEAEIIRMIFNWYANEGIGFFDIARRLNNLGLKTSQGKPFERRSIEYIIQNPSYCGMIRWNRTENSTNRIKDKDEWIVTEGQQPAIITKELFEAAQKRFEATYRPSGKRPSSTYKHWLSGLLKCPACGRTLTAATMKRANGEKYSYFSCYGYHKGKCEKPHGISSLVLENEVLACVKESLSSGNISYTLKERQPIEVSNEKNILTSRLESLSGKEERIKASYREGIDTLEEYKANKALLQKERIHLEEQLKELEDNAPKDAPNPAANMLLRVQGVYDILVSDSFTAAQKNEALKQIVDKIVYNREQDSLKIYYFLYQ

SEQ ID NO: 6117 - protein, 495 aa, Unknown
  Description of Unknown: Integrase B6118 sequence
  PTHR30461:SF3,IPR036162,PS51737,IPR011109,PTHR30461, PS00397,PF00239,G3DSA:1.10.10.2600,IPR006119,SSF53041, cd00338,SM00857,IPR025827,IPR038109,PS51736, IPR006118,PF13408,G3DSA:3.40.50.1390,PF07508,Coil
MSLKYAYGYIRVSTHDQEEISPDSQEHLLRDYAAKNNIVILKIFTDLGISGRKADKRPGFQEMIGLAKGPDHPVDCILVWKFSRFARNQEESIVYKSLLKKQHNVDVISISEPLADGPFGSLIERIIEWMDEYYSIRLSGEVFRGMKENATRGAYQARPPLGYKVIERGKPPVIVPEEAAIVRMIFDKYVNGKMSFFDIARHLNSLGLKTSHGKAFERRSIEYIIQNPSYCGMIRWNRMENATNRIKDQDEWIIADGMQEAIISKELFDAAQERLKKSYKPVGMRPSSTYKHWLSGLLKCPACGRTLTATTMKRANGEKYAYFSCYGYSKGKCDKPHGVSSLVIEKEVLKALEEALGSNSIVYEMREIRPQELSNERTLISERLASLKGKEDRIRASYREGIDTLEEYKENKALIAKERDSLERQLAELEENTPDKIPDDPTPKMLDRVSSVHDILVSDSYSLVQKNEALKQIIDKIVYDRESDTLKIHFFLYHS

SEQ ID NO: 6118 - protein, 495 aa, Unknown
  Description of Unknown: Integrase B6119 sequence
  PTHR30461:SF3,IPR036162,PS51737,IPR011109,PTHR30461, PS00397,PF00239,G3DSA:1.10.10.2600,IPR006119,SSF53041, cd00338,SM00857,IPR025827,IPR038109,PS51736, IPR006118,PF13408,G3DSA:3.40.50.1390,PF07508,Coil
MSLKYAYGYIRVSTHDQEEISPDSQEHLLRDYAAKNNIVILKIFTDLGISGRKADKRPGFQEMISLAKGPDHPVDCILVWKFSRFARNQEESIVYKSLLKKQHNVDVISISEPLADGPFGSLIERIIEWMDEYYSIRLSGEVFRGMKENATRGAYQARPPLGYKVIERGKPPVIVPEEAAIVRMIFDKYVNGKMSFFDIARHLNSLGLKTSHGKAFERRSIEYIIQNPSYCGMIRWNRMENATNRIKDQDEWIIADGMQEAIISKELFDAAQERLKKSYKPVGMRPSSTYKHWLSGLLKCPVCGRTLTATTMKRANGEKYAYFSCYGYSKGKCDKPHGVSSLVIEKEVLKALEEALGSNSIVYEMREIRPQELSNERTLISERLASLKGKEDRIRASYREGIDTLEEYKENKALIAKERDSLERQLAELEENAPDKTPEDPTPKMLDRVSSVHDILVSDSYSLVQKNEALKQIIDKIVYDRESDTLKIHFFLYHS

SEQ ID NO: 6119 - protein, 495 aa, Unknown
  Description of Unknown: Integrase B6120 sequence
  PTHR30461:SF3,IPR036162,PS51737,IPR011109,PTHR30461, PS00397,PF00239,G3DSA:1.10.10.2600,IPR006119,SSF53041, cd00338,SM00857,IPR025827,IPR038109,PS51736, IPR006118,PF13408,G3DSA:3.40.50.1390,PF07508,Coil
MSLKYAYGYIRVSTHDQEEISPDSQEHLLRDYAAKNNIVILKIFTDLGISGRKADKRPGFQEMIGLAKGPDHPVDCILVWKFSRFARNQEESIVYKSLLKKQHNVDVISISEPLADGPFGSLIERIIEWMDEYYSIRLSGEVFRGMKENATRGAYQARPPLGYKVIERGKPPVIVPEEAAIVRMIFDKYVNGKMNFFDIARYLNSLGLKTSHGKAFERRSIEYIIQNPSYCGMIRWNRMENATNRIKDQDEWIIADGMQEAIISKELFDAAQERLKKIYKPVGKRPSSTYKHWLSGLLKCPVCGRTLTATTMKRANGEKYAYFSCYGYSKGKCDKPHGVSSLVIEKEVLKALEEALGSNSIVYEMREIHPQELSNERTLISERLASLKGKEDRIRASYREGIDTLEEYKENKALIAKERDSLERQLAELEENTPDKIPDDPTPKMLDRVSSVHDILVSDSYSLVQKNEALKQIIDKIVYDRESDTLKIHFFLYHS

SEQ ID NO: 6120 - protein, 495 aa, Unknown
  Description of Unknown: Integrase B6121 sequence
  PTHR30461:SF3,IPR036162,PS51737,IPR011109,PTHR30461, PS00397,PF00239,G3DSA:1.10.10.2600,IPR006119,SSF53041, cd00338,SM00857,IPR025827,IPR038109,PS51736, IPR006118,PF13408,G3DSA:3.40.50.1390,PF07508,Coil
MMSELRYAYGYIRVSTHDQEEISPDSQENLLREYAARNNIVILKIFSDLGISGRKAEKRPGFQEMVGLAKGSDHPVDLILVWKFSRFARNQEESIVYKSLLKKQHNVEVVSISEPLSDNPFGSLIERIIEWMDEYYSIRLSGEVFRGMKENATRGAYQARPPLGYKVVEHGKPPVIIPEEAEIVRMIFNWYANEGIGFFDIARRLNNLGLKTSQGKPFERRSIEYIIQNPSYCGMIRWNRTENSTNRIKDKDEWIVTEGQQPSIITKELFDAAQKRFETTYRPSGKRPSSTYKHWLSGLLKCPVCGRTLTAATMKRANGEKYSYFSCYGYHKGKCEKPHGISSLVLEKEVLACVKESLSSGNISYTLKERQPIEASNEKNILTSRLESLSGKEERIKASYREGIDTLEEYKANKALLQKERIHLEEQLKELEDNAPKDTPDPAANMLLRVQGVYDILVSDSFTAAQKNEALKQIVDKIIYDREQDSLKIYYFLYQ

SEQ ID NO: 6121 - protein, 495 aa, Unknown
  Description of Unknown: Integrase B6122 sequence
  PTHR30461:SF3,IPR036162,PS51737,IPR011109,PTHR30461, PS00397,PF00239,G3DSA:1.10.10.2600,IPR006119,SSF53041, cd00338,SM00857,IPR025827,IPR038109,PS51736, IPR006118,PF13408,G3DSA:3.40.50.1390,PF07508,Coil
MSLKYAYGYIRVSTHDQEEISPDSQEHLLRDYAAKNNIVILKIFTDLGISGRKADKRPGFQEMIGLAKGPDHPVDCILVWKFSRFARNQEESIVYKSLLKKQHNVDVISISEPLADGPFGSLIERIIEWMDEYYSIRLSGEVFRGMKENATRGAYQARPPLGYKVVERGKPPVIVPEEAAIVRMIFDKYVNGKMSFFDIARHLNSLGLKTSHGKAFERRSIEYIIQNPSYCGMIRWNRMENATNRIKNQDEWIIADGMQEAIISKELFDTAQERLKKIYKPVGKRPSSTYKHWLSGLLKCPVCGRTLTATTMERANGEKYAYFSCYGYSKGKCDKPHGVSSLVIEKEVLKALEEALGSNSIVYEMREIRPQELSNERTLISERLASLKGKEDRIRASYREGIDTLEEYKENKALIAKERDALEQQLAELEENAPDKTPEDSTPKMLDRVSSVHDILVSDSYSLVQKNEALKQIIDKIVYDRESDTLKIHFFLYHS

SEQ ID NO: 6122 - protein, 495 aa, Unknown
  Description of Unknown: Integrase B6123 sequence
  PTHR30461:SF3,IPR036162,PS51737,IPR011109,PTHR30461, PS00397,PF00239,G3DSA:1.10.10.2600,IPR006119,SSF53041, cd00338,SM00857,IPR025827,IPR038109,PS51736, IPR006118,PF13408,G3DSA:3.40.50.1390,PF07508,Coil
MSLKYAYGYIRVSTHDQEEISPDSQEHLLRDYAAKNNIVILKIFTDLGISGRKADKRPGFQEMIGLAKGPDHPVDCILVWKFSRFARNQEESIVYKSLLKKQHNVDVISISEPLADGPFGSLIERIIEWMDEYYSIRLSGEVFRGMKENATRGAYQARPPLGYKVIERGKPPVIIPEEAAIVRMIFDKYVNGKMSFFDIARHLNSLGLKTSHGKAFERRSIEYIIQNPSYCGMIRWNRMENATNRIKDQDEWIIADGMQEAIISKELFDAAQERLKKIYKPVGKRPSSTYKHWLSGLLKCPVCGRTLTATTMKRTNGEKYAYFSCYGYSKGKCDKPHGVSSLVIEKEVLKALEEALGSNSIVYEMREIRPQELSNERTLISERLASLKGKEDRIRASYREGIDTLEEYKENKTLIAKERNSLEQQLAELEENTPDKIPDDPTPKMLDRVSSVHDILVSDSYSLVQKNEALKQIIDKIVYDRESDTLKIHFFLYHS

SEQ ID NO: 6123 - protein, 495 aa, Unknown
  Description of Unknown: Integrase B6124 sequence
  PTHR30461:SF3,IPR036162,PS51737,IPR011109,PTHR30461, PS00397,PF00239,G3DSA:1.10.10.2600,IPR006119,SSF53041, cd00338,SM00857,IPR025827,IPR038109,PS51736, IPR006118,PF13408,G3DSA:3.40.50.1390,PF07508,Coil
MSLKYAYGYIRVSTHDQEEISPDSQEHLLRDYAAKNNIVILKIFTDLGISGRKADKRPGFQEMIGLAKGPDHPVDCILVWKFSRFARNQEESIVYKSLLKKQHNVDVISISEPLADGPFGSLIERIIEWMDEYYSIRLSGEVFRGMKENATRGAYQARPPLGYKVIERGKPPVIVPEEAAIVRMIFDKYVNGKMSFFDIARHLNSLGLKTSHGKAFERRSIEYIIQNPSYCGMIRWNRIENATNRIKDQDEWIIADGMQEAIISKELFDAAQERLKKIYKPVGKRPSSTYKHWLSGLLKCPVCGRTLTATTMKRANGEKYAYFSCYGYSKGKCDKPHGVSSLVIEKEVLKALEEALGSNSIVYEMREIRPQELSNERTLISERLASLKGKEDRIRASYREGIDTLEEYKENKALIAKERDSLERQLAELEENTPDKILDDPTPKMLDRVSSVHDILVSDSYSLVQKNEALKQIIDKIVYDRESDTLKIHFFLYHS

SEQ ID NO: 6124 - protein, 495 aa, Unknown
  Description of Unknown: Integrase B6125 sequence
  PTHR30461:SF3,IPR036162,PS51737,IPR011109,PTHR30461, PS00397,PF00239,G3DSA:1.10.10.2600,IPR006119,SSF53041, cd00338,SM00857,IPR025827,IPR038109,PS51736, IPR006118,PF13408,G3DSA:3.40.50.1390,PF07508,Coil
MSLKYAYGYIRVSTHDQEEISPDSQEHLLRDYATKNNIVILKIFTDLGISGRKADKRPGFQEMIGLAKGPDHPVDCILVWKFSRFARNQEESIVYKSLLKKQHNVDVISISEPLADGPFGSLIERIIEWMDEYYSIRLSGEVFRGMKENATRGAYQARPPLGYKVIERGKPPVIVPEEAAIVRMIFDKYVNRKMSFFDIARHLNSLGLKTSHGKAFERRSIEYIIQNPSYCGMIRWNRMENATNRIKDQDEWIIADGMQEAIISKELFDAAQERLKKIYKPVGKRPSSTYKHWLSGLLKCPVCGRTLTATTMKRANGEKYAYFSCYGYSKGKCDKPHGVSSLVIEKEVLKALEEALGSNSIVYEMREIRPQELSNERTLISERLVSLKGKEDRIRVSYREGIDTLEEYKENKALIAKERDSLERQLAELEGNTPDKIPDDPTPKMLDRVSSVHDILVSDSYSLVQKNEALKQIIDKIVYDRESDTLKIHFFLYHS

SEQ ID NO: 6125 - protein, 495 aa, Unknown
  Description of Unknown: Integrase B6126 sequence
  PTHR30461:SF3,IPR036162,PS51737,IPR011109,PTHR30461, PS00397,PF00239,G3DSA:1.10.10.2600,IPR006119,SSF53041, cd00338,SM00857,IPR025827,IPR038109,PS51736, IPR006118,PF13408,G3DSA:3.40.50.1390,PF07508,Coil
MEKLRTGALYIRVSTDKQEELSPDAQRRLLLEYAAKNNIILSNEYIFEEDGISGRKADKRPNFQRMIGLAKSKEHPFDVILVWKFSRFARNQEESIVYKSLLRKNNVEVISVSEPLVDGPFGTLIERIIEWMDEYYSIRLSGEVTRGMTENAMRGNFQASPPLGYSITAHKATPVIVESEAEIVRMIFNLYTEQGYSIIEITRQLNALGYKTRAGKSFENRGIKYILTNEVYTGKSVWNKRDSASRPKDKAEWIIADGAHEPIISPEQFQRAKVRLESNYRPRYAKPSGVCSHWLSGIVKCSACGRSLSISLAGANKQGKRYIYLQCYGYLKGKCNVSHAISEKKIVPMVLAALKDAISSENLSFKVINDSQSNYPAAIDIYQNQLDELAKKEKRIKMAYMDGIDTIEEYRKNKELLLEERNSIESRINALPKPAAKSDTTAALRSKIKTVYDSLLNEDLSMQTRNDLLKSVVEKIVFNKKESTIDVYFYTSNPL

SEQ ID NO: 6126 - protein, 495 aa, Unknown
  Description of Unknown: Integrase B6127 sequence
  cd03768,PTHR30461:SF3,SM00857,G3DSA:1.10.10.2600,IPR036162, PF13408,IPR025827,G3DSA:3.40.50.1390,PS51737,IPR006119, IPR038109,PF07508,SSF53041,IPR011109,PTHR30461, PS51736,Coil,PF00239
MRIAIYTRKSVAVENSESIETQIQLCKKYFQGENEFEIFEDEGFSGGNTNRPSFKRLMSLIKLGKFDIVAIYKVDRISRNIVDFFKIYEELEKYNVKLISISEGFDPSTPGGKMMMIMLSAFADMERENIRQRVKDNMISLAKKGCFTGGFVPFGCTIEKKEGKSFLKIEDDKIIKLMFDKYLELGSLYATQKYLLDNGIKTLTTRSSLGKILRNPVYCKSDERVSDYLLNKGFEVVGKANKKGYMTYGKTSDYPTLIVSKHNAPIDAELFLKVNLLLDKNKDKATKRESKTYWLTEILYCPFCGSKYVLVNSGKNTYYVCSSRINRASNEMGINKDKVKCENNKYVNAETIEEKVSILINNLEDDREFKKYKGNMVVDNKQNEIDILLKSIDDNKKAIDNLVEKLMLLSNAAAEPLTRKIEELTSENIELEAKIDELRINQLDAITKKNDSELQQAIREFRNIKDNKEKRNKVRIIFNKLIYNPFDDSIDIEFT

SEQ ID NO: 6127 - protein, 495 aa, Unknown
  Description of Unknown: Integrase B6128 sequence
  PTHR30461:SF3,IPR036162,PS51737,IPR011109,PTHR30461, PS00397,PF00239,G3DSA:1.10.10.2600,IPR006119,SSF53041, cd00338,SM00857,IPR025827,IPR038109,PS51736, IPR006118,PF13408,G3DSA:3.40.50.1390,PF07508,Coil
MMSELRYAYGYIRVSTHDQEEISPDSQENLLREYATRNNIVILKIFSDLGISGRKAEKRPGFQEMVGLAKGSDHPVDLILVWKFSRFARNQEESIVYKSLLKKQHNVEVVSISEPLSDNPFGSLIERIIEWMDEYYSIRLSGEVFRGMKENATRGAYQARPPLGYKVVEHGKPPVIIPEEAEIVRMIFNWYANEGIGFFDIARRLNNLGLKTSQGKPFERRSIEYIIQNPSYCGMIRWNRTENSTNRIKDKDEWIVTEGQQPAIITKELFDAAQKRFETTYRPSGKRPSSTYKHWLSGLLKCPACGRTLTAATMKRANGEKYSYFSCYGYHKGKCEKPHGISSLVLEKEVLACIKESLSSGNISYTLKERQPIEVSNEKNILTSRLESLSGKEERIKASYREGIDTLEEYKANKALLQKERIHLEEQLKELEDNAPKDTPDPAANMLLRVQGVYDILVSDSFTAAQKNEALKQIVDKIIYDREQDSLKIYYFLYQ

SEQ ID NO: 6128 - protein, 495 aa, Unknown
  Description of Unknown: Integrase B6129 sequence
  PTHR30461:SF3,IPR036162,PS51737,IPR011109,PTHR30461, PS00397,PF00239,G3DSA:1.10.10.2600,IPR006119,SSF53041, cd00338,SM00857,IPR025827,IPR038109,PS51736, IPR006118,PF13408,G3DSA:3.40.50.1390,PF07508,Coil
MSLKYAYGYIRVSTHDQEEISPDSQEHLLRDYAAKNNIVILKIFTDLGISGRKADKRPGFQEMIGLAKGSDHPVDCILVWKFSRFARNQEESIVYKSLLKKQHNVDVISISEPLADGPFGSLIERIIEWMDEYYSIRLSGEVFRGMKENATRGAYQARPPLGYKVIERGKPPVIVPEEAAIVRMIFDKYVNGKMSFFDIARHLNSLGLKTSHGKAFERRSIEYIIQNPSYCGMIRWNRMENATNRIKDQDEWIIADGMQEAIISKELFDASQERLKKIYKPVGKRPSSTYKHWLSGLLKCPVCGRTLTATTMKRANGEKYAYFSCYGYSKGKCDKPHGVSSLVIEKEGLKALEEALGSNSIVYEMREIRPQELSNERTLISERLASLKSKEDRIRASYREGIDTLEEYKENKALIAKERDSLERQLAELEENTPDKIPDDPTPKMLDRVSSVHDILVSDSYSLVQKNEALKQIIDKIVYDRESDTLKIHFFLYHS

SEQ ID NO: 6129 - protein, 495 aa, Unknown
  Description of Unknown: Integrase B6130 sequence
  PTHR30461:SF3,IPR036162,PS51737,IPR011109,PTHR30461, PS00397,PF00239,G3DSA:1.10.10.2600,IPR006119,SSF53041, cd00338,SM00857,IPR025827,IPR038109,PS51736, IPR006118,PF13408,G3DSA:3.40.50.1390,PF07508,Coil
MSLKYAYGYIRVSTHDQEEISPDSQEHLLRDYAAKNNIVILKIFTDLGISGRKADKRPGFQEMIGLAKGPDHPVDCILVWKFSRFARNQEESIVYKSLLKKQHNVDVISISEPLADGPFGSLIERIIEWMDEYYSIRLSGEVFRGMKENATRGAYQARPPLGYKVIERGKPPVIVPEEAAIVRMIFDKYVNGKMSFFDIARHLNSLGLKTSHGKAFERRSIEYIIQNPSYCGMIRWNRMENATNRIKDQDEWIIADGMQEAIISKELFDAAQERLKKIYKPVGKRPSSTYKHWLSGLLKCPVCGRTLTATTMKRANGEKYAYFSCYGYSKGKCDKPHGVSSLVIEKEVLKALEEALGSNSIVYEMREIRPQELSNERTLISERLVSLKGKEDRIRASYREGIDTLEEYKENKALIAKERNSLERQLAELEENTPDKILDDPTPKMLDRVSSVHDILVSDSYSLVQKNEALKQIIDKIVYDRESDTLKIHFFLYHS

SEQ ID NO: 6130 - protein, 495 aa, Unknown
  Description of Unknown: Integrase B6131 sequence
  PTHR30461:SF3,IPR036162,PS51737,IPR011109,PTHR30461, PS00397,PF00239,G3DSA:1.10.10.2600,IPR006119,SSF53041, cd00338,SM00857,IPR025827,IPR038109,PS51736, IPR006118,PF13408,G3DSA:3.40.50.1390,PF07508,Coil
MSLKYAYGYIRVSTHDQEEISPDSQEHLLRDYAAKNNIVILKIFTDLGISGRKADKRPGFQEMIGLAKGPDHPVDCILVWKFSRFARNQEESIVYKSLLKKQHNVDVISISEPLADGPFGSLIERIIEWMDEYYSIRLSGEVFRGMKENATRGAYQARPPLGYKVIERGKPPVIVPEEAAIVRMIFDKYVNGKMSFFDIARHLNSLGLKTSHGKAFERRSIEYIIQNPSYCGMIRWNRMENATNRIKDQDEWIIADGMQEAIISKELFDAAQERLKKIYKPVGKRPSSTYKHWLSGLLKCPACGRTLTATTMKRANGEKYAYFSCYGYSKGKCDKPHGVSSLVIEKEVLKALEEALGSNSIVYEMREIRPQELSNERTLISERLASLKGKEDRIRASYREGIDTLEEYKENKTLIAKERDSLERQLAELEENTPDKIPDDPTPKMLDRVSSVHDILVSDSYSLVQKNEALKQIIDKIIYDRESDTLKIHFFLYHS

SEQ ID NO: 6131 - protein, 495 aa, Unknown
  Description of Unknown: Integrase B6132 sequence
  PTHR30461:SF3,IPR036162,PS51737,IPR011109,PTHR30461, PS00397,PF00239,G3DSA:1.10.10.2600,IPR006119,SSF53041, cd00338,SM00857,IPR025827,IPR038109,PS51736, IPR006118,PF13408,G3DSA:3.40.50.1390,PF07508,Coil
MMSELRYAYGYIRVSTHDQEEISPDSQENLLREYATRNNIVILKIFSDLGISGRKAEKRPGFQEMVGLAKGSDHPVDLILVWKFSRFARNQEESIVYKSLLKKQHNVEVVSISEPLSDNPFGSLIERIIEWMDEYYSIRLSGEVFRGMKENATRGAYQARPPLGYKVVEHGKPPMIVPEEAEIIRMIFNWYANEGIGFFDIARRLNNLGLKTSQGKPFERRSIEYIIQNPSYCGMIRWNRTENSTNRIKDKDEWIVTEGQQPAIITKELFDAAQKRFETTYRPSGKRPSSTYKHWLSGLLKCPACGRTLTAATMKRANGEKYSYFSCYGYHKGKCEKPHGISSLVLEKEVLACVKESLSSGNISYTLKERQPIEVSNEKNILTSRLESLAGKEERIKASYREGIDTLEEYKANKALLQKERIHLEEQLKELEDNAPKDAPDPAANMLLRVQGVYDILVSDSFTAAQKNEALKQIVDKIVYNREQDSLKIYYFLYQ

SEQ ID NO: 6132 - protein, 495 aa, Unknown
  Description of Unknown: Integrase B6133 sequence
  cd00338,SM00857,G3DSA:1.10.10.2600,IPR036162,PF13408, PS51737,G3DSA:3.40.50.1390,IPR025827,IPR006119,IPR038109, PF07508,IPR011109,SSF53041,PTHR30461,PS51736, Coil,PF00239
MSQKTAVLYARFSCSKQREESIEGQLRVCRDWCAREGYAIVAEYCDYAISGTTDERPQFQQMIANAGESDIVLVYMMDRFSRDPFDAPIYKRELQKRGVRLVSALEAIPDSPEGIIYEKLLEGLAACESRKTSVRVKRDMTTNAMKCRTNGVRCFGYRTGDDGRYEIDPDEAEIVREVFRRRVHGETVNSIAMDLRRRGVVSRAGNPIKDTFVNHMLHNEKYRGIYSWGGVTKKDGMPRIVSDETFRRAQMVKSKKQRRNEEWGEFALSGRVICSACGRNMRGVSGRGSSNRKYEYYSCGSCKEVRPVRRDWLEGSIIDALRELLSQPDEARRIAEMCVGAGEPKEVAEHRKQAAAALRAAETGLSNILKAVEQGIVVPGTKERAEELEAQKERAEHELAMYDRKVFSVENFTRFLQFGATLTDDLLLQGFVYQVMVSDEEVVVTMNFDAEKNEPARLRLSRVRTSFEWCPVCKNTRTMMAVLNGAVYLRFSRAA

SEQ ID NO: 6133 - protein, 495 aa, Unknown
  Description of Unknown: Integrase B6134 sequence
  PTHR30461:SF3,IPR036162,PS51737,IPR011109,PTHR30461, PS00397,PF00239,G3DSA:1.10.10.2600,IPR006119,SSF53041, cd00338,SM00857,IPR025827,IPR038109,PS51736, IPR006118,PF13408,G3DSA:3.40.50.1390,PF07508,Coil
MMSELRYAYGYIRVSTHDQEEISPDSQENLLREYAARNNIVILKIFSDLGISGRKAEKRPGFQEMVGLAKGSDHPVDLILVWKFSRFARNQEESIVYKSLLKKQHNVEVVSISEPLSDNPFGSLIERIIEWMDEYYSIRLSGEVFRGMKENATRGAYQARPPLGYKVVEHGKPPVIIPEEAEIVRMIFNWYANEGIGFFDIARRLNNLGLKTSQGKPFERRSIEYIIQNPSYCGMIRWNRTENSTNRIKDKDEWIVTEGQQPAIITKELFDAAQKRFETTYSPSGKRPSSTYKHWLSGLLKCPACGRTLTAATMKRANGEKYSYFSCYGYHKGKCEKPHGISSLILEKEVLACVKESLSSGSISYTLKERQPIEVSNEKNILTSRLESLSGKEERIKASYREGIDTLEEYKANKTLLQKERIHLEEQLKELEDNTPKDTPDPAANILLRVQGVYDILVSDSFTTAQKNEALKQIVDKIVYDREQDSLKIYYFLYQ

SEQ ID NO: 6134 - protein, 495 aa, Unknown
  Description of Unknown: Integrase B6135 sequence
  PTHR30461:SF3,IPR036162,PS51737,IPR011109,PTHR30461, PS00397,PF00239,G3DSA:1.10.10.2600,IPR006119,SSF53041, cd00338,SM00857,IPR025827,IPR038109,PS51736, IPR006118,PF13408,G3DSA:3.40.50.1390,PF07508,Coil
MSLKYAYGYIRVSTHDQEEISPDSQEHLLRDYAAKNNIVILKIFTDLGISGRKADKRPGFQEMIGLAKGPDHPVDCILVWKFSRFARNQEESIVYKSLLKKQHNVDVISISEPLADGPFGSLIERIIEWMDEYYSIRLSGEVFRGMKENATRGAYQARPPLGYKVIERGKPPVIVPEEASIVRMIFDKYVNGKMNFFDIARHLNSLGLKTSHGKAFERRSIEYIIQNPSYCGMIRWNRMENATNRIKDQDEWIIADGMQEAIISKELFDAAQERLKKIYKPVGKRPSSTYKHWLSGLLKCPVCGRTLTATTMKRANGEKYAYFSCYGYSKGKCDKPHGVSSLVIEKEVLKALEEALGSNSIVYEMREIRPQELSNERTLISERLASLKGKEDRIRASYREGIDTLEEYKENKALIAKERDSLERQLAELEENTPDKIPDDPTPKMLDKVSSVHDILVSDSYSLVQKNEALKQIIDKIVYDRESDTLKIHFFLYHS

SEQ ID NO: 6135 - protein, 495 aa, Unknown
  Description of Unknown: Integrase B6136 sequence
  PTHR30461:SF3,IPR036162,PS51737,IPR011109,PTHR30461, PS00397,PF00239,G3DSA:1.10.10.2600,IPR006119,SSF53041, cd00338,SM00857,IPR025827,IPR038109,PS51736, IPR006118,PF13408,G3DSA:3.40.50.1390,PF07508,Coil
MKDGALYIRVSTHMQDELSPDAQKRLLLDYAKQNDILVSHNHIFIENGVSGRKADKRPEFQKMISLAKTKPRPFDTILVWKYSRFARNQEESIVYKSLLRKQCGIDVISVSEPIIDGPFGSLIERIIEWMDEYYSTRLSGEVSRGMTEKALRGGYQARPPLGYKIVEKGKPPVIVPEEAKIVRIIFDKYVNEKRSFFDIARYLNKLGYKTSHGKPFETRSIDYIIQNPTYCGMIRWNRTENETNRIKDESEWVVTEGQHEPIISKELFDMAQERFKSTYTPKGARPSSTYKHWLSGLLKCSHCGRTMIAKTAKKKSDGSYYVYFSCYGYCKGKCLVSNSISSLKIEPAIIAALKEVLDTQELQFEYKFLQPIEVVDERKALDERLDALAIKEERIKLAYREGIDTIEEYRHNRDIIENERKEILEEIAGLPDNKQDDTHDNEIMMRKIKNVYEVISSPDYSNQQKNEMLRTIVDKFVFDKKNDRLDVYYYLAKTQ

SEQ ID NO: 6136 - protein, 495 aa, Unknown
  Description of Unknown: Integrase B6137 sequence
  PTHR30461:SF3,IPR036162,PS51737,IPR011109,PTHR30461, PS00397,PF00239,G3DSA:1.10.10.2600,IPR006119,SSF53041, cd00338,SM00857,IPR025827,IPR038109,PS51736, IPR006118,PF13408,G3DSA:3.40.50.1390,PF07508,Coil
MMSELRYAYGYIRVSTHDQEEISPDSQENLLREYATRNNIVILKIFSDLGISGRKAEKRPGFQEMVGLAKGSDHPVDLILVWKFSRFARNQEESIVYKSLLKKQHNVEVVSISEPLSDNPFGSLIERIIEWMDEYYSIRLSSEVFRGMKENATRGAYQARPPLGYKVVEHGKPPVIIPEEAEIVRMIFNWYANEGIGFFDIARRLNNLELKTSQGKPFERRSIEYIIQNPSYCGMIRWNRTENSTNRIKDKDEWIVTEGQQPAIITKELFEAAQKRFEATYRPSGKRPSSTYKHWLSGLLKCPACGRTLTAATMKRANGEKYSYFSCYGYHKGKCEKPHGISSLVLEKEVLACVKESLSSGNISYTLKERQPTEISNEKNILTSRLESLSGKEERIKASYREGIDTLEEYKANKSLLLKERIHLEEQLKELEDNAPKDAPDPAANMLLRVQGVYDILVSDSFTAAQKNEALKQIVDKIVYDREQDSLKIYYFLYQ

SEQ ID NO: 6137 - protein, 495 aa, Unknown
  Description of Unknown: Integrase B6138 sequence
  PTHR30461:SF3,IPR036162,PS51737,IPR011109,PTHR30461, PS00397,PF00239,G3DSA:1.10.10.2600,IPR006119,SSF53041, cd00338,SM00857,IPR025827,IPR038109,PS51736, IPR006118,PF13408,G3DSA:3.40.50.1390,PF07508,Coil
MKTGALYIRVSTHMQDELSPDAQKRLLLEYAKANDILVSSDYIFIETGISGRKVDKRPEFQKMISLAKTKPAPFDSILVWKFSRFARNQEESVVYKSLLRKQCNVDVISVSEPLIDGPFGSLIERIIEWMDEYYSIRLSGEVTRGMTEKALRGGYQARPPLGYKIAVKGEPPIIVPEEAKIVRIIFQKYVYEKQGYFDIARYLNSLGYKTSHGKSFEARSIDYIIQNPTYCGMIRWNRTENETNRIKDKDEWIITEGHHEPIISKELFDAAQDRYKSTYRPRGARPSSTYRHWLSGLLKCPHCGRTMIAKRVVKKSNGANYAYFTCYGYSKGKCLIPSNVSSLKLEPAVLSSLKEILDTKTLSFEYKVIEQTEQVDEKALLEEQLQQIALKEQRIKTAYREGIDTIEEYKHNREIIERERDEIQQKIYELESVDMDTSDDKAIMLKKIQNVYEVVSSSDYTDQQKNEMLKTIVDKYVYDKENDTLNAYYYLAKPQ

SEQ ID NO: 6138 - protein, 495 aa, Unknown
  Description of Unknown: Integrase B6139 sequence
  PTHR30461:SF3,IPR036162,PS51737,IPR011109,PTHR30461, PS00397,PF00239,G3DSA:1.10.10.2600,IPR006119,SSF53041, cd00338,SM00857,IPR025827,IPR038109,PS51736, IPR006118,PF13408,G3DSA:3.40.50.1390,PF07508,Coil
MSLKYAYGYIRVSTHDQEEISPDSQEHLLRDYAVKNNIVILKIFTDLGISGRKADKRPGFQEMIGLAKGPDHPVDCILVWKFSRFARNQEESIVYKSLLKKQHNVDVISISEPLADGPFGSLIERIIEWMDEYYSIRLSGEVFRGMKENATRGAYQARPPLGYKVVERGKPPVIVPEEAAIVRMIFDKYVNGKMSFFDIARYLNSLGLKTSHGKAFERRSIEYIIQNPSYCGMIRWNRIENATNRIKDQDEWIIAAGMQEAIISKELFDAAQERLKKIYKPVGKRPSSTYKHWLSGLLKCPVCGRTLTATTMKRANGEKYAYFSCYGYSKGKCDKPHGVSSLVIEKEVLKALEEALGSNSIVYEMREIRPQELSNERTLISERLASLKGKEDRIRASYREGIDTLEEYKENKALIAKERDSLERQLAELEENTPDKIPDDPTPKMLDRVSSVHDILVSDSYSLVQKNEALKQIIDKIVYDRESDSLKIHFFLYHS

SEQ ID NO: 6139 - protein, 495 aa, Unknown
  Description of Unknown: Integrase B6140 sequence
  PTHR30461:SF3,IPR036162,PS51737,IPR011109,PTHR30461, PS00397,PF00239,G3DSA:1.10.10.2600,IPR006119,SSF53041, cd00338,SM00857,IPR025827,IPR038109,PS51736, IPR006118,PF13408,G3DSA:3.40.50.1390,PF07508,Coil
MSLKYAYGYIRVSTHDQEEISPDSQEHLLRDYAAKNNIVILKIFTDLGISGRKADKRPSFQEMIGLAKGPDHPVDCILVWKFSRFARNQEESIVYKSLLKKQHNVDVISISEPLADGPFGSLIERIIEWMDEYYSIRLSGEVFRGMKENATRGAYQARPPLGYKVIERGKPPVIIPEEAAIVRIIFDKYVNGKMSFFDIARHLNSLGLKTSHGKAFERRSIEYIIQNPSYCGMIRWNRMENATNRIKDQDEWIIADGMQEAIISKELFDAAQERLKKIYKPVGKRPSSTYKHWLSGLLKCPVCGRTLTATTMERANGEKYVYFSCYGYSKGKCDKPHGVSSLVIEKEVLKALEEALGSNSIVYEMREIRPQELSNERTLISERLTSLKGKEDRIRASYREGIDTLEEYKENKALIAKERDSLERQLAELEENTPDKIPDDPTPKMLDRVSSVHDILVSDSYSLVQKNEALKQIIDKIVYDRESDTLKIHFFLYHS

SEQ ID NO: 6140 - protein, 495 aa, Unknown
  Description of Unknown: Integrase B6141 sequence
  PTHR30461:SF3,IPR036162,PS51737,IPR011109,PTHR30461, PS00397,PF00239,G3DSA:1.10.10.2600,IPR006119,SSF53041, cd00338,SM00857,IPR025827,IPR038109,PS51736, IPR006118,PF13408,G3DSA:3.40.50.1390,PF07508,Coil
MSVKYAYGYIRVSTHDQEEISPDSQEHLLRDYAAKNNIVILKIFTDLGISGRKADKRPGFQEMIGLAKGPDHPVDCILVWKFSRFARNQEESIVYKSLLKKQHNVDVISISEPLADGPFGSLIERIIEWMDEYYSIRLSGEVFRGMKENATRGAYQARPPLGYKVIERGKPPVIVPEEAAIVRMIFDKYVNGKMNFFDIARYLNSLGLKTSHGKAFERRSIEYIIQNPSYCGMIRWNRMENATNRIKDQDEWIIADGMQEAIISKELFDAAQERLKKIYKPVGKRPSSTYKHWLSGLLKCPVCGRTLTATTMKRANEEKYAYFSCYGYSKGKCDKPHGVSSLVIEKEVLKALEEALGSNSIVYEMREIRPQELSNECTLISERLASLKGKEDRIRASYREGIDTLEEYKENKALIAKERDALEQQLAELEENAPDKTPEDPTPKMLDRVSSVHDILVSDSYSLVQKNEALKQIIDKIVYDRESDTLKIHFFLYHS

SEQ ID NO: 6141 - protein, 495 aa, Unknown
  Description of Unknown: Integrase B6142 sequence
  PTHR30461:SF3,IPR036162,PS51737,IPR011109,PTHR30461, PS00397,PF00239,G3DSA:1.10.10.2600,IPR006119,SSF53041, cd00338,SM00857,IPR025827,IPR038109,PS51736, IPR006118,PF13408,G3DSA:3.40.50.1390,PF07508,Coil
MMSELRYAYGYIRVSTHDQEEISPDSQENLLREYAARNNIVILKIFSDLGISGRKAQKRPGFQEMVGLAKGSDHPVDLILVWKFSRFARNQEESIVYKSLLKKQHNVEVVSISEPLSDNPFGSLIERIIEWMDEYYSIRLSGEVFRGMKENATRGAYQARPPLGYKVVEHGKPPVIVPEEAEIVRMIFNWYVNEGLGFFDVARRLNNLGLKTSQGKPFERRSIEYIIQNPSYCGMIRWNRTENSTNRIKDKDEWIVTEGQQPAIITKELFDAAQKRFETTYRPSGKRPSSTYKHWLSGLLKCPACGRTLTAATMKRANGEKYSYFSCYGYHKGKCEKPHGISSLVLEKEVLACVKESLSSGNISYTLKERQPIEVSNEKNILTSRLESLSGKEERIKASYREGIDTLEEYKANKALLQKERIHLEEQLKELEDHAPKDTPDPAANMMLRVQGVYDILVSDSFTAAQKNEALKQIVDKIVYNREQDSLKIYYFLYQ

SEQ ID NO: 6142 - protein, 495 aa, Unknown
  Description of Unknown: Integrase B6143 sequence
  PTHR30461:SF3,IPR036162,PS51737,IPR011109,PTHR30461, PS00397,PF00239,G3DSA:1.10.10.2600,IPR006119,SSF53041, cd00338,SM00857,IPR025827,IPR038109,PS51736, IPR006118,PF13408,G3DSA:3.40.50.1390,PF07508,Coil
MSLKYAYGYIRVSTHDQEEISPDSQEHLLRDYAAKNNIVILKIFTDLGISGRKADKRPGFQEMIGLAKGPDHPVDCILVWKFSRFARNQEESIVYKSLLKKQHNVDVISISEPLADGPFGSLIERIIEWMDEYYSIRLSGEVFRGMKENATRGAYQARPPLGYKVIERGKPPVIVPEEAAIVRMIFDKYVNGKMNFFDIARYLNSLGLKTSHGKAFERRSIEYIIQNPSYCGMIRWNRMENATNRIKDQDEWIIAAGMQEAIISKELFDAAQERLKKIYKPVGKRPSSTYKHWLSGLLKCPVCGRTLTATTMKRANGEKYAYFSCYGYSKGKCDKPHGVSSLVIEKEVLKALEEALGSNSIVYEMREIRPQELSNERTLISERLASLKGKEDRIRASYREGIDTLEEYKENKALIAKERDSLERQLAELEENTPDKIPDDPTPKMLDRVSSVHDILFSDSYSLVQKNEALKQIIDKIVYDRESDTLKIHFFLYHS

SEQ ID NO: 6143 - protein, 495 aa, Unknown
  Description of Unknown: Integrase B6144 sequence
  PTHR30461:SF3,IPR036162,PS51737,IPR011109,PTHR30461, PS00397,PF00239,G3DSA:1.10.10.2600,IPR006119,SSF53041, cd00338,SM00857,IPR025827,IPR038109,PS51736, IPR006118,PF13408,G3DSA:3.40.50.1390,PF07508,Coil
MMSELRYAYGYIRVSTHDQEEISPDSQENLLREYAARNNIVILKIFSDLGISGRKAEKRPGFQEMVGLAKGSDHPVDLILVWKFSRFARNQEESIVYKSLLKKQHNVEVVSISEPLSDNPFGSLIERIIEWMDEYYSIRLSGEVFRGMKENATRGAYQARPPLGYKVVEHGKPPVIIPEEAEIVRMIFNWYANEGIGFFDIARRLNNLGLKTSQGKPFERRSIEYIIQNPSYCGMIRWNRTENSTNRIKDKDEWIVTEGQQPSIITKELFDAAQKRFETTYRPSGKRPSSTYKHWLSGLLKCPACGRTLTAATMKRANGEKYSYFSCYGYHKGKCEKPHGISSLVLEKEVLACVKESLSSGNISYTLKERQPIEASNEKNILTSRLESLSGKEERIKASYREGIDTLEEYKANKALLQKERIHLEEQLKELEDNAPKDTPDPAANMLLRVQGVYDILVSDSFTAAQKNEALKQIVDKIIYDREQDSLKIYYFLYQ

SEQ ID NO: 6144 - protein, 495 aa, Unknown
  Description of Unknown: Integrase B6145 sequence
  PTHR30461:SF3,IPR036162,PS51737,IPR011109,PTHR30461, PS00397,PF00239,G3DSA:1.10.10.2600,IPR006119,SSF53041, cd00338,SM00857,IPR025827,IPR038109,PS51736, IPR006118,PF13408,G3DSA:3.40.50.1390,PF07508,Coil
MMSELRYAYGYIRVSTHDQEEISPDSQENLLREYATRNNIVILKIFSDLGISGRKAEKRPGFQEMVGLAKGSDHPVDLILVWKFSRFARNQEESIVYKSLLKKQHNVEVVSISEPLSDNPFGSLIERIIEWMDEYYSIRLSGEVFRGMKENATRGAYQARPPLGYKVVEHGKPPVIIPEEAEIVRMIFNWYANEGIGFFDIARRLNNLGLKTSQGKPFERRSIEYIIQNPSYCGMIRWNRTENSTNRIKDKDEWIVTEGQQPAIITKELFDAAQKRFETTYSPSGKRPSSTYKHWLSGLLKCPACGRTLTAATMKRANGEKYSYFSCYGYHKGKCEKPHGISSLVLEKEVLACVKESLSSGNISYTLKERQPIEVSNEKNILTSRLESLSGKEERIKASYREGIDTLEEYKANKALLQKERIHLEEQLKELEDNAPKDTPDPAANMLLRVQGVYDILVSDSFTAAQKNEALKQIVDKIVYEREQDSLKIYYFLYQ

SEQ ID NO: 6145 - protein, 495 aa, Unknown
  Description of Unknown: Integrase B6146 sequence
  PTHR30461:SF3,IPR036162,PS51737,IPR011109,PTHR30461, PS00397,PF00239,G3DSA:1.10.10.2600,IPR006119,SSF53041, cd00338,SM00857,IPR025827,IPR038109,PS51736, IPR006118,PF13408,G3DSA:3.40.50.1390,PF07508,Coil
MSLKYAYGYIRVSTHDQEEISPDSQEHLLRDYATKNNIVILKIFTDLGISGRKADKRPGFQEMIGLAKGPDHPVDCILVWKFSRFARNQEESIVYKSLLKKQHNVDVISISEPLADGPFGSLIERIIEWMDEYYSIRLSGEVFRGMKENATRGAYQARPPLGYKVIERGKPPVIVPEEAAIVRMIFDKYVNGKMNFFDIARYLNSLGLKTSHGKAFERRSIEYIIQNPSYCGMIRWNRMENATNRIKDQDEWIIADGMQEAIISKELFDAAQERLKKIYKPVGKRPSSTYKHWLSGLLKCPVCGRTLTATTMKRANGEKYAYFSCYGYSKGKCDKPHGVSSLMIEKEVLKALEEALGSNSIVYEMREIRPQELSNERTLISERLASLKGKEDRIRASYREGIDTLEEYKENKTLIAKERDSLERQLAELEENAPDKIPDDPTPKMLDRVSSVHDILVSDSYSLVQKNEALKQIIDKIVYDRESDTLKIHFFLYHS

SEQ ID NO: 6146 - protein, 494 aa, Unknown
  Description of Unknown: Integrase B6147 sequence
  PTHR30461:SF3,SM00857,G3DSA:1.10.10.2600,IPR036162,PF13408, IPR025827,G3DSA:3.40.50.1390,PS51737,IPR006119,IPR038109, PF07508,SSF53041,IPR011109,PF00239,PTHR30461, PS51736,Coil,cd00338
MNRYGKRCVLYPRVSTEMQVDGYSLEGQKNMLTRFADREEMIIVDTYEDAGKSGKSIEGRPAFQKMLRDIEDGLDIDYILVYKLSRFGRNAADILNSLELVQSYGVNLICIEEGIDSSQTSGKLLISVLSAVAEIERENIIEQTMNGRREKARQGGWNGGFAPYGYTLEDNKLMIEETEAVAIRKIFELYTSSEIGLGGIANQLNLQGIRKIPRQNGTLEDWTGHFIKLILDNPVYCGKIAYGRRTKEKVKGTKNDYQIKRNDDYILTEGQHKGIVSEEVWEKAHAKRLRTGVKQPSKIGRDRVHLLSGLLKCPVCGSPMYTNKHAWTNKDGTYKEIYYYVCSRNRMVRGKHCEYKAMLKKTDIEPMVIEAIREIVRNEEYAQAIKKRIGVQIDTKAVDKELEGYQAKLKEVDLNKTRLEREIDSLPADAKYRERKLHDMTLRLDSLYDVIVELEEKIEDARLRRDAIKQQAITLENIYKIMVNFDCVYMIETC

SEQ ID NO: 6147 - protein, 494 aa, Unknown
  Description of Unknown: Integrase B6148 sequence
  PTHR30461:SF3,IPR036162,PS51737,IPR011109,PTHR30461, PS00397,PF00239,G3DSA:1.10.10.2600,IPR006119,SSF53041, cd00338,SM00857,IPR025827,IPR038109,PS51736, IPR006118,PF13408,G3DSA:3.40.50.1390,PF07508,Coil
MSELRYAYGYIRVSTHDQEEISPDSQENLLREYATRNNIVILKIFSDLGISGRKAEKRPGFQEMVGLAKGSDHPVDLILVWKFSRFARNQEESIVYKSLLKKQHNVEVVSISEPLSDNPFGSLIERIIEWMDEYYSIRLSGEVFRGMKENATRGAYQARPPLGYKVVEHGKPPMIVPEEAEIIRMIFNWYANEGIGFFDIARRLNNLGLKTSQGKPFERRSIEYIIQNPSYCGMIRWNRTENSTNRIKDKDEWIVTEGQQPAIITKELFDAAQKRFETTYRPSGKRPSSTYKHWLSGLLKCPACGRTLTAATMKRANGEKYSYFSCYGYHKGKCKKPHGISSLVLEKEVLACVKESLSSGNISYTLKERQPIEVSNEKNILTSRLESLSGKEERIKASYREGIDTLEEYKANKALLQKERIHLEEQLKELEDNAPKDTPDPAANMLLRVQGVYDILVSDSFTAAQKNEALKQIVDKIVYDREQDSLKIYYFLYQ

SEQ ID NO: 6148 - protein, 494 aa, Unknown
  Description of Unknown: Integrase B6149 sequence
  IPR036162,PS51737,IPR011109,PTHR30461,PS00397, PF00239,G3DSA:1.10.10.2600,IPR006119,SSF53041,cd00338, SM00857,IPR025827,IPR038109,PS51736,IPR006118, PF13408,G3DSA:3.40.50.1390,PF07508,Coil
MKQLKEVCAYIRVSTGKQEELSPDSQLRLIKEYAQAHDMLLTHVYMEEHGISGKSSEKRPAFQEMIAACKDKSHPYDAVLLWKFSRFARNQDEATYYKSILRKKCNVDVISISEPIIEGMYGRLIEMVIEWSDEFYLVNLSGEVMRGMTQNALNGGYNSNPPIGYTKKRGEIPQVDPERAELVRRIFRMFTQQHMSRNDIASTLNRQGITTNRGGRWETRTVTYILENPFYIGKIRWNFYDRSQNRRKDTGDVILSDGQHEPIISADTFAAAGRLLAKARTTSSFGRKRSVVATKHWLSSMVLCSSCGASLGYNKGGQKKHAAPFFQCWKHIKGMCDHNSYISAAALEQMVMDAIIHFGQSFDLMYHFSDAPQADDTIYLTGELSKLSEKERRIKDAYISGIDSLEEYRENKALLQKKRDELEQQLADTHKVTPIKERYQQIDMNHLLTVLQDPDQDYIVKGNSLRKVFDHFVYDKEAGTLDCFLNTSIEKISK

SEQ ID NO: 6149 - protein, 494 aa, Unknown
  Description of Unknown: Integrase B6150 sequence
  PTHR30461:SF3,IPR036162,PS51737,IPR011109,PTHR30461, PS00397,PF00239,G3DSA:1.10.10.2600,IPR006119,SSF53041, cd00338,SM00857,IPR025827,IPR038109,PS51736, IPR006118,PF13408,G3DSA:3.40.50.1390,PF07508,Coil
MKIGALYVRVSTHNQDELSPDAQIRLGKDFAKRNDIVIPKEYIFMESVSGRKAEKRHDFQRMVGLAKSKPRPFDVIIVWKYSRFARNQEESIVYKSLLRKQCGIDVLSVSEPRVEGPFGSLIERIIEWMDEYYSIRLSGEVTRGMTEKALRGGFQARPPLGYKITERGKPPVIVPEEAKIIRLIFQKYVEEQCGFFDIAKFLNRLGYKTSRNEPFERRSIEYIIQNPTYCGMIRWNRTTNETNEIKDESEWIIADGQHEAIISKELFDRAQERFKTTYKPKGARPSSTYHHWLSGLLKCPVCGRTMVAKTMYRKSNGEAYSYFVCYGVSKGKCAAKNSVSSLVLEPAIIRALQDVFQTREIEYTEIKPAAVHETIDERELLMDQLKQLDQKEKRIKEAYRDGIDTLEEYKDNKEYIRIERERLEIQLNDCQPAPADDTARKEQLLNKIHTVCDVISSEKFTDQQKNEALKSIIQKIIYDKPADSLKIYYYLTEP

SEQ ID NO: 6150 - protein, 494 aa, Unknown
  Description of Unknown: Integrase B6151 sequence
  PTHR30461:SF3,SM00857,G3DSA:1.10.10.2600,IPR036162,PF13408, PS51737,G3DSA:3.40.50.1390,IPR025827,IPR006119,IPR038109, PF07508,IPR011109,SSF53041,PTHR30461,Coil, PS51736,cd00338,PF00239
MPEALNAVIYARYSSDRQTEQSIEGQLRECYAFAKANDIAVIDTYIDRAISGKTDNRPAFQKMIEDSAKRQFQAVIVYRLDRFTRNRYDSAIYKARLKKNGVKVLSAMENLNGSPESIIMESLLEGMAEYYSVELSQKITRGMRENALKGKALGGQRVLGYKVNSDCYFEIDETTAPVVVDIFKLYSSGKTVKEICDILNARGVKTARGGAFNKNSLHTILTNKKYIGIYKTKYGEIVGGIPAIIDKELFEMVALRMEQNKKAPARVKAEINYLLSTKLFCGKCRSAMVGESGTSKTGKKYYYYACVKKKREKACDKSNVKKDWIEDLVIQRTVTDILKDDVIENIADRLVELQKAEAAESGTMLYLENSLAEIQVSIKNIMTAIEKGIITESTKTRLTELEDEKRNVEIEIAKESIARRIISREQIIYWISSFKDGDITSEKYRQQLIDTFVHAVFVYDDKIVITYNYSGENNTATISDLDLSSPPFGPYSNT

SEQ ID NO: 6151 - protein, 494 aa, Unknown
  Description of Unknown: Integrase B6152 sequence
  PTHR30461:SF3,cd00338,SM00857,G3DSA:1.10.10.2600,IPR036162, PF13408,PS51737,G3DSA:3.40.50.1390,IPR025827,IPR006119, IPR038109,PF07508,IPR011109,SSF53041,PTHR30461, PS51736,Coil,PF00239
MQDIIYGALYIRVSTHGKQEELSPDAQKRLLLKYAKENGIIVLEQHIYEEKGISGRKADRRPQFQEMISAAKSNPSPFQVILVWKYSRFARNQEESIVYKSLLRKKCSVDVISVSEPLVDGPFGSLIERIIEWMDEYYSIRLSGEVFRGMSEKAMKGGYQSRPPLGYRIEHKGCPPVIVPEEAEIVKYIFDKYVNEHAGIFDIARNVNALGAKTSHGKSFERRSIEYILKNPTYCGMIRWNMTDNTTKEIKNKSEWIIAEGTHPAIISKEVFQAAQKRFEKEYIPSGRRPSSTCKHWLSGVMKCPACGRTMVVSVTKTRTGHSYPYFVCYGYSKGKCAAKTAVSAKKIEPYVLDGIKTATQGELSFAIKETNPVESSPELQILEEQIGKIDIKERRIKEAYMNGIDTMEEYKENKAILAQERKILESKLSFLQKKPVTKEEVMPKLQQRIRNVYDIITNDDFSISQKNDAVKSIIEKIVFNKETDTAEIYYYYL

SEQ ID NO: 6152 - protein, 494 aa, Unknown
  Description of Unknown: Integrase B6153 sequence
  PTHR30461:SF3,IPR036162,PS51737,IPR011109,PTHR30461, PS00397,PF00239,G3DSA:1.10.10.2600,IPR006119,SSF53041, SM00857,IPR025827,IPR038109,PS51736,cd03768, IPR006118,PF13408,G3DSA:3.40.50.1390,PF07508,Coil
MRVVGYARVSTREQADHGYSIGEQNSRLRAYCQAKDWTLLRVIEDPGFSGAKMQRPGLQQVLEMVRRRECDAVLVWKLDRLSRSQKDTLYLLEDVFLANGCGFVSMLENFDTSTAFGRAMVGILSVFAQLEREQFKERSAIGRVGRAKAGLFHGGGYAPIGYDYYTKEDGGQGLVVNEYEAMQVREVYRLYLAGWAVHKIQVYMHERYTTKNGCWASDTTVRSVLSSPIYLGRITWAGKTYEGQHEALISQNDFDQVAARRESLKWQPAEPRAACDLIKNSPFRSTHILGGITWCARCGARYFASGNYSGRGENRKYWPYYTCYSVAKSSKKMIKDPNCKNKRWAVGKLDAIILAEISRLEFDPAALAKAAGPVDVSGVEEKRRVLEARVAEVRPQMERLLDLCQTGGLPVASVSGRLAALQKELDALNGELSGLAVPETVDRLAVAQEMLAGASAVIKNGTPEQKRALVHSLIGRIDIDGEDITIHWLFAPEN

SEQ ID NO: 6153 - protein, 494 aa, Unknown
  Description of Unknown: Integrase B6154 sequence
  PTHR30461:SF3,IPR036162,PS51737,IPR011109,PTHR30461, PS00397,PF00239,G3DSA:1.10.10.2600,IPR006119,SSF53041, SM00857,IPR025827,IPR038109,PS51736,cd03768, IPR006118,PF13408,G3DSA:3.40.50.1390,PF07508,Coil
MRVVGYARVSTREQADHGYSIGEQNSRLRAYCQAKDWTLLRVIEDPGFSGAKMQRPGLQQVLEMVRRRECDAVLVWKLDRLSRSQKDTLYLLEDVFLANGCGFVSMLENFDTSTAFGRAMVGILSVFAQLEREQFKERSAIGRVGRAKAGLFHGGGYAPIGYDYYTKEDGGQGLVVNEYEAMQVREVYRLYLAGWAVHKIQVYMHERYTTKNGCWASDTTVRSVLSSPIYLGRITWAGKTYEGQHEALVSQNDFDQVAARRESLKWQPAEPRAACDLIKNSPFRSTHILGGITWCARCGARYFASGNYSGRGENRKYWPYYTCYSVAKSSKKMIKDPNCKNKRWAVGKLDAIILAEISRLEFDPAALAKAAGPVDVSGVEEKRRVLEARVAEVRPQMERLLDLCQTGGLPVASVSGRLAALQKELDALKGELSGLAVPETVDRLAVAQEMLAGASAVIENGTPEQKRALVHSLIGRIDIDGEDITIHWLFAPGN

SEQ ID NO: 6154 - protein, 494 aa, Unknown
  Description of Unknown: Integrase B6155 sequence
  cd03768,PTHR30461:SF3,SM00857,G3DSA:1.10.10.2600,IPR036162, PF13408,IPR025827,G3DSA:3.40.50.1390,PS51737,IPR006119, IPR038109,PF07508,IPR011109,SSF53041,PTHR30461, PS51736,Coil,PF00239
MLRIAIYTRKSVFKENSESIDTQIELSKKYFQGSHHFEVFIDEGFSGGNTNRPAFKKMMNMIKLRKFDIVATYKIDRISRNIVDFVGIYEDLKNNNVKLVSITEGFDTTTVMGEMMMFILSAFANMERENIKERVKDNMIALAKKGCFTGGFVPFGCEIEKKEGKSYLTITDEKTIQLIFNKYLELKSLYALKKYLLDNKINSLSTRSSLGRLLRNPIYCKSNSKVSNYFESKGYEVVGSPNKKGYMTYGKTSNYPTLIVGKHKACIEADIFLKVNILLDENKEVATKKESKTYWLTEVLYCPYCNSKYVLVNSGRNAYYVCQNRLNRGSNELGIDKEKEKCINSRYLNANLIEEKISYLIRELEDDNYYNYFKKDNVDTNKEEIEVLENVLSKNKAAIGNLVEKLMILSNEASIPVTRKIEELTTKNLELENKIYELKTIELAEIKSKEENEIKSAIKRFKDLKSNKEKRENVRIIFKKLKYDPYKDSINIEF

SEQ ID NO: 6155 - protein, 494 aa, Unknown
  Description of Unknown: Integrase B6156 sequence
  IPR036162,PS51737,IPR011109,PTHR30461,PS00397, PF00239,G3DSA:1.10.10.2600,IPR006119,SSF53041,cd00338, SM00857,IPR025827,IPR038109,PS51736,IPR006118, PF13408,G3DSA:3.40.50.1390,PF07508,Coil
MKQLKEVCAYIRVSTGKQEELSPDSQLRLIKEYAQAHDMLLTHVYMEEHGISGKSSEKRPAFQEMIAACKDKSHPYDAVLLWKFSRFARNQDEATYYKSILRKKCNVDVISISEPIIEGMYGRLIEMVIEWSDEFYLVNLSGEVMRGMTQNALNGGYNSNPPIGYTKKRGEIPQIDPERAELVRRIFRMFTQQHMSRNDIASTLNRQGITTNRGGRWETRTVTYILENPFYIGKIRWNFYDRNQNRRKDTGDVILSDGQHEPIISADTFAAAGRLLAKARTTSSFGRKRSVVATKHWLSSMVLCSSCGASLGYNKGGQKKHAAPFFQCWKHIKGMCDHNSYISAAALEQMVMDAIIHFGQSFDLMYHFSDAPQADDAVYLTGELSKLSEKERRIKDAYISGIDSLEEYRENKALLQKKRDELEQQLADTHKVTPIKERYQQIDMNHLLTVLQDPDQDYIVKGNSLRKVFDHFVYDKEAGTLDCFLNTSIEKISK

SEQ ID NO: 6156 - protein, 494 aa, Unknown
  Description of Unknown: Integrase B6157 sequence
  PTHR30461:SF3,IPR036162,PS51737,IPR011109,PTHR30461, PS00397,PF00239,G3DSA:1.10.10.2600,IPR006119,SSF53041, SM00857,IPR025827,IPR038109,PS51736,cd03768, IPR006118,PF13408,G3DSA:3.40.50.1390,PF07508,Coil
MRVVGYARVSTREQADHGYSIGEQNSRLRAYCQAKDWTLLRVIEDPGFSGAKMQRPGLQQVLEMVRRRECDAVLVWKLDRLSRSQKDTLYLLEDVFLANGCGFVSMLENFDTSTAFGRAMVGILSVFAQLEREQFKERSAIGRVGRAKAGLFHGGGYAPIGYDYYTKEDGGQGLVVNEYEAMQVREVYRLYLAGWAVHKIQVYMHERYTTKNGCWASDTTVRSVLSSPIYLGRITWAGKTYEGQHEALVSQNDFDQVAARRESLKWQPAEPRAACDLIKNSPFRSTHILGGITWCARCGARYFASGNYSGRGENRKYWPYYTCYSVAKSSKKMIKDPNCKNKRWAVGKLDAIILAEISRLEFDPAALAKAAGPVDVSGVEEKRRVLEARVAEVRPQMERLLDLCQTGGLPVASVSGRLAALQKELDALNGELSGLAVPETVDRLAVAQEMLAGASAVIENGTPEQKRALVHSLIGRIDIDGEDITIHWLFAPGN

SEQ ID NO: 6157 - protein, 494 aa, Unknown
  Description of Unknown: Integrase B6158 sequence
  cd03768,PTHR30461:SF3,SM00857,G3DSA:1.10.10.2600,IPR036162, PF13408,IPR025827,PS51737,G3DSA:3.40.50.1390,IPR006119, IPR038109,PF07508,IPR011109,SSF53041,PTHR30461, PS51736,Coil,PF00239
MVAIYARQSIDKKDSISIESQIAFAKREIFSEECKIYADSGYSGKNTNRPAFTEMMHDIQTGQIEKVVVYRLDRISRSIVDFADFIDVLENNGISFVSATEKFDTSTPMGRAMLYIIVVFAQLERETIAERVRDNYYARVKKGAWGGGPAAYGFDLVRTTLDGKKATIYESNADLEIVSQIFDTYAQPYTSLADVQKVLIRSGALSAGGVNFDSVKLSGILKNPAYVQADIAIYNYYKSKGAIMANEPEDFDGTHGCILVGKRDASERKYKDVSNHLLAIGHHNGIVDSSTFLYCQEKLSKNRQIKNTGKGKHSWLTGLVKCGHCGYAFSVRFGQTKEGPIPYFVCSGKYLHKCCDVKQTHRVREIEAQVQARLIQEAEAYHLAREKRENNVIKQHQQKIADIDSKIENLISTLENVSQISAEYINRRIETLHRKKQLLIHQYSEALTEFNAVEIIPFTAEDWENMSFEDRRDIAKSMIDRVVLSEDGVDVRFK

SEQ ID NO: 6158 - protein, 494 aa, Unknown
  Description of Unknown: Integrase B6159 sequence
  cd03768,PTHR30461:SF3,SM00857,G3DSA:1.10.10.2600,IPR036162, PF13408,IPR025827,G3DSA:3.40.50.1390,PS51737,IPR006119, IPR038109,PF07508,IPR011109,SSF53041,PTHR30461, PS51736,Coil,PF00239
MLRIAIYTRKSVFKENSESIDTQIELSKKYFQGSHHFEVFIDEGFSGGNTNRPAFKKMMNMIKLRKFDIVATYKIDRISRNIVDFVGIYEDLKNNNVKLVSITEGFDTTTVMGEMMMFILSAFANMERENIKERVKDNMIALAKKGCFTGGFVPFGCEIEKKEGKSYLTITDEKTIQLIFNKYLELKSLYALKKYLLDNKINSLSTRSSLGRLLRNPIYCKSNSKVSNYFESKGYEVVGSPNKKGYMTYGKTSNYPTLIVGKHKACIEADIFLKVNILLDENKEVATKKESKTYWLTEVLYCPYCNSKYVLVNSGRNAYYVCQNRLNRGSNELGIDKEKEKCINSRYLNANLIEEKISYLIRELEDDNYYNYFKKDNVDTNKEEIEVLENVLSKNKAAIGNLVEKLMILSNEASIPVTRKIEELTTKNLELENKIYEFKTIELAEIKSKEENEIKSAIKRFKDLKSNKEKRENVRIIFKKLKYDPYKDSINIEF

SEQ ID NO: 6159 - protein, 494 aa, Unknown
  Description of Unknown: Integrase B6160 sequence
  cd00338,SM00857,G3DSA:1.10.10.2600,IPR036162,PF13408, PS51737,G3DSA:3.40.50.1390,IPR025827,IPR006119,IPR038109, PF07508,IPR011109,SSF53041,PTHR30461,PS51736, Coil,PF00239
MAKGNRAAIYARFSSHNQRDESIEIQVDKSREFCDESSLAVVRVYSDYAKTGKNTNRAEFQAMLKDAQKGLFDYVVIYKVTRIMRNRDEMALARIMLRKAGVEILYAGESLGEGSTKVLHLGMLEVLAEYESAVDSERIRDGIQKNAQRGMASGQRLYGWDVVNDRFVVNEREAAVMHKMKNMLFSGSTIADIQRAIRTERTRRGKAFSQSTIKRLLSREQNCGVYKYAGVRTTNGMPALWSRQEQDEIASILNGRGHKHRVVDGEQPYALSGKMYCRECGRWFVGTSGTGKSGKTYYYYRCPKCRRTFRRDIIEDAVSDTILESIHDPKVRERIIATLEMMIAETAEDDAPKESERITAEIKRIDAAFERIWHAIEDGIAPPGGKDRVEELKARQAALKEELEKALEAESAEDLSLDDYLAWLDTLGAESDPFEIIDTFIQFIQIDGDEVQLFFSFDNWDDDFMPTKKDEPLMNKGSSNFHVVETRGIEPLTS

SEQ ID NO: 6160 - protein, 494 aa, Unknown
  Description of Unknown: Integrase B6161 sequence
  PTHR30461:SF3,IPR036162,PS51737,IPR011109,PTHR30461, PS00397,PF00239,G3DSA:1.10.10.2600,IPR006119,SSF53041, SM00857,IPR025827,IPR038109,PS51736,cd03768, IPR006118,PF13408,G3DSA:3.40.50.1390,PF07508,Coil
MRVVGYARVSTREQADHGYSIGEQNSRLRAYCQAKDWTLLRVIEDPGFSGAKMQRPGLQQVLEMVRRHECDAVLVWKLDRLSRSQKDTLYLLEDVFLANGCGFVSMLENFDTSTAFGRAMVGILSVFAQLEREQFKERSAIGRVGRAKAGLFHGGGYAPIGYDYYTKEDGGQGLVVNEYEAMQVREVYRLYLAGWAVHKIQVYMHERYTTKNGCWASDTTVRSVLSSPIYLGRITWAGKTYEGQHEALISQNDFDQVAARRESLKWQPAEPRAACDLIKNSPFRSTHILGGITWCARCGARYFASGNYSGRGENRKYWPYYTCYSVAKSSKKMIKDPNCKNKRWAVGKLDAIILAEISRLEFDPAALAKAAGPVDVSDVEEKRRVLEARVAEVRPQMERLLDLCQTGGLPVASVSGRLAALQKELDALNGELSGLAVPETVDRLAVAQEMLAGASAVIENGTPEQKRALVHSLIGRIDIDGEDITIHWLFAPEN

SEQ ID NO: 6161 - protein, 494 aa, Unknown
  Description of Unknown: Integrase B6162 sequence
  PTHR30461:SF3,IPR036162,PS51737,IPR011109,PTHR30461, PS00397,PF00239,G3DSA:1.10.10.2600,IPR006119,SSF53041, SM00857,IPR025827,IPR038109,PS51736,cd03768, IPR006118,PF13408,G3DSA:3.40.50.1390,PF07508,Coil
MRVVGYARVSTREQADHGYSIGEQSSRLRAYCQAKDWTLLRVIEDPGFSGAKMQRPGLQQVLEMVRRRECDAVLVWKLDRLSRSQKDTLYLLEDVFLANGCGFVSMLENFDTSTAFGRAMVGILSVFAQLEREQFKERSAIGRVGRAKAGLFHGGGYAPIGYDYYTKEDGGQGLVVNEYEAMQVREVYRLYLAGWAVHKIQVYMHERYTTKNGCWASDTTVRSVLSSPIYLGRITWAGKTYEGQHEALISQNDFDQVAARRESLKWQPAEPRAACDLIKNSPFRSTHILGGITWCARCGARYFASGNYSGRGENRKYWPYYTCYSVAKSSKKMIKDPNCKNKRWAVGKLDAIILAEISRLEFDPAALAKAAGPVDVSDVEEKRRVLEARVAEVRPQMERLLDLCQTGGLPVASVSGRLAALQKELDALNGELSGLAVPETVDRLAVAQEMLAGASAVIKNGTPEQKRALVHSLIGRIDIDGEDITIHWLFAPEN

SEQ ID NO: 6162 - protein, 494 aa, Unknown
  Description of Unknown: Integrase B6163 sequence
  PTHR30461:SF3,IPR036162,PS51737,IPR011109,PTHR30461, PS00397,PF00239,G3DSA:1.10.10.2600,IPR006119,SSF53041, cd00338,SM00857,IPR025827,IPR038109,PS51736, IPR006118,PF13408,G3DSA:3.40.50.1390,PF07508,Coil
METKYGYGYVRVSTDKQEELSPDSQAKLLKDFAHKNGIIISKIFYELGVSGRKAEKRPEFQKMIAMAKSSDHPVDAILVWKFSRFARNQEESIVYKSLLKKKHNVDVISVSEPLVDGPFGSLIERIIEWMDEYYSVRLSGEVTRGMTEKAKRGGYQARPPLGYRITERGKPPVIIEDEAEIVRIIFRKYAEEGMGIFDIARYLNLCGFKTSHGKNFERRSVEYILENPTYCGMIRWNRTVNETNEIRPKDEWIIVDGQQPSIISKELFDKASARRNMEYKPRGSRPSSTYKHWLSGLVKCPACGRTMIAKKTVSGKRTYCYFTCYGYSKGKCLAKNSISSLKLAPAVLQSLKDVLDSQQLSFRYIKPQDETTVDLSAVLLEQLKQIDGKLERIKEAYRNGVDTLEEYKENKLMVQKEQQLLEKQLAELPEEKSDQDLAESHMLERVRNVYEIVSSESVDDVTKNEILKSIIEKIVYNKEEDTLEVYYYYKPQTQ

SEQ ID NO: 6163 - protein, 494 aa, Unknown
  Description of Unknown: Integrase B6164 sequence
  PTHR30461:SF3,IPR036162,PS51737,IPR011109,PTHR30461, PS00397,PF00239,G3DSA:1.10.10.2600,IPR006119,SSF53041, cd00338,SM00857,IPR025827,IPR038109,PS51736, IPR006118,PF13408,G3DSA:3.40.50.1390,PF07508,Coil
MNEVRYAFAYIRVSTHDQEEISPDSQENLLREYATRNNIVILKIFSDLGISGRKAQKRPGFQEMVGLAKGSDHPVDLILVWKFSRFARNQEESIVYKSLLKKQHNVEVVSISEPLSDNPFGSLIERIIEWMDEYYSIRLSGEVFRGMKENATRGAYQARPPLGYKVVEHGKPPMIVPEEAEIIRMIFNWYANEGIGFFDIARRLNNLGLKTSQGKPFERRSIEYIIQNPSYCGMIRWNRTENSTNRIKDKDEWIVTEGQQPAIITKELFDAAQKRFETTYRPSGKRPSSTYKHWLSGLLKCPACGRTLTAATMKRANGEKYSYFSCYGYHKGKCEKPHGISSLVLEKEVLACVKESLSSGNISYTLKERQPIEVSNEKNILTSRLESLSGKEERIKASYREGIDTLEEYKANKALLQKERIHLEEQLKELEDNAPKDTPDPAANMLLRVQGVYDILVSDSFTTAQKNEALKQIVDKIVYDREQDSLKIYYFLYQ

SEQ ID NO: 6164 - protein, 494 aa, Unknown
  Description of Unknown: Integrase B6165 sequence
  IPR036162,PS51737,IPR011109,PTHR30461,PS00397, PF00239,G3DSA:1.10.10.2600,IPR006119,SSF53041,cd00338, SM00857,IPR025827,IPR038109,PS51736,IPR006118, PF13408,G3DSA:3.40.50.1390,PF07508,Coil
MKQLKEVCAYIRVSTGKQEELSPDSQLRLIKEYAQAHDMLLTHVYMEEHGISGKSSEKRPAFQEMIAACKDKSHPYDAVLLWKFSRFARNQDEATYYKSILRKKCNVDVISISEPIIEGMYGRLIEMVIEWSDEFYLVNLSGEVMRGMTQNALNGGYNSNPPIGYTKKRGEIPQVDPERAELVRRIFRMFTEQHMSRNDIASTLNRQGITTNRGGRWETRTVTYILENPFYIGKIRWNFYDRSQNRRKDTGDVILSDGQHEPIISADTFAAAGRLLAKARITSSFGRKRSVVATKHWLSSMVLCSSCGASLGYNKGSQKKHAAPFFQCWKHIKGMCDHNSYISAAALEQMVMDAIIHFGQSFDLMYHFSDAPQADDTVYLTRELSKLSEKERRIKDAYISGIDSLEEYRENKSLLQKKRDELEQQLADTHKVTPIKERYQQIDMNHLLTVLQDPDLDYIVKGNSLRKVFDHFVYDKEAGTLDCFLNTSIEKISK

SEQ ID NO: 6165 - protein, 494 aa, Unknown
  Description of Unknown: Integrase B6166 sequence
  IPR036162,PS51737,IPR011109,PTHR30461,PS00397, PF00239,G3DSA:1.10.10.2600,IPR006119,SSF53041,cd00338, SM00857,IPR025827,IPR038109,PS51736,IPR006118, PF13408,G3DSA:3.40.50.1390,PF07508,Coil
MKQLKEVCAYIRVSTGKQEELSPDSQLRLIKEYAQAHDMLLTHVYMEEHGISGKSSEKRPAFQEMIAACKDKSHPYDAVLLWKFSRFARNQDEATYYKSILRKKCNVDVISISEPIIEGMYGRLIEMVIEWSDEFYLVNLSGEVMRGMTQNALNGGYNSNPPIGYTKKRGEIPQVDPERAELVRRIFRMFTQQHMSRNDIASTLNRQGITTNRGGRWETRTVTYILENPFYIGKIRWNFYDRNQNRRKDTGDVILSDGQHEPIISADTFAAAGRLLAKARTTSSFGQKRSVVATKHWLSSMVLCSSCGASLGYNKGGQKKHAAPFFQCWKHIKGMCDHNSYISAAALEQMVMDAIIHFGQSFDLMYHFSDAPQADDAVYLTGELSKLSEKERRIKDAYISGIDSLEEYRENKALLQKKRDELEQQLADTHKVTPIKERYQQIDMNHLLTVLQDPDQDYIVKGNSLRKVFDHFVYDKEAGTLDCFLNTSIEKISK

SEQ ID NO: 6166 - protein, 494 aa, Unknown
  Description of Unknown: Integrase B6167 sequence
  PTHR30461:SF3,IPR036162,PS51737,IPR011109,PTHR30461, PS00397,PF00239,G3DSA:1.10.10.2600,IPR006119,SSF53041, SM00857,IPR025827,IPR038109,PS51736,cd03768, IPR006118,PF13408,G3DSA:3.40.50.1390,PF07508,Coil
MRVVGYARVSTREQADHGYSIGEQNSRLRAYCQAKDWTLLRVIEDPGFSGAKMQRPGLQQVLEMVRRRECDAVLVWKLDRLSRSQKDTLYLLEDVFLANGCGFVSMLENFDTSTAFGRAMVGILSVFAQLEREQFKERSAIGRVGRAKAGLFHGGGYAPIGYDYYTKEDGGQGLVVNEYEAMQVREVYRLYLAGWAVHKIQVYMHERYTTKNGCWASDTTVRSVLSSPIYLGRITWAGKTYEGQHKALVSQNDFDQVAARRESLKWQPAEPRAACDLIKNSPFRSTHILGGITWCARCGARYFASGNYSGRGENRKYWPYYTCYSVAKSSKKMIKDPNCKNKRWAVGKLDAIILAEISRLEFDPAALAKAAGPVDVSGVEEKRRVLEARVAEVRPQMERLLDLCQTGGLPVASVSGRLAALQKELDALNGELSGLAVPETVDRLAVAQEMLAGASAVIENGTPEQKRALVHSLIGRIDIDGEDITIHWLFAPEN

SEQ ID NO: 6167 - protein, 494 aa, Unknown
  Description of Unknown: Integrase B6168 sequence
  PTHR30461:SF3,IPR036162,PS51737,IPR011109,PTHR30461, PS00397,PF00239,G3DSA:1.10.10.2600,IPR006119,SSF53041, SM00857,IPR025827,IPR038109,PS51736,cd03768, IPR006118,PF13408,G3DSA:3.40.50.1390,PF07508,Coil
MRVVGYARVSTREQADHGYSIGEQNSRLRAYCQAKDWTLLRVIEDPGFSGAKMQRPGLQQVLEMVRRRECDAVLVWKLDRLSRSQKDTLYLLEDVFLANGCGFVSMLENFDTSTAFGRAMVGILSVFAQLEREQFKERSAIGRVGRAKAGLFHGGGYAPIGYDYYTKEDGGQGLVVNEYEAMQVREVYRLYLAGWAVHKIQVYMHERYTTKNGCWASDTTVRSVLSSPIYLGRITWAGKTYEGQHEALVSQNDFDQVAARRESLKWQPAEPRAACDLIKNSPFRSTHILGGITWCARCGARYFASGNYSGRGENRKYWPYYTCYSVAKSSKKMIKDPNCKNKRWAVGKLDAIILAEISRLEFDPAALAKAAGPVDVSGVEEKRRVLEARVAEVRPQMERLLDLCQTGGLPVASVSGRLAALQKELDALNGELSGLAVPETVDRLAVAQEMLAGASAVIENGTPEQKRALVHSLIGRIDIDGEDITIHWLFAPEN

SEQ ID NO: 6168 - protein, 494 aa, Unknown
  Description of Unknown: Integrase B6169 sequence
  PTHR30461:SF3,cd00338,SM00857,G3DSA:1.10.10.2600,IPR036162, PF13408,PS51737,G3DSA:3.40.50.1390,IPR025827,IPR006119, IPR038109,PF07508,SSF53041,IPR011109,PTHR30461, PS51736,Coil,PF00239
MKAVIYARYSSNNQTEQSIEGQLRVCNNYAQSHGITVVGTYIDRALSGRTDRRPEFQRMIVDAERASWDIVLVYKFDRFARSMYDDSRYKKHLQDYGKQVVSASEHIPTGAEGKLAEGMLVVFNQYYSEELAIKTRRGMKESAYKCQVTGNPPFGYYNGKDKKYHINDLEAAAVREIYTRYAAGDKVQDIINWLTDHGYKTRLGKQFNKNTISNMIRNPRYKGTYIYDDIIIEGGMPAIIEVKTWETAQRRLEMAKSGTSRRKDVYMLTGKAYCGECHEAMNGESGVGRNGTLYRYYKCSGRKKGTGCTAETVQKDVLEQTVINHTRSLFGNDKTAHKIAAEVARQLQDLRDNNTAAKAAAKALEDTNKGINNILAAIEQGIFTAATKDRLEELESKKVQLEETLEIESAKAPDLSAEDIQQIINNIVKKSKNDQALIDTFIYRVFVYDAHCVIVYLMPDFPPELVSYDDIQSILAGSGSPAGKDGEPITETDR

SEQ ID NO: 6169 - protein, 494 aa, Unknown
  Description of Unknown: Integrase B6170 sequence
  cd03768,PTHR30461:SF3,SM00857,G3DSA:1.10.10.2600,IPR036162, PF13408,PS51737,IPR025827,G3DSA:3.40.50.1390,IPR006119, IPR038109,PF07508,IPR011109,SSF53041,PTHR30461, PS51736,Coil,PF00239
MVAIYARQSIDKKDSISIESQIAFAKREIFSEECKIYEDSGYSGKNTNRPAFTEMMHDIQTGQIEKVVVYRLDRISRSIVDFADFIDILENNGISFVSATEKFDTSTPMGRAMLYIIVVFAQLERETIAERVRDNYYARVKKGAWGGGPAAYGYNLVRTTLDGKKATIYEPNADLEIVSQIFDTYAQPYTSLADVQKVLIRSGALSAGGVNFDSVKLSGILKNPAYVQADIAIYNYYKSKGAIMANEPEDFDGTHGCILVGKRDASERKYKDVSNHLLAIGHHNGIVDSNTFLYCQEKLSKNRQIKNTGKGKHSWLTGLVKCGHCGYAFSVRFGQTKEGPIPYFVCSGKYLHKCCDVKQTHRVREIEAQVQARLIQEAEAYHLAREKRENNVIKQHQQKIADIDSKIENLISTLENVSQISAEYINRRIETLHREKQLLIHQYSEALTEFNAVEIIPFTAEDWENMSFEDRRDIAKSMIDRVVLSEDGVDVRFK

SEQ ID NO: 6170 - protein, 494 aa, Unknown
  Description of Unknown: Integrase B6171 sequence
  PTHR30461:SF3,IPR036162,PS51737,IPR011109,PTHR30461, PS00397,PF00239,G3DSA:1.10.10.2600,IPR006119,SSF53041, SM00857,IPR025827,IPR038109,PS51736,cd03768, IPR006118,PF13408,G3DSA:3.40.50.1390,PF07508,Coil
MRVVGYARVSTREQADHGYSIGEQNSRLRAYCQAKDWTLLRVIEDPGFSGAKMQRPGLQQVLEMVRRRECDAVLVWKLDRLSRSQKDTLYLLEDVFLANGCGFVSMLENFDTSTAFGRAMVGILSVFAQLEREQFKERSAIGRVGRAKAGLFHGGGYAPIGYDYYTKEDGGQGLVVNEYEAMQVREVYRLYLAGWAVHKIQVYMHERYTTKNGCWASDTTVRSVLSSPIYLGRITWAGKTYEGQHEALVSQNDFDQVAARRESLKWQPAEPRAACDLIKNSPFRSTHILGGITWCARCGARYFASGNYSGRGENRKYWPYYTCYSVAKSSKKMIKDPNCKNKRWAVGKLDAIILAEISRLEFDPPALAKAAGPVDVSDVEEKRRVLEARVAEVRPQMERLLDLCQTGGLPVASVSGRLAALQKELDALNGELSCLAVPETVDRLAVAQEMLAGASAVIENGTPEQKRALVHSLIGRIDIDGEDITIHWLFAPEN

SEQ ID NO: 6171 - protein, 494 aa, Unknown
  Description of Unknown: Integrase B6172 sequence
  cd03768,PTHR30461:SF3,SM00857,G3DSA:1.10.10.2600,IPR036162, PF13408,IPR025827,G3DSA:3.40.50.1390,PS51737,IPR006119, IPR038109,PF07508,SSF53041,IPR011109,PTHR30461, PS51736,Coil,PF00239
MVAIYARQSIDKKDSISIESQIAFAKREIFSEECKIYEDSGYSGKNTNRPAFTEMMHDIQTGQIEKVVVYRLDRISRSIVDFADFIDVLENNGISFVSATEKFDTSTPMGRAMLYIIVVFAQLERETIAERVRDNYYARVKKGAWGGGPAAYGYNLVRTTLDGKKATIYEPNADLEIVSQIFDTYAQPYTSLADVQKVLIRSGALSAGGVNFDSVKLSGILKNPTYVQADIAIYNYYKSKGAIMANEPEDFDGTHGCILVGKRDASERKYKDVSNHLLAIGHHNGIVDSSTFLYCQEKLSKNRQIKNTGKGKHSWLTGLVKCGHCGYAFSVRFASTKDGRIPYFVCSGKYLHKCCDAKQTHRVREIEAQVQAWLIQEAEAYHLAREKRENNVIKQHQQKIADIDSKIENLISTLENVSQISAEYINRRIETLHREKQLLIHQYSESLTEFNAVEIIPFTAEDWENMSFEDRRDIVKSMIDRVVLSEDGVDVRFK

SEQ ID NO: 6172 - protein, 494 aa, Unknown
  Description of Unknown: Integrase B6173 sequence
  SM00857,G3DSA:1.10.10.2600,IPR036162,PF13408,IPR025827, PS51737,G3DSA:3.40.50.1390,IPR006119,IPR038109,PF07508, SSF53041,IPR011109,PF00239,PTHR30461,PS51736, Coil,cd00338
MTAVIYARYSSDNQREESIEGQIRECTAYAEKNGITVVKHYIDRALSAKTDNRPDFQQMIKDSEKRLFDIVLVWKLDRFARNRYDSAHYEYQLERNHVKLVSATEPISDSPAGIMVKSMLTGMAEYYSAELSEKVVRGMTENVLKGKYNGGTIPIGFKVDEEKFFQVDPLKAPFVVEAFQRYNDGATMKELMNWLNDSGVTTNRNQKLTYNSIQTLLTNHRYIGENRFKDIVMPDSIPAIVDKDLFEEVQQKIKKNSRAPARHKAEDDYLLTTKLFCGMCGAMMFGECGTGRNKVVHHYYKCATAKRFKTCKKKTVRKEWLEDLVVAETMKLIQDDAVIDAIVAEVMELQDQENTTLPLLEKQMREVENGIENMLNAIQAGVLTNSTKSRLEKLEAQQKELEVRITEEKIARPRLSENQVRFWLTRFRKLDPNVKSHRETLINTFVNVVYLYDEKVLITFNYKDGTKTITFDEIAAKDASEGNGSDFGCFAPPR

SEQ ID NO: 6173 - protein, 494 aa, Unknown
  Description of Unknown: Integrase B6174 sequence
  PTHR30461:SF3,IPR036162,PS51737,IPR011109,PTHR30461, PS00397,PF00239,G3DSA:1.10.10.2600,IPR006119,SSF53041, SM00857,IPR025827,IPR038109,PS51736,cd03768, IPR006118,PF13408,G3DSA:3.40.50.1390,PF07508,Coil
MRVVGYARVSTREQADHGYSIGEQNSRLRAYCQAKDWTLLRVIEDPGFSGAKMQRPGLQQVLEMVRRRECDAVLVWKLDRLSRSQKDTLYLLEDVFLANGCGFVSMLENFDTSTAFGRAMVGILSVFAQLEREQFKERSAIGRVGRAKAGLFHGGGYAPIGYDYYTKEDGGQGLVVNEYEAMQVREVYRLYLAGWAVHKIQVYMHERYTTKNGCWASDTTVRSVLSSPIYLGRITWAGKTYEGQHEALISQNDFDQVAARRESLKWQPAEPRAACDLIKNSPFRSTHILGGITWCARCGARYFASGNYSGRGENRKYWPYYTCYSVAKSSKKMIKDPNCKNKRWAVGKLDAIILAEISRLEFDPAALAKAAGPVDVSGVEEKRRVLEARVAEVRPQMERLLDLCQTGGLPVASVSGRLAALQKELDALNGELSGLAVPETVDRLAVAQEMLAGASAVIENGTPEQKRALVHSLIGRIDIDGEDITIHWLFAPEN

SEQ ID NO: 6174 - protein, 494 aa, Unknown
  Description of Unknown: Integrase B6175 sequence
  PTHR30461:SF3,SM00857,G3DSA:1.10.10.2600,IPR036162,PF13408, PS51737,G3DSA:3.40.50.1390,IPR025827,IPR006119,IPR038109, PF07508,IPR011109,SSF53041,PTHR30461,Coil, PS51736,cd00338,PF00239
MKELIPAVIYARFSSSGQREESITGQLRDCKRYAENHGFEIINEYIDEAKTGTSDNRPSFQKMIKDSESKRFNAIIVWKLDRFARNRYDSAIYRARLKKNGVKIYSAMENISDSAEGIIMEGLMESMAEYYSANLSENVKRGNRESALQLKTLGRKIFGYGRSEDDHYIINETEAPVVRRIFNEYTSGKSIQDIIKGLNNDGIMNSRNNPWNKSSLKNIIGNDKYIGTYRFMDYVVPDGMPAIISKDMFSIAQEIKDRHKKSPARSREARYLLTGKLFCGHCGSPMTGEYGVSKTGKKYHYYRCIKANKHKCDKKRAKKDWIENVVVAELLNQLNDLTYIDQLADRFMEYQKKQQSDDSELKVLQDRLHGVNKSLGNMVKAIEMGIITPTTQARMEELEEQKQQLHTAIEQLKFSKPPMIERDEFLFWIDTLKQDTGNYDFKEKLIDIFLNAVYLYDDGYIDIGTNLIKGTKRVDSSTLEQLCLLNHPFQYELE

SEQ ID NO: 6175 - protein, 494 aa, Unknown
  Description of Unknown: Integrase B6176 sequence
  SM00857,G3DSA:1.10.10.2600,IPR036162,PF13408,PS51737, IPR025827,G3DSA:3.40.50.1390,IPR006119,IPR038109,PF07508, IPR011109,SSF53041,PF00239,PTHR30461,PS51736, Coil,cd00338
MTAVIYARYSSDNQREESIEGQIRECTAYAEKNGITVVKHYIDRALSAKTDNRPDFQQMIKDSEKRLFDIVLVWKLDRFARNRYDSAHYEYQLERNHVKLVSATEPISDSPAGIMVKSMLTGMAEYYSAELSEKVVRGMTENVLKGKYNGGTIPIGFKVDEEKFFQIDPLKAPFVVEAFQRYNEGATMKELMNWLNDSGVTTNRNQKFTYNSVQKLLTNKRYIGENHFKDIVMPDSIPAIVDKDLFEEVQQKIKKNSRAPARHKAEDDYLLTTKLFCGMCGAMMFGECGTGRNKVVHHYYKCATAKRFKTCKKKTVRKEWLEDLVIAETMKLIQDDAVIDAIVAEVIELQDQENTTIPLLERQMREVENGIENMLNAIQAGVLTNSTKSRLEKLEAQQKELEIRIAEEKIARPRLSENQVRFWLTRFRKLDPNVKSHRETLINTFVNAVYLYDEKVLITFNYKDGTKTITFDEIAAKGAPEGNGSDLGCFAPPR

SEQ ID NO: 6176 - protein, 494 aa, Unknown
  Description of Unknown: Integrase B6177 sequence
  IPR036162,PS51737,IPR011109,PTHR30461,PS00397, PF00239,G3DSA:1.10.10.2600,IPR006119,SSF53041,cd00338, SM00857,IPR025827,IPR038109,PS51736,IPR006118, PF13408,G3DSA:3.40.50.1390,PF07508,Coil
METKYGYGYVRVSTDKQEELSPDSQAKLLKDFAHKNGIIISKIFYELGVSGRKAEKRPEFQKMIAMAKSSDHPVDAILVWKFSRFARNQEESIVYKSLLKKKHNVDVISVSEPLVDGPFGSLIERIIEWMDEYYSVRLSGEVTRGMTEKAKRGGYQARPPLGYRIAERGKPPVIVEEEAEIIRIIFQKYALEGMGMFDIARYLNLCGFKTSHGKEFERRSVEYILENPTYCGMIRWNRTVNETNEIRPKDEWIIADGQQPAIISKELFDRAAARRNMEYKPRGSRPSSTYRHWLSGLVKCPVCGRTMIAKKIVNGKRTYCYFVCYGYSKGKCLAKNSISSLKLAPAILQSLKDVLNNQQLSFRYIQPEPETAPDLSDILLDQLKRIDEKLDRIKEAYRNGVDTLEEYKENKALVQNEKQLLEKQLAELPAQDSESDQAESALLDRVKNVYEIVNSESVDDVTKNEILKSIIEKIVYNKEKDTLEVYYYYKPQTQ

SEQ ID NO: 6177 - protein, 494 aa, Unknown
  Description of Unknown: Integrase B6178 sequence
  PTHR30461:SF3,IPR036162,PS51737,IPR011109,PTHR30461, PS00397,PF00239,G3DSA:1.10.10.2600,IPR006119,SSF53041, cd00338,SM00857,IPR025827,IPR038109,PS51736, IPR006118,PF13408,G3DSA:3.40.50.1390,PF07508,Coil
MNEVRYAFAYIRVSTHDQEEISPDSQENLLREYATRNNIVILKIFSDLGISGRKAEKRPGFQEMVGLAKGSDHPVDLILVWKFSRFARNQEESIVYKSLLKKQHNVEVVSISEPLSDNPFGSLIERIIEWMDEYYSIRLSGEVFRGMKENATRGAYQARPPLGYKVVEHGKPPVIVPEEAEIVRMIFNWYANEGIGFFDIARRLNNLGLKTSQGKPFERRSIEYIIQNPSYCGMIRWNRTENSTNRIKDKDEWIVTKGQQPAIITKELFEAAQKRFEATYRPSGKRPSSTYKHWLSGLLKCPACGRTLTAATMKRANGEKYSYFSCYGYHKGKCEKPHGISSLVLEKEVLACVKESLSSGNISYTLKERQPIEVSNEKNILTSRLESLAGKEERIKASYREGIDTLEEYKANKALLQKERIHLEEQLKELEDHAPKDTPDPAANMLLRVQGVYDILVSDSFTAAQKNEALKQIVDKIVYDREQDSLKIYYFLYQ

SEQ ID NO: 6178 - protein, 494 aa, Unknown
  Description of Unknown: Integrase B6179 sequence
  SM00857,G3DSA:1.10.10.2600,IPR036162,PS51737,G3DSA:3.40.50.1390, IPR006119,IPR038109,PF07508,SSF53041,IPR011109, PTHR30461,Coil,PS51736,cd00338,PF00239
MPEDIKTAVIYARFSCSKQREASIDDQLRVCRDWCAREGYAIVGEYSDYAMSGRSDDRPQFQKMIANAGESDIVLVYMMDRFSRDEYDAPAYKHELRRKGVEVVSAMEAMPDGPERILIEKIYEGLAAVESVKTSMRTRRGMEGNALKCKTNGVRVYGYGRNDDDEYVVNEDEAAIVREAFRRSCDHEPVDSIASDFARRGVTTRTGRPCGYSMVYQMLHNRKYTGFYSWGGIEVDGGMPQIIDKATFAMAQEVKPKKRRASEDWGAFALSGRAICSECGHNMAGTSGRGKKNVKYEYYGCRCGAKPVRRDWLEHELAEAIRGMLRDRETALRISHMLWDEPEPEIADARRRAMASRRKAENGLQNIMSAIEQGIVMPEFTDRIAQLQAQKARAERDLASYDEARIDPEEFADFLQCGGGMDDAAVLDSFVYQVMVTPEECVATLYCDDERNEPARLSIARVRTFSGWCPVSKDSRTQVLALGRSVFIRFSRAA

SEQ ID NO: 6179 - protein, 494 aa, Unknown
  Description of Unknown: Integrase B6180 sequence
  PTHR30461:SF3,SM00857,G3DSA:1.10.10.2600,IPR036162,PF13408, PS51737,IPR025827,G3DSA:3.40.50.1390,IPR006119,IPR038109, PF07508,IPR011109,SSF53041,PF00239, PTHR30461,PS51736,Coil,cd00338
MKAVIYARFSSHNQREESIEGQVRACQRFAKEHDMTVIEIYADRGLSGLHADNRPEFQRMIADSDRHKFQALIMWNLDRFSRDKYDTAVYKSRLKKNGVTLYYSDQNIPDTPEGIILESLLEGFAQYYSANLSRNAKRGLQENARKCLWNGGGLPLGYAIDETKHFVIDPAGAACVRLIFQMYADNHSIKEIVSTLNEKGYRTVKGNKFRLGSIQGVLRNRKYIGEYHASGITVPNGVPAIVDVELFNAVQEKIGVVSAAKARNKAEIPYLLTTKVFCGHCGSPMIGESGTGKGGSTYRYYKCSCRKNRKGQCDKRTEQKEWLEETVVVQTVEKFLHPDVIEDVSNACAAVLEQDSQSNALLKALNAQLADVEKSSRNLIKAIEAGVFTASMRERMAELEQQKEDITVQIAREQLRKPQLSAEQIAFFLRSFLDGDAHDPKFQERIIESLVRRVDVYDEGPGNRKLTVFYNLKKNNHSSVSVKCSDSESVGLPE

SEQ ID NO: 6180 - protein, 494 aa, Unknown
  Description of Unknown: Integrase B6181 sequence
  SM00857,G3DSA:1.10.10.2600,IPR036162,PS51737,G3DSA:3.40.50.1390, IPR006119,IPR038109,PF07508,IPR011109,SSF53041, PF00239,PTHR30461,PS51736,Coil,cd00338
MPEDIKTAVIYARFSCSKQREASIDDQLRVCRDWCAREGYAIVGEYSDYAMSGRSDDRPQFQKMIANAGESDIVLVYMMDRFSRDEYDAPAYKHELRKKGVEVVSAMEAMPNGPERILIEKIYEGLAAVESVKTSMRTRRGMEGNALKCKTNGVRVYGYGRNEDDEYVVNEDEAAIVREAFRRSCDHEPVDSIASDFARRGVTTRTGRPCGYSMVYQMLHNRKYTGFYSWGGIEVDGGMPQIIDKATFAMAQEVKPKKRRASEDWGTFALSGRAICSECGHNMAGTSGRGKKNVKYEYYGCRCGAKPVRRDWLEHELAEAIRGMLRDRETALRISHMLWDEPEPEIADARRRAMASKRKAENGLQNIMAAIEQGIVMPEFTDRIAQLQAQKARAERDLASYDEARIDPEEFADFLQCGGGMDDAAVLDSFVYQVMVTPEECVATLYCDDERNEPARLSIARVRTFSGWCPVSKDSRTQVLALGRSVFIRFSRAA

SEQ ID NO: 6181 - protein, 494 aa, Unknown
  Description of Unknown: Integrase B6182 sequence
  PTHR30461:SF3,IPR036162,PS51737,IPR011109,PTHR30461, PS00397,PF00239,G3DSA:1.10.10.2600,IPR006119,SSF53041, SM00857,IPR025827,IPR038109,PS51736, cd03768,IPR006118,PF13408,G3DSA:3.40.50.1390,PF07508,Coil
MRVVGYARVSTREQADHGYSIGEQNSRLRAYCQAKDWTLLRVIEDPGFSGAKMQRPGLQQVLEMVRRRECDAVLVWKLDRLSRSQKDTLYLLEDVFLANGCGFVSMLENFDTSTAFGRAMVGILSVFAQLEREQFKERSAIGRVGRAKAGLFHGGGYAPIGYDYYTKEDGGQGLVVNEYEAMQVREVYRLYLAGWAVHKIQVYMHERYTTKNGCWASDTTVRSVLSSQIYLGRITWAGKTYEGQHEALISQNDFDQVAARRESLKWQPAEPRAACDLIKNSPFRSTHILGGITWCARCGARYFASGNYSGRGENRKYWPYYTCYSVAKSSKKMIKDPNCKNKRWAVGKLDAIILAEISRLEFDPAALAKAAGPVDVSGVEEKRRVLEARVAEVRPQMERLLDLCQTGGLPVASVSGRLAALQKELDALNGELSGLAVPETVDRLAVAQEMLAGASAVIENGTPEQKRALVHSLIGRIDIDGEDITIHWLFAPEN

SEQ ID NO: 6182 - protein, 494 aa, Unknown
  Description of Unknown: Integrase B6183 sequence
  PTHR30461:SF3,IPR036162,PS51737,IPR011109,PTHR30461, PS00397,PF00239,G3DSA:1.10.10.2600,IPR006119,SSF53041, cd00338,SM00857,IPR025827,IPR038109,PS51736, IPR006118,PF13408,G3DSA:3.40.50.1390,PF07508,Coil
METKYGYGYVRVSTDKQEELSPDSQAKLLKDFAHKNGIIISKIFYELGVSGRKAEKRPEFQKMIAMAKSSDHPVDAILVWKFSRFARNQEESIVYKSLLKKKHNVDVISVSEPLVDGPFGSLIERIIEWMDEYYSVRLSGEVTRGMTEKAKRGGYQARPPLGYRIAERGKPPVIVEEEAEIIRIIFQKYALEGMGMFDIARYLNLYGFKTSHGKEFERRSVEYILENPTYCGMIRWNRTVNETNEIRPKDEWIIADGQQPAIISKELFDRAAARRNMEYKPRGSRPSSTYKHWLSGLVKCPVCGRTMIAKKIVNGKRTYCYFVCYGYSKGKCLAKNSISSLKLAPAVLQSLKDVLNNHHLSFRYIQPEPETAPDLSDILLDQLKRIDEKLDRIKEAYRNGVDSLEEYKENKVLVQNEKQLLEKQLAELPAQDSDSEQAESALLDRVKNVYEIVNSESVDDVTKNEILKSIIEKIVYNKEKDTLEVYYYYKPQTQ

SEQ ID NO: 6183 - protein, 494 aa, Unknown
  Description of Unknown: Integrase B6184 sequence
  PTHR30461:SF3,IPR036162,PS51737,IPR011109,PTHR30461, PS00397,PF00239,G3DSA:1.10.10.2600,IPR006119,SSF53041, SM00857,IPR025827,IPR038109,PS51736,cd03768, IPR006118,PF13408,G3DSA:3.40.50.1390,PF07508,Coil
MRVVGYARVSTREQADHGYSIGEQNSRLRAYCQAKDWTLLRVIEDPGFSGAKMQRPGLQQVLEMVRRRECDAVLVWKLDRLSRSQKDTLYLLEDVFLANGCGFVSMLENFDTSTAFGRAMVGILSVFAQLEREQFKERSAIGRVGRAKAGLFHGGGYAPIGYDYYTKEDGGQGLVVNEYEAMQVREVYRLYLAGWAVHKIQVYMHERYTTKNGCWASDTTVRSVLSSPIYLGRITWAGKTYEGQHEALVSQNDFDQVAARRESLKWQPAEPRAACDLIKNSPFRSTHILGGITWCARCGARYFASGNYSGRGENRKYWPYYTCYSVAKSSKKMIKDPNCKNKRWAVGKLDAIILAEISRLEFDPAALAKAAGPVDVSDVEEKRRVLEARVAEVRPQMERLLDLCQTGGLPVASVSGRLAALQKELDALNGELSGLAVPETVDRLAVAQEMLAGASAVIENGIPEQKRALVHSLIGRIDIDGEDITIHWLFAPEN

SEQ ID NO: 6184 - protein, 494 aa, Unknown
  Description of Unknown: Integrase B6185 sequence
  PTHR30461:SF3,IPR036162,PS51737,IPR011109,PTHR30461, PS00397,PF00239,G3DSA:1.10.10.2600,IPR006119,SSF53041, cd00338,SM00857,IPR025827,IPR038109,PS51736, IPR006118,PF13408,G3DSA:3.40.50.1390,PF07508,Coil
METKYGYGYVRVSTDKQEELSPDSQAKLLKDFAHKNGIIISKIFYELGVSGRKAEKRPEFQKMIAMAKSSDHPVDAILVWKFSRFARNQEESIVYKSLLKKKHNVDVISVSEPLVDGPFGSLIERIIEWMDEYYSVRLSGEVTRGMTEKAKRGGYQARPPLGYRITERGKPPVIIEDEAEIVRIIFRKYAEEGMGIFDIARYLNLCGFKTSHGKNFERRSVEYILENPTYCGMIRWNRTVNETNEIRPKDEWIIVDGQQPSIISKELFDKASARRNMEYKPRGSRPSSTYKHWLSGLVKCPACGRTMIAKKTVSGKRIYCYFTCYGYSKGKCLAKNSISSLKLAPAVLQSLKDVLDSQQLSFRYIKPQEETTVDLSAVLLEQLKQIDEKLERIKEAYRNGVDTLEEYKENKLMVQKEQKLLEKQLAELPEEKSDQDLAESHMLERVRNVYEIVSSESVDDVTKNEILKSIIEKIVYNKEEDTLEVYYYYKPQTQ

SEQ ID NO: 6185 - protein, 494 aa, Unknown
  Description of Unknown: Integrase B6186 sequence
  PTHR30461:SF3,IPR036162,PS51737,IPR011109,PTHR30461, PS00397,PF00239,G3DSA:1.10.10.2600,IPR006119,SSF53041, SM00857,IPR025827,IPR038109,PS51736,cd03768, IPR006118,PF13408,G3DSA:3.40.50.1390,PF07508,Coil
MRVVGYARVSTREQADHGYSIGEQNSRLRAYCQAKDWTLLRVIEDPGFSGAKMQRPGLQQVLEMVRRRECDAVLVWKLDRLSRSQKDTLYLLEDVFLANGCGFVSMLENFDTSTAFGRAMVGILSVFAQLEREQFKERSAIGRVGRAKAGLFHGGGYAPIGYDYYTKEDGGQGLVVNEYEAMQVREVYRLYLAGWAVHKIQVYMHERYTTKNGCWASDTTVRSVLSSPIYLGRITWAGKTYEGQHEALVSQNDFDQVAARRESLKWQPAEPRAACDLIKNSPFRSTHILGGITWCARCGARYFASGNYSGRGENRKYWPYYTCYSVAKSSKKMIKDPNCKNKRWAVGKLDAIILAEISRLEFDPAALAKAAGPVDVSDVEEKRRVLEARVAEVRPQMERLLDLCQTGGLPVASVSGRLATLQKELDALNGELSGLAVPETVDRLAVAQEMLAGASAVIENGTPEQKRALVHSLIGRIDIDGEDITIHWLFAPEN

SEQ ID NO: 6186 - protein, 494 aa, Unknown
  Description of Unknown: Integrase B6187 sequence
  SM00857,G3DSA:1.10.10.2600,IPR036162,PF13408,IPR025827, G3DSA:3.40.50.1390,PS51737,IPR006119,IPR038109,PF07508, IPR011109,SSF53041,PF00239,PTHR30461,PS51736, Coil,cd00338
MTAVIYARYSSDNQREESIEGQIRECTAYAEKNGITVVKHYIDRALSAKTDNRPDFQQMIKDSEKRLFDIVLVWKLDRFARNRYDSAHYEYQLERNHVKLVSATEPISDSPAGIMVKSMLTGMAEYYSAELSEKVVRGMTENVLKGKYNGGTIPIGFKVDEEKFFQVDPLKAPFVVEAFQRYNDGATMKELMNWLNDSGVTTNRNQKFTYNSVQTLLTNKRYIGENHFKDIVMPDSIPAIVDKDLFEEVQQKIKKNSRAPARHKAEDDYLLTTKLFCGMCGAMMFGECGTGRNKVVHHYYKCSTAKRFKTCKKKTVRKEWLEDLVVAETMKLIQDDAVIDAIVAEVMELQDQENTTLPLLEKQMREVENGIENMLNAIQAGVLTNSTKLRLEKLEAQQKELEVRIAEEKIARPRLSENQVRFWLTRFRKLDPNVKSHRETLINTFVNAVYLYDEKVLITFNYKDGTKTITFDEIAAKDAPEGNGSDLDCFAPPR

SEQ ID NO: 6187 - protein, 494 aa, Unknown
  Description of Unknown: Integrase B6188 sequence
  IPR036162,PS51737,IPR011109,PTHR30461,PS00397, PF00239,G3DSA:1.10.10.2600,IPR006119,SSF53041,cd00338, SM00857,IPR025827,IPR038109,PS51736,IPR006118, PF13408,G3DSA:3.40.50.1390,PF07508,Coil
METKYGYGYVRVSTDKQEELSPDSQAKLLKDFAHKNGIIISKIFYELGVSGRKAEKRPEFQKMIAMAKSSDHPVDAILVWKFSRFARNQEESIVYKSLLKKKHNVDVISVSEPLVDGPFGSLIERIIEWMDEYYSVRLSGEVTRGMTEKAKRGGYQARPPLGYRIAERGKPPVIVEEEAEIIRIIFQKYALEGMGMFDIARYLNLCGFKTSRGKEFERRSVEYILENPTYCGMIRWNRTVNETNEIRPKDEWIIAEGQQPSIISKELFDKAAARHNMEYKPKGSRPSSTYRHWLSGLVKCPVCGRTMIAKKIVNGKRTYCYFVCYGYSKGKCLAKNSISSLKLAPAILQSLKDVLNNQQLSFRYIQPEPETAPDLSDILLDQLKRIDEKLNRIKEAYRNGVDTLEEYKENKALVRNEKQLLEKQLAELPAQDSESDQAESALLDRVKNIYEIVNSESVDDVTKNEILKSIIEKIVYNKEKDTLEVYYYYKPQTQ

SEQ ID NO: 6188 - protein, 494 aa, Unknown
  Description of Unknown: Integrase B6189 sequence
  SM00857,G3DSA:1.10.10.2600,PS51736,IPR036162,PS51737, G3DSA:3.40.50.1390,IPR006119,IPR038109,PF07508,IPR011109, SSF53041,PF00239,PTHR30461,mobidb-lite,Coil, cd00338
MTKGSRAAIYARFSSHNQRDESIEIQVDKSREFCTESGLTVVRIYSDYAKTGRNSDRTEFQQMLKDAQKGLFDYVVIYKVTRIMRNRDEMALARIMLHKAGVEILYAGETLGEGSTRVLHLGMLEVLAEYESAVDSERIRDGIQKNAQRGMASGQRLYGWNVIDDHFVINEREAAVMHKMKNMLLSGSTVADIQRAVKTERSRRGKPFSHGSIKKLLMREQNCGTYNYAGVRIPNGMPAIWSRSEQEEINNVLNGRGHKHRVEDGERVYALSGKMFCCECGRWYVGTSGTGKSGKVYHYYRCPKCRRTFRRDVIEDAVTDTILESIKDPKVRERIITTLEMMIAETAENDEPKDSERIKAEIKRIDASFERIWQAIEDGFAPPGGKERVDELKARQGELKDELATALEAESAEALTIDDYIDWLDTLDANSDPYDIIDTFIRFIQIDGDEVQIYFSFDNWDDDFMPTKKDEPQINKGSSNSTRVETRGIEPLTS

SEQ ID NO: 6189 - protein, 494 aa, Unknown
  Description of Unknown: Integrase B6190 sequence
  PTHR30461:SF3,IPR036162,PS51737,IPR011109,PTHR30461, PS00397,PF00239,G3DSA:1.10.10.2600,IPR006119,SSF53041, SM00857,IPR025827,IPR038109,PS51736,cd03768, IPR006118,PF13408,G3DSA:3.40.50.1390,PF07508,Coil
MRVVGYARVSTREQADHGYSIGEQNSRLRAYCQAKDWTLLRVIEDPGFSGAKMQRPGLQQVLEMVRRRECDAVLVWKLDRLSRSQKDTLYLLEDVFLANGCGFVSMLENFDTSTAFGRAMVGILSVFAQLEREQFKERSAIGRVGRAKAGLFHGGGYAPIGYDYYTKEDGGQGLVVNEYEAMQVREVYRLYLAGWAVHKIQVYMHERYTTKNGCWASDTTVRSVLSSQIYLGRITWAGKTYEGQHEALVSQNDFDQVAARRESLKWQPAEPRAACDLIKNSPFRSTHILGGITWCARCGARYFASGNYSGRGENRKYWPYYTCYSVAKSSKKMIKDPNCKNKRWAVGKLDAIILAEISRLEFDPAALAKAAGPVDVSGVEEKRRVLEARVAEVRPQMERLLDLCQTGGLPVASVSGRLAALQKELDALNGELSGLAVPETVDRLAVAQEMLAGASAVIENGTPEQKRALVHSLIGRIDIDGEDITIHWLFAPEN

SEQ ID NO: 6190 - protein, 494 aa, Unknown
  Description of Unknown: Integrase B6191 sequence
  SM00857,G3DSA:1.10.10.2600,IPR036162,PS51737,G3DSA:3.40.50.1390, IPR006119,IPR038109,PF07508,IPR011109,SSF53041, PTHR30461,Coil,PS51736,cd00338,PF00239
MDAAQYLRKSRMEEGLDTEEVLAKHRKALAEYAKANDIHIIETYYEVVSGESLYARPEMLRLLEDVEEGRYDAVLVMDLDRLSRGRMKDQGIILDAFRDSDTLIITPEHTYNLSDDLDDEMAEFKTFMSRREYKIINKRLRRGLKQTIQDGCYVANAPYGYRKVTVDRKPTLEIYEPEAKFVRMMYDLYLQGYGCVSIARHINSLGAKPHRASEFTRNSVAHILRNPTFAGKIVWDQKTHIRKGSKGNPKHITIYNPRESWTIVDGLHPAIIDQETYDKVQAVMAGRYIPSRRDGTVHSPLAGLVRCTNCGGHMQRMTMKGGAYLLCPRPGCCASAKFELVEHRVLSYLRDTLARLEMERQASAARDTSVLDSTLAAIKKELATASGQKTRLYELLEIGEYDIPTFRERMAAVKEKISHLERRQQEAERAIQEAATADPSALAAKIRAVLDAYDASDAAGRNALLKSVIETAWYTKAKKTKPADFQLRFDLRFL

SEQ ID NO: 6191 - protein, 494 aa, Unknown
  Description of Unknown: Integrase B6192 sequence
  PTHR30461:SF3,SM00857,G3DSA:1.10.10.2600,IPR036162,PF13408, IPR025827,G3DSA:3.40.50.1390,PS51737,IPR006119,IPR038109, PF07508,IPR011109,SSF53041,PTHR30461, Coil,PS51736,cd00338,PF00239
MQVTKITKTICEKPRVCAYARVSTNHDAQEDSLAVQIAYWDKKFKDNPDVEFVGLFTDDGISGKEMRKRKGLMAVLQLVREGKVDKVYTKSISRFARNYIEITEIIREFREIGVPIIFEKENINTLDPASSMILSVMSSLAEEELKSISKNQTWAIRKRFAKGDIELVRITGYNYNGKQLTVNEEEKKVIRRIFDLYLSGCGMVKICNILDAEGYKPMYADHWVKSSIRRILLNEKYTGNCLLQKTVGDLHRRWRNTGEAPQYYVEGTHEAIVTMEEWEEVQRQFRERTEHFRPGAGSTNIYPLSGKIFCGHCGTKYVRKTCAKGTTYECIKWKCRKKDQEGIGVCQSTDIKNDVLEKLLVEAYNECLDARLVHMGLSEEESKLNTLLATEKELRELHIKGYLPDRKYREETEKLLQQIMEEEQIIQQLKTKNTDTTKYKKSDVFTKDMADFLISAVVDEWKITFEFGNGYKVTKTYTNGRAGNVNGKLRKQKT

SEQ ID NO: 6192 - protein, 494 aa, Unknown
  Description of Unknown: Integrase B6193 sequence
  PTHR30461:SF3,IPR036162,PS51737,IPR011109,PTHR30461, PS00397,PF00239,G3DSA:1.10.10.2600,IPR006119,SSF53041, SM00857,IPR025827,IPR038109,PS51736,cd03768, IPR006118,PF13408,G3DSA:3.40.50.1390,PF07508,Coil
MRVVGYARVSTREQADHGYSIGEQNSRLRAYCQAKDWTLLRVIEDPGFSGAKMQRPGLQQVLEMVRRRECDAVLVWKLDRLSRSQKDTLYLLEDVFLANGCGFVSMLENFDTSTAFGRAMVGILSVFAQLEREQFKERSAIGRVGRAKAGLFHGGGYAPIGYDYYTKEDGGQGLVVNEYEAMQVREVYRLYLAGWAVHKIQVYMHERYTTKNGCWASDTTVRSVLSSQIYLGRITWAGKTYEGQHEALISQNDFDQVAARRESLKWQPAEPRAACDLIKNSPFRSTHILGGITWCARCGARYFASGNYSGRGENRKYWPYYTCYSVAKSSKKMIKDPNCKNKRWAVGKLDAIILSEISRLEFDPAALAKAAGPVDVSGVEEKRRVLEARVAEVRPQMERLLDLCQTGGLPVASVSGRLAALQKELDALNGELSGLAVPETVDRLAVAQEMLAGASAVIENGTPEQKRALVHSLIGRIDIDGEDITIHWLFAPEN

SEQ ID NO: 6193 - protein, 494 aa, Unknown
  Description of Unknown: Integrase B6194 sequence
  PTHR30461:SF3,cd00338,SM00857,G3DSA:1.10.10.2600,IPR036162, PF13408,IPR025827,G3DSA:3.40.50.1390,PS51737,IPR006119, IPR038109,PF07508,IPR011109,SSF53041,PTHR30461, PS51736,Coil,PF00239
MKAVIYARYSSNNQTEQSIEGQLRVCNNYAQSHGITVVGTYIDRALSGRTDRRPEFQRMIVDAERASWDIVLVYKFDRFARSMYDDSRYKKHLQDYGKQVVSASEHIPTGAEGKLAEGMLVVFNQYYSEELAIKTRRGMKESAYKCQVTGNPPFGYYNGKDKKYHINDLEAAAVREIYTRYAAGDKVQDIINWLTDHGYKTRLGKQFNKNTISNMIRNPRYKGTYIYDDIIIEGGMPAIIEEKTWETAQRRLEMAKSGTSRRKDVYMLTGKAYCGECHEAMNGESGVGRNGTLYRYYKCSGRKKGTGCTAETVQKDVLEQTVINHTRSLLGSDEATRKIATEVARQLQDLRDNNTAAKAAAKALEDTNKGINNILAAIEQGIFSASTKDRLDELENKKVQLEKTLEKESAKAPDLAAEDIQRIISNIVKASKSDQALIDTFVYRVFVYDDHCVIVYLMPDFPPELVGYNDIQSILAGSGSPAGKDGEPITETDR

SEQ ID NO: 6194 - protein, 494 aa, Unknown
  Description of Unknown: Integrase B6195 sequence
  PTHR30461:SF3,cd00338,SM00857,G3DSA:1.10.10.2600,IPR036162, PF13408,PS51737,IPR025827,G3DSA:3.40.50.1390,IPR006119, IPR038109,PF07508,IPR011109,SSF53041,PTHR30461, PS51736,Coil,PF00239
MQDMIYGALYIRVSTHGKQEELSPDAQKRLLLKYAKENGIIVLEQHIYEEKGISGRKADRRPKFQEMISAAKSNPSPFQVILVWKYSRFARNQEESIVYKSLLRKKCNVDVISVSEPLVDGPFGSLIERIIEWMDEYYSIRLSGEVFRGMSEKAMKGGYQARPPLGYRIEHKGCPPVIVPEEAEVVKYIFNKYVNEHAGLFDIARSVNALGAKTSRGKSFERRSIAYILKNPTYCGMIRWNMTDNTTKEIKNKSEWIIAEGTHPAIISKELFQAAQERFEKEYIPTGRRPSSTCKHWLSGLIKCPACGRTMVLSVTKTRTGHSYPYFVCYGYSKGKCTAKAAVSARKLEPYVLDGIKTATQGELSFTIKEPDPIESSPELQILEEQLGKIDIKEKRIRDAYMNGIDTMEEYKENKGILSQEREMLESKLLFFRKNPVTKEEVMPKLQQRIRNVYDIITNEDFSITQKNDAVKSIVEKIVFNKETDTAEIYYYYL

SEQ ID NO: 6195 - protein, 494 aa, Unknown
  Description of Unknown: Integrase B6196 sequence
  PTHR30461:SF3,IPR036162,PS51737,IPR011109,PTHR30461, PS00397,PF00239,G3DSA:1.10.10.2600,IPR006119,SSF53041, cd00338,SM00857,IPR025827,IPR038109,PS51736, IPR006118,PF13408,G3DSA:3.40.50.1390,PF07508,Coil
MKTKYGYGYVRVSTDKQEELSPDSQSKLLKDFAHKNGIILLNIFFEIGVSGRKAEKRPEFQKMIALAKSKDHPVDSILVWKFSRFARNQEESIVYKSLLKKKHNVDVISVSEPLVDGPFGSLIERIIEWMDEYYSVRLSGEVTRGMKEKAQRGGYQARPPLGYRIVDRGEPPVIVPKEAEIIKIIFDKYANEHCGIFDIARYLNLCGFKTSHGKPFERRSVEYILQNPTYCGMIRWNRTVNETNEIRPKDEWIITKGLHPAIISEELFNKAMSRYEKEYISKGSRPSSTYKHWLSGLVKCPSCGRTMIAKTIKGSARTYVYFTCYGYSKGKCLLNNSVSSLKLEPAVLQSVKDVLDSHRIVYRYVKPKAEESTDLSAILKEQLKKSDEKLDRIKEAYRNGVDTLAEYKASKLIIAAEIEQIKKQLEEVEKTIDVPSNDDSIMLDRVRNVYEIISSDVINNTTKNEILKSVIEKIVYDRDSDELKVYYYYTPEPL

SEQ ID NO: 6196 - protein, 494 aa, Unknown
  Description of Unknown: Integrase B6197 sequence
  IPR036162,PS51737,IPR011109,PTHR30461,PS00397, PF00239,G3DSA:1.10.10.2600,IPR006119,SSF53041,cd00338, SM00857,IPR025827,IPR038109,PS51736,IPR006118, PF13408,G3DSA:3.40.50.1390,PF07508,Coil
MKQLKEVCAYIRVSTGKQEELSPDSQLRLIKEYAQAHDMLLTHVYMEEHGISGKSSEKRPAFQEMIAACKDKSHPYDAVLLWKFSRFARNQDEATYYKSILRKKCNVDVISISEPIIEGMYGRLIEMVIEWSDEFYLVNLSGEVMRGMTQNALNGGYNSNPPIGYTKKRGEIPQVDPERAELVRRIFRMFTQQHMSRNDIASTLNRQGITTNRGGRWETRTVTYILENPFYIGKIRWNFYDRNQNRRKDTGDVILSDGQHEPIISADTFAAAGRLLAKARTTSSFGRKRSVVATKHWLSSMVLCSSCGASLGYNKGGQKKHAAPFFQCWKHIKGMCDHNSYISAAALEQMVMEAIIHFGQSFDLMYHFSDTPQADDTIYLTGELSKLSEKERRIKDAYISGIDSLEEYRENKALLQKKRDELEQQLADTHKVTPIKERYQQIDMNHLLTVLQDPDQDYIVKGNSLRKVFDHFVYDKEAGTLDCFLNTSIEKISK

SEQ ID NO: 6197 - protein, 494 aa, Unknown
  Description of Unknown: Integrase B6198 sequence
  IPR036162,PS51737,IPR011109,PTHR30461,PS00397, PF00239,G3DSA:1.10.10.2600,IPR006119,SSF53041,cd00338, SM00857,IPR025827,IPR038109,PS51736,IPR006118, PF13408,G3DSA:3.40.50.1390,PF07508,Coil
MKQLKEVCAYIRVSTGKQEELSPDSQLRLIKEYAQAHDMLLTHVYMEEHGISGKSSEKRPAFQEMIAACKDKSHPYDAVLLWKFSRFARNQDEATYYKSILRKKCNVDVISISEPIIEGMYGRLIEMVIEWSDEFYLVNLSGEVMRGMTQNALNGGYNSNPPIGYTKKRGEIPQVDPERAELVRRIFRMFTEQHMSRNDIASTLNRQGITTNRGGRWETRTVTYILENPFYIGKIRWNFYDRSQNRRKDTGDVILSDGQHEPIISADTFAAAGRLLAKARTTSCFGRKRSVVATKHWLSSMVLCSSCGASLGYNKGGQKKHAAPFFQCWKHIKGMCDHNSYISAAALEQMVMDAIIHFGQSFDLMYHFSDAPQADDTVYLTRELSKLSEKERRIKDAYISGIDSLEEYRENKSLLQKKRDELEQQLADNHKVTPIKERYQQIDMNHLLTVLQDPDQDYIVKGNSLRKVFDHFVYNKEAGTLDCFLNTSIEKISK

SEQ ID NO: 6198 - protein, 494 aa, Unknown
  Description of Unknown: Integrase B6199 sequence
  SM00857,G3DSA:1.10.10.2600,IPR036162,PF13408,PS51737, G3DSA:3.40.50.1390,IPR025827,IPR006119,IPR038109,PF07508, SSF53041,IPR011109,PF00239,PTHR30461,PS51736, Coil,cd00338
MTAVIYARYSSDNQREESIEGQIRECTAYAEKNGITVVKHYIDRALSAKTDNRPDFQQMIKDSEKRLFDIVLVWKLDRFARNRYDSAHYEYQLERNHVKLVSATEPISDSPAGIMVKSMLTGMAEYYSAELSEKVVRGMTENVLKGKYNGGTIPIGFKVDEEKFFQVDPLKAPFVVEAFQRYNDGATMKELMNWLNDSGVTTNRNQKFTYNSVQTLLTNKRYIGENHFKDIVMPDSIPAIVDKDLFEEVQQKIKKNSRAPARHKAEDDYLLTTKLFCGMCGAMMFGECGTGRNKVVHHYYKCATAKRFKTCKKKTVRKEWLEDLVIAETMKLIQDDAVIDAIVAEVMELQEQENTTLPLLEKQMREVENGIENMLNAIQAGVLTNSTKSRLEKLEAQQKELEVRIAEEKIARPRLSENQVRFWLTRFRKLDPNVKSHRETLINTFVNAVYLYDEKVLIAFNYKDGTKTISFNEIAAKDASEGNGSDLGCFAPPR

SEQ ID NO: 6199 - protein, 494 aa, Unknown
  Description of Unknown: Integrase B6200 sequence
  PTHR30461:SF3,IPR036162,PS51737,IPR011109,PTHR30461, PS00397,PF00239,G3DSA:1.10.10.2600,IPR006119,SSF53041, cd00338,SM00857,IPR025827,IPR038109,PS51736, IPR006118,PF13408,G3DSA:3.40.50.1390,PF07508,Coil
MNEVRYAFAYIRVSTHDQEEISPDSQENLLREYATRNNIVILKIFSDLGISGRKAEKRPGFQEMVGLAKGSDHPVDLILVWKFSRFARNQEESIVYKSLLKKQHNVEVVSISEPLSDNPFGSLIERIIEWMDEYYSIRLSGEVFRGMKENATRGAYQARPPLGYKVVEHGKPPMIVPEEAEIIRMIFSWYANEGIGFFDIARRLNNLGLKTSQGKTFERRSIEYIIQNPSYCGMIRWNRTENSTNRIKDKDEWIVTEGQQPAIITKELFDAAQKRFETTYRPSGKRPSSTYKHWLSGLLKCPACGRTLTAATMKRANGEKYSYFSCYGYHKGKCEKPHGISSLVLEKEVLACVKESLSSGNISYTLKERQPIEVSNEKNILTSRLESLAGKEERIKASYREGIDTLEEYKANKALLQKERIHLEEQLKELEDHAPKDTPDPAANMLLRVQGVYDILVSDSFTAAQKNEALKQIVDKIVYNREQDSLKIYYFLYR

SEQ ID NO: 6200 - protein, 494 aa, Unknown
  Description of Unknown: Integrase B6201 sequence
  IPR036162,PS51737,IPR011109,PTHR30461,PS00397, PF00239,G3DSA:1.10.10.2600,IPR006119,SSF53041,cd00338, SM00857,IPR025827,IPR038109,PS51736,IPR006118, PF13408,G3DSA:3.40.50.1390,PF07508,Coil
METKYGYGYVRVSTDKQEELSPDSQAKLLKDFAHKNGIIISKIFYELGVSGRKAEKRPEFQKMIAMAKSSDHPVDAILVWKFSRFARNQEESIVYKSLLKKKHNVDVISVSEPLVDGPFGSLIERIIEWMDEYYSVRLSGEVTRGMTEKAKRGGYQARPPLGYRIAERGKPPVIVEEEAEIIRIIFQKYALEGMGMFDIARYLNLCGFKTSHGKEFERRSVEYILENPTYCGMIRWNRTVNETNEIRPKDEWIIADGQQPAIISKELFDRAAARRNMEYKPRGSRPSSTYRHWLSGLVKCPVCGRTMIAKKIVNGKRTYCYFVCYGYSKGKCLAKNSISSLKLAPAILQSLKDVLNNQQLSFRYIQPEPETAPDLSDILLDQLKRIDEKLDRIKEAYRNGVDTLEEYKENKALVQNEKQLLEKQLAELPAQDSESAQAESALLDRVKNVYEIVNSESVDDVTKNEILKSIIEKIVYNKEKDTLEVYYYYKPQTQ

SEQ ID NO: 6201 - protein, 494 aa, Unknown
  Description of Unknown: Integrase B6202 sequence
  cd00338,SM00857,G3DSA:1.10.10.2600,IPR036162,PS51737, G3DSA:3.40.50.1390,IPR006119,IPR038109,PF07508,IPR011109, SSF53041,PTHR30461,PS51736,Coil,PF00239
MPEDIKTAVIYARFSCSKQREASIDDQLRVCRDWCAREGYAIVGEYSDYAMSGRSDDRPEFQKMIANAGESDIVLVYMMDRFSRDEYDAPAYKHELRKKGVEVVSAMEAMPDGPERILIEKIYEGLAAVESVKTSMRTRRGMEGNAIKCKTNGVRVYGYGRNDDDEYVVNEDEAAIVREAFRRSCDHEPVDSIASDFARRGVTTRTGRPCGYSMVYQMLHNRKYTGFYSWGGIEMDGGMPQIIDKATFAMAQEVKPKKRRASEDWGTFALSGRAICSECGHNMAGTSGRGKKNVKYEYYGCRCGAKPVRRDWLEHELAEAIRGMLRDRETALRISHMLWDEPEPEIADARRRAMASKRKAENGLQNIMAAIEQGIVMPEFTDRIAQLQAQKARAERDLASYDEARIDPEEFADFLQCGGGMDDAAVLDSFVYQVMVTPEECVATLYCDDERNEPARLSIARVRTFSGWCPVSKDSRTQVLALGRSVFIRFSRAA

SEQ ID NO: 6202 - protein, 494 aa, Unknown
  Description of Unknown: Integrase B6203 sequence
  PTHR30461:SF3,IPR036162,PS51737,IPR011109,PTHR30461, PS00397,PF00239,G3DSA:1.10.10.2600,IPR006119,SSF53041, SM00857,IPR025827,IPR038109,PS51736, cd03768,IPR006118,PF13408,G3DSA:3.40.50.1390,PF07508,Coil
MRVVGYARVSTREQADHGYSIGEQNSRLRAYCQAKDWTLLRVIEDPGFSGAKMQRPGLQQVLEMVRRRECDAVLVWKLDRLSRSQKDTLYLLEDVFLANGCGFVSMLENFDTSTAFGRAMVGILSVFAQLEREQFKERSAIGRVGRAKAGLFHGGGYAPIGYDYYTKEDGGQGLVVNEYEAMQVREVYRLYLAGWAVHKIQVYMHERYTTKNGCWASDTTVRSVLSSPIYLGRITWAGKTYEGQHEALISQNDFDQVAARRESLKWQPAEPRAACDLIKNSPFRSTHILGGITWCARCGARYFASGNYSGRGENRKYWPYYTCYSVAKSSKKMIKDPNCKNKRWAVGKLDAIILAEISRLEFDPAALAKAAGPVDVSGVEEKRRVLEARVAEVRPQMERLLDLCQTGGLPVASVSGRLATLQKELDALNGELSGLAVPETVDRLAVAQEMLAGASAVIENGTPEQKRALVHSLIGRIDIDGEDITIHWLFAPEN

SEQ ID NO: 6203 - protein, 494 aa, Unknown
  Description of Unknown: Integrase B6204 sequence
  IPR036162,PS51737,IPR011109,PTHR30461,PS00397, PF00239,G3DSA:1.10.10.2600,IPR006119,SSF53041,cd00338, SM00857,IPR025827,IPR038109,PS51736,IPR006118, PF13408,G3DSA:3.40.50.1390,PF07508,Coil
MKTKYGYGYVRVSTDKQEELSPDSQAKLLKDFAHKNGIIISKIFYELGVSGRKAEKRPEFQKMIAMAKSSDHPVDAILVWKFSRFARNQEESIVYKSLLKKKHNVDVISVSEPLVDGPFGSLIERIIEWMDEYYSVRLSGEVTRGMTEKAKRGGYQARPPLGYRIAERGKPPAIVEEEAEIIRIIFQKYALEGMGMFDIARYLNLCGFKTSHGKEFERRSVEYILENPTYCGMIRWNRTVNETNEIRPKDEWIIAEGQQPAIISKELFDRAAARRNMEYKPKGSRPSSTYRHWLSGLVKCPVCGRTMIAKKIVNGKRTYCYFVCYGYSKGKCLAKNSISSLKLAPAVLQSLKDVLNNQQLSFRYIQPEPETAPDLSDILLDQLKRIDEKLDRIKEAYRNGVDTLEEYKENKALVQNEKQLLEKQLAALPAQDNESDQAESALLDRVRNVYEIVNSESVDDVTKNEILKSIIEKIVYNKEKDTLEVYYYYKPQTQ

SEQ ID NO: 6204 - protein, 493 aa, Unknown
  Description of Unknown: Integrase B6205 sequence
  PTHR30461:SF3,IPR036162,PS51737,IPR011109,PTHR30461, PS00397,PF00239,G3DSA:1.10.10.2600,IPR006119,SSF53041, cd00338,SM00857,IPR025827,IPR038109,PS51736, IPR006118,PF13408,G3DSA:3.40.50.1390,PF07508,Coil
MKEKVSERKTGAIYIRVSTDKQEELSPDAQLRLLMDYAKKNSIDVPEEYIYQDNGISGRKANKRPAFQNMIALAKSKEHPIDTIIVWKFSRFARNQEESIVYKSLLSKNSVDVVSVSEPLIDGPFGSLIERIIEWMDEYYSIRLSGEVIRGMTQNAMRGHYQSDAPIGYISPGDKKPPVINPDTVQIPLMIKDMFLSGSTQLQIARKLNDMGYRTKRGNLWDARGVRYVLENPFYIGKSRWNYTERGRKLKPSDEVIYADGNWEALWDEDTFKEIQKRLALNMRKAKSRDVSSAKHWLSGLLICSSCGGTLAYGGANSARGFQCWKYSKGFCSESHYISTGSIEKMVMEYLEYVLHSPTLSYTIISAASSNAESKLSDCERQLQKIDAKEKRIKAAYLNEIDTLEEYKANKTALEEERRTIEKEIEELTLSNVKYTKEDMDKKMKQNIQNLLLVLKDESADYVQKGNMMRNVVDHIVFDRKNTSLDVFLKLVI

SEQ ID NO: 6205 - protein, 493 aa, Unknown
  Description of Unknown: Integrase B6206 sequence
  PTHR30461:SF3,IPR036162,PS51737,IPR011109,PTHR30461, PS00397,PF00239,G3DSA:1.10.10.2600,IPR006119,SSF53041, cd00338,SM00857,IPR025827,IPR038109,PS51736, IPR006118,PF13408,G3DSA:3.40.50.1390,PF07508,Coil
MSVKYAYGYIRVSTHDQEEISPDSQEHLLRDYAAKNNIVILKIFTDLGISGRKANKRPGFQEMIGLAKGDDHPVDQILVWKFSRFARNQEESIVYKSLLKKQHNVDVVSVSEPLSDDPFGSLIERIIEWMDEYYSIRLSGEVLRGMKENAARGAFQGAAPFGYKTVDKTLVIDPEKADIVRHVFNMYVNEKLSVFDIARYLNNLGFRTIRGNLFERRTVEYMLKNPTYCGMIHWNKTENATHSIKNKDEWIVSQGQHPAIISQELFDATQERLKATRRPSRRRERPSSTYKHWLSGLMKCPACGKTLSACTQKRVNGEKYAYFSCYGYAHGQCDKAHGVSSLVLEPEVLAGIKEVLDTGNISYELHDYQPTEAVDERSIIRERLSNLTSKEERIKASYREGIDTLEEYKSNKAILQKERDNLEEQLKELEGQNPEPDQDPAGDMLLKVRSVYDILISDSYTYVQKNEALKQIVDKIIYDKESDSLKIYFFLCR

SEQ ID NO: 6206 - protein, 493 aa, Unknown
  Description of Unknown: Integrase B6207 sequence
  PTHR30461:SF3,IPR036162,PS51737,IPR011109,PTHR30461, PS00397,PF00239,G3DSA:1.10.10.2600,IPR006119,SSF53041, cd00338,SM00857,IPR025827,IPR038109,PS51736, IPR006118,PF13408,G3DSA:3.40.50.1390,PF07508,Coil
MSVKYAYGYIRVSTHDQEEISPDSQEHLLRDYAAKNNIVILKIFTDLGISGRKANKRPGFQEMIGLAKGDDHPVDQILVWKFSRFARNQEESIVYKSLLKKQHNVDVVSVSEPLSDNPFGSLIERIIEWMDEYYSIRLSGEVYRGMKENALRGAYQARPPLGYKVVEHGKPPVIVPEEAKIVRTIFEKYTNEGMSFFDIARYLNSLRLKTSHGKPFERRSVEYIIQNPSYCGMIRWNRTENSTNRIKDKDEWIVTEGQQPAIISKELFELAQERFKATYKPVGKRPSSTYKHWLSGLLKCPDCGRTLTSTTMKRVNGEKYSYFSCYGYSKGKCKKPNGISSLVLEKEVLTSIKEILDTKDIVYELREYQPTEQFDERKAITEQLESLTGKEERIKASYREGIDTLEEYKANKAIIQKERESLEQQLKDLKKAARKSDQDPADAMLQKVRSVYDILISNNYTYIQKNEALKQIIDKIIYDRKNDSLKIYFFLYR

SEQ ID NO: 6207 - protein, 493 aa, Unknown
  Description of Unknown: Integrase B6208 sequence
  PTHR30461:SF3,IPR036162,PS51737,IPR011109,PTHR30461, PS00397,PF00239,G3DSA:1.10.10.2600,IPR006119,SSF53041, cd00338,SM00857,IPR025827,IPR038109,PS51736, IPR006118,PF13408,G3DSA:3.40.50.1390,PF07508,Coil
MSVKYAYGYIRVSTHDQEEISPDSQEHLLRDYAAKNNIVILKIFTDLGISGRKANKRPGFQEMIGLAKGDDHPVDLILVWKFSRFARNQEESIVYKSLLKKQHNVDVLSVSEPLSDNPFGSLIERIIEWMDEYYSIRLSGEVHRGMKENALRGAYQARPPLGYKVVEHGKPPVIVPEEAKIVRTIFEKYTNEGMSFFDIARYLNSLGLKTSHGKPFERRSVEYIIQNPSYCGMIRWNRTENSTNRIKDKDEWIVTEGQQPAIISKELFESAQERFKATYKPVGKRPSSTYKHWLSGLLKCPDCGRTLTSTTMKRVNEEKYSYFSCYGYSKGKCKKPNGISSLVLEKEVLASIKEVLDTKDIVYELREYQPTEQFDERKAITEQLESLTGKEERIKASYREGIDTLEEYKANKAIIQKERESLEQQLKDLKKAAHKSDQDPADAMLQKVRSVYDILISNNYTYVQKNEALKQIIDKIIYDRKNDSLKIYFFLYR

SEQ ID NO: 6208 - protein, 493 aa, Unknown
  Description of Unknown: Integrase B6209 sequence
  PTHR30461:SF3,IPR036162,PS51737,IPR011109,PTHR30461, PS00397,PF00239,G3DSA:1.10.10.2600,IPR006119,SSF53041, cd00338,SM00857,IPR025827,IPR038109,PS51736, IPR006118,PF13408,G3DSA:3.40.50.1390,PF07508,Coil
MKTKYCYGYVRVSTSGQEELSPDSQAKLLKDFAKKNDMIVLQIFYELGISGRKADKRPEFQKMIALAKSDKHPVDCIIVWKFSRFARNQEESIVYKSLLKKKHNVEVLSVSEPLVDGPFGSLIERIIEWMDEYYSVRLSGEVTRGMTEKAKRGGYQARPPLGYKIQERGKPPVIVPEEAEIIKIIFDKYVNEHTGIFDIARYLNLCGFKTSHNKPFERRSIEYILQNPTYCGMIRWNRTVSETNEIRPESEWIVSDGQQPAIISKELFDKAQIRYKSEYKPSGTRPSSTYKHWLSGLMKCPVCGRTMIAKTVNNQKSYCYFTCYGYSKGKCLAKTSVSSLKLEPAVLASIKEVLDTGNIIYRHVEPVQETSVDLNVIITEQLRKNVEKFDRIREAYRNGVDTLDEYKENKRMVQEEKETLEKQLADIKPAEPTIDTSKIAMLEKVRNVYEIIESDSVDSVTKNEILKSVIEKIIYDRSKDELKVYYYYAPESQ

SEQ ID NO: 6209 - protein, 493 aa, Unknown
  Description of Unknown: Integrase B6210 sequence
  PTHR30461:SF3,SM00857,G3DSA:1.10.10.2600,IPR036162,PS51737, G3DSA:3.40.50.1390,IPR006119,IPR038109,PF07508,SSF53041, IPR011109,PTHR30461,Coil,PS51736,cd00338, PF00239
MKTCIYLRKSRADIEAEKEGEYETLHRHKTTLLKVAKERKLNIVDIKEELVSGEYVEHRPRMMELLEEVKNKKYDAVLVMDLDRLGRGNMQDQGLILDTFKTSKTKIITPRKIYNLDDEFDEEYSEFEAFMARKELKLINRRLQRGRAKSIEEGKYISPDAPYGYEFKYDDRGKKYLAINEEQAAAVKLVFSMYLENKGATKIANKLNALGYETNNHIEFKAKAVRDILSNITYCGYVKWKTIDRKNHSRLRPDGEQIIAKGHHEPIIDEFTFNKVQEIRKGKYISPSKNKVSNPLAGIVICKKCGHNIIQKISRGKTYLWCRHCDNKSSSLDYVEDAIINSLQGWLENYKIKIDLKDDTEEIDQIKFELKKLQRELKEAEKQKGKLYDFLERGIYDDKTFLERSNVLESRIDDLKNQISECNLSIISYKDNLQAKKQIIPSLEKVLYNYSRSNDAKEQNLLLKSVLDKVLYEKAKDASKDEFILEVHPKLPK

SEQ ID NO: 6210 - protein, 493 aa, Unknown
  Description of Unknown: Integrase B6211 sequence
  PTHR30461:SF3,IPR036162,PS51737,IPR011109,PTHR30461, PS00397,PF00239,G3DSA:1.10.10.2600,IPR006119,SSF53041, cd00338,SM00857,IPR025827,IPR038109,PS51736, IPR006118,PF13408,G3DSA:3.40.50.1390,PF07508,Coil
MKTKYCYGYVRVSTSGQEELSPDSQAKLLKDFAKKNDMIILQIFYELGISGRKADKRPEFQKMIALAKSDKHPVDCIIVWKFSRFARNQEESIVYKSLLKKKHNVDVLSVSEPLVDGPFGSLIERIIEWMDEYYSVRLSGEVTRGMTEKAKRGGYQARPPLGYKIQERGKPPVIVPEEAEIIKIIFDKYVNEHTGIFDIARYLNLCGFKTSHNKPFERRSIEYILQNPTYCGMIRWNRTVSETNEIRPESEWIVSDGQQPAIISKELFDKAQIRYKSEYKPSGARPSSTYKHWLSGLMKCPVCGRTMIAKTVNNQKSYCYFTCYGYSKGKCLAKTSVSSLRLEPAVLASIKEVLDTGNIIYRHVEPVQETSVDLNVIITEQLRKNAEKFDRIREAYRNGVDTLDEYKENKRMVQEEKEMLEKQLADIKPAEPTIDTSKIAMLEKVRNVYEIIESDSVDPVTKNEILKSVIEKIIYDRSKDELKVYYYYAPESQ

SEQ ID NO: 6211 - protein, 493 aa, Unknown
  Description of Unknown: Integrase B6212 sequence
  PTHR30461:SF3,IPR036162,PS51737,IPR011109,PTHR30461, PS00397,PF00239,G3DSA:1.10.10.2600,IPR006119,SSF53041, cd00338,SM00857,IPR025827,IPR038109,PS51736, IPR006118,PF13408,G3DSA:3.40.50.1390,PF07508,Coil
MSVKYAYGYIRVSTHDQEEISPDSQEHLLRDYAAKNNIVILKIFTDLGISGRKANKRPGFQEMIGLAKGDDHPVDQILVWKFSRFARNQEESIVYKSLLKKQHNVDVVSVSEPLSDNPFGSLIERIIEWMDEYYSIRLSGEVYRGMKENALRGAYQARPPLGYKVVEHGKPPVIVPEEAKIVRTIFEKYTNEGMSFFDITRYLNSLGLKTSHGKPFERRSVEYIVQNPSYCGMIRWNRTENSTNRIKDKDEWIVTEGQQPAIISKELFESAQKRFKATYKPVGKRPSSTYKHWLSGLLKCPDCGRTLTSTTMKRVNGEKYSYFSCYGYSKGKCKKPNGISSLVLEKEVLASIKEVLDTKDIVYELREYQPTEQFDERKAITEQLKSLTGKEERIKASYREGIDTLEEYKANKAIIQKERESLEQQLKELKTAAHKSDQDPADAMLQKVRSVYDILISNNYTYIQKNEALKQIIDKIIYDRKNDSLKIYFFLYR

SEQ ID NO: 6212 - protein, 493 aa, Unknown
  Description of Unknown: Integrase B6213 sequence
  PTHR30461:SF3,IPR036162,PS51737,IPR011109,PTHR30461, PS00397,PF00239,G3DSA:1.10.10.2600,IPR006119,SSF53041, cd00338,SM00857,IPR025827,IPR038109,PS51736, IPR006118,PF13408,G3DSA:3.40.50.1390,PF07508,Coil
MKETLSERKTGAIYIRVSTDKQEELSPDAQLRLLMDYAKTNHTDIPMEYIFQDNGISGRKADKRPAFQQMIALAKSKEHPIDTIIVWKFSRFARNQEESIVYKSLLKKNNVDVVSVSEPLIDGPFGSLIERIIEWMDEYYSIRLSGEVMRGMTQNALRGHYQGDAPIGYQSPGNKKPPEKDPKTIQIPIMMKDLLLSGSSLLQIARKLNEHGYRTKHGNLWDARGVRYVLENPFYAGISRWNYTDRGRQLKPADEVIYTKGNWEPLWDKATLKEIQKHLAMNMRKAKSRDVSTAKHWLSGLLICSSCGGTLAYSGTKNSRGFQCWKYTKGFCNESHYIGIHPIEKMVIEYLESILHSPAIVYTVISSASADADSKLADLEKQLQKVENKEKRIKAAYLNEIDSLEEYKANKAALLKERAAIEKNIKLLTISNTDISKEEMDKKMKQNISALLTVLQDDSADYVQKGNMMRNVVDHIVFDRGNTSLDMFLKLVI

SEQ ID NO: 6213 - protein, 493 aa, Unknown
  Description of Unknown: Integrase B6214 sequence
  PTHR30461:SF3,IPR036162,PS51737,IPR011109,PTHR30461, PS00397,PF00239,G3DSA:1.10.10.2600,IPR006119,SSF53041, cd00338,SM00857,IPR025827,IPR038109,PS51736, IPR006118,PF13408,G3DSA:3.40.50.1390,PF07508,Coil
MSVKYAYGYIRVSTHDQEEISPDSQEHLLRDYAAKNNIVILKIFTDLGISGRKANKRPGFQEMIGLAKGDDHPVDQILVWKFSRFARNQEESIVYKSLLKKQHNVDVVSVSEPLSDDPFGSLIERIIEWMDEYYSIRLSGEVHRGMKENALRGAYQARPPLGYKVVEHGKPPVIVPEEAKIVRTIFEKYTNEGMSFFDIARYLNSLGLKTSHGKPFERRSVEYIIQNPSYCGMIRWNRTENSTNRIKDKDEWIVTEGQQPAIISKELFESAQERFKATYKPVGKRPSSTYKHWLSGLLKCPDCGRTLTSTTMKRVNGEKYSYFSCYGYSKGKCKKPNGISSLVLEKEVLASIKEILDTKDIVYELREYQPTEQFDERKAITEQLESLTGKEERIKASYREGIDTLEEYKANKAIIQKERESLEQQLKELKKAARKSDQDPADAMLQKVRSVYDILISNNYTYVQKNEALKQIIDKIIYDRKNDSLKIYFFLYK

SEQ ID NO: 6214 - protein, 493 aa, Unknown
  Description of Unknown: Integrase B6215 sequence
  PTHR30461:SF3,IPR036162,PS51737,IPR011109,PTHR30461, PS00397,PF00239,G3DSA:1.10.10.2600,IPR006119,SSF53041, cd00338,SM00857,IPR025827,IPR038109,PS51736, IPR006118,PF13408,G3DSA:3.40.50.1390,PF07508,Coil
MSVKYAYGYIRVSTHDQEEISPDSQEHLLRDYAAKNNIVILKIFTDLGISGRKANKRPGFQEMIGLAKGDDHPVDQILVWKFSRFARNQEESIVYKSLLKKQHNVDVVSVSEPLSDNPFGSLIERIIEWMDEYYSIRLSGEVYRGMKENALRGAYQARPPLGYKVVEHGKPPVIVPEEAKIVRTIFEKYTNEGMSFFDIARYLNSLGLKTSHGKPFERRSVEYIIQNPSYCGMIRWNRTENSTNRIKDKDEWIVTEGQQPAIISKELFESAQERFKAAYKPVGKRPSSTYKHWLSGLLKCPDCGRTLTSTTMKRVNGEKYSYFSCYGYSKGKCKKPNGISSLVLEKEVLASIKEVLDTKDIVYELREYQPTEQFDERKAITEQLESLTGKEERIKASYREGIDTLEEYKANKAIIQKERESLEQQLKELKKATHKSDQDPADAMLQKVRSVYDILISNNYTYVQKNEALKQIIDKIIYDRKNDSLKIYFFLYR

SEQ ID NO: 6215 - protein, 493 aa, Unknown
  Description of Unknown: Integrase B6216 sequence
  PTHR30461:SF3,IPR036162,PS51737,IPR011109,PTHR30461, PS00397,PF00239,G3DSA:1.10.10.2600,IPR006119,SSF53041, cd00338,SM00857,IPR025827,IPR038109,PS51736, IPR006118,PF13408,G3DSA:3.40.50.1390,PF07508,Coil
MSVKYAYGYIRVSTHDQEEISPDSQEHLLRDYAAKNNIVILKIFTDLGISGRKANKRPGFQEMIGLAKGDGHPVDLILVWKFSRFARNQEESIVYKSLLKKQHNVDVVSVSEPLSDDPFGSLIERIIEWMDEYYSIRLSGEVYRGMKENALRGAYQARPPLGYKVVEHGKPPVIVPEEAKIVRTIFEKYTNEGMSFFDIARYLNSLGLKTSHGKPFERRSVEYIIQNPSYCGMIRWNRTENSTNRIKDKDEWIVTEGQQPAIISKELFESAQERFKATYKPVGKRPSSTYKHWLSGLLKCPDCGRTLTSTTMKRVNGEKYSYFSCYGYSKGKCKKPNGISSLVLEKEVLASIKEVLDTKDIVYELREYQPTEQFDERKAITEQLESLTGKEERIKASYREGIDTLEEYKANKAIIQKERESLEQQLKELKKAAHKSDQDPADSMLQKVRSVYDILISNNYTYVQKNEALKQIIDKIIYDRKNNSLKIYFFLYR

SEQ ID NO: 6216 - protein, 493 aa, Unknown
  Description of Unknown: Integrase B6217 sequence
  PTHR30461:SF3,IPR036162,PS51737,IPR011109,PTHR30461, PS00397,PF00239,G3DSA:1.10.10.2600,IPR006119,SSF53041, cd00338,SM00857,IPR025827,IPR038109,PS51736, IPR006118,PF13408,G3DSA:3.40.50.1390,PF07508,Coil
MSVKYAYGYIRVSTHDQEEISPDSQEHLLRDYAAKNNIVILKIFTDLGISGRKANKRPGFQEMIGLAKGDDHPVDQILVWKFSRFARNQEESIVYKSLLKKQHNVDVVSVSEPLSDDPFGSLIERIIEWMDEYYSIRLSGEVHRGMKENALRGAYQARPPLGYKVVEHGKPPVIVPEEAKIVRTIFEKYTNEGMSFFDIARYLNSLGLKTSHGKPFERRSVEYIIQNPSYCGMIRWNRTENSTNRIKDKDEWIVTEGQQPAIISKELFESAQERFKATYKPVGKRPSSTYKHWISGLLKCPDCGRTLTSTTMKRVNGEKYSYFSCYGYSKGKCKKPNGISSLVLEKEVLASIKEILDTKDIVYELREYQPTEQFDERKAITEQLESLTGKEERIKASYREGIDTLEEYKANKAIIQKERESLEQQLKELKKAAHKSDQDPADAMLQKVRSVYDILISNNYTYVQKNEALKQIIDKIIYDRKNDSLKIYFFLYR

SEQ ID NO: 6217 - protein, 493 aa, Unknown
  Description of Unknown: Integrase B6218 sequence
  PTHR30461:SF3,IPR036162,PS51737,IPR011109,PTHR30461, PS00397,PF00239,G3DSA:1.10.10.2600,IPR006119,SSF53041, cd00338,SM00857,IPR025827,IPR038109,PS51736, IPR006118,PF13408,G3DSA:3.40.50.1390,PF07508,Coil
MKTKYCYGYVRVSTSGQEELSPDSQAKLLKDFAKKNDMIVLQIFYELGISGRKADKRPEFQKMIALAKSDKHPVDCIIVWKFSRFARNQEESIVYKSLLKKKHNVEVLSVSEPLVDGPFGSLIERIIEWMDEYYSVRLSGEVTRGMTEKAKRGGYQARPPLGYKIQERGKPPVIVPEEAEIIKIIFDKYVNEHTGIFDIARYLNLCGFKTSHNKPFERRSIEYILQNPTYCGMIRWNRTVSETNEIRPESEWIVSDGQQPAIISKELFDKAQIRYKSEYKPSGTRPSSTYKHWLSGLMKCPVCGRTMIAKTVNNQKSYCYFTCYGYSKGKCLAKTSVSSLRLEPAVLASIKEVLDTGNIIYRHVEPVQETSVDLNVIITEQLRKNAEKFDRIREAYRNGVDTLDEYKENKRMVQEEKEMLEKQLADIKPAEPTIDTSKIAMLEKVRNVYEIIESDSVDPVTKNEILKSVIEKIIYDRSKDELKVYYYYAPESQ

SEQ ID NO: 6218 - protein, 493 aa, Unknown
  Description of Unknown: Integrase B6219 sequence
  PTHR30461:SF3,IPR036162,PS51737,IPR011109,PTHR30461, PS00397,PF00239,G3DSA:1.10.10.2600,IPR006119,SSF53041, cd00338,SM00857,IPR025827,IPR038109,PS51736, IPR006118,PF13408,G3DSA:3.40.50.1390,PF07508,Coil
MRVKYAYGYIRVSTHDQEEISPDSQEHLLRDYAAKNNIVILKIFTDLGISGRKANKRPGFQEMIGLAKGDDHPVDLILVWKFSRFARNQEESIVYKSLLKKQHNVDVVSVSEPLSDDPFGSLIERIIEWMDEYYSIRLSGEVYRGMKENALRGAYQARPPLGYKVVEHGKPPVIVPEEAKIVRTIFEKYTNEGMSFFDIARYLNSLGLKTSHGKPFERRSVEYIVQNPSYCGMIRWNRTENSTNRIKDKDEWIVTEGQQPAIISKELFESAQERFKATYKPVGKRPSSTYKHWLSGLLKCPDCGRTLTSTTMKRVNGEKYSYFSCYGYSKGKCKKPNGISSLVLEKEVLASIKEILDTKDIVYELREYQPTEQFDERKAITEQLESLNGKEERIKASYREGIDTLEEYKANKAIIQKERESLEQQLKELKKAAHKSDQDPADAMLQKVRSVYDILISNNYTYVQKNEALKQIIDKIIYDRKNDSLKIYFFLYR

SEQ ID NO: 6219 - protein, 493 aa, Unknown
  Description of Unknown: Integrase B6220 sequence
  PTHR30461:SF3,IPR036162,PS51737,IPR011109,PTHR30461, PS00397,PF00239,G3DSA:1.10.10.2600,IPR006119,SSF53041, cd00338,SM00857,IPR025827,IPR038109,PS51736, IPR006118,PF13408,G3DSA:3.40.50.1390,PF07508,Coil
MSVKYAYGYIRVSTHDQEEISPDSQEHLLRDYAAKNNIVILKIFTDLGISGRKANKRPGFQEMIGLAKGDDHPVDQILVWKFSRFARNQEESIVYKSLLKKQHNVDVVSVSEPLSDDPFGSLIERIIEWMDEYYSIRLSGEVLRGMKENALRGAYQARPPLGYKVVEHGKPPVIVPEEAKIVRTIFEKYTNEGMSFFDIARYLNSLGLKTSHGKPFERRSVEYIIQNPSYCGMIRWNRIENSTNRIKDKDEWIVTEGQQPAIISKELFESAQKRFKATYKPVGKRPSSTYKHWLSGLLKCPDCGRTLTSTTMKRVNGEKYSYFSCYGYSKGKCKKPNGISSLVLEKEVLASIKEILDTKDIVYELREYQPTEQFDERKAITEQLESLTGKEERIKASYREGIDTLEEYKANKAIIQKERESLEQQLKELKKAARKSDQDPADAMLQKVRSVYDILISNNYTYIQKNEALKQIIDKIIYDRKNDSLKIYFFLYR

SEQ ID NO: 6220 - protein, 493 aa, Unknown
  Description of Unknown: Integrase B6221 sequence
  PTHR30461:SF3,IPR036162,PS51737,IPR011109,PTHR30461, PS00397,PF00239,G3DSA:1.10.10.2600,IPR006119,SSF53041, cd00338,SM00857,IPR025827,IPR038109,PS51736, IPR006118,PF13408,G3DSA:3.40.50.1390,PF07508,Coil
MSVKYAYGYIRVSTHDQEEISPDSQEHLLRDYASKNNIVILKIFTDLGISGRKANKRPGFQEMIGLAKGDDHPVDQILVWKFSRFARNQEESIVYKSLLKKQHNVDVVSVSEPLSDDPFGSLIERIIEWMDEYYSIRLSGEVLRGMKENAARGAFQGAAPFGYKTIDKTLVIDPEKADIVRHVFNMYVNEKLSVFDIARYLNNLGFRTIRGNLFERRTVEYMLKNPTYCGMIHWNKTENATHSIKNKDEWIVSQGQHPAIISQELFDATQERLKATRRPSRRRERPSSTYKHWLSGLMKCPACGKTLSACTQKRVNGEKYAYFSCYGYAHGQCDKAHGVSSLVLEPEVLASIKEVLDTGNISYELHDYQPTEVVDERSIIRDRLNSLASKEERIKASYREGIDTLEEYKSNKAILQKERDNLEEQLKELEGQNPEPDQDPTGDMLLKVRSVYDILISDSYTYIQKNEALKQIVDKIIYDKESDSLKIYFFLCR

SEQ ID NO: 6221 - protein, 493 aa, Unknown
  Description of Unknown: Integrase B6222 sequence
  PTHR30461:SF3,IPR036162,PS51737,IPR011109,PTHR30461, PS00397,PF00239,G3DSA:1.10.10.2600,IPR006119,SSF53041, cd00338,SM00857,IPR025827,IPR038109,PS51736, IPR006118,PF13408,G3DSA:3.40.50.1390,PF07508,Coil
MKTKYCYGYVRVSTSGQEELSPDSQAKLLKDFAKKNDMIVLQIFYELGISGRKADKRPEFQKMIALAKSDKHPVDCIIVWKFSRFARNQEESIVYKSLLKKKHNVEVLSVSEPLVDGPFGSLIERIIEWMDEYYSVRLSGEVTRGMTEKAKRGGYQARPPLGYKIQERGKPPVIVPEEAEIIKIIFDKYVNEHTGIFDIARYLNLCGFKTSHNKPFERRSIEYILQNPTYCGMIRWNRTVSETNEIRPESEWIVSDGQQPAIISKELFDKAQIRYKSEYKPSGTRPSSTYKHWLSGLMKCPVCGRTMIAKTVNNQKSYCYFTCYGYSKGKCLAKTSVSSLKLEPAVLASIKEVLDTGNIIYRHVEPVQETSVDLNVIITEQLRKNVEKFDRIREAYRNGVDTLDEYKENKRMVQEEKEMLEKQLADIKPAEPTIDTSKIAMLEKVRNVYEIIESDSVDSVTKNEILKSVIEKIIYDRSKDELKVYYYYAPESQ

SEQ ID NO: 6222 - protein, 493 aa, Unknown
  Description of Unknown: Integrase B6223 sequence
  PTHR30461:SF3,IPR036162,PS51737,IPR011109,PTHR30461, PS00397,PF00239,G3DSA:1.10.10.2600,IPR006119,SSF53041, cd00338,SM00857,IPR025827,IPR038109,PS51736, IPR006118,PF13408,G3DSA:3.40.50.1390,PF07508,Coil
MSVKYAYGYIRVSTHDQEEISPDSQEHLLRDYATKNNIVILKIFTDLGISGRKANKRPGFQEMIGLAKGDDHPVDQILVWKFSRFARNQEESIVYKSLLKKQHNVDVVSVSEPLSDDPFGSLIERIIEWMDEYYSIRLSGEVHRGMKENALRGAYQARPPLGYKVVEHGKPPVIVPEEAKIVRTIFEKYTNEGMSFFDIARYLNSLGLKTSHGKPFERRSVEYIIQNPSYCGMIRWNRTENSTNRIKDKDEWIVTEGQQPAIISKELFESAQERFKATYKPVGKRPSSTYKHWLSGLLKCPDCGRTLTSTTMKRVNGEKYSYFSCYGYSKGKCKKPNGISSLVLEKEVLASIKEILDTKDIVYELREYQPTEQFDERKAITEQLESLTGKEERIKASYREGIDTLEEYKANKAIIQKERESLEQQLKELKKAAHKPDQDPVDAMLQKVRSVYDILISNNYTYVQKNEALKQIIDKIIYDRKNDSLKIYFFLYR

SEQ ID NO: 6223 - protein, 493 aa, Unknown
  Description of Unknown: Integrase B6224 sequence
  PTHR30461:SF3,IPR036162,PS51737,IPR011109,PTHR30461, PS00397,PF00239,G3DSA:1.10.10.2600,IPR006119,SSF53041, cd00338,SM00857,IPR025827,IPR038109,PS51736, IPR006118,PF13408,G3DSA:3.40.50.1390,PF07508,Coil
MKTKYCYGYVRVSTSGQEELSPDSQAKLLKDFAKKDDMIVLQIFYELGISGRKADKRPEFQKMIALAKSDKHPVDCIIVWKFSRFARNQEESIVYKSLLKKKHNVEVLSVSEPLVDGPFGSLIERIIEWMDEYYSVRLSGEVTRGMTEKAKRGGYQARPPLGYKIQERGKPPVIVPEEAEIIKIIFDKYVNEHTGIFDIARYLNLCGFKTSHNKPFERRSIEYILQNPTYCGMIRWNRTVSETNEIRPESEWIVSDGQQPAIISKELFDKAQIRYKSEYKPSGTRPSSTYKHWLSGLMKCPVCGRTMIAKTVNNQKSYCYFTCYGYSKGKCLAKTSVSSLKLEPAVLASIKEVLDTGNIIYRHVEPVQETSVDLNVIITEQLRKNVEKFDRIREAYRNGVDTLDEYKENKRMVQEEKEMLEKQLADIKPAEPTIDTSKIAMLEKVRNVYEIIESDSVDSVTKNEILKSVIEKIIYDRSKDELKVYYYYAPESQ

SEQ ID NO: 6224 - protein, 493 aa, Unknown
  Description of Unknown: Integrase B6225 sequence
  SM00857,G3DSA:1.10.10.2600,IPR036162,PF13408,PS51737, G3DSA:3.40.50.1390,IPR025827,IPR006119,IPR038109,PF07508, IPR011109,SSF53041,PF00239,PTHR30461,PS51736, Coil,cd00338
MVLLDTYCIYLRKSRADAEAEARGEGETLARHEHALLDLAKRGNLTISHIYREIVSGDSIAARPQMQQMLQDVTDKAYTGVLVMEIERLARGDTIDQGVVAQAFRESGTKIVTPLKTYDPSNEFDEEYFEFSLFMSRREYKTIKRRMQAGRIASIKEGNYLGTNPPYGYKKVQPEPKVKTLEIVSEEAEAVKMMFNMYLSGDGARAIAARLNQLQIPPRKASMWEPVSVRKILRNPVYAGKIEWHTKKDGTILSDGVHPAIISWEQFQQSVERRKRTAPQVPTGYTTQNYYHGLLFCGNCGHQMKRRPVPNGTPHMLCRRYECRGKVVSSTTEKIDEAVLEAIKYRISELTLFKDQSGEEKRAKEKQKEFQRDQLKKALEKLKSQKEKLHTLLETDVYTVEVFLERSKALEAKKEELEKALHSITDSLQEKEHLAPEQAVIWLRYVLDHFSTADACQKSKMLQRIIKRIEYKKTEKMCYRKQSSDMSLHIDFL

SEQ ID NO: 6225 - protein, 493 aa, Unknown
  Description of Unknown: Integrase B6226 sequence
  cd03768,PTHR30461:SF3,SM00857,IPR036162,PF13408, IPR025827,G3DSA:3.40.50.1390,PS51737,IPR006119,PF07508, IPR011109,SSF53041,PTHR30461,PS51736,Coil, PF00239
MIAIYARQSIDKKDSISIESQIEYGKHEAFDEPYEVYQDKGYSGKNTNRPAFERMLKDINDGKINKVVVYRLDRISRSIVDFADFINNLEEKHVSFVSATEKFDTSAPMGRAMLYIIIVFAQLERETIAERVKDNYYSRIKKGAVGGGPAPYGFDLTKALVNGHKIATYAPNSNINNAVAIFNEYAKPNTSLADVQRFLAANNILTTKNKPWDNAKLSSILKSPTYVKADATIYNFYKSKGAIVANDIEDFNGENGCILVGKRDANSRKYADVSNHILAVSNHKGVIDSETFLYVQQKLSKNKQIKNLHKGTHSWLTGFVQCVNCGYSFSVRKSKCKNGFVDYFACSGKYLYKTCDLKQTHKVKDVEDHVQGEILKHIQEIRERQARSKQTNIVDLTLKKIADIDAKIEALISNLEESTAITAKYINQRIATLDDEKQQLIEQHSKDIAAKREQIVIPDYDYNNLSFDEKRELAKLLVKHVWLGSGKVEIEWK

SEQ ID NO: 6226 - protein, 493 aa, Unknown
  Description of Unknown: Integrase B6227 sequence
  PTHR30461:SF3,IPR036162,PS51737,IPR011109,PTHR30461, PS00397,PF00239,G3DSA:1.10.10.2600,IPR006119,SSF53041, cd00338,SM00857,IPR025827,IPR038109,PS51736, IPR006118,PF13408,G3DSA:3.40.50.1390,PF07508,Coil
MSVKYAYGYIRVSTHDQEEISPDSQEHLLRDYAAKNNIVIIKIFTDLGISGRKANKRPGFQEMIGLAKGDDHPVDLILVWKFSRFARNQEESIVYKSLLKKQHNVDVVSVSEPLSDDPFGSLIERIIEWMDEYYSIRLSGEVLRGMKENAARGAFQGAAPFGYKTIDKTLVIDPEKADIVRHVFNMYVNEKLSVFDIARYLNNLGFRTIRGNLFERRTVEYMLKNPTYCGMIHWNKTENATHSIKNKDEWIVSQGQHPAIISQELFDATQERLKATRRPSRRRERPSSTYKHWLSGLMKCPACGKTLSACTQKRVNGEKYAYFSCYGYAHGQCDKAHGVSSLVLEPEVLASIKEVLDTGNISYELHDYQPTEVVDERSIIRDRLNSLASKEERIKASYREGIDTLEEYKSNKAILQKERDNLEEQLKELEGQNPEPDQDPTGDMLLKVRSVYDILISDSYTYIQKNEALKQIVDKIIYDKESDSLKIYFFLCR

SEQ ID NO: 6227 - protein, 493 aa, Unknown
  Description of Unknown: Integrase B6228 sequence
  PTHR30461:SF3,IPR036162,PS51737,IPR011109,PTHR30461, PS00397,PF00239,G3DSA:1.10.10.2600,IPR006119,SSF53041, cd00338,SM00857,IPR025827,IPR038109,PS51736, IPR006118,PF13408,G3DSA:3.40.50.1390,PF07508,Coil
MSVKYAYGYIRVSTHDQEEISPDSQEHLLRDYAAKNNIVILKIFTDLGISGRKANKRPGFQEMIGLAKGDDHPIDQILVWKFSRFARNQEESIVYKSLLKKQHNVDVVSVSEPLSDDPFGSLIERIIEWMDEYYSIRLSGEVYRGMKENAIRGAYQARPPLGYKVVEHGKPPVIVPKEAKIVQTIFEKYVNESMGFFDIARYLNDLGLKTSHGKPFERRSIEYIIQNPSYCGMIRWNRTENSTNRIKDKDEWIVTEGQQPAIISKELFESAQERFKATYKPVGKRPSSTYKHWLSGLLKCPDCGRTLTSTTMKRVNGEKYSYFSCYGYSKGKCKKPNGISSLVLEKEVLASIKEILDTKDIVYELREYQPTEQFDERKAITEQLESLTGKEERIKASYREGIDTLEEYKANKAIIQKERESLEQQLKELKKAAHKSDQDPADSMLQKVRSVYDILISNNYTYVQKNEALKQIIDKIIYDRKNDSLKIYFFLYR

SEQ ID NO: 6228 - protein, 493 aa, Unknown
  Description of Unknown: Integrase B6229 sequence
  PTHR30461:SF3,IPR036162,PS51737,IPR011109,PTHR30461, PS00397,PF00239,G3DSA:1.10.10.2600,IPR006119,SSF53041, cd00338,SM00857,IPR025827,IPR038109,PS51736, IPR006118,PF13408,G3DSA:3.40.50.1390,PF07508,Coil
MKEKVSERKTGAIYIRVSTDKQEELSPDAQLRLLMDYAKKNSIDVPEEYIYQDNGISGRKANKRPAFQNMIALAKSKEHPIDTIIVWKFSRFARNQEESIVYKSLLSKNSVDVVSVSEPLIDGPFGSLIERIIEWMDEYYSIRLSGEVMRGMTQNAMRGHYQSDAPIGYTSPGDKKPPVINPDTVQIPLMIKDMFLSGSTQLQIARKLNDMGYRTKRGNLWDARGVRYVLENPFYIGKSRWNYTERGRKLKPSDEVIYADGNWEALWDEDTFKEIQKRLALNMRKAKSRDVSSAKHWLSGLLICSSCGGTLAYGGANSARGFQCWKYSKGFCSESHYISTRSIEKMVMEYLEYVLHSPTLSYTIISAASSDAESKLSDCERQLQKIDAKEKRIKAAYLNEIDTLEEYKANKTALEEERRTIEKEIEELTLSNVKYTKEDMDKKMKQNIQNLLLVLKDESADYVQKGNMMRNVVDHIVFDRKNTSLDVFLKLVI

SEQ ID NO: 6229 - protein, 493 aa, Unknown
  Description of Unknown: Integrase B6230 sequence
  PTHR30461:SF3,IPR036162,PS51737,IPR011109,PTHR30461, PS00397,PF00239,G3DSA:1.10.10.2600,IPR006119,SSF53041, cd00338,SM00857,IPR025827,IPR038109,PS51736, IPR006118,PF13408,G3DSA:3.40.50.1390,PF07508,Coil
MSVKYAYGYIRVSTHDQEEISPDSQEHLLRDYAAKNNIVIIKIFTDLGISGRKANKRPGFQEMIGLAKGDDHPVDLILVWKFSRFARNQEESIVYKSLLKKQHNVDVVSVSEPLSDDPFGSLIERIIEWMDEYYSIRLSGEVYRGMKENALRGAYQARPPLGYKVVEHGKPPVIVPEEAKIVRTIFEKYTNEGMSFFDIARYLNSLGLKTSHGKPFERRSVEYIIQNPSYCGMIRWNRTENSTNRIKDKDEWIVTEGQQPAIISKELFESAQERFKATYKPVGKRPSSTYKHWLSGLLKCPDCGRTLTSITMKRVNGEKYSYFSCYGYSKGKCKKPNGISSLVLEKEVLASIKEVLATKDIVYELREYQPTEQFDERKAITEQLESLNGKEERIKASYREGIDTLEEYKANKAIIQKERESLEQQLKELKKATHKSDQDPADAMLQKVRSVYDILISNNYTYVQKNEALKQIIDKIIYDRKNDSLKIYFFLYR

SEQ ID NO: 6230 - protein, 493 aa, Unknown
  Description of Unknown: Integrase B6231 sequence
  PTHR30461:SF3,IPR036162,PS51737,IPR011109,PTHR30461, PS00397,PF00239,G3DSA:1.10.10.2600,IPR006119,SSF53041, cd00338,SM00857,IPR025827,IPR038109,PS51736, IPR006118,PF13408,G3DSA:3.40.50.1390,PF07508,Coil
MSVKYAYGYIRVSTHDQEEISPDSQEHLLRDYAAKNNIVILKIFTDLGISGRKANKRPGFQEMIGLAKGDDHPVDQILVWKFSRFARNQEESIVYKSLLKKQHNVDVVSVSEPLSDDPFGSLIERIIEWMDEYYSIRLSGEVYRGMKENALRGAYQARPPLGYKVVEHGKPPVIVPEEAKIVRTIFEKYTNEGMSFFDIARYLNSLGLKTSHGKPFERRSVEYIIQNPSYCGMIRWNRTENSTNRIKDKDEWIVTEGQQPAIISKELFESAQKRFKATYKPVGKRPSSTYKHWLSGLLKCPDCGRTLTSTTMKRVNGEKYSYFSCYGYSKGKCKKPNGISSLVLEKEVLASIKEILDTKDIVYELREYQPTEQFDERKAITEHLESLTGKEERIKASYREGIDTLEEYKANKAIIQKERESLEQQLKELKKAARKSDQDPADAMLQKVRSVYDILISNNYTYIQKNEALKQIIDKIIYDRKNDSLKIYFFLYR

SEQ ID NO: 6231 - protein, 493 aa, Unknown
  Description of Unknown: Integrase B6232 sequence
  PTHR30461:SF3,IPR036162,PS51737,IPR011109,PTHR30461, PS00397,PF00239,G3DSA:1.10.10.2600,IPR006119,SSF53041, cd00338,SM00857,IPR025827,IPR038109,PS51736, IPR006118,PF13408,G3DSA:3.40.50.1390,PF07508,Coil
MSVKYAYGYIRVSTHDQEEISPDSQEHLLRDYAAKNNIVILKIFTDLGISGRKANKRPGFQEMIALAKGDDRPVDLILVWKFSRFARNQEESIVYKSLLKKQHNVDVVSVSEPLSDNPFGSLIERIIEWMDEYYSIRLSGEVYRGMKENALRGAYQARPPLGYKVVEHGKPPVIVPEEAKIVRTIFEKYTNEGMSFFDIARYLNSLGLKTSHGKPFERRSVEYIIQNPSYCGMIRWNRTENSTNRIKDKDEWIVTEGQQPAIISKELFESAQKRFKATYKPVGKRPSSTYKHWLSGLLKCPDCGRTLTSTTMKRVNGEKYSYFSCYGYSKGKCKKPNGISSLVLEKEVLASIKEILDTKDIVYELREYQPTEQFDERKAITEHLESLTGKEERIKASYREGIDTLEEYKANKAIIQKERESLEQQLKELKKAARKSDQDPADAMLQKVRSVYDILISNNYTYIQKNEALKQIIDKIIYDRKNDSLKIYFFLYR

SEQ ID NO: 6232 - protein, 493 aa, Unknown
  Description of Unknown: Integrase B6233 sequence
  PTHR30461:SF3,IPR036162,PS51737,IPR011109,PTHR30461, PS00397,PF00239,G3DSA:1.10.10.2600,IPR006119,SSF53041, cd00338,SM00857,IPR025827,IPR038109,PS51736, IPR006118,PF13408,G3DSA:3.40.50.1390,PF07508,Coil
MKEKVSERKTGAIYIRVSTDKQEELSPDAQLRLLMDYAKTNHTDIPMEYIFQDNGISGRKANKRPAFQQMIALAKSKEHPIDTIIVWKFSRFARNQEESIVYKSLLKKNNVDVVSVSEPLIDGPFGSLIERIIEWMDEYYSIRLSGEVMRGMTQNALRGHYQGDAPIGYQSPGNKKPPEKDPKTIQIPIMMKDLLLSGSSLLQIARKLNEQGYRTKHGNLWDARGVRYVLENPFYAGISRWNYTDRGRQLKPADEVIYTKGNWEPLWDKATLEEIQKHLAMNMRKAKSRDVSTAKHWLSGLLICSSCGGTLAYSGAKNSRGFQCWKYTKGFCNESHYIGIRPIEKMVIEYLESILHSPAIVYTVISSASADADSKLADLEKQLQKVENKEKRIKAAYLNEIDSLEEYKANKAALLKERAAIEKNIKLLTISNTDMSKEEMDKKMKQNISALLTVLQDDSADYVQKGNMMRNVVDHIVFDRGNTSLDMFLKLVI

SEQ ID NO: 6233 - protein, 493 aa, Unknown
  Description of Unknown: Integrase B6234 sequence
  PTHR30461:SF3,IPR036162,PS51737,IPR011109,PTHR30461, PS00397,PF00239,G3DSA:1.10.10.2600,IPR006119,SSF53041, cd00338,SM00857,IPR025827,IPR038109,PS51736, IPR006118,PF13408,G3DSA:3.40.50.1390,PF07508,Coil
MSVKYAYGYIRVSTHDQEEISPDSQEHLLRDYAAKNNIVILKIFTDLGISGRKANKRPGFQEMIGLAKGDDHPVDQILVWKFSRFARNQEESIVYKSLLKKQHNVDVVSVSEPLSDNPFGSLIERIIEWMDEYYSIRLSGEVLRGMKENAARGAFQGAAPFGYKTIDKTLVIDLEKADIVRHVFNMYVNEKLSVFDIARYLNNLGCRTIRGNLFERRTVEYMLKNPTYCGMIHWNKTENATHSIKNKDEWIVSQGQHPAIISQELFDATQERLKATRRPSRRRERPSSTYKHWLSGLMKCPACGKTLSACTQKRVNGEKYAYFSCYGYAHGQCDKAHGVSSLVLEPEVLASIKEILDTGNISYELHDYQPTEAVDERSIIKDRLNSLASKEERIKASYREGIDTLEEYKSNKAILQKERDNLEEQLKELEGQNPEPNQDPTGDMLLQVRSVYDILVSDSYTYVQKNEALKQIVDKIIYDKESDSLKIYFFLCR

SEQ ID NO: 6234 - protein, 493 aa, Unknown
  Description of Unknown: Integrase B6235 sequence
  PTHR30461:SF3,IPR036162,PS51737,IPR011109,PTHR30461, PS00397,PF00239,G3DSA:1.10.10.2600,IPR006119,SSF53041, cd00338,SM00857,IPR025827,IPR038109,PS51736, IPR006118,PF13408,G3DSA:3.40.50.1390,PF07508,Coil
MRVKYAYGYIRVSTHDQEEISPDSQEHLLRDYAAKNNIVILKIFTDLGISGRKANKRPGFQEMIGLAKGDDHPVDLILVWKFSRFARNQEESIVYKSLLKKQHNVDVVSVSEPLSDDPFGSLIERIIEWMDEYYSIRLSGEVYRGMKENALRGAYQARPPLGYKVVEHGKPPVIVPEEAKIVRTIFEKYTNEGMSFFDIARYLNSLGLKTSHGKPFERRSVEYIIQNPSYCGMIRWNRTENSTNRIKDKDEWIVTEGQQPAIISKELFESAQKRFKATYKPVGKRPSSTYKHWLSGLLKCPDCGRTLTSTTMKRVNGEKYSYFSCYGYSKGKCKKPNGISSLVLEKEVLASIKEVLDTKDIVYELREYQPTEQFDERKAITEQLESLTGKEERIKASYREGIDTLEEYKANKAIIQKERESLEQQLKELKKAAHKSDQDPADAMLQKVRSVYDILISNNYTYIQKNEALKQIIDKIIYDRKNDSLKIYFFLYR

SEQ ID NO: 6235 - protein, 493 aa, Unknown
  Description of Unknown: Integrase B6236 sequence
  PTHR30461:SF3,IPR036162,PS51737,IPR011109,PTHR30461, PS00397,PF00239,G3DSA:1.10.10.2600,IPR006119,SSF53041, cd00338,SM00857,IPR025827,IPR038109,PS51736, IPR006118,PF13408,G3DSA:3.40.50.1390,PF07508,Coil
MSVKYAYGYIRVSTHDQEEISPDSQEHLLRDYAARNNIVILKIFTDLGISGRKANKRPGFQEMIGLAKGDDHPVDQILVWKFSRFARNQEESIVYKSLLKKQHNVDVVSVSEPLSDDPFGSLIERIIEWMDEYYSIRLSGEVYRGMKENALRGAYQARPPLGYKVVEHGKPPVIVPEEAKIVRTIFEKYTNESMSFFDIARYLNSLGLKTSHGKSFERRSVEYIIQNPSYCGMIRWNRTENSTNRIKDKDEWIVTEGQQPAIISKELFESAQKRFKATYKPVGKRPSSTYKHWLSGLLKCPDCGRTLTSTTMKRVNGEKYSYFSCYGYSKGKCKKPNGISSLVLEKEVLACIKEILDTKDIVYELREYQPTDQFDERKAITEQLESLTGKEERIKASYREGIDTLEEYKTNKAIIQKERESLEQQLKDLKKAAHKSDQDPADAMLQKVRSVYDILISNNYTYVQKNEALKQIIDKIIYDRKNDSLKIYFFLYR

SEQ ID NO: 6236 - protein, 493 aa, Unknown
  Description of Unknown: Integrase B6237 sequence
  PTHR30461:SF3,IPR036162,PS51737,IPR011109,PTHR30461, PS00397,PF00239,G3DSA:1.10.10.2600,IPR006119,SSF53041, cd00338,SM00857,IPR025827,IPR038109,PS51736, IPR006118,PF13408,G3DSA:3.40.50.1390,PF07508,Coil
MKEKVSERKTGAIYIRVSTDKQEELSPDAQLRLLMDYAKKNSIDVPEEYIYQDNGISGRKANKRPAFQNMIALAKSKEHPIDTIIVWKFSRFARNQEESIVYKSLLSKNSVDVVSVSEPLIDGPFGSLIERIIEWMDEYYSIRLSGEVMRGMTQNAMRGHYQSDAPIGYKSPGDKKPPVINPDTVQIPLMIKDMFLSGSTQLQIARKLNDMGYRTKRGNLWDARGVRYVLENPFYIGKSRWNYTERGRKLKPSDEVIYADGNWEALWDEDTFKEIQKRLALNMRKAKSRDVSSAKHWLSGLLICSSCGGTLAYGGANSARGFQCWKYSKGFCSESHYISTGSIEKMVMEYLEYVLHSPTLSYTIISAASSDAESKLSDCERQLQKIDAKEKRIKAAYLNEIDTLEEYKANKTALEEERRTIEKEIEELTLSNVKYTKEDMDKKMKQNIQNLLLVLKDESADYVQKGNMMRNVVDHIVFDRKNTSLDVFLKLVI

SEQ ID NO: 6237 - protein, 493 aa, Unknown
  Description of Unknown: Integrase B6238 sequence
  PTHR30461:SF3,IPR036162,PS51737,IPR011109,PTHR30461, PS00397,PF00239,G3DSA:1.10.10.2600,IPR006119,SSF53041, cd00338,SM00857,IPR025827,IPR038109,PS51736, IPR006118,PF13408,G3DSA:3.40.50.1390,PF07508,Coil
MSVKYAYGYIRVSTHDQEEISPDSQEHLLRDYAAKNNIVILKIFTDLGISGRKANKRPGFQEMIGLAKGDDHPVDQILVWKFSRFARNQEESIVYKSLLKKQHNVDVVSVSEPLSDNPFGSLIERIIEWMDEYYSIRLSGEVLRGMKENAARGAFQGAAPFGYKTVDKTLVIDPEKADIVRHVFNMYANEKLSVFDIARYLNNLGCRTIRGNLFERRTVEYMLKNPTYCGMIHWNKTENATHSIKNKDEWIVSQGQHPAIISQELFDATQERLKATRRPSRRRERPSSTYKHWLSGLMKCPACGKTLSACTQKRVNGEKYAYFSCYGYAHGQCDKAHGVSSLVLEPEVLAGIKEVLDTGNISYELHDYQPTEAVDERSIIRDRLNNLTSKEERIKASYREGIDTLEEYKSNKAILQKERDNLEEQLKELEGQNPEPDQDPSGDMLLKVRSVYDILISDSYTYVQKNEALKQIVDKIIYDKESDSLKIYFFLCR

SEQ ID NO: 6238 - protein, 493 aa, Unknown
  Description of Unknown: Integrase B6239 sequence
  PTHR30461:SF3,IPR036162,PS51737,IPR011109,PTHR30461, PF00239,G3DSA:1.10.10.2600,IPR006119,SSF53041,cd00338, SM00857,IPR025827,IPR038109,mobidb-lite,PS51736, PF13408,G3DSA:3.40.50.1390,PF07508,Coil
MNSCVIYARFSSDKQREESIEGQVRECRAFADANNLEVIHIYVDRAKSARTDQRPDFLKMIKQSAKGLFQYVIVYTLDRFSRSRYDSVTYKAKLKKNGVKVLSAKENIRDDPSGIILESVLEGYAEYYSAELAQKVKRGMTDSILEHKWPGTEVPFGYHKKEDGTLDVDPIAAPVVKKIFEAVLQGHTRAEITRRVAMKHYKTESGRSISYAMINRLIKNELYTGRYHWGQLDVAGFCPVLVKKETFEAVQRAIAPHPKTRRNAAAYVLTGKIYCGKCKEAMAGVCGTSKSGEKYRYYRCASKSNSIRRNRIPCSGHNVPVAWLDDIVFKTTLDILNTPEARTEIARQAIEAQRRDKSTDSEEKHLKKQKADVEKRLQNSVKAIEAGVVSDTIAANIKKYEKEIKDIQAAIDELKLKTAVPEITETAIEFFFEQLAKKAKTEGATLGLFFDFIQRVEVFDDKVVIYYSYLPTKKTPNPVEVRCSSNYQMVTPE

SEQ ID NO: 6239 - protein, 493 aa, Unknown
  Description of Unknown: Integrase B6240 sequence
  PTHR30461:SF3,IPR036162,PS51737,IPR011109,PTHR30461, PS00397,PF00239,G3DSA:1.10.10.2600,IPR006119,SSF53041, cd00338,SM00857,IPR025827,IPR038109,PS51736, IPR006118,PF13408,G3DSA:3.40.50.1390,PF07508,Coil
MKETLSERKTGAIYIRVSTDKQEELSPDAQLRLLMDYAKNNHTDIPMEYIFQDNGISGRKANKRPAFQQMIALAKSKEHPIDTIIVWKFSRFARNQEESIVYKSLLKKNNVDVVSVSEPLIDGPFGSLIERIIEWMDEYYSIRLSGEVMRGMTQNALRGHYQGDAPIGYRSPGNKKPPEKDPKTIQIPIAMKDLLLSGSSLLQIARKLNEQGYRTKHGNLWDARGVRYVLENPFYTGISRWNYTDRGRQLKPADEVIYTKGNWEPLWDKATLEEIKKHLAMNMRKTKSRDVSAAKHWLSGLLICSSCGGTLAYSGTKNSRGFQCWKYTKGFCNKSHYIGIHPIEKMVIEYLESVLHSPAIVYTVISSASADADSKLADLEKQLQKVENKEKRIKAAYLNEIDTLEEYKANKAALLEERATIEKNIKLLTVSNADMSKEEMDKKMKQNISALLAVLQDDSADYVQKGNMMRNVVDHIVFDRGNTSLDMFLKLVI

SEQ ID NO: 6240 - protein, 493 aa, Unknown
  Description of Unknown: Integrase B6241 sequence
  PTHR30461:SF3,IPR036162,PS51737,IPR011109,PTHR30461, PS00397,PF00239,G3DSA:1.10.10.2600,IPR006119,SSF53041, cd00338,SM00857,IPR025827,IPR038109,PS51736, IPR006118,PF13408,G3DSA:3.40.50.1390,PF07508,Coil
MSVKYAYGYIRVSTHDQEEISPDSQEHLLRDYAAKNNIVILKIFTDLGISGRKANKRPGFQEMIGLAKGDDHPVDQILVWKFSRFARNQEESIVYKSLLKKQHNVDVVSVSEPLSDDPFGSLIERIIEWMDEYYSIRLSGEVYRGMKENALRGAYQARPPLGYKVVEHSKPPVIIPEEAKIVRTIFEKYTNEGMSFFDIARYLNSLGLKTSHGKPFERRSVEYIIQNPSYCGMIRWNRTENSTNRIKDKDEWIVTEGQQPAIISKELFESAQERFKATYKPVGKRPSSTYKHWLSGLLKCPDCGRTLTSTTMKRVNGEKYSYFSCYGYSKGKCKKPNGISSLVLEKEVLDSIKEVLDTKDIVYELREYQPTEQFDERKAITEQLESLTGKEERIKASYREGIDTLEEYKANKAIIQKERESLEQQLKELKKAARKSDQDPADAMLQKVRSVYDILISNNYTYVQKNEALKQIIDKIIYDRKNDSLKIYFFLYR

SEQ ID NO: 6241 - protein, 493 aa, Unknown
  Description of Unknown: Integrase B6242 sequence
  PTHR30461:SF3,cd00338,SM00857,G3DSA:1.10.10.2600,IPR036162, PF13408,IPR025827,G3DSA:3.40.50.1390,PS51737,IPR006119, IPR038109,PF07508,IPR011109,SSF53041,PTHR30461, PS51736,Coil,PF00239
MKTAVIYARYSSDKQTEQSIEGQLYDCYNYAKQHGITVVQEYIDRAMTGKNDDRPAFQQMLHESAMHKWDSVIVWKLDRFARNTIDSAVNRQILAKNGVKLLSVMESFGDDASGQMMTHIIEAINEYYSADLREKTIRGMRQSAMKAQTTGHIPLGYKVVDKKLVIDDETRIIPETVFRMYAEGERLTEIAEHLNAQGYRNRRGRPFTTNSFYNMLANEKYIGIYKYDDIVIEGGIPQMIPNEVFEAVREKLITNRKRAAKNTAKADYYLSGKLYCGHCGEPMSGLSGTGRNGVKHYYYRCNGVQKKSGCHKKLENKYLIEDEVCRAARSAFEQMDKAETAETIYQMYLQTVRNEYAPAELEKELTECTKQAENVVNAIAQTGGNQLLYDKVRELEERKEQLSSALRLSQAMTDNVPSVEQITVFIDDILATDINTTEGKKSIADIMISKVYVYDDKLTVIFKDKDGKSVDIPLSAVSDSSSADCAPSALGSQ

SEQ ID NO: 6242 - protein, 493 aa, Unknown
  Description of Unknown: Integrase B6243 sequence
  PTHR30461:SF3,IPR036162,PS51737,IPR011109,PTHR30461, PS00397,PF00239,G3DSA:1.10.10.2600,IPR006119,SSF53041, cd00338,SM00857,IPR025827,IPR038109,PS51736, IPR006118,PF13408,G3DSA:3.40.50.1390,PF07508,Coil
MKETLSERKTGAIYIRVSTDKQEELSPDAQLRLLMDYAKTNHTDIPMEYIFQDNGISGRKADKRPAFQQMIALAKSKEHPIDTIIVWKFSRFARNQEESIVYKSLLKKNNVDVVSVSEPLIDGPFGSLIERIIEWMDEYYSIRLSGEVMRGMTQNALRGHYQGDAPIGYQSPGNKKPPEKDPKTIQIPIMMKDLLLSGSSLLQIARKLNEHGYRTKHGNLWDARGVRYVLENPFYAGISRWNYTDRGRQLKPADEVIYTKGNWEPLWDKATLKEIQKHLAMNMRKAKSRDVSTAKHWLSGLLICSSCGGTLAYSGTKNSRGFQCWKYTKGFCNESHYIGIHPIEKMVIEYLESILHSPAIVYTVISSASADADSKLADLEKQLQKVENKEKRIKAAYLNEIDSLEEYKANKAALLKERAAIEKNIKLLTISNTDMSKEEMDKKMKQNISALLTVLQDVSADYVQKGNMMRNVVDHIVFDRGNTSLDMFLKLVI

SEQ ID NO: 6243 - protein, 493 aa, Unknown
  Description of Unknown: Integrase B6244 sequence
  PTHR30461:SF3,IPR036162,PS51737,IPR011109,PTHR30461, PS00397,PF00239,G3DSA:1.10.10.2600,IPR006119,SSF53041, cd00338,SM00857,IPR025827,IPR038109,PS51736, IPR006118,PF13408,G3DSA:3.40.50.1390,PF07508,Coil
MSVKYAYGYIRVSTHDQEEISPDSQEHLLRDYAAKNNIVILKIFTDLGISGRKANKRPGFQEMIGLAKGDDHPVDQILVWKFSRFARNQEESIVYKSLLKKQHNVDVVSVSEPLSDDPFGSLIERIIEWMDEYYSIRLSGEVYRGMKENALRGAYQARPPLGYKVVEHGKPPVIVPEEAKIVRTIFEKYTNEGMSFFDIARYLNSLGLKTSHGKPFERRSVEYIIQNPSYCGMIRWNRTENSTNRIKDKDEWIVTEGQQPAIISKELFESAQERFKATYKPVGKRPSSTYKHWLSGLLKCPDCGRTLTSTTMKRVNGEKYSYFSCYGYSKGKCKKPNGISSLVLEKEVLASIKEILDTKDIVYELREYQPTEQFDERKAITEQLESLTGKEERIKASYREGIDTLEEYKANKAIIQKERESLEQQLKELKKTARKSDQDPADAMLQKVRSVYDILISNNYTYVQKNEALKQIIDKIIYDRKNDSLKIYFFLYR

SEQ ID NO: 6244 - protein, 493 aa, Unknown
  Description of Unknown: Integrase B6245 sequence
  PTHR30461:SF3,IPR036162,PS51737,IPR011109,PTHR30461, PS00397,PF00239,G3DSA:1.10.10.2600,IPR006119,SSF53041, cd00338,SM00857,IPR025827,IPR038109,PS51736, IPR006118,PF13408,G3DSA:3.40.50.1390,PF07508,Coil
MSVKYAYGYIRVSTHDQEEISPDSQEHLLRDYAAKNNIVILKIFTDLGISGRKANKRPGFQEMIGLAKGDDHPVDQILVWKFSRFARNQEESIVYKSLLKKQHNVDVVSVSEPLSDDPFGSLIERIIEWMDEYYSIRLSGEVYRGMKENALRGAYQARPPLGYKVVEHGKPPVIVPEEAKIVRTIFEKYTNEGMSFFDIAKYLNSLGLKTSHGKSFERRSVEYIVQNPSYCGMIRWNRTENSTNRIKDKDEWIVAEGQQPAIISKELFESAQERFKATYKPVGKRPSSTYKHWLSGLLKCPDCGRTLTSTTMKRVNGEKYSYFSCYGYSKGKCKKPNGISSLVLEKEVLASIKEVLDTKDIVYELREYQPTEQFDERKAITEQLESLTGKEERIKTSYREGIDTLEEYKANKAIIQKERESLEQQLKELKKAAHKSDQDPADAMLQKVRSVYDILISNNYTYVQKNEALKQIIDKIVYDRKNDSLKIYFFLYR

SEQ ID NO: 6245 - protein, 493 aa, Unknown
  Description of Unknown: Integrase B6246 sequence
  PTHR30461:SF3,IPR036162,PS51737,IPR011109,PTHR30461, PS00397,PF00239,G3DSA:1.10.10.2600,IPR006119,SSF53041, cd00338,SM00857,IPR025827,IPR038109,PS51736, IPR006118,PF13408,G3DSA:3.40.50.1390,PF07508,Coil
MSVKYAYGYIRVSTHDQEEISPDSQEHLLRDYAAKNNIVILKIFTDLGISGRKANKRPGFQEMIGLAKGDDHPVDQILVWKFSRFARNQEESIVYKSLLKKQHNVDVVSVSEPLSDNPFGSLIERIIEWMDEYYSIRLSGEVLRGMKENAARGAFQGDAPFGYKTVDKTLVIDPEKADIVRHVFNMYVNEKLSVFDIARYLNNLGFRTIRGNLFERRTVEYMLKNPTYCGMIHWNKTENATHSIKNKDEWIVSQGQHPSIISQELFDATQERLKATRRPSRRRERPSSTYKHWLSGLMKCPACGKTLSACTQKRVNGEKYAYFSCYGYAHGQCDKAHGVSSLVLEPEVLASIKEVLDTGNISYELHDYQPTEVVDERSIIRDRLNSLASKEERIKASYREGIDTLEEYKSNKAILQKERDNLEEQLKELEGQNPEPDQDPTGDMLLKVRSVYDILISDSYTYIQKNEALKQIVDKIIYDKESDSLKIYFFLCR

SEQ ID NO: 6246 - protein, 493 aa, Unknown
  Description of Unknown: Integrase B6247 sequence
  PTHR30461:SF3,IPR036162,PS51737,IPR011109,PTHR30461, PS00397,PF00239,G3DSA:1.10.10.2600,IPR006119,SSF53041, cd00338,SM00857,IPR025827,IPR038109,PS51736, IPR006118,PF13408,G3DSA:3.40.50.1390,PF07508,Coil
MSVKYAYGYIRVSTHDQEEISPDSQEHLLRDYAAKNNIVILKIFTDLGISGRKANKRPGFQEMIGLAKGDDHPVDQILVWKFSRFARNQEESIVYKSLLKKQHNVDVVSVSEPLSDDPFGSLIERIIEWMDEYYSIRLSGEVYRGMKENALRGAYQARPPLGYKVVEHGKPPVIVPEEAKIVRTIFEKYTNEGMSFFDIARYLNSLGLKTSHGKPFERRSVEYIVQNPSYCGMIRWNRTENSTNRIKDKDEWIVTEGQQPAIISKELFESAQKRFKATYKPVGKRPSSTYKHWLSGLLKCPDCGRTLTSTTMKRVNGEKYSYFSCYGYSKGKCKKPNGISSLVLEKEILASIKEVLDTKDIVYELREYQPTEQFDERKAITEQLESLTGKEERIKASYREGIDTLEEYKANKAIIQKERESLEQQLKELKKAAHKSDQDPADAMLQKVRSVYDILISNNYTYVQKNEALKQIIDKIIYDRKNDSLKIYFFLYR

SEQ ID NO: 6247 - protein, 493 aa, Unknown
  Description of Unknown: Integrase B6248 sequence
  PTHR30461:SF3,IPR036162,PS51737,IPR011109,PTHR30461, PS00397,PF00239,G3DSA:1.10.10.2600,IPR006119,SSF53041, SM00857,IPR025827,IPR038109,PS51736,cd03768, IPR006118,PF13408,G3DSA:3.40.50.1390,PF07508,Coil
MRVICYVRVSTREQAEKGYSVGEQQERLRAYCMAKDWIVEDVITDPGFSGAKLERPGIQRVIQLVQEKKCEAVLVWKLDRLSRSQKDTLYLIEDVFLKNGCAFVSMNENFDTSTAFGRAMIGILSVFAQLEREQIRERMAVGRVGRAKAGLFHGGGFAPIGYDYKTIAEGGEGLVVNEYEAMQVREVFSLYLQGWPVNRIRKYMTARYTTKSGDWGNDTTIRDVLKNPLYIGKINWAKKIYDGKHEPIIDEETFNAAAARLASSQWKRDCSDGLERNSPFHSTHLLGGILWCGRCGARYFASGNYSGKGENRKYWPYYVCYSRAKSAKRMIRDPNCKNDRWPVAKLDKIILDQVRQLIFDPEALERAAGGNQEAPPSERRALLNARRAEAKGQIDRLLDLCQMGTLPAAAVADRLKSLQDEVEGIDTALRELAEDDPAERLEAARGTLVGAAEILDNGSLDEKRELVHSLIHRIDLDGENIDIHWSFAPGKSE

SEQ ID NO: 6248 - protein, 493 aa, Unknown
  Description of Unknown: Integrase B6249 sequence
  PTHR30461:SF3,IPR036162,PS51737,IPR011109,PTHR30461, PS00397,PF00239,G3DSA:1.10.10.2600,IPR006119,SSF53041, cd00338,SM00857,IPR025827,IPR038109,PS51736, IPR006118,PF13408,G3DSA:3.40.50.1390,PF07508,Coil
MSVKYAYGYIRVSTHDQEEISPDSQEHLLRDYAAKNNIVILKIFTDLGISGRKANKRPGFQEMIGLAKGDDHPVDLILVWKFSRFARNQEESIVYKSLLKKQHNVDVVSVSEPLSDDPFGSLIERIIEWMDEYYSIRLSGEVHRGMKENALRGAYQARPPLGYKVVEHGKPPVIVPEEAKIVRTIFEKYTNEGMSFFDIARYLNSLGLKTSHEKPFERRSVEYIIQNPSYCGMIRWNRTENSTNRIKDKDEWIVTEGQQPAIISKELFESAQKRFKATYKPVGKRPSSTYKHWLSGLLKCPDCGRTLTSTTMKRVNGEKYSYFSCYGYSKGKCKKPNGISSLVLEKEVLASIKEILDTKDIVYELREYQPTEQFDERKAITEQLESLTGKEERIKASYREGIDTLEEYKANKAIIQKERESLEQQLKDLKKAAHKSDQDPADAMLQKVRSVYDILISNNYTYVQKNEALKQIIDKIIYDRKNDSLKIYFFLYR

SEQ ID NO: 6249 - protein, 493 aa, Unknown
  Description of Unknown: Integrase B6250 sequence
  PTHR30461:SF3,IPR036162,PS51737,IPR011109,PTHR30461, PS00397,PF00239,G3DSA:1.10.10.2600,IPR006119,SSF53041, cd00338,SM00857,IPR025827,IPR038109,PS51736, IPR006118,PF13408,G3DSA:3.40.50.1390,PF07508,Coil
MSVKYAYGYIRVSTHDQEEISPDSQEHLLRDYAAKNNIVILKIFTDLGISGRKANKRPGFQEMIGLAKGDGHPVDLILVWKFSRFARNQEESIVYKSLLKKQHNVDVVSVSEPLSDDPFGSLIERIIEWMDEYYSIRLSGEVYRGMKENALRGAYQARPPLGYKVVEHGKPPMIVPEEAKIVRTIFEKYTNEGMSFFDIARYLNSLGLKTSHGKPFERRSVEYIIQNPSYCGMIRWNRTENGTNRIKDKDEWIVTEGQQPAIISKELFESAQKRFKATYKPVGKRPSSTYKHWLSGLLKCPDCGRTLTSTTMKRVNGEKYSYFSCYGYSKGKCKKPNGISSLVLEKEVLASIKEILDTKDIVYELREYQPTEQFDERKAITEQLESLTGKEERIKASYREGIDTLEEYKANKAIIQKERKSLEQQLKELKKAARKSDQDPADAMLQKVRSVYDILISNNYTYIQKNEALKQIIDKIIYDRKNDSLKIYFFLYR

SEQ ID NO: 6250 - protein, 493 aa, Unknown
  Description of Unknown: Integrase B6251 sequence
  PTHR30461:SF3,cd00338,SM00857,G3DSA:1.10.10.2600,IPR036162, PF13408,IPR025827,G3DSA:3.40.50.1390,PS51737,IPR006119, IPR038109,PF07508,SSF53041,IPR011109,PTHR30461, PS51736,Coil,PF00239
MQTAVIYARYSSDKQTEQSIEGQLYDCYNYAKQHGITVVQEYIDRAMTGKNDDRPAFQQMLHESAMHKWDSVIVWKLDRFARNTIDSAVNRQILAKNGVKLLSVMESFGDDASGQMMTHIIEAINEYYSADLREKTIRGMRQSAMKAQTTGHIPLGYKVVDKKLVIDDETRIIPETVFRMYAEGERLTDIAEHLNAQGYRNRRGRPFTTNSFYNMLSNEKYIGIYKYDDIVIEGGIPQMIPNDVFEAVREKLITNRKRAAKNTAKADYYLSGKLYCGHCGEPMSGLSGTGRNGVKHYYYRCNGVQKKSGCHKKLENKYLIEDEVCRAARSAFEQMDKAETAETIYQMYLQTVRNEYAPAELEKELTECTKQAENVVNAIAQTGGNQLLYDKVRELEERKEQLSSALRLSQAMTDNVPSVEQITVFIDDILATDINTTEGKKSIADIMISKVYVYDDKLTVIFKDKDGKSVDIPLSAVSDTSSADCAPSALGSQ

SEQ ID NO: 6251 - protein, 493 aa, Unknown
  Description of Unknown: Integrase B6252 sequence
  PTHR30461:SF3,IPR036162,PS51737,IPR011109,PTHR30461, PS00397,PF00239,G3DSA:1.10.10.2600,IPR006119,SSF53041, cd00338,SM00857,IPR025827,IPR038109,PS51736, IPR006118,PF13408,G3DSA:3.40.50.1390,PF07508,Coil
MSVKYAYGYIRVSTHDQEEISPDSQEHLLRDYAAKNNIVILKIFTDLGISGRKANKRPGFQEMIGLAKGDDHPADLILVWKFSRFARNQEESIVYKSLLKKQHNVDVVSVSEPLSDNPFGSLIERIIEWMDEYYSIRLSGEVLRGMKENAARGAFQGAAPFGYKTIDKTLVIDPKKADIVRHVFNMYVNEKLSVFDIARYLNNLGFRTIRGNLFERRTVEYMLKNPTYCGMIHWNKTENATHSIKNKDEWIVSQGQHPAIISQELFDATQERLKATRRPSRRRERPSSTYKHWLSGLMKCPACGKTLSACTQKRVNGEKYAYFSCYGYAHGQCDKAHGVSSLVLEPEVLASIKEILDTGNISYELHDYQPTEAVDERSIIRDRLNSLTSKEERIKASYREGIDTLEEYKSNKAILQKERDNLEEQLKELEGQNPEPDQDPTGDMLLKVRSVYDILVSDSYTYVQKNEALKQIVDKIIYDKESDSLKIYFFLCR

SEQ ID NO: 6252 - protein, 493 aa, Unknown
  Description of Unknown: Integrase B6253 sequence
  PTHR30461:SF3,IPR036162,PS51737,IPR011109,PTHR30461, PS00397,PF00239,G3DSA:1.10.10.2600,IPR006119,SSF53041, cd00338,SM00857,IPR025827,IPR038109,PS51736, IPR006118,PF13408,G3DSA:3.40.50.1390,PF07508,Coil
MSVKYAYGYIRVSTHDQEEISPDSQEHLLRDYATKNDIVILKIFTDLGISGRKANKRPGFQEMIGLAKGDDHPVDLILVWKFSRFARNQEESIVYKSLLKKQHNVDVVSVSEPLSDDPFGSLIERIIEWMDEYYSIRLSGEVYRGMKENALRGAYQARPPLGYKVVEHGKPPVIVPEEAKIVRTIFEKYTNEGMSFFDIARYLNSLGFKTSHGKPFERRSIEYIIQNPSYCGMIRWNRTENSTNRIKDKDEWIVTEGQQPAIISKELFESAQERFKATYKPVGKRPSSTYKHWLSGLLKCPDCGRTLTSTTMKRVNGEKYSYFSCYGYSKGKCKKPNGISSLVLEKEVLASIKEILDTKDIFYELREYQPTEQFDERKAITEQLESLTGKEERIKASYREGIDTLEEYKANKAIIQKERESLEQQLKELKKAARKSDQDPADAMLQKVRSVYDILISNNYTYIQKNEALKQIIDKIIYDRKNDSLKIYFFLYR

SEQ ID NO: 6253 - protein, 493 aa, Unknown
  Description of Unknown: Integrase B6254 sequence
  PTHR30461:SF3,IPR036162,PS51737,IPR011109,PTHR30461, PS00397,PF00239,G3DSA:1.10.10.2600,IPR006119,SSF53041, cd00338,SM00857,IPR025827,IPR038109,PS51736, IPR006118,PF13408,G3DSA:3.40.50.1390,PF07508,Coil
MSVKYAYGYIRVSTHDQEEISPDSQEHLLRDYATKNNIVILKIFTDLGISGRKANKRPSFQEMIGLAKGDDHPVDQILVWKFSRFARNQEESIVYKSLLKKQHNVDVVSVSEPLSDNPFGSLIERIIEWMDEYYSIRLSGEVLRGMKENAARGAFQGAAPFGYKTVDKTLVIDPEKADIVRHVFNMYANEKLSVFDIARYLNNLGLRTIRGNLFERRTVEYMLKNPTYCGMIHWNKTENATHSIKNKDEWIVSQGQHPAIISQELFDTTQERLKATRRPSRRRERPSSTYKHWLSGLMKCPACGKTLSACTQKRVNGEKYAYFSCYGYAHGQCDKAHGVSSLVLEPEVLASIKEILDTGNISYELHDYQPTEAVDERSIIRDRLNSLTSKEERIKASYREGIDTLEEYKSNKAILQKERDNLEEQLKELEGQNPEPDQDPTGDMLLKVRSVYDILISDSYTYVQKNEALKQIVDKIIYDKESDSLKIYFFLCR

SEQ ID NO: 6254 - protein, 493 aa, Unknown
  Description of Unknown: Integrase B6255 sequence
  PTHR30461:SF3,IPR036162,PS51737,IPR011109,PTHR30461, PS00397,PF00239,G3DSA:1.10.10.2600,IPR006119,SSF53041, cd00338,SM00857,IPR025827,IPR038109,PS51736, mobidb-lite,IPR006118,PF13408,G3DSA:3.40.50.1390,PF07508,Coil
MKEKVSERKTGAIYIRVSTDKQEELSPDAQLRLLMDYAKTNHTDIPMEYIFQDNGISGRKANKRPAFQQMIALAKSKEHPIDTIIVWKFSRFARNQEESIVYKSLLKKNNVDVVSVSEPLIDGPFGSLIERIIEWMDEYYSIRLSGEVMRGMTQNALRGHYQGDAPIGYQSPGNKKPPEKDPKTVQIPIMMKDLLLSGSSLLQIARKLNEQGYRTKHGNLWDARGVRYVLENPFYAGISRWNYTDRGRQLKPADEVIYTKGNWEPLWDKATLEEIKKHLAMNMRKAKSRDVSTAKHWLSGLLICSSCGGTLAYSGTKNSRGFQCWKYTKGFCNESHYIGIRPIEKMVIEYLESILHSPAIVYTVISSASADADSKLTDLEKQLQKVENKEKRIKAAYLNEIDSLEEYKANKAALLKERAAIEKNIKLLTISNTDMSKEEMDKKMKQNISALLTVLQDDSADYVQKGNMMRNVVDHIVFDRGNTSLDMFLKLVI

SEQ ID NO: 6255 - protein, 493 aa, Unknown
  Description of Unknown: Integrase B6256 sequence
  PTHR30461:SF3,IPR036162,PS51737,IPR011109,PTHR30461, PS00397,PF00239,G3DSA:1.10.10.2600,IPR006119,SSF53041, cd00338,SM00857,IPR025827,IPR038109,PS51736, mobidb-lite,IPR006118,PF13408,G3DSA:3.40.50.1390,PF07508,Coil
MKETLSERKTGAIYIRVSTDKQEELSPDAQLRLLMDYAKTNHTDIPMEYIFQDNGISGRKANKRPAFQQMIALAKSKEHPIDTIIVWKFSRFARNQEESIVYKSLLKKNNVDVVSVSEPLIDGPFGSLIERIIEWMDEYYSIRLSGEVMRGMTQNALRGHYQGDAPIGYQSPGNKKPPEKDPKTVQIPIMMKDLLLSGSSLLQIARKLNEQGYRTKHGNLWDARGVRYVLENPFYAGISRWNYTDRGRQLKPADEVIYTKGNWEPLWDKATLEEIKKHLAMNMRKTKSRDVSAAKHWLSGLLICSSCGGTLAYSGTKNSRGFQCWKYTKGFCNESHYIGIRPIEKMVIEYLESILHSPAIVYTVISSASADADSKLADLEKQLQKVENKEKRIKAAYLNEIDSLEEYKANKAALLKERVAIEKNIKLLTISNIDMSKEEMDKKMKQNISALLTVLRDDSADYVQKGNMMRNVVDHIVFDRGNTSLDMFLKLVI

SEQ ID NO: 6256 - protein, 493 aa, Unknown
  Description of Unknown: Integrase B6257 sequence
  PTHR30461:SF3,IPR036162,PS51737,IPR011109,PTHR30461, PS00397,PF00239,G3DSA:1.10.10.2600,IPR006119,SSF53041, cd00338,SM00857,IPR025827,IPR038109,PS51736, IPR006118,PF13408,G3DSA:3.40.50.1390,PF07508,Coil
MSVKYAYGYIRVSTHDQEEISPDSQEHLLRDYAAKNNIVILKIFTDLGISGRKANKRPGFQEMIGLAKGDDHPVDLILVWKFSRFARNQEESIVYKSLLKKQHNVDVVSVSEPLSDDPFGSLIERIIEWMDEYYSIRLSGEVYRGMKENALRGAYQARPPLGYKVVEHGKPPVIVPEEAKIVRTIFEKYTNEGMSFFDIARYLNSLGFKTSHGKPFERRSIEYIIQNPSYCGMIRWNRTENSTNRIKDKDEWIVTEGQQPAIISKELFESAQERFKATYKPVGKRPSSTYKHWLSGLLKCPDCGRTLTSTTMKRVNGEKYSYFSCYGYSKGKCKKPNGISSLVLEKEVLASIKEVLDTKDIVYELREYQPTEQFDERKAITEQLESLTGKEERIKASYREGIDTLEEYKTNKAIIQKERESLEQQLKELKKAAHKSDRDPADAMLQKVRSVYDILISNNYTYVQKNEALKQIIDKIIYDRKNDSLKIYFFLYR

SEQ ID NO: 6257 - protein, 493 aa, Unknown
  Description of Unknown: Integrase B6258 sequence
  PTHR30461:SF3,IPR036162,PS51737,IPR011109,PTHR30461, PS00397,PF00239,G3DSA:1.10.10.2600,IPR006119,SSF53041, cd00338,SM00857,IPR025827,IPR038109,PS51736, IPR006118,PF13408,G3DSA:3.40.50.1390,PF07508,Coil
MSVKYAYGYIRVSTHDQEEISPDSQEHLLRDYAAKNNIVILKIFTDLGISGRKANKRPGFQEMIGLAKGDDHPIDQILVWKFSRFARNQEESIVYKSLLKKQHNVDVVSVSEPLSDDPFGSLIERIIEWMDEYYSIRLSGEVYRGMKENAIRGAYQARPPLGYKVVEHGKPPVIVPKEAKIVQTIFEKYVNESMGFFDIARYLNDLGLKTSHGKPFERRSIEYIIQNPSYCGMIRWNRTENSTNRIKDKDEWIVTEGQQPAIISKELFESAQERFKATYKPVGKRPSSTYKHWLSGLLKCPDCGRTLTSTTMKRVNGEKYSYFSCYGYSKGKCKKPNGISSLVLEKEVLASIKEILDTKDIVYELREYQPTEQFDERKAITEQLESLTGKEERIKASYREGIDTLEEYKANKAIIQKERESLEQQLKELKKAARKSDQDPADATLQKVRSVYDILISNNYTYIQKNEALKQIIDKIIYDRKNDSLKIYFFLYR

SEQ ID NO: 6258 - protein, 493 aa, Unknown
  Description of Unknown: Integrase B6259 sequence
  IPR036162,PS51737,IPR011109,PTHR30461,PS00397, PF00239,G3DSA:1.10.10.2600,IPR006119,SSF53041,cd00338, SM00857,IPR025827,IPR038109,PS51736,IPR006118, PF13408,G3DSA:3.40.50.1390,PF07508,Coil
MKEKVSERKTGAIYIRVSTDKQEELSPDAQLRLLMDYAKKNSIDVPEEYIYQDNGISGRKANKRPAFQNMIALAKSKEHPIDTIIVWKFSRFARNQEESIVYKSLLSKNSVDVVSVSEPLIDGPFGSLIERIIEWMDEYYSIRLSGEVMRGMTQNAMRGHYQSDAPIGYISPGDKKPPVINPDTVQIPLMIKDMFLSGSTQLQIARKLNDMGYRTKRGNLWDARGVRYVLENPFYIGKSRWNYTERGRKLKPSDEVIYADGNWEALWDEDTFKEIQKRLALNMRKAKSRDVSSAKHWLSGLLICSSCGGTLAYGGANSARGFQCWKYSKGFCSESHYISTGSIEKMVMEYLEYVLHSPTLSYTIISAASSDAESKLSDCERQLQKIDAKEKRIKAAYLNEIDTLEEYKANKTALEEERRTIEKEIEELTLSNVKYTKEDMDKKMKQNIQNLLLVLKDESADYVQKGNMMRNVVDHIVFDRKNTSLDVFLKLVI

SEQ ID NO: 6259 - protein, 493 aa, Unknown
  Description of Unknown: Integrase B6260 sequence
  PTHR30461:SF3,IPR036162,PS51737,IPR011109,PTHR30461, PS00397,PF00239,G3DSA:1.10.10.2600,IPR006119,SSF53041, cd00338,SM00857,IPR025827,IPR038109,PS51736, IPR006118,PF13408,G3DSA:3.40.50.1390,PF07508,Coil
MRVKYAYGYIRVSTHDQEEISPDSQEHLLRDYAAKNNIVILKIFTDLGISGRKANKRPGFQEMIGLAKGDDHPVDLILVWKFSRFARNQEESIVYKSLLKKQHNVDVVSVSEPLSDDPFGSLIERIIEWMDEYYSIRLSDEVYRGMKENALRGAYQARPPLGYKVVEHGKPPVIVPEEAKIVRTIFEKYTNEGMSFFDIARYLNSLGLKTSHGKPFERRSVEYIIQNPSYCGMIRWNRTENSTNRIKDKDEWIVTEGQQPAIISKELFESAQERFKATYKPVGKRPSSTYKHWLSGLLKCPDCGRTLTSTTMKRVNGEKYSYFSCYGYSKGKCKKPNGISSLVLEKEVLASIKEILDTKDIVYELREYQPTEQFDERKAITEQLESLNGKEERIKASYREGIDTLEEYKANKAIIQKERESLEQQLKELKKAAHKSDQDPADAMLQKVRSVYDILISNNYTYVQKNEALKQIIDKIIYDRKNDSLKIYFFLYR

SEQ ID NO: 6260 - protein, 493 aa, Unknown
  Description of Unknown: Integrase B6261 sequence
  PTHR30461:SF3,IPR036162,PS51737,IPR011109,PTHR30461, PS00397,PF00239,G3DSA:1.10.10.2600,IPR006119,SSF53041, cd00338,SM00857,IPR025827,IPR038109,PS51736, mobidb-lite,IPR006118,PF13408,G3DSA:3.40.50.1390,PF07508,Coil
MKEKVSERKTGAIYIRVSTDKQEELSPDAQLRLLMDYAKTNHTDIPMEYIFQDNGISGRKANKRPAFQQMIALAKSKEHPIDTIIVWKFSRFARNQEESIVYKSLLKKNNVDVVSVSEPLIDGPFGSLIERIIEWMDEYYSIRLSGEVMRGMTQNALRGHYQGDAPIGYQSPGNKKPPEKDPKTVQIPIMMKDLLLSGSSLLQIARKLNEQGYRTKHGNLWDARGVRYVLENPFYAGISRWNYTDRGRQLKPADEVIYTKGNWEPLWDKATLEEIKKHLAMNMRKTKSRDVSAAKHWLSGLLICSSCGGTLAYSGTKNSRGFQCWKYTKGFCNESHYIGIRPIEKMVIEYLENILHSPAIVYTVISSASADTDSKLADLEKQLQKVENKEKRIKAAYLNEIDSLEEYKANKAALLKERAAIEKNIKLLTISNTDMSKEEMDKKMKQNISALLTVLQNDSADYVQKGNMMRNVVDHIVFDRGNTSLDMFLKLVI

SEQ ID NO: 6261 - protein, 493 aa, Unknown
  Description of Unknown: Integrase B6262 sequence
  PTHR30461:SF3,IPR036162,PS51737,IPR011109,PTHR30461, PS00397,PF00239,G3DSA:1.10.10.2600,IPR006119,SSF53041, cd00338,SM00857,IPR025827,IPR038109,PS51736, IPR006118,PF13408,G3DSA:3.40.50.1390,PF07508,Coil
MSVKYAYGYIRVSTHDQEEISPDSQEHLLRDYAAKNNIVILKIFTDLGISGRKANKRPGFQEMIGLAKGDDHPVDQILVWKFSRFARNQEESIVYKSLLKKQHNVDVVSVSEPLSDNPFGSLIERIIEWMDEYYSIRLSGEVYRGMKENALRGAYQARPPLGYKVVEHGKPPVIVPEEAKIVRTIFEKYTNEGMSFFDIARYLNSLGLKTSHGKPFERRSVEYIIQNPSYCGMIRWNRTENSTNRIKDKDEWIVTEGQQPAIISKELFELAQERFKATYKPVGKRPSSTYKHWLSGLLKCPDCGRTLTSTTMKRVNGEKYSYFSCYGYSKGKCKKPNGISSLVLEKEVLASIKEILDTKDIVYELREYQPTEQFDERKAITEQLESLTGKEERIKASYREGIDTLEEYKANKAIIQKERESLEQQLQELKKAAHKSDRDPADAMLQKVRSVYDILISNNYTYIQKNEALKQIIDKIIYDRKNNSLKIYFFLYR

SEQ ID NO: 6262 - protein, 493 aa, Unknown
  Description of Unknown: Integrase B6263 sequence
  PTHR30461:SF3,cd00338,SM00857,IPR036162,PF13408, PS51737,G3DSA:3.40.50.1390,IPR025827,IPR006119,PF07508, IPR011109,SSF53041,PTHR30461,PS51736,Coil, PF00239
MDNRIDAIYGRQSIDKKDSISIESQFEFCRYELKGGEGREYKDKGYSGKNIERPDFQRLLQDIKLGLIKRVIVYKLDRISRSIVDFAKLMELFKQYNVEFVSCTEKFDTSTPMGRAMLNICIVFAQLERESIQMRVQDAFYSRCTKGYYMRGRTPYGFDTEPIVMDGIKTKKLVENAEMDFAELMYQMYAEPSSSYGDITRYFVKNSIDVYGKALQRAFISKLLRNPVYVQADMDIYEYFKAQGVKIESPPEMFTGDNSCYLYQGREGEEQILVIAPHQGRIPSSLWLTVQRKLSQNTSFQNGRKCHNTWLAGKIKCGRCGYALVGLRAQNGVTYLRCKQRADNGSCEGAGTLTAQSMESFVYGEMVEKMRKYHTLKGGKEPGYNPKLTAARVALAKTESEIEKLLDTLSGANPLLLQYANNRIEELDAERQKQLKLVADLTANSVSDTQIDCITNYLNDWESVSFDDKRKVVDILISHIDATSESVTIHWKI

SEQ ID NO: 6263 - protein, 493 aa, Unknown
  Description of Unknown: Integrase B6264 sequence
  PTHR30461:SF3,IPR036162,PS51737,IPR011109,PTHR30461, PS00397,PF00239,G3DSA:1.10.10.2600,IPR006119,SSF53041, cd00338,SM00857,IPR025827,IPR038109,PS51736, IPR006118,PF13408,G3DSA:3.40.50.1390,PF07508,Coil
MSVKYAYGYIRVSTHDQEEISPDSQEHLLRDYAAKNNIVILKIFTDLGISGRKANKRPGFQEMIGLAKGDDHPVDQILVWKFSRFARNQEESIVYKSLLKKQHNVDVVSVSEPLSDDPFGSLIERIIEWMDEYYSIRLSGEVYRGMKENALRGAYQARPPLGYKVVEHGKPPVIVPEEAKIVRTIFEKYTNESMSFFDIARYLNSLGLKTSHGKSFERRSVEYIIQNPSYCGMIRWNRTENSTNRIKDKDEWIVTEGQQPAIISKELFESAQKRFKATYKPVGKRPSSTYKHWLSGLLKCPDCGRTLTSTTMKRVNGEKYSYFSCYGYSKGKCKKPNGISSLVLEKEVLASIKEILDTKDIVYELREYQPTEQFDERKAITEQLESLTGKDERIKASYREGIDTLEEYKANKAIIQKERESLEQQLKELKKVARKSDQDPADAMLQKVRSVYDILISNNYTYVQKNEALKQIIDKIIYDRKNDSLKIYFFLYR

SEQ ID NO: 6264 - protein, 493 aa, Unknown
  Description of Unknown: Integrase B6265 sequence
  cd00338,SM00857,G3DSA:1.10.10.2600,IPR036162,PF13408, PS51737,IPR025827,G3DSA:3.40.50.1390,IPR006119,IPR038109, PF07508,IPR011109,SSF53041,PTHR30461,PS51736, Coil,PF00239
MTAVIYARYSSDNQREESIEGQIRECTDYAEKNGITVIKHYIDRAFSAKTDNRPEFQQMIKDSGKKLFDVVLVWKCDRFARNRFDSANYKMILKKNGVHLISVMEPIAEGSQGILVETLLEGMAEYYSAELSEKVIRGQTENALKGKCTGGTGTIGYKIDDDKFYHLDPLTAPLVLEAFQRYDNGDKMVEIVNFLNDKGVRNMLGGKMTHSSVNTMLKNRRYIGELSFRDIVVPEAIPVIVPKDLFDRVQKRLDKNKRAPACGKADEEYLLTTKLFCGKCGALMFGESGTSATGRTYYYYKCANVKRRKGCNKKTVQKDWLEDMVVRETMKLIQDDAVIDKIVQLVMDVQNQENTTIPLLEKQLREVNKKLDNLMKAIEDGLYTRTTKERLEALESQKDELTVKIADEKLKKPSFNEDFIRFWLMKFRKFDISQKKQRKALIEIFVNAIFLYDDRMLLTFNYKDGTQTVRLEDTLTADSAEEKSSDLSSSAGP

SEQ ID NO: 6265 - protein, 493 aa, Unknown
  Description of Unknown: Integrase B6266 sequence
  PTHR30461:SF3,IPR036162,PS51737,IPR011109,PTHR30461, PS00397,PF00239,G3DSA:1.10.10.2600,IPR006119,SSF53041, cd00338,SM00857,IPR025827,IPR038109,PS51736, IPR006118,PF13408,G3DSA:3.40.50.1390,PF07508,Coil
MSVKYAYGYIRVSTHDQEEISPDSQEHLLRDYAAKNNIVILKIFMDLGISGRKANKRPGFQEMIGLAKGDDHPVDQILVWKFSRFARNQEESIVYKSLLKKQHNVDVVSVSEPLSDDPFGSLIERIIEWMDEYYSIRLSGEVYRGMKENAIRGAYQARPPLGYKVVEHGKPPVIVPKEAKIVRTIFEKYTNEGMSFFDIARYLNSLGLKTSHGKPFERRSVEYIIQNPSYCGMIRWNRTENSTNRIKDKDEWIVTEGQQPAIISKELFESAQERFKATYKPVGKRPSSTYKHWLSGLLKCPDCGRTLTSTTMKRVNGEKYSYFSCYGYSKGKCKKPNGISSLVLEKEVLASIKEILDTKDIVYELREYQPTGQFDERKTITEQLESLTGKEERIKASYREGIDTLEEYKANKAIIQKERESLEQQLKELKKAARKSDQDPADAMLQKVRSVYDILISNNYTYIQKNEALKQIIDKIIYDRKNDSLKIYFFLYR

SEQ ID NO: 6266 - protein, 493 aa, Unknown
  Description of Unknown: Integrase B6267 sequence
  PTHR30461:SF3,IPR036162,PS51737,IPR011109,PTHR30461, PS00397,PF00239,G3DSA:1.10.10.2600,IPR006119,SSF53041, cd00338,SM00857,IPR025827,IPR038109,PS51736, IPR006118,PF13408,G3DSA:3.40.50.1390,PF07508,Coil
MSVKYAYGYIRVSTHDQEEISPDSQEHLLRDYAAKNNIVILKIFTDLGISGRKANKRPGFQEMIGLAKGDDHPVDQILVWKFSRFARNQEESIVYKSLLKKQHNVDVVSVSEPLSDNPFGSLIERIIEWMDEYYSIRLSGEVHRGMKENALRGAYQARPPLGYKVVEHGKPPVIVPEEAKIVRTIFEKYTNEGMSFFDIARYLNSLGLKTSHGKPFERRSVEYIIQNPSYCGMIRWNRTENSTNRIKDKDEWIVTEGQQPAIISKELFESAQERFKATYKQVGKRPSSTYKHWLSGLLKCPDCGRTLTSATMKRVNGEKYSYFSCYGYSKGKCKKPNGISSLVLEKEVLTSIKEILDTKDIVYELREYQPTEQFDERKAITEQLESLTGKEERIKASYREGIDTLEEYKANKAIIQKERESLEQQLKELKKAAHKSDQDPADAMLQKVRSVYDILISNNYTYIQKNEALKQIIDKIIYDRKNDSLKIYFFLYR

SEQ ID NO: 6267 - protein, 493 aa, Unknown
  Description of Unknown: Integrase B6268 sequence
  PTHR30461:SF3,IPR036162,PS51737,IPR011109,PTHR30461, PS00397,PF00239,G3DSA:1.10.10.2600,IPR006119,SSF53041, SM00857,IPR025827,IPR038109,PS51736,cd03768, IPR006118,PF13408,G3DSA:3.40.50.1390,PF07508,Coil
MRVICYVRVSTREQAEKGYSVGEQQERLRAYCIAKDWIVEDVITDPGFSGAKLERPGIQRVIQLVQEKKCEAVLVWKLDRLSRSQKDTLYLIEDVFLKNGCAFVSMNENFDTSTAFGRAMIGILSVFAQLEREQIRERMAVGRVGRAKAGLFHGGGFAPIGYDYKTIAEGGEGLVVNEYEAMQVREVFSLYLQGWPVNRIRKYMTARYTTKSGDWGNDTTIRDVLKNPLYIGKINWAKKIYDGKHEPIIDEETFNAAAARLASSQWKRDCSDGLERNSPFHSTHLLGGILWCGRCGARYFASGNYSGKGENRKYWPYYVCYSRAKSAKRMIRDPNCKNDRWPVAKLDKIILDQVRQLIFDPEALERAAGGNQEAPPSERRALLNARRAEAKGQIDRLLDLCQMGTLPAAAVADRLKSLQDEVEGIDTALRELAEDDPAERLEAARGTLVGAAEILDNGSLDEKRELVHSLIHRIDLDGENIDIHWSFAPGESE

SEQ ID NO: 6268 - protein, 493 aa, Unknown
  Description of Unknown: Integrase B6269 sequence
  PTHR30461:SF3,IPR036162,PS51737,IPR011109,PTHR30461, PS00397,PF00239,G3DSA:1.10.10.2600,IPR006119,SSF53041, cd00338,SM00857,IPR025827,IPR038109,PS51736, IPR006118,PF13408,G3DSA:3.40.50.1390,PF07508,Coil
MSVKYAYGYIRVSTHDQEEISPDSQEHLLRDYAAKNNIVILKIFTDLGISGRKANKRPGFQEMIGLAKGDDHPVDQILVWKFSRFARNQEESIVYKSLLKKQHNVDVVSVSEPLSDNPFGSLIERIIEWMDEYYSIRLSGEVYRGMKENALRGAYQARPPLGYKVVEHGKPPVIVPEEAKIVRTIFEKYTNEGMSFFDIARYLNSLGLKTSHGKPFERRSVEYIIQNPSYCGMIRWNRTENSTNRIKDKDEWIVTEGQQPAIISKELFESSQERFKATYKPVGKRPSSTYKHWLSGLLKCPDCGRTLTSTTMKRVNGEKYSYFSCYGYSKGKCKKPNGISSLVLEKEVLASIKEVLDTKDIVYELREYQPTEQFDECKAITEQLESLTGKEERIKASYREGIDTLEEYKANKAIIQKERESLEQQLKELKKTARKSDQDPADAMLQKVRSVYDILISNNYTYIQKNEALKQIIDKIIYDRKNDSLKIYFFLYR

SEQ ID NO: 6269 - protein, 493 aa, Unknown
  Description of Unknown: Integrase B6270 sequence
  PTHR30461:SF3,IPR036162,PS51737,IPR011109,PTHR30461, PS00397,PF00239,G3DSA:1.10.10.2600,IPR006119,SSF53041, cd00338,SM00857,IPR025827,IPR038109,PS51736, mobidb-lite,IPR006118,PF13408,G3DSA:3.40.50.1390,PF07508,Coil
MKEKVSERKTGAIYIRVSTDKQEELSPDAQLRLLMDYAKTNHTDIPMEYIFQDNGISGRKANKRPAFQQMIALAKSKEHPIDTIIVWKFSRFARNQEESIVYKSLLKKNNVDVVSVSEPLIDGPFGSLIERIIEWMDEYYSIRLSGEVMRGMTQNAIRGHYQSDAPIGYRSPGNKKPPEKDPKTVQIPIMMKDLLLSGSSLLQIARKLNEQGYRTKHGNLWDARGVRYVLENPFYAGISRWNYTDRGRQLKPADEVIYTKGNWEPLWDKATLEEIKKHLTMNMRKAKSRDVSTAKHWLSGLLICSSCGGTLAYSGTKNSRGFQCWKYTKGFCNESHYIGIRPIEKMVIEYLESILHSPAIVYTVISSASADADSKLADLEKQLQKVENKEKRIKAAYLNEIDSLEEYKANKAALLKERAAIEKNIKLLTISNTDMSKEEMDKKMKQNISALLTVLQDDSADYVQKGNMMRNVVDHIVFDRGNTSLDMFLKLVI

SEQ ID NO: 6270 - protein, 493 aa, Unknown
  Description of Unknown: Integrase B6271 sequence
  IPR036162,PS51737,IPR011109,PTHR30461,PS00397, PF00239,G3DSA:1.10.10.2600,IPR006119,SSF53041,cd00338, SM00857,IPR025827,IPR038109,PS51736,IPR006118, PF13408,G3DSA:3.40.50.1390,PF07508,Coil
MKEKVSERKTGAIYIRVSTDKQEELSPDAQLRLLLDYAKKDSIDVPKEYIFQDNGISGRKANKRPAFQNMIALAKSKEHPIDTIIVWKFSRFARNQEESIVYKSLLKKNNVDVVSVSEPLIDGPFGSLIERIIEWMDEYYSIRLSGEVMRGMTQNAMRGHYQSDAPIGYTSPGDKKPPVINPDTVQIPLMIKDMFLSGSTQLQIARKLNDSGYRTKRGNLWDARGVRYVLENPFYIGKSRWNYTERGRRLKPVDEVIYADGNWEALWDEDTFKEIQKRLSLNMRKSKSRDISAAKHWLSGLLICSSCGGTLAFGGTHNMRGFQCWKYSKGFCSESHYISTGPIEKMVLEYLEAVMHSPALSYTVISSSSVDASSKLSDLERQLQKIDAKEKRIKAAYLNEIDTLEEYKANKTALEEERRTVEKEIEELTLSDVKYSKEDLDKKMKQNISDLLRVLRDESANYIQKGNMMRNVVDHIVFDRKNTSLDVFLKLVV

SEQ ID NO: 6271 - protein, 493 aa, Unknown
  Description of Unknown: Integrase B6272 sequence
  PTHR30461:SF3,IPR036162,PS51737,IPR011109,PTHR30461, PS00397,PF00239,G3DSA:1.10.10.2600,IPR006119,SSF53041, cd00338,SM00857,IPR025827,IPR038109,PS51736, IPR006118,PF13408,G3DSA:3.40.50.1390,PF07508,Coil
MKTKYCYGYVRVSTSGQEELSPDSQAKLLKDFAKKNDMIVLQIFYELGISGRKADKRPEFQKMIALAKSDKHPVDCIIVWKFSRFARNQEESIVYKSLLKKKHNVEVLSVSEPLVDGPFGSLIERIIEWMDEYYSVRLSGEVTRGMTEKAKRGGYQARPPLGYKIQERGKPPAIVPEEAEIIKIIFDKYVNEHTGIFDIARYLNLCGFKTSHNKPFERRSIEYILQNPTYCGMIRWNRTVSETNEIRPESEWIVSDGQQPAIISKELFDKAQIRYKSEYKPSGTRPSSTYKHWLSGLMKCPVCGRTMIAKTVNNQKSYCYFTCYGYSKGKCLAKTSVSSLKLEPAVLASIKEVLDTGNIIYRHVEPVQETSVDLNVIITEQLRKNVEKFDRIREAYRNGVDTLDEYKENKRMVQEEKEMLEKQLADIKPAEPTIDTSKIAMLEKVRNVYEIIESDSVDSVTKNEILKSVIEKIIYDRSKDELKVYYYYAPESQ

SEQ ID NO: 6272 - protein, 493 aa, Unknown
  Description of Unknown: Integrase B6273 sequence
  PTHR30461:SF3,IPR036162,PS51737,IPR011109,PTHR30461, PS00397,PF00239,G3DSA:1.10.10.2600,IPR006119,SSF53041, cd00338,SM00857,IPR025827,IPR038109,PS51736, IPR006118,PF13408,G3DSA:3.40.50.1390,PF07508,Coil
MSVKYAYGYIRVSTHDQEEISPDSQEHLLRDYAARNNIVILKIFTDLGISGRKANKRPGFQEMIGLAKGDDHPVDQILVWKFSRFARNQEESIVYKSLLKKQHNVDVVSVSEPLSDDPFGSLIERIIEWMDEYYSIRLSGEVYRGMKENALRGAYQARPPLGYKVVEHGKPPVIVPEEAKIVRTIFEKYTNESMSFFDIARYLNSLGLKTSHGKSFERRSVEYIIQNPSYCGMIRWNRTENSTNRIKDKDEWIVTEGQQPAIISKELFESAQKRFKATYKPVGKRPSSTYKHWLSGLLKCPDCGRTLTSTTMKRVNGEKYSYFSCYGYSKGKCKKPNGISSLVLEKEVLACIKEILDTKDIVYELREYQPTEQFDERKAITEQLESLTGKDERIKASYREGIDTLEEYKANKAIIQKERESLEQQLKELKKVARKSDQDPADAMLQKVRSVYDILISNNYTYVQKNEALKQIIDKIIYDRKNDSLKIYFFLYR

SEQ ID NO: 6273 - protein, 493 aa, Unknown
  Description of Unknown: Integrase B6274 sequence
  PTHR30461:SF3,IPR036162,PS51737,IPR011109,PTHR30461, PS00397,PF00239,G3DSA:1.10.10.2600,IPR006119,SSF53041, cd00338,SM00857,IPR025827,IPR038109,PS51736, IPR006118,PF13408,G3DSA:3.40.50.1390,PF07508,Coil
MSVKYAYGYIRVSTHDQEEISPDSQEHLLRDYAAKNNIVILKIFTDLGISGRKANKRPGFQEMIGLAKADDHPVDQILVWKFSRFARNQEESIVYKSLLKKQHNVDVVSVSEPLSDNPFGSLIERIIEWMDEYYSIRLSGEVYRGMKENALRGAYQARPPLGYKVVEHGKPPVIVPEEAKIVRTIFEKYTNEGMSFFDIARYLNSLGLKTSHGKPFERRSVEYIIQNPSYCGMIRWNRTENSTNRIKDKDEWIVTEGQQPAIISKELFESAQERFKATYKPVGKRPSSTYKHWLSGLLKCPDCGRTLTSTTMKRVNGEKYSYFSCYGYSKGKCKKPNGISSLVLEKEVLASIKEILDTKDIVYELREYQPTEQFDERKAITEQLESLTGKEERIKASYREGIDTLEEYKANKAIIQKERESLEQQLKDLKKAAHKSDQDPADAMLQKVRSVYDILISNNYTYVQKNEALKQIIDKIIYDRKNDSLKIYFFLYR

SEQ ID NO: 6274 - protein, 493 aa, Unknown
  Description of Unknown: Integrase B6275 sequence
  PTHR30461:SF3,IPR036162,PS51737,IPR011109,PTHR30461, PS00397,PF00239,G3DSA:1.10.10.2600,IPR006119,SSF53041, cd00338,SM00857,IPR025827,IPR038109,PS51736, IPR006118,PF13408,G3DSA:3.40.50.1390,PF07508,Coil
MKTKYCYGYVRVSTSGQEELSPDSQAKLLKDFAKKNDMIVLQIFYELGISGRKADKRPEFQKMIALAKSDKHPVDCIIVWKFSRFARNQEESIVYKSLLKKKHNVDVLSVSEPLVDGPFGSLIERIIEWMDEYYSVRLSGEVTRGMTEKAKRGGYQARPPLGYKIQERGKPPVIVPEEAEIIKIIFDKYVNEHTGIFDIARYLNSCGFKTSHNKPFERRSIEYILQNPTYCGMIRWNRTVSETNEIRPESEWIVSDGQQPAIISKELFDKAQIRYKSEYKPSGARPSSTYKHWLSGLMKCPVCGRTMIAKTVSNQKSYCYFTCYGYSKGKCLAKTSVSSLRLEPAVLASIKEVLDSGNIIYRHVEPVQETSVDLNVIITEQLRKNAEKFDRIREAYRNGVDTLDEYKENKRMVQEEKEMLEKQLADIKPAEPTIDTSKIAMLEKVRNVYEIIESDSVDPVTKNEILKSVIEKIIYDRSKDELKVYYYYAPESQ

SEQ ID NO: 6275 - protein, 493 aa, Unknown
  Description of Unknown: Integrase B6276 sequence
  PTHR30461:SF3,IPR036162,PS51737,IPR011109,PTHR30461, PS00397,PF00239,G3DSA:1.10.10.2600,IPR006119,SSF53041, cd00338,SM00857,IPR025827,IPR038109,PS51736, IPR006118,PF13408,G3DSA:3.40.50.1390,PF07508,Coil
MSVKYAYGYIRVSTHDQEEISPDSQEHLLRDYAAKNNIVILKIFTDLGISGRKANKRPGFQEMIGLAKGDDHPVDQILVWKFSRFARNQEESIVYKSLLKKQHNVDVVSVSEPLSDNPFGSLIERIIEWMDEYYSIRLSGEVYRGMKENALRGAYQARPPLGYKVVEHGKPPVIVPEEAKIVRTIFEKYTNEGMSFFDIARYLNSLGLKTSHGKPFERRSVEYIIQNPSYCGMIRWNRTENSTNRIKDKDEWIVTEGQQPAIISKELFESAQERFKATYKPVGKRPSSTYKHWLSGLLKCPDCGRTLTSTTMKRVNGEKYSYFSCYGYSKGKCKKPNGISSLVLEKEILASIKEVLDTKDIVYELREYQPTEQFDERKAITEQLESLTGKEERIKASYREGIDTLEEYKANKAIIQKERESFEQQLKELKKAPHKSDQDPADSLLQKVRSVYDILISNNYTYVQKNEALKQIIDKIIYDRKNDSLKIYFFLYR

SEQ ID NO: 6276 - protein, 493 aa, Unknown
  Description of Unknown: Integrase B6277 sequence
  PTHR30461:SF3,IPR036162,PS51737,IPR011109,PTHR30461, PS00397,PF00239,G3DSA:1.10.10.2600,IPR006119,SSF53041, cd00338,SM00857,IPR025827,IPR038109,PS51736, mobidb-lite,IPR006118,PF13408,G3DSA:3.40.50.1390,PF07508,Coil
MKETLSERKTGAIYIRVSTDKQEELSPDAQLRLLMNYAKTNHTDIPMEYIFQDNGISGRKADKRPAFQQMIALAKSKEHPIDTIIVWKFSRFARNQEESIVYKSLLKKNNVDVVSVSEPLIDGPFGSLIERIIEWMDEYYSIRLSGEVMRGMTQNALRGHYQGDAPIGYQSPGNKKPPEKDPKTVQIPIMMKDLLLSGSSLLQIARKLNEQGYRTKHGNLWDARGVRYVLENPFYAGISRWNYTDRGRQLKPADEVIYTKGNWEPLWDKATLEEIKKHLAMNMRKAKSRDVSTAKHWLSGLLICSSCGGTLAYSGTKNSRGFQCWKYTKGFCNESHYIGIRPIEKMVIEYLESILHSPAIVYTVISSASADADSKLADLEKQLQKVENKEKRIKAAYLNEIDSLEEYKANKAALLKERAAIEKNIKLLTISNTDMSKEEMDKKMKQNISALLTVLQDDSADYVQKGNMMRNVVDHIVFDRGNTSLDMFLKLVI

SEQ ID NO: 6277 - protein, 493 aa, Unknown
  Description of Unknown: Integrase B6278 sequence
  PTHR30461:SF3,IPR036162,PS51737,IPR011109,PTHR30461, PS00397,PF00239,G3DSA:1.10.10.2600,IPR006119,SSF53041, cd00338,SM00857,IPR025827,IPR038109,PS51736, IPR006118,PF13408,G3DSA:3.40.50.1390,PF07508,Coil
MSVKYAYGYIRVSTHDQEEISPDSQEHLLRDYAAKNNIVIIKIFTDLGISGRKANKRPGFQEMIGLAKGDDHPVDQILVWKFSRFARNQEESIVYKSLLKKQHNVDVVSVSEPLSDNPFGSLIERIIEWMDEYYSIRLSGEVLRGMKENAARGAFQGAAPFGYKTIDKTLVIDPEKADIVRHVFNMYVNEKLSVFDIARYLNNLGFRTIRGNLFERRTVEYMLKNPTYCGMIHWNKTENATHSIKNKDEWIVSQGQHPAIISQELFDATQERLKATRRPSRRRERPSSTYKHWLSGLMKCPACGKTLSACTQKRVNGEKYAYFSCYGYAHGQCDKAHGVSSLVLEPEVLASIKEILDTGNISYELHDYQPTEAVDERSIIRDRLNSLSSKEERIKASYREGIDTLEEYKSNKAILQKERDNLEEQLKELEGQNPEPDQDPTGDMLLKVRSVYDILISDSYTYVQKNEALKQIVDKIIYDKESDSLKIYFFLCR

SEQ ID NO: 6278 - protein, 493 aa, Unknown
  Description of Unknown: Integrase B6279 sequence
  PTHR30461:SF3,IPR036162,PS51737,IPR011109,PTHR30461, PS00397,PF00239,G3DSA:1.10.10.2600,IPR006119,SSF53041, cd00338,SM00857,IPR025827,IPR038109,PS51736, IPR006118,PF13408,G3DSA:3.40.50.1390,PF07508,Coil
MKEKVSERKTGAIYIRVSTDKQEELSPDAQLRLLMDYAKTNHTDIPMEYIFQDNGISGRKANKRPAFQQMIALAKSKEHPIDTIIVWKFSRFARNQEESIVYKSLLKKNNVDVVSVSEPLIDGPFGSLIERIIEWMDEYYSIRLSGEVMRGMTQNALRGHYQGDAPIGYQSPGNKKPPEKDPKTIQIPIMMKDLLLSGSSLLQIARKLNEQGYRTKHGNLWDARGVRYVLENPFYAGISRWNYTDRGRQLKPADEVIYTKGNWEPLWDKATLEEIKKHLTMNMRKAKSRDVSTAKHWLSGLLICSSCGGTLAYSGTKNSRGFQCWKYTKGFCNESHYIGIRPIEKMVIEYLESILHSPAIVYTVISSASADADSKLADLEKQLQKVENKEKRIKAAYLNEIDSLEEYKANKAALLKERAAIEKNIKLLTISNTDMSKEEMDKKMKQNISALLTVLQDDSADYVQKGNMMRNVVDHIVFDRGNTSLDMFLKLVI

SEQ ID NO: 6279 - protein, 493 aa, Unknown
  Description of Unknown: Integrase B6280 sequence
  PTHR30461:SF3,IPR036162,PS51737,IPR011109,PTHR30461, PS00397,PF00239,G3DSA:1.10.10.2600,IPR006119,SSF53041, cd00338,SM00857,IPR025827,IPR038109,PS51736, IPR006118,PF13408,G3DSA:3.40.50.1390,PF07508,Coil
MSVKYAYGYIRVSTHDQEEISPDSQEHLLRDYAAKNNIVILKIFTDLGISGRKANKRPGFQEMIGLAKGDDHPVDQILVWKFSRFARNQEESIVYKSLLKKQHNVDVVSVSEPLSDDPFGSLIERIIEWMDEYYSIRLSGEVYRGMKENALRGAYQARPPLGYKVVEHGKPPVIVPEEAKIVRTIFEKYTNEGMSFFDIARYLNSLGLKTSHGKPFERRSVEYIIQNPSYCGMIRWNRTENSTNRIKDKDEWIVTEGQQPAIISKELFESAQKRFKATYKPVGKRPSSTYKHWLSGLLKCPDCGRTLTSTTMKRVNGEKYSYFSCYGYSKGKCKKPNGISSLVLEKEVLASIKEILDTKDIVYELREYQPTEQFDERKAITEQLESLTGKEERIKASYREGIDTLEEYKANKAIIQKERKSLEQQLKELKKAAHKSDQDPADAMLQKVRSVYDILISNNYTYVQKNEALKQIIDKIIYDRKNDSLKIYFFLYR

SEQ ID NO: 6280 - protein, 493 aa, Unknown
  Description of Unknown: Integrase B6281 sequence
  PTHR30461:SF3,IPR036162,PS51737,IPR011109,PTHR30461, PS00397,PF00239,G3DSA:1.10.10.2600,IPR006119,SSF53041, cd00338,SM00857,IPR025827,IPR038109,PS51736, mobidb-lite,IPR006118,PF13408,G3DSA:3.40.50.1390,PF07508,Coil
MKETLSERKTGAIYIRVSTDKQEELSPDAQLRLLMDYAKTNHTDIPMEYIFQDNGISGRKADKRPAFQQMIALAKSKEHPIDTIIVWKFSRFARNQEESIVYKSLLKKNNVDVVSVSAPLIDGPFGSLIERIIEWMDEYYSIRLSGEVLRGMTQNALRGHYQGDAPIGYQSPGNKKPPEKDPKNIQIPIMMKDLLLSGSSLLQIARKLNEQGYRTKHGNLWDARGVRYVLENPFYAGISRWNYTDRGRQLKPADEVIYTKGNWEPLWDKATLEEIKKHLTMNMRKAKSRDVSTAKHWLSGLLICSSCGGTLAYSGTKNSRGFQCWKYTKGFCNESHYIGIRPIEKMVIEYLESILHSPAIVYTVISSASADADSKLADLEKQLQKVENKEKRIKAAYLNEIDSLEEYKANKAALLKERAAIEKNIKLLTISNTDMSKEEMDKKMKQNISALLTVLQDDSADYVQKGNMMRNVVDHIVFDRGNTSLDMFLKLVI

SEQ ID NO: 6281 - protein, 493 aa, Unknown
  Description of Unknown: Integrase B6282 sequence
  cd00338,SM00857,G3DSA:1.10.10.2600,IPR036162,PF13408, PS51737,IPR025827,G3DSA:3.40.50.1390,IPR006119,IPR038109, PF07508,SSF53041,IPR011109,PTHR30461,PS51736, Coil,PF00239
MSEKAVIYARYSSSNQREESIIGQIRDCRAYAEKLGLEVIKEYTDEARTGTTDRRPGFQQMIKDAESKKFTAVIVWKVDRFARNRYDSAIYKSKLKKNGVRVYSAMEAISEGPEGIIMEGLMESMAEYYSANLSENVKRGNLDSALEHKTLGKRIYGYRTATDGTYELDPDEAAVVKRIFDERVEGKTGADIARDLVHDGYLFLGKKFTKQAIYRILKSIKYTGTYIYKDYICEGGMPMIVDKSTYMRVQNMKKSLKPKAKETVIYNLTGKLFCGQCGGYMTGEYGTSKTNRKYYYYACRDCKKRVSKDVVENIIYDELAKRLSDDKLIELLAVRFEEHQKKKLNDNSVLDNLKTRLKETERGISNLVSAIEQGIITSSTKDRLVALEAEKDELIQSIKDEEVNSKIVITKEDFVYWSKQVRSNAEDKDKLFECFLNSAYLYDDHIVINSNLLGPSATIRAEQLNNSEFEYDASSPAYKYSFELMILSSEINL

SEQ ID NO: 6282 - protein, 493 aa, Unknown
  Description of Unknown: Integrase B6283 sequence
  PTHR30461:SF3,IPR036162,PS51737,IPR011109,PTHR30461, PS50254,PS00397,PF00239,G3DSA:1.10.10.2600,IPR006119, IPR011539,SSF53041,cd00338,SM00857,IPR025827,IPR038109 ,PS51736,IPR006118,PF13408,G3DSA:3.40.50.1390,PF07508,Coil
MSVKYAYGYIRVSTHDQEEISPDSQEHLLRDYATKNNIVIIKIFTDLGISGRKANKRPGFQEMIGLAKSDDHPVDQILVWKFSRFARNQEESIVYKSLLKKQHNVDVVSVSEPLSDDPFGSLIERIIEWMDEYYSIRLSGEVHRGMKENALRGAYQARPPLGYKVVEHGKPPVIVPEEAKIVRTIFEKYTNEGMSFFDIARYLNSLGLKTSHGKPFERRSVEYIIQNPSYCGMIRWNRTENSTNRIKDKDEWIVTEGQQPAIISKELFESAQERFKATYKPVGKRPSSTYKHWLSGLLKCPDCGRTLTSTTMKRVNGEKYSYFSCYGYSKGKCKKPNGISSLVLEKEVLASIKEILDTKDIVYELREYQPTEQFDERKAITEQLESLTGKEERIKASYREGIDTLEEYKVNKAIIQKERESLEQQLKELKTAARKSDQDPADAMLQKVRSVYDILISNNYTYVQKNEALKQIIDKIIYDRKNDSLKIYFFLYK

SEQ ID NO: 6283 - protein, 493 aa, Unknown
  Description of Unknown: Integrase B6284 sequence
  PTHR30461:SF3,IPR036162,PS51737,IPR011109,PTHR30461, PS00397,PF00239,G3DSA:1.10.10.2600,IPR006119,SSF53041, cd00338,SM00857,IPR025827,IPR038109,PS51736, IPR006118,PF13408,G3DSA:3.40.50.1390,PF07508,Coil
MSVKYAYGYIRVSTHDQEEISPDSQEHLLRDYAAKNNIVILKIFTDLGISGRKANKRPGFQEMIGLVKGDDHPVDQILVWKFSRFARNQEESIVYKSLLKKQHNVDVISISEPLSDNPFGSLIERIIEWMDEYYSIRLSGEVYRGMKENALRGAYQARPPLGYKVVEHGKPPVIVPEEAKIVRTIFEKYTNEGIGFFDIARYLNSLGLKTSHGKPFERRSIEYIIHNPSYCGMIRWNRTENSTNRIKDKDEWIVTEGQQPAIISKELFESAQERFKASYKPVGKRPSSTYKHWLSGLLKCPDCGRTLTSTTMKRVNGEKYSYFSCYGYSKGKCKKPNGISSLVLEKEVLAGIKEVLDTKDIVYELREYQPTEQFDERKAITEQLESLTGKEERIKASYREGIDTLEEYKANKAIIQKERESLEQQLKELKKAAHKSDQDPADAMLQKVRSVYDILISNNYTYVQKNEALKQIIDKIIYDRKNDSLKIYFFLYR

SEQ ID NO: 6284 - protein, 493 aa, Unknown
  Description of Unknown: Integrase B6285 sequence
  PTHR30461:SF3,IPR036162,PS51737,IPR011109,PTHR30461, PS00397,PF00239,G3DSA:1.10.10.2600,IPR006119,SSF53041, SM00857,IPR025827,IPR038109,PS51736,cd03768, IPR006118,PF13408,G3DSA:3.40.50.1390,PF07508,Coil
MRVICYVRVSTREQAEKGYSVGEQQERLRAYCIAKDWIVEDVITDPGFSGAKLERPGIQRVIRLVQEKKCEAVLVWKLDRLSRSQKDTLYLIEDVFLKNGCAFVSMNENFDTSTAFGRAMIGILSVFAQLEREQIRERMAVGRVGRAKAGLFHGGGFAPIGYDYKTIAEGGEGLVVNEYEAMQVREVFSLYLQGWPVNRIRKYMTARYTTKSGDWGNDTTIRDVLKNPLYIGKINWAKKIYDGKHEPIIDEETFNAAAARLASSQWKRDCSDGLERNSPFHSTHLLGGILWCGRCGARYFASGNYSGKGENRKYWPYYVCYSRAKSAKRMIRDPNCKNDRWPVAKLDKIILDQVRQLIFDPEALERAAGGNQEAPPSERRALLNARRAEAKGQIDRLLDLCQMGTLPAAAVADRLKSLQDEVEGIDTALRELAEDDPAERLEAARETLVGAAEILDNGSLDEKRELVHSLIHRIDLDGENIDIHWSFAPGESE

SEQ ID NO: 6285 - protein, 493 aa, Unknown
  Description of Unknown: Integrase B6286 sequence
  PTHR30461:SF3,IPR036162,PS51737,IPR011109,PTHR30461, PS00397,PF00239,G3DSA:1.10.10.2600,IPR006119,SSF53041, cd00338,SM00857,IPR025827,IPR038109,PS51736, IPR006118,PF13408,G3DSA:3.40.50.1390,PF07508,Coil
MSVKYAYGYIRVSTHDQEEISPDSQEHLLRDYAAKNNIVILKIFTDLGISGRKANKRPGFQEMIGLAKGDDHPVDLILVWKFSRFARNQEESIVYKSLLKKQHNVDVVSVSEPLSDDPFGSLIERIIEWMDEYYSIRLSGEVYRGMKENALRGAYQARPPLGYKIVEHGKPPVIVPEEAKIVRTIFEKYANEGMSFFDIARYLNSLGLKTSHGKPFERRSVEYIIQNPSYCGMIRWNRTENSTNRIKDKDEWIVTEGQQPAIISKELFESAQERFKATYKPVGKRPSSTYKHWLSGLLKCPDCGRTLTSTTMKRVNGEKYSYFSCYGYSKGKCKKPNGISSLVLEKEVLASIKEVLDTKDIVYELREYQPTEQFDERKAITEQLESLTGKEDRIKASYREGIDTLEEYKANKAIIQKERESLEQQLKDLKKAAHKSDQDPADAMLQKVRSVYDILISNNYTYVQKNEALKQIIDKIIYDRKNDSLKIYFFLYR

SEQ ID NO: 6286 - protein, 493 aa, Unknown
  Description of Unknown: Integrase B6287 sequence
  PTHR30461:SF3,IPR036162,PS51737,IPR011109,PTHR30461, PS00397,PF00239,G3DSA:1.10.10.2600,IPR006119,SSF53041, cd00338,SM00857,IPR025827,IPR038109,PS51736, IPR006118,PF13408,G3DSA:3.40.50.1390,PF07508,Coil
MKTKYCYGYVRVSTSGQEELSPDSQAKLLKDFAKKNDMIVLQIFYELGISGRKADKRPEFQKMIALAKSDKHPVDCIIVWKFSRFARNQEESIVYKSLLKKKHNVEVLSVSEPLVDGPFGSLIERIIEWMDEYYSVRLSGEVTRGMTEKAKRGGYQARPPLGYKIQERGKPPVIVPEEAEIIKIIFDKYVNEHTGIFDIARYLNLCGFKTSHNKPFERRSIEYILQNPTYCGMIRWNRTVSETNEIRPESEWIVSDGQQPAIISKELFDKAQIRYKSEYKPSGTRPSSTYKHWLSGLMKCPVCGRTMIAKTVNNQKSYCYFTCYGYSKGKCLAKTSVSSLKLEPAVLASIKEVLDSGNIIYRHVEPVQETSVDLNVIITEQLRKNVEKFDRIREAYRNGVDTLDEYKENKRMVQEEKEMLEKQLADIKPAEPTIDTSKIAMLEKVRNVYEIIESDSVDSVTKNEILKSVIEKIIYDRSKDELKVYYYYAPESQ

SEQ ID NO: 6287 - protein, 493 aa, Unknown
  Description of Unknown: Integrase B6288 sequence
  PTHR30461:SF3,IPR036162,PS51737,IPR011109,PTHR30461, PS00397,PF00239,G3DSA:1.10.10.2600,IPR006119,SSF53041, cd00338,SM00857,IPR025827,IPR038109,PS51736, IPR006118,PF13408,G3DSA:3.40.50.1390,PF07508,Coil
MSVKYAYGYIRVSTHDQEEISPDSQEHLLRDYAAKNNIVILKIFTDLGISGRKANKRPGFQEMIGLAKGDDHPVDQILVWKFSRFARNQEESIVYKSLLKKQHNVDVVSVSEPLSDDPFGSLIERIIEWMDEYYSIRLSGEVYRGMKENALRGAYQARPPLGYKIVEHGKPPVIVPEEAKTVRTIFEKYANEGMSFFDIARYLNSLGLKTSHGKSFERRSVEYIIQNPSYCGMIRWNRTENSTNRIKDKDEWIVTEGQQPAIISKELFESAQKRFKATYKPVGKRPSSTYKHWLSGLLKCPDCGRTLTSTTMKRVNGEKYSYFSCYGYSKGKCKKPNGISSLVLEKEVLACIKEILDTKDIVYELREYQPTDQFDERKAITEQLESLTGKEERIKASYREGIDTLEEYKTNKAIIQKERESLEQQLKDLKKAAHKSDQDPADAMLQKVRSVYDILISNNYTYVQKNEALKQIIDKIIYDRKNDSLKIYFFLYR

SEQ ID NO: 6288 - protein, 493 aa, Unknown
  Description of Unknown: Integrase B6289 sequence
  PTHR30461:SF3,SM00857,G3DSA:1.10.10.2600,IPR036162,PF13408, IPR025827,G3DSA:3.40.50.1390,PS51737,IPR006119,IPR038109, PF07508,SSF53041,IPR011109,PF00239,PTHR30461, PS51736,Coil,cd00338
MTAVIYARYSSDNQREESIEGQIRECTAYAEKNGITVIKHYIDRALSAKTDNRPEFQQMIKDSEKRLFDIVLVWKLDRFARNRYDSAHYEYQLERNHVKLVSATEPISEGPAGIMVKSMLTGMAEYYSAELSEKVVRGMTENVLKGKYNGGTIPIGYTVDEEKFFQIDPLKAPFVVEAFQRYNDGATMKELMNWLNDSGVTTNRNQKFTYNSIQTLLTNRRYIGENRFKDIVMPDSIPVIIEKELFDSVQDKIAKNRRAPARHKAEDDYLLTTKLFCGMCGAMMFGECGTSRNKNVHHYYKCANAKRTKTCKKKTVRKEWLEDLVVNETMKMIHDDDCIQSIVDAVMILQEQENTVLPLLEKQMKDIENGIENLLNAIQAGVLTSSTKGRLEKLEAQQKELEIRIAEEKLAKPKVSAEFVKFWLTNFRKLDPNVKSHRETLINTFVNAVYLYDEKVLIAFNYKDGTKTITFDEIAAKDAPEGNGSDLGCFAPP

SEQ ID NO: 6289 - protein, 493 aa, Unknown
  Description of Unknown: Integrase B6290 sequence
  SM00857,G3DSA:1.10.10.2600,IPR036162,PS51737,G3DSA:3.40.50.1390, IPR006119,IPR038109,PF07508,SSF53041,IPR011109, PTHR30461,Coil,PS51736,cd00338,PF00239
MPKTAVIYARFSCNKQREASIDDQLRVCRDWCKREGYAIAAEYCDYAISGRTDDRPEFQRMIANAGESDIVLVYMMDRFSRGEYDAPIYKRELAKKGVKLVSALEAIPDSPEGIIYEKLLEGLAACESKKTAIRTKRGMEGNALRCKTNGVRVFGYRKSEDDEYEIDEHDAAFVREAFRRRINRETVNSIARDFAQRGVKTSNGNPCGYSMVYQMLHNRRYTGRYEWGGIVKEGGMPAIIDEVTFMDAQQVQGTKKRSSEDWGDFALAGKAICAGCGRNLQGVSGRGRHNVKYEYYSCVDGCMRNVRREELEGAIVGALRELLSDREEALRIARMVADRADGAEIATRRKQAAESLSAAERGLKNILNAIEQGIIAPGVKERIAELEQQKARANYDLQAIQEQKIDPERFADFLQCGAKLDDATLLKAFVWQVSVSDEDVLVTLNYDTESNEPARLDIQRVRGKLEWCTVCASPRTEVCAVGTVIFVRIPRAA

SEQ ID NO: 6290 - protein, 493 aa, Unknown
  Description of Unknown: Integrase B6291 sequence
  PTHR30461:SF3,SM00857,G3DSA:1.10.10.2600,IPR036162,PF13408, PS51737,G3DSA:3.40.50.1390,IPR025827,IPR006119,IPR038109, PF07508,IPR011109,SSF53041,PF00239, PTHR30461,PS51736,Coil,cd00338
MINDDFFRKGAISVRVSTEMQTKYSPDSQIKMCLEYAKSHNIYVNDENIYRDDGISGKCAEKRTEFQRMISDAQKQPKPFDCILVYDFSRFARNKEESVMYKAMLRKKYNIEVISITQPLADGKERVILESMYEAMDEYYILNLSENVKRGKLEKASRGEYQGRTPFGYFYDKNQQNLVINPETSKIVKYIFDEWLKDDTTLNGLTKNINNMGIKTVQGNRWCEGSLKYLLNNPLYAGYVRYTDGGMKKYFNNVNTKVIKGNHEPIITEGTWEKVKEKNQMHEKNWFKYKKPSVKHEYWLRGLIKCSSCGKNLIMIQRKSGKKTKPFFQCNGYNKKMCPDSHSILQEKLENALLTEIEKIFTKKINITIADNQNNTTKTNLFESAIKKQKDRLDRIEIAYMDGIDTLAEYKEKKVFINQEISRLTNELERINSLKFQNDKSEKVYNLCEYAHRILASPDIDFKIKDKIAHELFKEIIYNKKENSLIITFNELS

SEQ ID NO: 6291 - protein, 493 aa, Unknown
  Description of Unknown: Integrase B6292 sequence
  PTHR30461:SF3,IPR036162,PS51737,IPR011109,PTHR30461, PS00397,PF00239,G3DSA:1.10.10.2600,IPR006119,SSF53041, cd00338,SM00857,IPR025827,IPR038109,mobidb-lite, PS51736,IPR006118,PF13408,G3DSA:3.40.50.1390,PF07508,Coil
MKETLSERKTGAIYIRVSTDKQEELSPDAQLRLLMDYAKNNHTDIPMEYIFQDNGISGRKANKRPAFQQMIALAKSKEHPIDTIIVWKFSRFARNQEESIVYKSLLKKNNVDVVSVSEPLIDGPFGSLIERIIEWMDEYYSIRLSGEVMRGMTQNALRGHYQGDAPIGYQSPGNKKPPEKDPKTVQIPIMMKDLLLSGSSLLQIARKLNEHGYRTKHGNLWDARGVRYVLENPFYAGISRWNYTDRGRQLKPADEVIYTKGNWEPLWDKATLKEIQKHLAMNMRKTKSRDVSTAKHWLSGLLICSSCGGTLAYSGTKNSRGFQCWKYTKGFCNESHYIGIRPIEKMVIEYLESILHSPAIVYTVISSASADADSKLADLEKQLQKVENKEKRIKAAYLNEIDSLEEYKANKAALLKERAAIEKNIKLLTISNTDMSKEEMDKKMKQNISALLTVLQDDSADYVQKGNMMRNVVDHIVFDRGNTSLDMFLKLVI

SEQ ID NO: 6292 - protein, 493 aa, Unknown
  Description of Unknown: Integrase B6293 sequence
  SM00857,G3DSA:1.10.10.2600,IPR036162,PS51737,G3DSA:3.40.50.1390, IPR006119,IPR038109,PF07508,SSF53041,IPR011109, PTHR30461,Coil,PS51736,cd00338,PF00239
MPKTAVIYARFSCNKQREASIDDQLRVCRDWCKREGYAIAAEYCDYAISGRTDDRPEFQRMIANAGESDIVLVYMMDRFSRGEYDAPIYKRELAKNGVKLVSALEAIPDSPEGIIYEKLLEGLAACESKKTAIRTKRGMEGNALRCKTNGVRVFGYRKSEDDEYEIDEHDAAFVREAFKRRINRETVNSIARDFAQRGVKTSNGNPCGYSMVYQMLHNRRYTGRYEWGGIVKEGGMPEIVDEVTFMDAQQVQGTKKRSSEDWGDFALAGKAICAGCGRNLQGVSGRGRHNVKYEYYSCVDGCMKNVRREELEGAIVDALRELLSDREEALRIARMVADRADGAEIATRRKQAAESLSAAERGLKNILNAIEQGIIAPGVKERIAELEEQKARANYDLQAIQDQKIDPERFADFLQCGAKLDDATLLKAFVWQVSVSDDEVFVTLNYDTESNEPARLDIQRVRGKLEWCPICKDSRTQVLALGRSVFIRFSRAA

SEQ ID NO: 6293 - protein, 493 aa, Unknown
  Description of Unknown: Integrase B6294 sequence
  PTHR30461:SF3,IPR036162,PS51737,IPR011109,PTHR30461, PS00397,PF00239,G3DSA:1.10.10.2600,IPR006119,SSF53041, cd00338,SM00857,IPR025827,IPR038109, PS51736,IPR006118,PF13408,G3DSA:3.40.50.1390,PF07508,Coil
MKETLSERKTGAIYIRVSTDKQEELSPDAQLRLLMDYAKTNHTDIPMEYIFQDNGISGRKADKRPAFQQMIALAKSKEHPIDTIIVWKFSRFARNQEESIVYKSLLKKNNVDVVSVSEPLIDGPFGSLIERIIEWMDEYYSIRLSGEVMRGMTQNALRGHYQGDAPIGYQSPGNKKPPEKDPKTIQIPIMMKDLLLSGSSLLQIARKLNEHGYRTKHGNLWDARGVRYVLENPFYAGISRWNYTDRGRQLKPADEVIYTKGNWEPLWDKATLEEIKKHLAMNMRKTKSRDVSAAKHWLSGLLICSSCGGTLAYSGTKNSRGFQCWKYTKGFCNESHYIGIRPIEKMVIEYLESILHSPAIVYTVISSASADADSKLADLEKQLQKVENKEKRIKAAYLNEIDSLEEYTANKAALLKERAAIEKNIKLLTISNTDMSKEEMDKKMKQNISALLTVLQDDSADYVQKGNMMRNVVDHIVFDRGNTSLDMFLKLVI

SEQ ID NO: 6294 - protein, 493 aa, Unknown
  Description of Unknown: Integrase B6295 sequence
  PTHR30461:SF3,IPR036162,PS51737,IPR011109,PTHR30461, PS00397,PF00239,G3DSA:1.10.10.2600,IPR006119,SSF53041, cd00338,SM00857,IPR025827,IPR038109,PS51736, IPR006118,PF13408,G3DSA:3.40.50.1390,PF07508,Coil
MSVKYAYGYIRVSTHDQEEISPDSQEHLLWDYAAKNNIVILKIFTDLGISGRKANKRPGFQEMIGLAKGDDHPVDQILVWKFSRFARNQEESIVYKSLLKKQHNVDVVSVSEPLSDNPFGSLIERIIEWMDEYYSIRLSGEVYRGMKENALRGAYQARPPLGYKVVEHGKPPVIVPEEAKIVRTIFEKYTNEGMSFFDIARYLNSLGLKTSHGKPFERRSVEYIIQNPSYCGMIRWNRTENSTNRIKDKDEWIVTEGQQPAIISKELFESAQERFKATYKPVGKRPSSTYKHWLSGLLKCPDCGRTLTSTTMKRVNGEKYSYFSCYGYSKGKCKKPNGISSLVLEKEVLASIKEILDTKDIVYELREYQPTEQFDERKAITEQLESLTGKEERIKASYREGIDTLEEYKANKAIIQKERESLEQQLKDLKKAAHKSDQDPADAMLQKVRSVYDILISNNYTYVQKNEALKQIIDKIIYDRKNDSLKIFFFLYR

SEQ ID NO: 6295 - protein, 493 aa, Unknown
  Description of Unknown: Integrase B6296 sequence
  PTHR30461:SF3,IPR036162,PS51737,IPR011109,PTHR30461, PS00397,PF00239,G3DSA:1.10.10.2600,IPR006119,SSF53041, cd00338,SM00857,IPR025827,IPR038109,PS51736, IPR006118,PF13408,G3DSA:3.40.50.1390,PF07508,Coil
MSVKYAYGYIRVSTHDQEEISPDSQEHLLRDYAAKNNIVILKIFTDLGISGRKANKRPGFQEMIGLAKGDDHPVDQILVWKFSRFARNQEESIVYKSLLKKQHNVDVVSVSEPLSDDPFGSLIERIIEWMDEYYSIRLSGEVYRGMKENALRGAYQARPPLGYKVVEHGKPPVIVPEEAKIVRTIFEKYTNEGMSFFDIARYLNSLGLKTSHGKPFERRSVEYIIQNPSYCGMIRWNRTENSTNRIKDKDEWIVTEGQQPAIISKELFESAQERFKATYKPVGKRPSSTYKHWLSGLLKCPDCGRTLTSTTMKRVNGEKYSYFSCYGYSKGKCKKPNGISSLVLEKEVLAGIKEVLDTGNISYELHDYQPAEAVDERSIIRDRLNSLSSKEERIKASYREGIDTLEEYKANKAIIQKERESLEQQLKELKKATHKSDQDPADAMLQKVRSVYDILISNNYTYIQKNEALKQIIDKIIYDRKNDSLKIYFFLYR

SEQ ID NO: 6296 - protein, 493 aa, Unknown
  Description of Unknown: Integrase B6297 sequence
  PTHR30461:SF3,IPR036162,PS51737,IPR011109,PTHR30461, PS00397,PF00239,G3DSA:1.10.10.2600,IPR006119,SSF53041, cd00338,SM00857,IPR025827,IPR038109,PS51736, IPR006118,PF13408,G3DSA:3.40.50.1390,PF07508,Coil
MSVKYAYGYIRVSTHDQEEISPDSQEHLLRDYAAKNNIVILKIFTDLGISGRKANKRPGFQEMIGLAKADDHPVDQILVWKFSRFARNQEESIVYKSLLKKQHNVDVVSVSEPLSDNPFGSLIERIIEWMDEYYSIRLSGEVYRGMKENALRGAYQARPPLGYKVVEHGKPPVIVPEEAKIVRTIFEKYTNEGMSFFDIARYLNSLGLKTSHGKPFERRSVEYIIQNPSYCGMIRWNRTENSTNRIKDKDEWIVTEGQQPAIISKELFESAQERFKATYKPVGKRPSSTYKHWLSGLLKCPDCGRTLTSTTMKRVNEEKYSYFSCYGYSKGKCKKPNGISSLVLEKEVLASIKEVLDTKDIVYELREYQPTEQFDERKAITEQLESLTGKEERIKASYREGIDTLEEYKANKAIIQKERESLEQQLKDLKKAAHKSDQDPADAMLQKVRSVYDILISNNYTYVQKNEALKQIIDKIIYDRKNDSLKIYFFLYR

SEQ ID NO: 6297 - protein, 493 aa, Unknown
  Description of Unknown: Integrase B6298 sequence
  PTHR30461:SF3,IPR036162,PS51737,IPR011109,PTHR30461, PS00397,PF00239,G3DSA:1.10.10.2600,IPR006119,SSF53041, cd00338,SM00857,IPR025827,IPR038109,PS51736, IPR006118,PF13408,G3DSA:3.40.50.1390,PF07508,Coil
MSVKYAYGYIRVSTHDQEEISPDSQEHLLRDYATKNNVVILKIFTDLGISGRKANKRPGFQEMIGLAKGDDHPVDQILVWKFSRFARNQEESIVYKSLLKKQHNVDVVSVSEPLSDDPFGSLIERIIEWMDEYYSIRLSGEVLRGMKENAARGAFQGAAPFGYKTIDKTLVIDPEKADIVRHVFNMYVNEKLSVFDIARYLNNLGFRTIRGNLFERRTVEYMLKNPTYCGMIHWNKTENATHSIKNKDEWIVSQGQHPAIISQELFDATQERLKATRRPSRRRERPSSTYKHWLSGLMKCPACGKTLSACTQKRVNGEKYAYFSCYGYAHGQCDKAHGVSSLVLEPEVLASIKEVLDTGNISYELHDYQPTEVVDERSIIRDRLNSLASKEERIKASYREGIDTLEEYKSNKAILQKERDNLEEQLKELEGQNPEPDQDPTSDMLLKVRSVYDILISDSYTYVQKNEALKQIVDKIIYDKESDSLKIYFFLCR

SEQ ID NO: 6298 - protein, 493 aa, Unknown
  Description of Unknown: Integrase B6299 sequence
  PTHR30461:SF3,IPR036162,PS51737,IPR011109,PTHR30461, PS00397,PF00239,G3DSA:1.10.10.2600,IPR006119,SSF53041, cd00338,SM00857,IPR025827,IPR038109,PS51736, IPR006118,PF13408,G3DSA:3.40.50.1390,PF07508,Coil
MSVKYAYGYIRVSTHDQEEISPDSQEHLLRDYAAKNNIVILKIFTDLGISGRKANKRPGFQEMIGLAKGDDHPVDQILVWKFSRFARNQEESIVYKSLLKKQHNVDVVSVSEPLSDDPFGSLIERIIEWMDEYYSIRLSGEVYRGMKENALRGAYQARPPLGYKVVEHGKPPVIVPEEAKIVRTIFEKYTNEGMSFFDIARYLNSLGLKTSHGKPFERRSVEYIIQNPSYCGMIRWNRTENSTNRIKDKDEWIVTEGQQPAIISKELFESAQERFKATYKLVGKRPSSTYKHWLSGLLKCPDCGRTLTSTTMKRVNGEKYSYFSCYGYSKGKCKKPNGISSLVLEKEVLASIKEILDTKDIVYELREYQPTEQFDERKAITEQLESLTGKEERIKASYREGIDTLEEYKANKAIIQKERESLEQQLKDLKKAAHKSDQDPADAMLQKVRSVYDILISNNYTYIQKNEALKQIIDKIIYDRKNDSLKIYFFLYR

SEQ ID NO: 6299 - protein, 493 aa, Unknown
  Description of Unknown: Integrase B6300 sequence
  PTHR30461:SF3,IPR036162,PS51737,IPR011109,PTHR30461, PS00397,PF00239,G3DSA:1.10.10.2600,IPR006119,SSF53041, cd00338,SM00857,IPR025827,IPR038109,PS51736, IPR006118,PF13408,G3DSA:3.40.50.1390,PF07508,Coil
MKTKYCYGYVRVSTSGQEELSPDSQAKLLKDFAKKNDMIVLQIFYELGISGRKADKRPEFQKMIALAKSDKHPVDCIIVWKFSRFARNQEESIVYKSLLKKKHNVEVLSVSEPLVDGPFGSLIERIIEWMDEYYSVRLSGEVTRGMTEKAKRGGYQARPPLGYKIQERGKPPVIVPEEAEIIKIIFDKYVNEHTGIFDIARYLNLCGFKTSHNKPFERRSIEYILQNPTYCGMIRWNRTVSETNEIRPESEWIVSDGQQPAIISKELFDKAQIRYKSEYKPSGTRPSSTYKHWLSGLMKCPVCGRTMIAKTVNNQKSYCYFTCYGYSKGKCLAKTSVSSLRLEPAVLASIKEVLDTGNIIYRHVEPVQETSVDLNVIITEQLRKNAEKFDRIREAYRNGVDALDEYKENKRMVQEEKEMLEKQLADIKPAEPTIDTSKIAMLEKVRNVYEIIESDSVDPVTKNEILKSVIEKIIYDRSKDELKVYYYYAPESQ

SEQ ID NO: 6300 - protein, 493 aa, Unknown
  Description of Unknown: Integrase B6301 sequence
  PTHR30461:SF3,IPR036162,PS51737,IPR011109,PTHR30461, PS00397,PF00239,G3DSA:1.10.10.2600,IPR006119,SSF53041, cd00338,SM00857,IPR025827,IPR038109,PS51736, IPR006118,PF13408,G3DSA:3.40.50.1390,PF07508,Coil
MSIKYAYGYIRVSTHDQEEISPDSQEHLLRDYAAKNNIVILKIFTDLGISGRKANKRPGFQEMIGLAKADDHPADLILVWKFSRFARNQEESIVYKSLLKKQHNVDVVSVSEPLSDDPFGSLIERIIEWMDEYYSIRLSGEVLRGMKENAARGAFQGAAPFGYKTVDKTLVIDPEKADIVRHVFNMYANGKLSVFDIARYLNNLGLRTIRGNLFERRTVEYMLKNPTYCGMIHWNKTENATHSIKNKDEWIVSQGQHPAIISQELFDATQERLKTTRRPSRRRERPSSTYKHWLSGLMKCPACGKTLSACTQKRVNGEKYAYFSCYGYAHGQCDKAHGVSSLVLEPEVLASIKEILDTGNISYELHDYQPTEAVDERSIIRDRLNSLTSKEERIKASYREGIDTLEEYKSNKAILQKEQDNLEEQLKELEGQNPEPDQDPTGDMLLKVRSVYDILISDSYTYVQKNEALKQIVDKIIYDKESDSLKIYFFLCR

SEQ ID NO: 6301 - protein, 493 aa, Unknown
  Description of Unknown: Integrase B6302 sequence
  PTHR30461:SF3,IPR036162,PS51737,IPR011109,PTHR30461, PS00397,PF00239,G3DSA:1.10.10.2600,IPR006119,SSF53041, cd00338,SM00857,IPR025827,IPR038109,PS51736, IPR006118,PF13408,G3DSA:3.40.50.1390,PF07508,Coil
MSVKYAYGYIRVSTHDQEEISPDSQEHLLRDYAAKNNIVILKIFTDLGISGRKANKRPGFQEMIGLAKGDDHPVDQILVWKFSRFARNQEESIVYKSLLKKQHNVDVVSVSEPLSDDPFGSLIERIIEWMDEYYSIRLSGEVLRGMKENAARGAFQGAAPFGYKTIDKTLVIDPEKADIVRHVFNMYVNEKLSVFDIARYLNNLGFRTIRGNLFERRTVEYMLKNPTYCGMIHWNKTENATHSIKNKDEWIVSQGQHPAIISQELFDATQERLKATRRPSRRRERPSSTYKHWLSGLMKCPACGKTLSACTQKRVNGEKYAYFSCYGYAHGQCDKAHGVSSLVLEPEVLASIKEILDTGNISYELHDYQPTEAVDERSIIRDRLNSLSSKEERIKASYREGIDTLEEYKSNKAILQKERDNLEEQLKELEGQNPEPDQDPTGDMLLKVRSVYDILISDSYTYVQKNEALKQIVDKIIYDKESDSLKIYFFLCR

SEQ ID NO: 6302 - protein, 493 aa, Unknown
  Description of Unknown: Integrase B6303 sequence
  PTHR30461:SF3,IPR036162,PS51737,IPR011109,PTHR30461, PS00397,PF00239,G3DSA:1.10.10.2600,IPR006119,SSF53041, cd00338,SM00857,IPR025827,IPR038109,PS51736, IPR006118,PF13408,G3DSA:3.40.50.1390,PF07508,Coil
MSVKYAYGYIRVSTHDQEEISPDSQEHLLRDYAAKNNIVILKIFTDLGISGRKANKRPGFQEMIGLAKGDDHPVDQILVWKFSRFARNQEESIVYKSLLKKQHNVDVVSVSEPLSDDPFGSLIERIIEWMDEYYSIRLSGEVHRGMKENALRGAYQARPPLGYKVVEHGKPPVIVPEEAKIVRTIFEKYTNEGMSFFDIARYLNSLGLKTSHGKPFERRSVEYIIQNPSYCGMIRWNRTENSTNRIKDKDEWIVTEGQQPAIISKELFESAQERFKATYKPVGKRPSSTYKHWLSGLLKCPDCGRTLTSTTMKRVNGEKYSYFSCYGYSKGKCKKPNGISSLVLEKEVLASIKEILDTKDIVYELREYQPTEQFDERKAITEQLESLTGKEERIKASYREGIDTLEEYKANKAIIQKERESLEQQLKELKTAARKSDQDPADAMLQKVRSVYDILISNNYTYVQKNEALKQIIDKIIYDRKNDSLKIYFFLYR

SEQ ID NO: 6303 - protein, 493 aa, Unknown
  Description of Unknown: Integrase B6304 sequence
  PTHR30461:SF3,IPR036162,PS51737,IPR011109,PTHR30461, PS00397,PF00239,G3DSA:1.10.10.2600,IPR006119,SSF53041, cd00338,SM00857,IPR025827,IPR038109,PS51736, IPR006118,PF13408,G3DSA:3.40.50.1390,PF07508,Coil
MSVKYAYGYIRVSTHDQEEISPDSQEHLLRDYAAKNNIVILKIFTDLGISGRKANKRPGFQEMIGLAKGDDHPVDQILVWKFSRFARNQEESIVYKSLLKKQHNVDVVSVSEPLSDDPFGSLIERIIEWMDEYYSIRLSGEVYRGMKENALRGAYQARPPLGYKVVEHGKPPVIVPEEAKIVRTIFEKYTNEGMSFFDIARYLNSLGLKTSHGKPFERRSVEYIIQNPSYCGMIRWNRTENSTNRIKDKDEWIVTEGQQPAIISKELFESAQKRFKATYKPVGKRPSSTYKHWLSGLLKCPDCGRTLTSTTMKRVNGEKYSYFSCYGYSKGKCKKPNGISSLVLEKEVLAGIKEVLDTGNISYELHDYQPAEAVDERSIIRDRLNSLSSKEERIKASYREGIDTLEEYKANKAIIQKERESLEQQLKELKKATHKSDQDPADAMLQKVRSVYDILISNNYTYIQKNEALKQIIDKIIYDRKNDSLKIYFFLYR

SEQ ID NO: 6304 - protein, 493 aa, Unknown
  Description of Unknown: Integrase B6305 sequence
  cd03768,PTHR30461:SF3,SM00857,IPR036162,PF13408, PS51737,IPR025827,G3DSA:3.40.50.1390,IPR006119,PF07508, SSF53041,IPR011109,PTHR30461,PS51736,PF00239
MKTAIYARQSVNKKDSISIETQIDICKREIKDNGPIEIYQDKGYSGKNTSRPAFQSLLNDVKQNKINNIIVYRLDRISRSVLDFANIIDILKEHNVGFVSANEKFDTTTPVGKAMLYIVMVFAQLERETIAERVKDNYYARGTEGVWLGGPAPYGFNNTKISIGNKNVATIVPNEKIELIKWIFEQYQQDDTSLGIIARQLVAQHPGEMWNNIKLSRILHNPAYVRADVDVYNYFKSKGCIIKSDISQFDGIHGLNIYGKRDRTLNKYNNIENHHVTVSLHEGIISSRDWLQCQYKLENNIQIKNTGTGKHTWLTGLLKCGYCGRAVTPKKTTKTTMKLYCSGKPLGLCDEVTNSHYLTDVENLVSEKIKKYIDKMQECEINTIENANETEINILKIELVKVETEIDCIVNNLTLANEVMMKYANEKIIELDKKRNEILGKLSKLSVAKPHKLDVPDICDWDSGSKEFKKEVANILIDRVLIYNDQITVKWKY

SEQ ID NO: 6305 - protein, 493 aa, Unknown
  Description of Unknown: Integrase B6306 sequence
  PTHR30461:SF3,IPR036162,PS51737,IPR011109,PTHR30461, PS00397,PF00239,G3DSA:1.10.10.2600,IPR006119,SSF53041, cd00338,SM00857,IPR025827,IPR038109, PS51736,IPR006118,PF13408,G3DSA:3.40.50.1390,PF07508,Coil
MSVKYAYGYIRVSTHDQEEISPDSQEHLLRDYAAKNNIVILKIFTDLGISGRKANKRPGFQEMIGLAKGDDHPVDQILVWKFSRFARNQEESIVYKSLLKKQHNVDVVSVSEPLSDDPFGSLIERIIEWMDEYYSIRLSGEVYRGMKENALRGAYQARPPLGYKVVEHGKPPVIVSEEAKIVRTIFEKYTNEGMSFFDIARYLNSLGLKTSHGKPFERRSVEYIIQNPSYCGMIRWNRTENSTNRIKDKDEWIVTEGQQPAIISKELFESAQKRFKATYKPVGKRPSSTYKHWLSGLLKCPDCGRTLTSTTMKRVNEEKYSYFSCYGYSKGKCKKPNGISSLVLEKEVLASIKEILDTKDIVYELREYQPTEQFDERKAITEQLESLTGKEERIKASYREGIDTLEEYKANKAIIQKERESLEQQLKELKTAARKSDQDPADAMLQKVRSVYDILISNNYTYIQKNEALKQIIDKIIYDRKNDSLKIYFFLYR

SEQ ID NO: 6306 - protein, 493 aa, Unknown
  Description of Unknown: Integrase B6307 sequence
  PTHR30461:SF3,IPR036162,PS51737,IPR011109,PTHR30461, PS00397,PF00239,G3DSA:1.10.10.2600,IPR006119,SSF53041, SM00857,IPR025827,IPR038109,PS51736,cd03768, IPR006118,PF13408,G3DSA:3.40.50.1390,PF07508,Coil
MRVICYVRVSTREQAEKGYSVGEQQERLRAYCIAKDWIVEDVITDPGFSGAKLERPGIQRVIRLVQEKKCEAVLVWKLDRLSRSQKDTLYLIEDVFLKNGCAFVSMNENFDTSTAFGRAMIGILSVFAQLEREQIRERMAVGRVGRAKAGLFHGGGFAPIGYDYKTIAEGGEGLVVNEYEAMQVREVFSLYLQGWPVNRIRKYMTARYTTKSGDWGNDTTIRDVLKNPLYIGKINWAKKIYDGKHEPIIDEETFNAAAARLASSQWKRDCSDGLERNSPFHSTHLLGGILWCGRCGARYFASGNYSGKGENRKYWPYYVCYSRAKSAKRMIRDPNCKNDRWPVAKLDKIILDQVRQLIFDPETLERAAGGNQEAPPSERRALLNARRAEAKGQIDRLLDLCQMGTLPAAAVADRLKSLQDEVEGIDTALRELAEDDPAERLEAARETLVGAAEILDNGSLDEKRELVHSLIHRIDLDGENIDIHWSFAPGESE

SEQ ID NO: 6307 - protein, 493 aa, Unknown
  Description of Unknown: Integrase B6308 sequence
  PTHR30461:SF3,SM00857,IPR006118,G3DSA:1.10.10.2600,IPR036162, PS51737,G3DSA:3.40.50.1390,IPR006119,IPR038109,PF07508, SSF53041,IPR011109,PF00239,PTHR30461,PS00397, PS51736,Coil,cd00338
MKEKVSERKTGAIYIRVSTDKQEELSPDAQLRLLLDYAKKDSIDVPKEYIFQDNGISGRKANKRPAFQNMIALAKSKEHPIDTIIVWKFSRFARNQEESIVYKSLLKKNNVDVVSVSEPLIDGPFGSLIERIIEWMDEYYSIRLSGEVMRGMTQNAMRGHYQSDAPIGYTSPGDKKPPVINPDTVQIPLMIKDMFLSGSTQLQIARKLNDSGYRTKRGNLWDARGVRYVLENPFYIGKSRWNYTERGRRLKPADEVIYADGNWEALWDEDTFKEIQKRLALNMRKSKSRDISAAKHWLSGLLICSSCGGTLAFGGAHNMRGFQCWKYSKGFCSESHYISTGPIEKMVLEYLEAVMHSPALSYTVISSSSVDASSKLSDLERQLQKIDAKEKRIKAAYLNEIDTLEEYKANKTALEEERRTVEKEIEELTLSDVKYSKEDLDKKMKQNISDLLRVLRDESADYIQKGNMMRNVVDHIVFNRKNTSLDVFLKLVV

SEQ ID NO: 6308 - protein, 493 aa, Unknown
  Description of Unknown: Integrase B6309 sequence
  PTHR30461:SF3,IPR036162,PS51737,IPR011109,PTHR30461, PS00397,PF00239,G3DSA:1.10.10.2600,IPR006119,SSF53041, cd00338,SM00857,IPR025827,IPR038109,PS51736, IPR006118,PF13408,G3DSA:3.40.50.1390,PF07508,Coil
MSVKYAYGYIRVSTHDQEEISPDSQEHLLRDYAAKNNIVILKIFTDLGISGRKANKRPGFQEMIGLAKGDDHPVDLILVWKFSRFARNQEESIVYKSLLKKQHNVDVMSVSEPLSDDPFGSLIERIIEWMDEYYSIRLSGEVLRGMKENAARGAFQGAAPFGYKTVDKTLVIDPEKADIVRHVFNMYVNEKLSVFDIARYLNNLGFRTIRGNLFERRTVEYMLKNPTYCGMIHWNKTENATHSIKNKDEWIVSQGQHPAIISQELFDATQERLKATRRPSRRRERPSSTYKHWLSGLMKCPACGKTLSACTQKRVNGEKYAYFSCYGYAHGQCDKAHGVSSLVLEPEVLAGIKEVLDTGNISYELHDYQPTEAIDERSIIRDRLNSLSSKEERIKASYREGIDTLEEYKSNKAILRKERDNLEEQLKELEGQNSEPDQDPTGDMLLKVRSVYDILISDSYTYVQKNEALKQIVDKIIYDKESDSLKIYFFLCR

SEQ ID NO: 6309 - protein, 493 aa, Unknown
  Description of Unknown: Integrase B6310 sequence
  PTHR30461:SF3,IPR036162,PS51737,IPR011109,PTHR30461, PS00397,PF00239,G3DSA:1.10.10.2600,IPR006119,SSF53041, cd00338,SM00857,IPR025827,IPR038109,PS51736, IPR006118,PF13408,G3DSA:3.40.50.1390,PF07508,Coil
MRVKYAYGYIRVSTHDQEEISPDSQEHLLRDYAAKNNIVILKIFTDLGISGRKANKRPGFQEMIGLAKGDDHPVDQILVWKFSRFARNQEESIVYKSLLKKQHNVDVVSVSEPLSDDPFGSLIERIIEWMDEYYSIRLSGEVYRGMKENALRGAYQARPPLGYKVVEHGKPPVIVPEEAKIVRTIFEKYTNEGMSFFDIARYLNSLGLKTSHGKPFERRSVEYIIQNPSYCGMIRWNRTENSTNRIKDKDEWIVTEGQQPAIISKELFESAQERFKATYKPVGKRPSSTYKHWLSGLLKCPDCGRTLTSTTMKRVNGEKYSYFSCYGYSKGKCKKPNGISSLVLEKEVLASIKEILDTKDIVYELREYQPTEQFDERKAITEQLESLTGKEERIKASYREGIDTLEEYKANKAIIQKERESLEQQLKELKKTARKSDQDPADAMLQKVRSVYDILISNNYTYVQKNEALKQIIDKIIYDRKNDSLKIYFFLYR

SEQ ID NO: 6310 - protein, 493 aa, Unknown
  Description of Unknown: Integrase B6311 sequence
  PTHR30461:SF3,IPR036162,PS51737,IPR011109,PTHR30461, PS00397,PF00239,G3DSA:1.10.10.2600,IPR006119,SSF53041, cd00338,SM00857,IPR025827,IPR038109,PS51736, IPR006118,PF13408,G3DSA:3.40.50.1390,PF07508,Coil
MSVKYAYGYIRVSTHDQEEISPDSQEHLLRDYAAKNNIVIIKIFTDLGISGRKANKRPGFQEMIGLAKGDDHPVDLILVWKFSRFARNQEESIVYKSLLKKQHNVDVVSVSEPLSDNPFGSLIERIIEWMDEYYSIRLSGEVLRGMKENALRGAYQARPPLGYKIVEHGKPPVIVPEEAKIVRTIFEKYTNEGMSFFDIARYLNSLGLKTSHGKPFERRSVEYIIQNPSYCGMIRWNRTENSTNRIKDKDEWIVTEGQQPAIISEELFESAQERFKATYKPVGKRPSSTYKHWLSGLLKCPDCGRTLTATTMKRVNGEKYSYFSCYGYSKGKCKKPNGISSLVLEKEVLASIKEILDTKDIVYELREYQPTEQFDERKAITEQLESLTGKEERIKASYREGIDTLEEYKANKAIIQKERESLEQQLKELKTAARKSDQDPADAMLQKVRSVYDILISNNYTYVQKNEALKQIIDKIIYDRKNDSLKIYFFLYR

SEQ ID NO: 6311 - protein, 493 aa, Unknown
  Description of Unknown: Integrase B6312 sequence
  cd00338,SM00857,IPR006118,G3DSA:1.10.10.2600,IPR036162, PS51737,G3DSA:3.40.50.1390,IPR006119,IPR038109,PF07508, SSF53041,IPR011109,PTHR30461,PS00397,PS51736, Coil,PF00239
MKEKVSERKTGAIYIRVSTDKQEELSPDAQLRLLLDYAKKDSIDVPKEYIFQDNGISGRKANKRPAFQNMIALAKSKEHPIDTIIVWKFSRFARNQEESIVYKSLLKKNNVDVVSVSEPLIDGPFGSLIERIIEWMDEYYSIRLSGEVMRGMTQNAMRGHYQSDAPIGYTSPGDKKPPVINPDTVQIPLMIKDMFLSGSTQLQIARKLNDSGYRTKRGNLWDARGVRYVLENPFYIGKSRWNYTERGRRLKPADEVIYANGNWEALWDEDTFKEIQKRLALNMRKSKSRDISAAKHWLSGLLICSSCGGTLAFGGAHNMRGFQCWKYSKGFCSESHYISTGPIEKMVLEYLEAVMHSPALSYTVISSSSVDASSKLSDLERQLQKIDAKEKRIKAAYLNEIDTLEEYKANKTALEEERRTVEKEIEELTLSDVKYSKEDLDKKMKQNISDLLRVLRDESADYIQKGNMMRNVVDHIVFDRKNTSLDVFLKLVV

SEQ ID NO: 6312 - protein, 493 aa, Unknown
  Description of Unknown: Integrase B6313 sequence
  PTHR30461:SF3,IPR036162,PS51737,IPR011109,PTHR30461, PS00397,PF00239,G3DSA:1.10.10.2600,IPR006119,SSF53041, cd00338,SM00857,IPR025827,IPR038109,PS51736, IPR006118,PF13408,G3DSA:3.40.50.1390,PF07508,Coil
MSVKYAYGYIRVSTHDQEEISPDSQEHLLRDYATKNNVVILKIFTDLGISGRKANKRPGFQEMIGLAKGDDHPVDQILVWKFSRFARNQEESIVYKSLLKKQHDVDVVSISEPLSDNPFGSLIERIIEWMDEYYSIRLSGEVLRGMKENAARGAFQGAAPFGYKTIDKTLVIDPEKADIVRHVFNMYVNEKLSVFDIARYLNNLGFRTIRGNLFERRTVEYMLKNPTYCGMIHWNKTENATHSVKNKDEWIVSQGQHPAIISQELFDATQEQLKATRRPSRRRERPSSTYKHWLSGLMKCPACGKTLSACTQKRVNGEKYAYFSCYGYAHGQCDKAHGVSSLVLEPEVLASIKEILDTGNISYELHDYQPTEAVDERSIIRDRLNSLTSKEERIKASYREGIDTLEEYKSNKAILQKERDNLEEQLKELEGQNPEPDQDPTGDMLLKVRSVYDILISDSYTYVQKNEALKQIVDKIIYDKESDSLKIYFFLCR

SEQ ID NO: 6313 - protein, 493 aa, Unknown
  Description of Unknown: Integrase B6314 sequence
  PTHR30461:SF3,IPR036162,PS51737,IPR011109,PTHR30461, PS00397,PF00239,G3DSA:1.10.10.2600,IPR006119,SSF53041, cd00338,SM00857,IPR025827,IPR038109,PS51736, IPR006118,PF13408,G3DSA:3.40.50.1390,PF07508,Coil
MKTKYCYGYVRVSTSGQEELSPDSQAKLLKDFAKKNDMIVLQIFYELGISGRKADKRPEFQKMIALAKSDKHPVDCIIVWKFSRFARNQEESIVYKSLLKKKHNVEVLSVSEPLVDGPFGSLIERIIEWMDEYYSVRLSGEVTRGMTEKAKRGGYQARPPLGYKIQERGKPPVIVPEEAEIIKIIFDKYVNEHTGIFDIARYLNLCGFKTSHNKPFERRSIEYILQNPTYCGMIRWNRTVSETNEIRPESEWIVSDGQQPAIISKELFDKAQIRYKSEYKPSGTRPSSTYKHWLSGLMKCPVCGRTMIAKTVNNQKSYCYFTCYGYSKGKCLAKTSVSSLKLEPAVLASIKEVLDTGNIIYRHVEPVQETSVDLNVIITEQLRKNVEKFDRIREAYRNGVDTLDEYKENKRMVQEEKEMLEKQLADIKPAEPTIDTSKIAMLEKVRNVYEIIESDSVDPVTKNEILKSVIEKIIYDRSKDELKVYYYYAPESQ

SEQ ID NO: 6314 - protein, 493 aa, Unknown
  Description of Unknown: Integrase B6315 sequence
  PTHR30461:SF3,IPR036162,PS51737,IPR011109,PTHR30461, PS00397,PF00239,G3DSA:1.10.10.2600,IPR006119,SSF53041, cd00338,SM00857,IPR025827,IPR038109,PS51736, IPR006118,PF13408,G3DSA:3.40.50.1390,PF07508,Coil
MSVKYAYGYIRVSTHDQEEISPDSQEHLLRDYAAKNNIVILKIFMDLGISGRKANKRPGFQEMIGLAKGDDHPVDLILVWKFSRFARNQEESIVYKSLLKKQHNVDVVSVSEPLSDDPFGSLIERIIEWMDEYYSIRLSGEVYRGMKENALRGAYQARPPLGYKVVEHGKPPVIVPEEAKIVRTIFEKYTNESMSFFDIARYLNSLGLKTSHGKSFERRSVEYIIQNPSYCGMIRWNRTENSTNRIKDKDEWIVTEGQQPAIISKELFESAQKRFKATYKPVGKRPSSTYKHWLSGLLKCPDCGRTLTSTTMKRVNGEKYSYFSCYGYSKGKCKKPNGISSLVLEKEVLASIKEILDTKDIVYELREYQPTEQFDERKAITEQLESLTGKDERIKASYREGIDTLEEYKANKAIIQKERESLEQQLKELKKVARKSDQDPADAMLQKVRSVYDILISNNYTYVQKNEALKQIIDKIIYDRKNDSLKIYFFLYR

SEQ ID NO: 6315 - protein, 493 aa, Unknown
  Description of Unknown: Integrase B6316 sequence
  PTHR30461:SF3,IPR036162,PS51737,IPR011109,PTHR30461, PS00397,PF00239,G3DSA:1.10.10.2600,IPR006119,SSF53041, cd00338,SM00857,IPR025827,IPR038109,PS51736, IPR006118,PF13408,G3DSA:3.40.50.1390,PF07508,Coil
MSVKYAYGYIRVSTHDQEEISPDSQEHLLLDYAAKNNIVILKIFTDLGISGRKANKRPGFQEMIGLAKADDHPVDQILVWKFSRFARNQEESIVYKSLLKKQHNVDVVSVSEPLSDNPFGSLIERIIEWMDEYYSIRLSGEVLRGMKENAARGAFQGAAPFGYKTIDKTLVIDPEKADIVRHVFNMYVNEKLSVFDIARYLNNLGFRTIRGNLFERRTVEYMLKNPTYCGMIHWNKTENATHSIKNKDEWIVSQGQHPAIISQELFDATQERLKATRRPSRRRERPSSTYKHWLSGLMKCPACGKTLSACTQKRVNGEKYAYFSCYGYAHGQCDKAHGVSSLVLEPEVLASIKEVLDTGNISYELHDYQPTEAVDERSIIRDRLNSLTSKEERIKASYREGIDTLEEYKSNKAILQKERDNLEEQLKELEGQNPEPNQDPTGDMLLQVRSVYDILVSDSYTYVQKNEALKQIVDKIIYDKESDSLKIYFFLCR

SEQ ID NO: 6316 - protein, 493 aa, Unknown
  Description of Unknown: Integrase B6317 sequence
  PTHR30461:SF3,IPR036162,PS51737,IPR011109,PTHR30461, PS00397,PF00239,G3DSA:1.10.10.2600,IPR006119,SSF53041, cd00338,SM00857,IPR025827,IPR038109,PS51736, IPR006118,PF13408,G3DSA:3.40.50.1390,PF07508,Coil
MSVKYAYGYIRVSTHDQEEISPDSQEHLLRDYATKNNVVILKIFTDLGISGRKANKRPGFQEMIGLAKGDDHPVDQILVWKFSRFARNQEESIVYKSLLKKQHNVDVVSVSEPLSDDPFGSLIERIIEWMDEYYSIRLSGEVLRGMKENAARGAFQGAAPFGYKTIDKTLVIDPEKADIVRHVFNMYVNEKLSVFDIARYLNSLGFRTIRGNLFERRTVEYMLKNPTYCGMIHWNKTENATHSVKNKDEWIVSQGQHPAIISQELFDATQERLKATRRPSRRRERPSSTYKHWLSGLMKCPACGKTLSACTQKRVNGEKYAYFSCYGYAHGQCDKAHGVSSLVLEPEVLASIKEILDTGNISYELHDYQPTEAVDERSIIRDRLNSLTSKEERIKASYREGIDTLEEYKSNKAILQKERDNLEEQLKELEGQNPEPDQDPTGDMLLKVRSVYDILISDSYTYVQKNEALKQIVDKIIYDKESDSLKIYFFLCR

SEQ ID NO: 6317 - protein, 493 aa, Unknown
  Description of Unknown: Integrase B6318 sequence
  PTHR30461:SF3,SM00857,G3DSA:1.10.10.2600,IPR036162,PF13408, IPR025827,G3DSA:3.40.50.1390,PS51737,IPR006119,IPR038109, PF07508,IPR011109,SSF53041,PTHR30461,Coil, PS51736,cd00338,PF00239
MPEALNAVIYARYSSDRQTEQSIEGQLRECYAFAKANDIAVIDTYIDRAISGKTDNRPAFQKMIEDSAKRQFQAVIVYRLDRFTRNRYDSAIYKARLKKNGVKVLSAMENLNGSPESIIMESLLEGMAEYYSVELSQKITRGMRENALKGKALGGQRVLGYKVNSDCYFEIDETTAPVVVDIFKLYSSGKTVKEICDILNARGVKTARGGAFNKNSLHTILTNKKYIGIYKTKYGEIIGGIPAIIDKELFEMVALRMEQNKKAPARAKAEINYLLSTKLFCGKCRSAMVGESGTSKTGKKYYYYACVKKKREKACDKSNVKKDWIEDLVIQRTVTDILKDDVIEKIADRLVELQKAEAAESGTMLYLENSLAEIQVSIKNIMTAIEKGIITESTKTRLTELEDEKRNVEIEIAKESIARRIISREQIIYWISSFKDGDITSEKYRQQLIDTFVHAVFVYDDKIVITYNYSGENNTATISDLDLSSPPYDTNPP

SEQ ID NO: 6318 - protein, 493 aa, Unknown
  Description of Unknown: Integrase B6319 sequence
  PTHR30461:SF3,IPR036162,PS51737,IPR011109,PTHR30461, PS00397,PF00239,G3DSA:1.10.10.2600,IPR006119,SSF53041, cd00338,SM00857,IPR025827,IPR038109,PS51736, IPR006118,PF13408,G3DSA:3.40.50.1390,PF07508,Coil
MSVKYAYGYIRVSTHDQEEISPDSQEHLLRDYATKNNVVILKIFTDLGISGRKANKRPGFQEMIGLAKGDDHPVDQILVWKFSRFARNQEESIVYKSLLKKQHNVDVVSVSEPLSDDPFGSLIERIIEWMDEYYSIRLSGEVYRGMKENALRGAYQARPPLGYKVVEHGKPPVIVPEEAKIVRTIFEKYTNEGMSFFDIARYLNSLGLKTSHGKSFERRSVEYIIQNPSYCGMIRWNRTENSTNRIKDKDEWIVTEGQQPAIISKELFESAQKRFKATYKPVGKRPSSTYKHWLSGLLKCPDCGRTLTSTTMKRVNGEKYSYFSCYGYSKGKCKKPNGISSLVLEKEVLACIKEILDTKDIVYELREYQPTDQFDERKAITEQLESLTGKEERIKASYREGIDTLEEYKTNKAIIQKERESLEQQLKDLKKAAHKSDQDPADAMLQKVRSVYDILISNNYTYVQKNEALKQIIDKIIYDRKNDSLKIYFFLYR

SEQ ID NO: 6319 - protein, 493 aa, Unknown
  Description of Unknown: Integrase B6320 sequence
  PTHR30461:SF3,IPR036162,PS51737,IPR011109,PTHR30461, PS00397,PF00239,G3DSA:1.10.10.2600,IPR006119,SSF53041, cd00338,SM00857,IPR025827,IPR038109,PS51736, IPR006118,PF13408,G3DSA:3.40.50.1390,PF07508,Coil
MSVKYAYGYIRVSTHDQEEISPDSQEHLLRDYAAKNNIVIIKIFTDLGISGRKANKRPGFQEMIGLAKGDDHPVDLILVWKFSRFARNQEESIVYKSLLKKQHNVDVVSVSEPLSDDPFGSLIERIIEWMDEYYSIRLSGEVLRGMKENAARGAFQGVAPFGYKTVNKTLAIDPEKADIVRHVFNMYVNEKLSVFDIARYLNNLGFRTIRGNLFERRTVEYMLKNPTYCGMIHWNKTENATHSIKNKDEWIVSQGQHPAIISQELFDATQERLKATRRPSRRRERPSSTYKHWLSGLMKCPACGKTLSACTQKRVNGEKYAYFSCYGYAHGQCDKAHGVSSLVLEPEVLAGIKEVLDTGNISYELHDYQPTEAVDERSIIRERLSNLTSKEERIKASYREGIDTLEEYKSNKAILQKERDNLEEQLKELEGQNPEPDQDPAGDMLLKVRSVYDILISDSYTYVQKNEALKQIVDKIIYDKESDSLKIYFFLCR

SEQ ID NO: 6320 - protein, 493 aa, Unknown
  Description of Unknown: Integrase B6321 sequence
  PTHR30461:SF3,IPR036162,PS51737,IPR011109,PTHR30461, PS00397,PF00239,G3DSA:1.10.10.2600,IPR006119,SSF53041, cd00338,SM00857,IPR025827,IPR038109,PS51736, IPR006118,PF13408,G3DSA:3.40.50.1390,PF07508,Coil
MSVKYAYGYIRVSTHDQEEISPDSQEHLLRDYAAKNNIVILKIFTDLGISGRKANKRPGFQEMIGLAKADDHPVDQILVWKFSRFARNQEESIVYKSLLKKQHNVDVVSVSEPLSDNPFGSLIERIIEWMDEYYSIRLSGEVYRGMKENALRGAYQARPPLGYKVVEHGKPPVIVPEEAKIVRTIFEKYTNEGMSFFDIARYLNSLGLKTSHGKPFERRSVEYIIQNPSYCGMIRWNRTENSTNRIKDKDEWIVTEGQQPAIISKELFESAQERFKATYKPVGKRPSSTYKHWLSGLLKCPDCGRTLTSTTMKRVNGEKYSYFSCYGYSKGKCKKPNGISSLVLEKEVLASIKEILDTKDIVYELREYQPTEQFDERKAITEQLESLNGKEERIKASYREGIDTLEEYKANKAIIQKERESLEQQLKDLKKAAHKSDQDPADAMLQKVRSVYDILISNNYTYIQKNEALKQIIDKIIYDRKNDSLKIYFFLYR

SEQ ID NO: 6321 - protein, 493 aa, Unknown
  Description of Unknown: Integrase B6322 sequence
  PTHR30461:SF3,IPR036162,PS51737,IPR011109,PTHR30461, PS00397,PF00239,G3DSA:1.10.10.2600,IPR006119,SSF53041, cd00338,SM00857,IPR025827,IPR038109,PS51736, IPR006118,PF13408,G3DSA:3.40.50.1390,PF07508,Coil
MSVKYAYGYIRVSTHDQEEISPDSQEHLLRDYAAKNNIVILKIFTDLGISGRKANKRPGFQEMIGLAKGDDHPVDQILVWKFSRFARNQEESIVYKSLLKKQHNVDVVSVSEPLSDDPFGSLIERIIEWMDEYYSIRLSGEVYRGMKENALRGAYQARPPLGYKVVEHGKPPVIVPEESKIVRTIFEKYTNEGMSFFDIARYLNSLGLKTSHGKPFERRSVEYIIQNPSYCGMIRWNRTENSTNRIKDKDEWIVTEGQQPAIISKELFESAQERFKATYKPVGKRPSSTYKHWLSGLLKCPDCGRTLTSTTMKRVNGEKYSYFSCYGYSKGKCKKPNGISSLVLEKEVLTSIKEVLDTKDIVYELREYQPTEQFDERKAITEQLESLTGKEERIKASYREGIDTLEEYKANKAIVQKERESLEQQLKELKKAAHKSDQDPADAMLQKVRSVYDILISNNYTYVQKNEALKQIIDKIIYDRKNDSLKIYFFLYR

SEQ ID NO: 6322 - protein, 493 aa, Unknown
  Description of Unknown: Integrase B6323 sequence
  PTHR30461:SF3,IPR036162,PS51737,IPR011109,PTHR30461, PS00397,PF00239,G3DSA:1.10.10.2600,IPR006119,SSF53041, SM00857,IPR025827,IPR038109,PS51736,cd03768, IPR006118,PF13408,G3DSA:3.40.50.1390,PF07508,Coil
MRVICYVRVSTREQAEKGYSVGEQQERLRAYCMAKDWIVEDVITDPGFSGAKLERPGIQRVIQLVQEKKCEAVLVWKLDRLSRSQKDTLYLIEDVFLKNGCAFVSMNENFDTSTAFGRAMIGILSVFAQLEREQIRERMAVGRVGRAKAGLFHGGGFAPIGYDYKTIAEGGEGLVVNEYEAMQVREVFSLYLQGWPVNRIRKYMTARYTTKSGDWGNDTTIRDVLKNPLYIGKINWAKKIYDGKHEPIIDEETFNAAAARLASSQWKRDCSDGLERNSPFHSTHLLGGILWCGRCGARYFASGNYSGKGENRKYWPYYVCYSRAKSAKRMIRDPNCKNDRWPVAKLDKIILDQVRQLIFDPEALERAAGGNQEAPPSERRALLNARRAEAKGQIDRLLDLCQMGTLPAAAVADRLKSLQDEVEGIDTALRELAEDDPAERLEAARGTLVGAAEILDNGSLDEKRELVHSLIHRIDLDGENIDIHWSFAPGESE

SEQ ID NO: 6323 - protein, 493 aa, Unknown
  Description of Unknown: Integrase B6324 sequence
  PTHR30461:SF3,IPR036162,PS51737,IPR011109,PTHR30461, PS00397,PF00239,G3DSA:1.10.10.2600,IPR006119,SSF53041, cd00338,SM00857,IPR025827,IPR038109,PS51736, mobidb-lite,IPR006118,PF13408,G3DSA:3.40.50.1390,PF07508,Coil
MKETLSERKTGAIYIRVSTDKQEELSPDAQLRLLMDYAKNNHTDIPMEYIFQDNGISGRKANKRPAFQQMIALAKSKEHPIDTIIVWKFSRFARNQEESIVYKSLLKKNNVDVVSVSEPLIDGPFGSLIERIIEWMDEYYSIRLSGEVMRGMTQNALRGHYQGDAPIGYQSPGNKKPPEKDPKTVQIPIMMKDLLLSGSSLLQIARKLNEQGYRTKHGNLWDARGVRYVLENPFYAGISRWNYTDRGRQLKPADEVIYTKGNWEPLWDKATLEEIKKHLAMNMRKTKSRDVSAAKHWLSGLLICSSCGGTLAYSGTKNSRGFQCWKYAKGFCNESHYIGIHPIEKMVIEYLESILHSPAIVYTVISSASADADSKLADLEKQLQKVENKEKRIKAAYLNEIDSLEEYKANKAALLKERAAIEKNIKLLTISNTDMSKEEMDKKMKQNISALLTVLQDDSADYVQKGNMMRNVVDHIVFDRGNTSLDMFLKLVI

SEQ ID NO: 6324 - protein, 493 aa, Unknown
  Description of Unknown: Integrase B6325 sequence
  PTHR30461:SF3,IPR036162,PS51737,IPR011109,PTHR30461, PS00397,PF00239,G3DSA:1.10.10.2600,IPR006119,SSF53041, cd00338,SM00857,IPR025827,IPR038109,PS51736, IPR006118,PF13408,G3DSA:3.40.50.1390,PF07508,Coil
MSVKYAYGYIRVSTHDQEEISPDSQEHLLRDYAAKNNIVILKIFTDLGISGRKANKRPGFQEMIGLAKGDNHPVDQILVWKFSRFARNQEESIVYKSLLKKQHNVDVVSVSEPLSDDPFGSLIERIIEWMDEYYSIRLSGEVYRGMKENALRGAYQARPPLGYKVVEHGKPPVIVPEEAKIVRTIFEKYTNEGMSFFDIARYLNSLGLKTSHGKPFERRSVEYIIQNPSYCGMIRWNRTENSTNRIKDKDEWIVTEGQQPAIISKELFESAQKRFKATYKPVGKRPSSTYKHWLSGLLKCPDCGRTLTSTTMKRVNGEKYSYFSCYGYSKGKCKKPNGISSLVLEKEVLASIKEVLDTKDIVYELREYQPTEQFDERKAITEQLESLTGKEERIKASYREGIDTLEEYKANKAIIQKERESLEQQLKELKKAAHKSDQDPADAMLQKVRSVYDILISNNYTYVQKNEALKQIIDKIIYDRKNDSLKIYFFLYK

SEQ ID NO: 6325 - protein, 493 aa, Unknown
  Description of Unknown: Integrase B6326 sequence
  PTHR30461:SF3,cd00338,SM00857,G3DSA:1.10.10.2600,IPR036162, PF13408,IPR025827,G3DSA:3.40.50.1390,PS51737,IPR006119, IPR038109,PF07508,IPR011109,SSF53041,PTHR30461, PS51736,Coil,PF00239
MGQKCVIYTRYSSDRQREESIEGQIRVCEDYAKRNGLEVLHIYADRAMTGRSDQRPEFLTMIRDAASMSFDTVLVYKLNRFARNRYDSAKYKHKLKKYGVKVVSAMENIADDPSGILLESVIEGMAEYYSVELAENVVRGMTENALEGKWPGGIVPLGYKLDADHHLVIDEPNALVVRRIYQMILDGRTPASICRILNAEGKRTATGRAFNHNSITRLLSNERYIGIFSWRDVRRTGVVPRILDDRTFYAVQELRKSRQRHKGVAKRSENYMLTGKIFCGRCGSPMVGKSGTSKGGCIYYYYNCQRHIDGSGCPARPVRTDKLEDRVVQVTTKILSQPDAIKAIARQAIAIQKERRESLEVQSLKAQVSDLSKKLDNCLKAVDNGAFSETLCNHMRGYENRLRDMKAALSRAQLMDRGGKLTEKQIEFFFFAISRQLKQEPRYKEILLSSLVRCVIVNDDSIEIQYNYKKELPTLANPVKVKSSHKVLMVTPE

SEQ ID NO: 6326 - protein, 493 aa, Unknown
  Description of Unknown: Integrase B6327 sequence
  PTHR30461:SF3,IPR036162,PS51737,IPR011109,PTHR30461, PS00397,PF00239,G3DSA:1.10.10.2600,IPR006119,SSF53041, cd00338,SM00857,IPR025827,IPR038109,PS51736, IPR006118,PF13408,G3DSA:3.40.50.1390,PF07508,Coil
MSVKYAYGYIRVSTHDQEEISPDSQEHLLRDYAAKNNIVILKIFTDLGISGRKANKRPGFQEMIGLAKGDDHPVDLILVWKFSRFARNQEESIVYKSLLKKQHNVDVVSVSEPLSDDPFGSLIERIIEWMDEYYSIRLSGEVHRGMKENALRGAYQARPPLGYKVVEHGKPPVIVPEEAKIVRTIFEKYTNEGMSFFDIARYLNSLGLKTSHAKPFERRSVEYIIQNPSYCGMIRWNRTENSTNRIKDKDEWIVTEGQQPAIISKELFESAQERFKATYKPVGKRPSSTYKHWLSGLLKCPDCGRTLTSTTMKRVNGEKYSYFSCYGYSKGKCKKPNGISSLVLEKEVLASIKEILDTKDIVYELREYQPTEQFDERKAITEQLESLTGKEERIKASYREGIDTLEEYKANKAIIQKERESLEQQLKELKKAAHKSDPDPADAMLQKVRSVYDILISNNYTYVQKNEALKQIIDKIIYDRKNDSLKIYFFLYR

SEQ ID NO: 6327 - protein, 493 aa, Unknown
  Description of Unknown: Integrase B6328 sequence
  PTHR30461:SF3,IPR036162,PS51737,IPR011109,PTHR30461, PS00397,PF00239,G3DSA:1.10.10.2600,IPR006119,SSF53041, cd00338,SM00857,IPR025827,IPR038109,PS51736, IPR006118,PF13408,G3DSA:3.40.50.1390,PF07508,Coil
MRVKYAYGYIRVSTHDQEEISPDSQEHLLRDYAAKNNIVILKIFTDLGISGRKANKRPGFQEMIGLAKGDDHPVDQILVWKFSRFARNQEESIVYKSLLKKQHNVDVVSVSEPLSDNPFGSLIERIIEWMDEYYSIRLSGEVYRGMKENALRGAYQARPPLGYKVVEHGKPPVIIPEEAKIVRTIFEKYTNEGMSFFDIARYLNSLGLKTSHGKPFERRSVEYIIQNPSYCGMIRWNRTENSTNRIKDKDEWIVTEGQQPAIISKELFESAQERFKATYRPVGKRPSSTYKHWLSGLLKCPDCGRTLTSTTMKRVNGEKYSYFSCYGYSKGKCKKPNGISSLVLEKEVLASIKEILDTKDIVYELREYQPTEQFDERKAITEQLESLTGKEERIKASYREGIDTLEEYKANKAIIQKERESLEQQLKDLKKAAHKSDQNPADAMLQKVRSVYDILISNNYTYVQKNEALKQIIDKIIYDRKNDSLKIYFFLYR

SEQ ID NO: 6328 - protein, 493 aa, Unknown
  Description of Unknown: Integrase B6329 sequence
  PTHR30461:SF3,IPR036162,PS51737,IPR011109,PTHR30461, PS00397,PF00239,G3DSA:1.10.10.2600,IPR006119,SSF53041, SM00857,IPR025827,IPR038109,PS51736,cd03768, IPR006118,PF13408,G3DSA:3.40.50.1390,PF07508,Coil
MRVICYVRVSTREQAEKGYSVGEQQERLRAYCMAKDWIVEDVITDPGFSGAKLERPGIRRVIQLVQEKKCEAVLVWKLDRLSRSQKDTLYLIEDVFLKNGCAFVSMNENFDTSTAFGRAMIGILSVFAQLEREQIRERMAVGRVGRAKAGLFHGGGFAPIGYDYKTIAEGGEGLVVNEYEAMQVREVFSLYLQGWPVNRIRKYMTARYTTKSGDWGNDTTIRDVLKNPLYIGKINWAKKIYDGKHEPIIDEETFNAAAARLASSQWKRDCSDGLERNSPFHSTHLLGGILWCGRCGARYFASGNYSGKGENRKYWPYYVCYSRAKSAKRMIRDPNCKNDRWPVAKLDKIILDQVRQLIFDPEALERAAGGNQEAPPSERRALLNARRAEAKGQIDRLLDLCQMGTLPAAAVADRLKSLQDEVEGIDTALRELAEDDPAERLEAARGTLVGAAEILDNGSLDEKRELVHSLIHRIDLDGENIDIHWSFAPGESE

SEQ ID NO: 6329 - protein, 493 aa, Unknown
  Description of Unknown: Integrase B6330 sequence
  PTHR30461:SF3,IPR036162,PS51737,IPR011109,PTHR30461, PS00397,PF00239,G3DSA:1.10.10.2600,IPR006119,SSF53041, cd00338,SM00857,IPR025827,IPR038109,PS51736, IPR006118,PF13408,G3DSA:3.40.50.1390,PF07508,Coil
MSVKYAYGYIRVSTHDQEEISPDSQEHLLRDYATKNNIVILKIFTDLGISGRKANKRPGFQEMIGLAKGDDHPVDQILVWKFSRFARNQEESIVYKSLLKKQHNVDVVSVSEPLSDDPFGSLIERIIEWMDEYYSIRLSGEVYRGMKENALRGAYQARPPLGYKVVEHGKPPVIVPEEAKIVRTIFEKYTNEGMSFFDIARYLNSLGLKTSHGKPFERRSVEYIIQNPSYCGMIRWNRTENSTNRIKDKDEWIVTEGQQPAIISKELFESAQERFKATYKPVGKRPSSTYKHWLSGLLKCPDCGRTLTSTTMKRVNGEKYSYFSCYGYSKGKCKKPNGISSLVLEKEVLASIKEILDTKDIVYELREYQPTEQFDERKAITEQLESLTGKEERIKASYREGIDTLEEYKANKAIIQKERETLEQQLKDLKKAAHKSDQDPADAMLQKVRSVYDILISSNYTYVQKNEALKQIIDKIIYDRKNDSLKIYFFLYR

SEQ ID NO: 6330 - protein, 493 aa, Unknown
  Description of Unknown: Integrase B6331 sequence
  PTHR30461:SF3,IPR036162,PS51737,IPR011109,PTHR30461, PS00397,PF00239,G3DSA:1.10.10.2600,IPR006119,SSF53041, cd00338,SM00857,IPR025827,IPR038109,PS51736, IPR006118,PF13408,G3DSA:3.40.50.1390,PF07508,Coil
MSVKYAYGYIRVSTHDQEEISPDSQEHLLRDYAAKNNIVILKIFTDLGISGRKANKRPGFQEMIGLAKGDDHPVDQILVWKFSRFARNQEESIVYKSLLKKQHNVDVVSVSEPLSDNPFGSLIERIIEWMDEYYSIRLSGEVYRGMKENALRGAYQARPPLGYKVVEHGKPPVIVPKEAKIVQTIFEKYVNESMGFFDIARYLNDLGLKTSHGKPFERRSIEYIIQNPSYCGMIRWNRTENSTNRIKDKDEWIVTEGQQPAIISKELFESAQERFKATYKPAGKRPSSTYKHWLSGLLKCPDCGRTLTSTTMKRVNGEKYSYFSCYGYSKGKCKKPNGISSLVLEKEVLASIKEILDTKDIVYELREYQPTEQFDERKAITEQLESLTGKEERIKASYREGIDTLEEYKANKAIIQKERESLEQQLKELKKAARKSDQDPADAMLQKVRSVYDILISNNYTYIQKNEALKQIIDKIIYDRKNDSLKIYFFLYR

SEQ ID NO: 6331 - protein, 493 aa, Unknown
  Description of Unknown: Integrase B6332 sequence
  PTHR30461:SF3,IPR036162,PS51737,IPR011109,PTHR30461, PS00397,PF00239,G3DSA:1.10.10.2600,IPR006119,SSF53041, cd00338,SM00857,IPR025827,IPR038109,PS51736, IPR006118,PF13408,G3DSA:3.40.50.1390,PF07508,Coil
MKEKVSERKTGAIYIRVSTDKQEELSPDAQLRLLMDYAKKNSIDVPEEYIYQDNGISGRKANKRPAFQNMIALAKSKEHPIDTIIVWKFSRFARNQEESIVYKSLLSKNSVDVVSVSEPLIDGPFGSLIERIIEWMDEYYSIRLSGEVMRGMTQNAMRGHYQSDAPIGYISPGDKKPPVINPDTVQIPLMIKDMFLSGSTQLQIARKLNDMGYRTKRGNLWDARGVRYVLENPFYIGKSRWNYTERGRKLKPSDEVIYADGNWEALWDEDTFKEIQKRLALNMRKAKSRDVSSAKHWLSGLLICSSCGGTLAYGGANSARGFQCWKYSKGFCSESHYISTGSIEKMVMEYLEYVLHSPTLSYTIISAASSNAESKLSDCERQLQKIDAKEKRIKAAYLNEIDTLEEYKANKTALEEERRTIEKEIEELTLSNVKYTKEDMDKKMKQNIQNLLLVLKDESADYVQKGNMMRNVVDHIVFDRKNTSLDVFLKLVI

SEQ ID NO: 6332 - protein, 493 aa, Unknown
  Description of Unknown: Integrase B6333 sequence
  PTHR30461:SF3,IPR036162,PS51737,IPR011109,PTHR30461, PS00397,PF00239,G3DSA:1.10.10.2600,IPR006119,SSF53041, cd00338,SM00857,IPR025827,IPR038109,PS51736, IPR006118,PF13408,G3DSA:3.40.50.1390,PF07508,Coil
MSVKYAYGYIRVSTHDQEEISPDSQEHLLRDYAAKNNIVILKIFTDLGISGRKANKRPGFQEMIGLAKGDDHPADQILVWKFSRFARNQEESIVYKSLLKKQHNVDVVSVSEPLSDNPFGSLIERIIEWMDEYYSIRLSGEVLRGMKENAARGAFQGAAPFGYKTVDKTLVIDPEKADIVRHVFNMYVNEKLSVFDIARYLNNLGFRTIRGNLFERRTVEYMLKNPTYCGMIHWNKTENATHSIKNKDEWIVSQGQHPAIISQELFDATQERLKATRRPSRRRERPSSTYKHWLSGLMKCPACGKTLSACTQKRVNGEKYAYFSCYGYAHGQCDKAHGVSSLVLEPEVLASIKEVLDTGNISYELHDYQPTEAVDERSIIRDRLNSLTSKEERIKASYREGIDTLEEYKSNKAILQKERDNLEEQLKELEGQNPEPDQDPTGDMLLQVRSVYDILVSDSYTYVQKNEALKQIVDKIIYDKESDSLKIYFFLCR

SEQ ID NO: 6333 - protein, 493 aa, Unknown
  Description of Unknown: Integrase B6334 sequence
  PTHR30461:SF3,IPR036162,PS51737,IPR011109,PTHR30461, PS00397,PF00239,G3DSA:1.10.10.2600,IPR006119,SSF53041, cd00338,SM00857,IPR025827,IPR038109,PS51736, IPR006118,PF13408,G3DSA:3.40.50.1390,PF07508,Coil
MKEKVSERKTGAIYIRVSTDKQEELSPDAQLRLLMDYAKNNHTDIPMEYIFQDNGISGRKANKRPAFQQMIALAKSKEHPIDTIIVWKFSRFARNQEESIVYKSLLKKNNVDVVSVSEPLIDGPFGSLIERIIEWMDEYYSIRLSGEVMRGMTQNALRGHYQGDAPIGYQSPGNKKPPEKDPKTIQIPIMMKDLLLSGSSLLQIARKLNEQGYRTKHGNLWDARGVRYVLENPFYAGISRWNYTDRGRQLKPADEVIYTKGNWEPLWDKATLEEIKKHLAMNMRKTKSRDVSAAKHWLSGLLICSSCGGTLAYSGTKNSRGFQCWKYTKGFCNESHYIGIHPIEKMVIEYLESVLHSPAIVYTVISSASADADSKLADFEKQLQKVENKEKRIKAAYLNEIDSLEEYKANKAALLKERAAIEKNIKLLTISNTDMSKEEMDKKMKQNISALLTVLQDDSADYVQKGNMMRNVVDHIVFDRRNTSLDMFLKLVI

SEQ ID NO: 6334 - protein, 493 aa, Unknown
  Description of Unknown: Integrase B6335 sequence
  PTHR30461:SF3,IPR036162,PS51737,IPR011109,PTHR30461, PS00397,PF00239,G3DSA:1.10.10.2600,IPR006119,SSF53041, cd00338,SM00857,IPR025827,IPR038109,PS51736, IPR006118,PF13408,G3DSA:3.40.50.1390,PF07508,Coil
MSVKYAYGYIRVSTHDQEEISPDSQEHLLRDYAAKNNIVILKIFTDLGISGRKANKRPGFQEMIGLAKGDDHPVDQILVWKFSRFARNQEESIVYKSLLKKQHNVDVVSVSEPLSDDPFGSLIERIIEWMDEYYSIRLSGEVYRGMKENALRGAYQARPPLGYKVVEHGKPPVIVPEEAKIVRTIFEKYTNEGMSFFDIAKYLNSLGLKTSHGKPFERRSVEYIIQNPSYCGMIRWNRTENSTNRIKDKDEWIVTEGQQPAIISKELFESAQKRFKATYKPVGKRPSSTYKHWLSGLLKCPDCGRTLTSTTMKRVNGEKYSYFSCYGYSKGKCKKPNGISSLVLEKEVLASIKEILDTKDIVYELREYQPTEQFDERKAITEQLESLNGKEERIKASYREGIDTLEEYKANKAIIQKERESLEQQLKDLKKAAHKSDQDPADAMLQKVRSVYDILISNNYTYVQKNEALKQIIDKIIYDRKNDSLKIYFFLYR

SEQ ID NO: 6335 - protein, 493 aa, Unknown
  Description of Unknown: Integrase B6336 sequence
  PTHR30461:SF3,IPR036162,PS51737,IPR011109,PTHR30461, PS00397,PF00239,G3DSA:1.10.10.2600,IPR006119,SSF53041, cd00338,SM00857,IPR025827,IPR038109,PS51736, IPR006118,PF13408,G3DSA:3.40.50.1390,PF07508,Coil
MSVKYAYGYIRVSTHDQEEISPDSQEHLLRDYAAKNNIVILKIFTDLGISGRKANKRPGFQEMIGLAKGDDHPIDLILVWKFSRFARNQEESIVYKSLLKKQHNVDVVSVSEPLSDNPFGSLIERIIEWMDEYYSIRLSGEVYRGMKENALRGAYQARPPLGYKVVEHGKPPVIVPEEAKIVRTIFEKYTNEGMSFFDIARYLNSLGLKTSHGKPFERRSVEYIIQNPSYCGMIRWNRTENSTNRIKDKDEWIVTEGQQPAIISKELFESAQKRFKATYKPVGKRPSSTYKHWLSGLLKCPDCGRTLTSTTMKRVNGEKYSYFSCYGYSKGKCKKPNGISSLVLEKEVLAGIKEILDTKDIVYELREYQPTEQFDERKAITEQLESLTGKEERIKASYREGIDTLEEYKANKAIIQKERESLEQQLQELKKAARKSDQDPADAMLQKVRSVYDILISNNYTYIQKNEALKQIIDKIIYDRKNDSLKIYFFLYR

SEQ ID NO: 6336 - protein, 493 aa, Unknown
  Description of Unknown: Integrase B6337 sequence
  PTHR30461:SF3,IPR036162,PS51737,IPR011109,PTHR30461, PS00397,PF00239,G3DSA:1.10.10.2600,IPR006119,SSF53041, cd00338,SM00857,IPR025827,IPR038109,PS51736, IPR006118,PF13408,G3DSA:3.40.50.1390,PF07508,Coil
MSVKYAYGYIRVSTHDQEEISPDSQEHLLRDYATKNDIVILKIFTDLGISGRKANKRPGFQEMIGLAKGDDHPVDLILVWKFSRFARNQEESIVYKSLLKKQHNVDVVSVSEPLSDDPFGSLIERIIEWMDEYYSIRLSGEVYRGMKENALRGAYQARPPLGYKVVEHGKPPVIVPEEAKIVRTIFEKYTNEGMSFFDIARYLNSLGFKTSHGKPFERRSIEYIIQNPSYCGMIRWNRTENSTNRIKDKDEWIVTEGQQPAIISKELFESAQERFKATYKPVGKRPSSTYKHWLSGLLKCPDCGRTLTSTTMKRVNGEKYSYFSCYGYSKGKCKKPNGISSLVLEKEVLASIKEILDTKDIFYELREYQPTEQFDERKAITEQLESLTGKEERIKASYREGIDTLEEYKANKAIIQKERESLEQQLKDLKKAAHKSDQDPADAMLQKVRSVYDILISNNYTYVQKNEALKQIIDKIIYDRKNDSLKIYFFLYR

SEQ ID NO: 6337 - protein, 493 aa, Unknown
  Description of Unknown: Integrase B6338 sequence
  PTHR30461:SF3,IPR036162,PS51737,IPR011109,PTHR30461, PS00397,PF00239,G3DSA:1.10.10.2600,IPR006119,SSF53041, cd00338,SM00857,IPR025827,IPR038109,PS51736, IPR006118,PF13408,G3DSA:3.40.50.1390,PF07508,Coil
MSVKYAYGYIRVSTHDQEEISPDSQEHLLRDYAAKNNIVILKIFTDLGISGRKANKRPGFQEMIGLAKGDDHPVDQILVWKFSRFARNQEESIVYKSLLKKQHNVDVVSVSEPLSDDPFGSLIERIIEWMDEYYSIRLSGEVHRGMKENALRGAYQARPPLGYKVVEHGKPPVIVPEEAKIVRTIFEKYTNEGMSFFDIARYLNSLGLKTSHGKPFERRSVEYIIQNPSYCGMIRWNRTENSTNRIKDKDEWIVTEGQQPAIISKELFESAQERFKATYKPVGKRPSSTYKHWLSGLLKCPDCGRTLTSTTMKRVNGEKYSYFSCYGYSKGKCKKPNGISSLVLEKEVLASIKEVLDTKDIVYELREYQPTEQFDERKAITEQLESLNGKEERIKASYREGIDTLEEYKANKAIIQKERESLEQQLKELKKAAHKSDQDPADAMLQKVRSVYDILISNNYTYIQKNEALKQIIDKIIYDRKNDSLKIYFFLYR

SEQ ID NO: 6338 - protein, 493 aa, Unknown
  Description of Unknown: Integrase B6339 sequence
  SM00857,G3DSA:1.10.10.2600,IPR036162,PF13408,IPR025827, G3DSA:3.40.50.1390,PS51737,IPR006119,IPR038109,PF07508, SSF53041,IPR011109,PF00239,PTHR30461,PS51736, Coil,cd00338
MVLLDTYCIYLRKSRADAEAEARGEGETLARHEHALLDLAKRGNLTISHIYREIVSGDSIAARPQMQQMLQDVTDKAYTGVLVMEIERLARGDTIDQGVVAQAFRESGTKIVTPLKTYDPSNEFDEEYFEFSLFMSRREYKTIKRRMQAGRIASIKEGNYLGTNPPYGYKKVQPEPKVKTLEIVPEEAEAVKMMFDMYLSGDGARAIAAHLNQLQIPPRKAAMWEPVSVRKILGNPVYAGKIEWHTKKDGTILSDGLHPAIISWEQFQQSVERRKRTAPQVPTGYTTQNYYHGILFCGNCGHQMKRRPVPNGTPHMLCRRNECRGKVVSSTTEKIDEAVLEAIKYRISELTLFKDQSGEEKRAKEKQKEIQQNQIKKALEKLKSQKEKLHTLLETDVYTVDVFLERSKALEAKKEELEKALHSITDSLQEKEHLAPEQAVIWLRYVLDHFSTADACQKSKMLQRIIKRIEYKKTEKMCYRKQSSDMSLHIDFL

SEQ ID NO: 6339 - protein, 493 aa, Unknown
  Description of Unknown: Integrase B6340 sequence
  PTHR30461:SF3,IPR036162,PS51737,IPR011109,PTHR30461, PS00397,PF00239,G3DSA:1.10.10.2600,IPR006119,SSF53041, cd00338,SM00857,IPR025827,IPR038109,PS51736, IPR006118,PF13408,G3DSA:3.40.50.1390,PF07508,Coil
MSVKYAYGYIRVSTHDQEEISPDSQEHLLRDYAAKNDIVILKIFTDLGISGRKANKRPGFQEMIGLAKGDDHPVDLILVWKFSRFARNQEESIVYKSLLKKQHNVDVVSVSEPLSDDPFGSLIERIIEWMDEYYSIRLSGEVYRGMKENALRGAYQARPPLGYKVVEHGKPPVIVPEEAKIVRTIFEKYTNEGMSFFDIARYLNSLGLKTSHGKPFERRSVEYIIQNPSYCGMIRWNRTENSTNRIKDKDEWIVTEGQQPAIISKELFESAQERFKATYKPVGKRPSSTYKHWLSGLLKCPDCGRTLTSTIMKRVNGEKYSYFSCYGYSKGKCKKPNGISSLVLEKEVLASIKEVLDTKDIVYELREYQPTEQFDERKAITEQLESLTGKEERIKASYREGIDTLEEYKANKAIIQKERESLEQQLKELKTAARKSDQDPADAMLQKVRSVYDILISNNYTYVQKNEALKQIIDKIIYDRKNDSLKIYFFLYR

SEQ ID NO: 6340 - protein, 493 aa, Unknown
  Description of Unknown: Integrase B6341 sequence
  PTHR30461:SF3,IPR036162,PS51737,IPR011109,PTHR30461, PS00397,PF00239,G3DSA:1.10.10.2600,IPR006119,SSF53041, cd00338,SM00857,IPR025827,IPR038109,PS51736, IPR006118,PF13408,G3DSA:3.40.50.1390,PF07508,Coil
MSVKYAYGYIRVSTHDQEEISPDSQEHLLRDYAAKNNIVILKIFTDLGISGRKANKRPGFQEMIGLAKGDDHPVDQILVWKFSRFARNQEESIVYKSLLKKQHNVDVVSVSEPLSDDPFGSLIERIIEWMDEYYSIRLSGEVYRGMKENALRGAYQARPPLGYKVVEHGKPPVIVPEEAKIVRTIFEKYANEGMSFFDIARYLNSLGLKTSHGKPFERRSVEYIIQNPSYCGMIRWNRTENNTNRIKDKDEWIVTEGQQPAIISKELFESAQERFKATYKPVGKRPSSTYKHWLSGLLKCPDCGRTLTSTTMKRVNGEKYSYFSCYGYSKGKCKKPNGISSLVLEKEVLASIKEVLDTKDIVYELREYQPTEQFDERKAITEQLESLTGKEERIKASYREGIDTLEEYKANKAIIQKERESLEQQLKELKKAARKSDQDPADAMLQKVRSVYDILISNNYTYVQKNEALKQIIDKIIYDRKNDSLKIYFFLYR

SEQ ID NO: 6341 - protein, 493 aa, Unknown
  Description of Unknown: Integrase B6342 sequence
  PTHR30461:SF3,IPR036162,PS51737,IPR011109,PTHR30461, PS00397,PF00239,G3DSA:1.10.10.2600,IPR006119,SSF53041, cd00338,SM00857,IPR025827,IPR038109,PS51736, IPR006118,PF13408,G3DSA:3.40.50.1390,PF07508,Coil
MSVKYAYGYIRVSTHDQEEISPDSQEHLLRDYAAKNNIVILKIFTDLGISGRKANKRPGFQEMIGLAKGDDHPVDQILVWKFSRFARNQEESIVYKSLLKKQHNVDVVSVSEPLSDNPFGSLIERIIEWMDEYYSIRLSGEVHRGMKENALRGAYQARPPLGYKVVEHGKPPVIVPEEAKIVRTIFEKYTNEGMSFFDIARYLNSLGLKTSHGKPFERRSVEYIIQNPSYCGMIRWNRTENSTNRIKDKDEWIVTEGQQPAIISKELFESAQERFKATYKQVGKRPSSTYKHWLSGLLKCPDCGRTLTSATMKRVNGEKYSYFSCYGYSKGKCKKPNGISSLVLEKEVLTSIKEILDTKDIVYELREYQPTEQFDERKAITEQLESLTGKEERIKASYREGIDTLEEYKANKAIIQKERESLEQQLKELKKAAHKSDQDPADAMLQKVRSVYDILISNNYTYVQKNEALKQIIDKIIYDRKNDSLKIYFFLYR

SEQ ID NO: 6342 - protein, 493 aa, Unknown
  Description of Unknown: Integrase B6343 sequence
  PTHR30461:SF3,IPR036162,PS51737,IPR011109,PTHR30461, PS00397,PF00239,G3DSA:1.10.10.2600,IPR006119,SSF53041, cd00338,SM00857,IPR025827,IPR038109,PS51736, IPR006118,PF13408,G3DSA:3.40.50.1390,PF07508,Coil
MSVKYAYGYIRVSTHDQEEISPDSQEHLLRDYAAKNNIVILKIFTDLGISGRKANKRPGFQKMIGLAKGDDHPVDQILVWKFSRFARNQEESIVYKSLLKKQHNVDVVSVSEPLSDDPFGSLIERIIEWMDEYYSIRLSGEVYRGMKENALRGAYQARPPLGYKVVEHGKPPVIVPEEAKIVRTIFEKYTNESMSFFDIARYLNSLGLKTSHGKPFERRSVEYIIQNPSYCGMIRWNRTENSTNRIKDKDEWIVTEGQQPAIISKELFESAQERFKATYKPVGKRPSSTYKHWLSGLLKCPDCGRTLTSTTMKRVNGEKYSYFSCYGYSKGKCKKPNGISSLVLEKEVLASIKEILDTKDIVYELREYQPTEQFDERKAITEQLESLTGKEERIKASYREGIDTLEEYKANKAIIQKERESLEQQLKELKKAAHKSDQDPADAMLQKVRSVYDILISNNYTYIQKNEALKQIIDKIIYDRKNDSLKIYFFLYR

SEQ ID NO: 6343 - protein, 493 aa, Unknown
  Description of Unknown: Integrase B6344 sequence
  PTHR30461:SF3,IPR036162,PS51737,IPR011109,PTHR30461, PS00397,PF00239,G3DSA:1.10.10.2600,IPR006119,SSF53041, cd00338,SM00857,IPR025827,IPR038109,PS51736, IPR006118,PF13408,G3DSA:3.40.50.1390,PF07508,Coil
MSVKYAYGYIRVSTHDQEEISPDSQEHLLRDYAAKNNIVILKIFTDLGISGRKANKRPGFQEMIGLAKGDDHPADLILVWKFSRFARNQEESIVYKSLLKKQHDVDVVSISEPLSDNPFGSLIERIIEWMDEYYSIRLSGEVLRGMKENAARGAFQGAAPFGYKTIDKTLVIDPEKADIVRHVFNMYVNEKLSVFDIARYLNNLGFRTIRGNLFERRTVEYMLKNPTYCGMIHWNKTENATHSVKNKDEWIVSQGQHPAIISQELFDATQERLKATRRPSRRRERPSSTYKHWLSGLMKCPACGKTLSACTQKRVNGEKYAYFSCYGYAHGQCDKAHGVSSLVLEPEVLASIKEILDTGNISYELHDYQPTEAVDERSIIRDRLNSLTSKEERIKASYREGIDTLEEYKSNKAILQKERDNLEEQLKELEGQNPEPDQDPTGDMLLKVRSVYDILISDSYTYVQKNEALKQIVDKIIYDKESDSLKIYFFLCR

SEQ ID NO: 6344 - protein, 493 aa, Unknown
  Description of Unknown: Integrase B6345 sequence
  PTHR30461:SF3,IPR036162,PS51737,IPR011109,PTHR30461, PS00397,PF00239,G3DSA:1.10.10.2600,IPR006119,SSF53041, cd00338,SM00857,IPR025827,IPR038109,mobidb-lite, PS51736,IPR006118,PF13408,G3DSA:3.40.50.1390,PF07508,Coil
MKETLSERKTGAIYIRVSTDKQEELSPDAQLRLLMDYAKTNHTDIPMEYIFQDNGISGRKANKRPAFQQMIALAKSKEHPIDTIIVWKFSRFARNQEESIVYKSLLKKNNVDVVSVSEPLIDGPFGSLIERIIEWMDEYYSIRLSGEVMRGMTQNALRGHYQGDAPIGYQSPGNKKPPEKDPKTVQIPIMMKDLLLSGSSLLQIARKLNEHGYRTKHGNLWDARGVRYVLENPFYAGISRWNYTDRGRQLKPADEVIYTKGNWEPLWDKATLEEIKKHLTMNMRKAKSRDVSTAKHWLSGLLICSSCGGTLAYSGTKNSRGFQCWKYTKGFCNESHYIGIHPIEKMVIEYLESILHSPAIVYTVISSASADADSKLADLEKQLQKVENKEKRIKAAYLNEIDSLEEYKANKAALLKERVAIEKNIKLLTISNTDMSKEEMDKKMKQNISALLTVLQDDSADYVQKGNMMRNVVDHIVFDRGNTSLDMFLKLVI

SEQ ID NO: 6345 - protein, 493 aa, Unknown
  Description of Unknown: Integrase B6346 sequence
  PTHR30461:SF3,IPR036162,PS51737,IPR011109,PTHR30461, PS00397,PF00239,G3DSA:1.10.10.2600,IPR006119,SSF53041, cd00338,SM00857,IPR025827,IPR038109,PS51736, IPR006118,PF13408,G3DSA:3.40.50.1390,PF07508,Coil
MSVKYAYGYIRVSTHDQEEISPDSQEHLLRDYAAKNNIVIIKIFTDLGISGRKANKRPGFQEMIGLAKGDDHPVDLILVWKFSRFARNQEESIVYKSLLKKQHNVDVVSVSEPLSDDPFGSLIERIIEWMDEYYSIRLSGEVYRGMKENALRGAYQARPPLGYKVVEHGKPPVIVPEEAKIVRTIFEKYTNEGMSFFDIARYLNSLGLKTSHGKPFERRSVEYIIQNPSYCGMIRWNRTENSTNRIKDKDEWIVTEGQQPAIISKELFESAQERFKATYKPVGKRPSSTYKHWLSGLLKCPDCGRTLTSITMKRVNGEKYSYFSCYGYSKGKCKKPNGISSLVLEKEVLASIKEVLATKDIVYELREYQPTEQFDERKAITEQLESLNGKEERIKASYREGIDTLEEYKANKAIIQKERESLEQQLKDLKKAAHKSDQDPADAMLQKVRSVYDILISNNYTYVQKNEALKQIIDKIIYDRKNDSLKIYFFLYR

SEQ ID NO: 6346 - protein, 493 aa, Unknown
  Description of Unknown: Integrase B6347 sequence
  PTHR30461:SF3,SM00857,IPR006118,G3DSA:1.10.10.2600,IPR036162, PS51737,G3DSA:3.40.50.1390,IPR006119,IPR038109,PF07508, IPR011109,SSF53041,PF00239,PTHR30461,PS00397, PS51736,Coil,cd00338
MKETLSERKTGAIYIRVSTDKQEELSPDAQLRLLMDYAKTNHTDIPMEYIFQDNGISGRKADKRPAFQQMIALAKSKEHPIDTIIVWKFSRFARNQEESIVYKSLLKKNNVDVVSVSEPLIDGPFGSLIERIIEWMDEYYSIRLSGEVMRGMTQNALRGHYQGDAPIGYQSPGNKKPPEKDPKTIQIPIMMKDLLLSGSSLLQIARKLNEQGYRTKHGNLWDARGVRYVLENPFYAGISRWNYTDRGRQLKPADEVIYTKGNWEPLWDKATLEEIKKHLAMNMRKAKSRDVSTAKHWLSGQLICSSCGGTLAYSGTKNSRGFQCWKYTKGFCNESHYIGIHPIEKMVIEYLESILHSPAIVYTVISSASADADSKLADLEKQLQKVENKEKRIKAAYLNEIDSLEEYKANKAALLKERAAIEKNIKLLTISNTDMSKEEMDKKMKQNISALLTVLQDDSADYVQKGNMMRNVVDHIVFDRENTSLDMFLKLVI

SEQ ID NO: 6347 - protein, 493 aa, Unknown
  Description of Unknown: Integrase B6348 sequence
  PTHR30461:SF3,cd00338,SM00857,G3DSA:1.10.10.2600,IPR036162, PF13408,IPR025827,PS51737,G3DSA:3.40.50.1390,IPR006119, IPR038109,PF07508,IPR011109,SSF53041,PTHR30461, PS51736,Coil,PF00239
MSAAIYTRQSIEKKDSESIDVQIEYAKKYLEPNEDFEIFSDPGYSGKNIMRPDFQRMLEGIKSGKFDKVIVYKLDRISRRVSDFSWLMELLKEYKCSFISAKENFSLDTPAGRAMLYMTSTFAQMERESTSERVRDNYYERIKLGAIGGGPAPLGYDNSTVIIGGKKHSIYVANGEIEIIKKMFEIYSRPITALADVKKELERLYGVNIQTSDISRRLHNPTYVKADASIYNYYYKTGAIVASPIESFDGIHGCLLVGRRKANERKYTDVREHTLTIGRHEGVIDSDTFLYIQNKLSKNKQIKNSHKGQYTWLSGLVKCTDCGYAMVIKRWKSKNGYVSNLYCSSQSNHGICKPHSHNVTDVEDYVYNSMVEKLKSLQEIKLNAQTNRNEKIMELHKAIEDINAKIENLVISLEQAGTSALKYINKRIEELDNEKTQLESEMNTCNYQIESIVLPNLTDWASKSLDDKKEIARSLIEKVSIDYKNNITIAWKV

SEQ ID NO: 6348 - protein, 493 aa, Unknown
  Description of Unknown: Integrase B6349 sequence
  PTHR30461:SF3,IPR036162,PS51737,IPR011109,PTHR30461, PS00397,PF00239,G3DSA:1.10.10.2600,IPR006119,SSF53041, cd00338,SM00857,IPR025827,IPR038109,PS51736, IPR006118,PF13408,G3DSA:3.40.50.1390,PF07508,Coil
MSVKYAYGYIRVSTHDQEEISPDSQEHLLRDYAAKNNIVILKIFTDLGISGRKSNKRPGFQEMIGLAKGDDHPVDQILVWKFSRFSRNQEESIVYKSLLKKQHNVDVVSVSEPLSDNPFGSLIERIIEWMDEYYSIRLSGEVLRGMKENAARGAFQGAAPFGYKTVDKTLVIDPEKADIVRHVFNMYVNEKLSVFDIARYLNNLGFRTIRGNLFERRTVEYMLKNPTYCGMIHWNKTENATHSIKNKDEWIVSQGQHPAIISQELFDATQERLKATRRPSRRRERPSSTYKHWLSGLMKCPACGKTLSACTQKRVNGEKYAYFSCYGYAHGQCDKAHGVSSLVLEPEVLASIKEVLDTGNISYELHDYQPTEAVDERSIIRDRLNSLTSKEERIKASYREGIDTLEEYKSNKAILQKERDNLEEQLKELEGQNPEPDQDPTGDMLLQVRSVYDILVSDSYTYVQKNEALKQIVDKIIYDKESDSLKIYFFLCR

SEQ ID NO: 6349 - protein, 493 aa, Unknown
  Description of Unknown: Integrase B6350 sequence
  PTHR30461:SF3,IPR036162,PS51737,IPR011109,PTHR30461, PS00397,PF00239,G3DSA:1.10.10.2600,IPR006119,SSF53041, cd00338,SM00857,IPR025827,IPR038109,PS51736, IPR006118,PF13408,G3DSA:3.40.50.1390,PF07508,Coil
MSVKYAYGYIRVSTHDQEEISPDSQEHLLRDYAAKNDIVILKIFTDLGISGRKANKRPGFQEMIGLAKGDDHPADLILVWKFSRFARNQEESIVYKSLLKKQHNVDVVSVSEPLSDNPFGSLIERIIEWMDEYYSIRLSGEVLRGMKENAARGAFQGAAPFGYKTIDKTLVIDLEKADIVRHVFNMYVNEKLSVFDIARYLNNLGFRTIRGNLFERRTVEYMLKNPTYCGMIHWNKTENATHSIKNKDEWIVSQGQHPAIISQELFDATQERLKATRRPSRRRERPSSTYKHWLSGLMKCPACGKTLSACTQKRVNGEKYAYFSCYGYAHGQCDKAHGVSSLVLEPEVLASIKEVLDTGNISYELHDYQPTEAVDERSIIRDRLNSLTSKEERIKASYREGIDTLEEYKSNKAILQKERDNLEEQLKELEGQNPEPNQDPTGDMLLKVRSVYDILISDSYTYIQKNEALKQIVDKIIYDKESDSLKIYFFLCR

SEQ ID NO: 6350 - protein, 493 aa, Unknown
  Description of Unknown: Integrase B6351 sequence
  PTHR30461:SF3,IPR036162,PS51737,IPR011109,PTHR30461, PS00397,PF00239,G3DSA:1.10.10.2600,IPR006119,SSF53041, cd00338,SM00857,IPR025827,IPR038109,PS51736, IPR006118,PF13408,G3DSA:3.40.50.1390,PF07508,Coil
MSVKYAYGYIRVSTHDQEEISPDSQEHLLRDYAAKNNIVILKIFTDLGISGRKANKRPGFQEMIGLAKGDDHPVDQILVWKFSRFARNQEESIVYKSLLKKQHNVDVVSVSEPLSDNPFGSLIERIIEWMDEYYSIRLSGEVLRGMKENAARGAFQGAAPFGYKTVDKTLVIDPEKADIVRHVFNMYVNEKLSVFDIARYLNNLGFRTIRGNLFERRTVEYMLKNPTYCGMIHWNKTENATHSIKNKDEWIVSQGQHPAIISQELFDATQERLKATRRPSRRRERPSSTYKHWLSGLMKCPACGKTLSACTQKRVNGEKYAYFSCYGYAHGQCDKAHGVSSLVLEPEVLASIKEVLDTGNISYELHDYQPTEAVEERSIIRDRLNSLASKEERIKASYREGIDTLEEYKSNKAILQKERDNLEEQLKELKGQNPEPDQDPTGDMLFKVRSVYDILISDSYTYIQKNEALKQIVDKIIYDKESDSLKIYFFLCR

SEQ ID NO: 6351 - protein, 493 aa, Unknown
  Description of Unknown: Integrase B6352 sequence
  PTHR30461:SF3,IPR036162,PS51737,IPR011109,PTHR30461, PS00397,PF00239,G3DSA:1.10.10.2600,IPR006119,SSF53041, cd00338,SM00857,IPR025827,IPR038109,PS51736, IPR006118,PF13408,G3DSA:3.40.50.1390,PF07508,Coil
MKTKYCYGYVRVSTSGQEELSPDSQAKLLKDFAKKNDMIVLQIFYELGISGRKADKRPEFQKMIALAKSDKHPVDCIIVWKFSRFARNQEESIVYKSLLKKKHNVEVLSVSEPLVDGPFGSLIERIIEWMDEYYSVRLSGEVTRGMTEKAKRGGYQARPPLGYKIQERGKPPVIVPEEAEIIKIIFDKYVNEHTGIFDIARYLNLCGFKTSHNKPFERRSIEYILQNPTYCGMIRWNRTVSETNEIRPESEWIVSDGQQPAIISKELFDKAQIRYKSEYKPSGTRPSSTYKHWLSGLMKCPVCGRTMIAKTVNNQKSYCYFTCYGYSKGKCLAKTSVSSLRLEPAVLESIKEVLATGNIIYRHVEPAQKTSVDLNVIITEQLRKNAEKFDRIREAYRNGVDTLDEYKENKRMVQEEKEMLEKQLADIKPAEPTIDTSKIAMLEKVRNVYEIIESDSVDPVTKNEILKSVIEKIIYDRSKDELKVYYYYAPESQ

SEQ ID NO: 6352 - protein, 493 aa, Unknown
  Description of Unknown: Integrase B6353 sequence
  PTHR30461:SF3,IPR036162,PS51737,IPR011109,PTHR30461, PS00397,PF00239,G3DSA:1.10.10.2600,IPR006119,SSF53041, cd00338,SM00857,IPR025827,IPR038109,PS51736, IPR006118,PF13408,G3DSA:3.40.50.1390,PF07508,Coil
MSVKYAYGYIRVSTHDQEEISPDSQEHLLRDYATKNNIVILKIFTDLGISGRKANKRPGFQEMIGLAKGDDHPIDQILVWKFSRFARNQEESIVYKSLLKKQHNVDVVSVSEPLSDDPFGSLIERIIEWMDEYYSIRLSGEVYRGMKENAIRGAYQARPPLGYKVVEHGKPPVIVPKEAKIVQTIFEKYVNESMGFFDIARYLNDLGLKTSHGKPFERRSIEYIIQNPSYCGMIRWNRTENSTNRIKDKDEWIVTEGQQPAIISKELFESAQERFKATYKPVGKRPSSTYKHWLSGLLKCPDCGRTLTSTTMKRVNGEKYSYFSCYGYSKGKCKKPNGISSLVLEKEVLASIKEILDTKDIVYELREYQPTEQFDERKAITEQLESLTGKEERIKASYREGIDTLEEYKANKAIIQKERESLEQQLKELKKAAHKSDQDPADSMLQKVRSVYDILISNNYTYVQKNEALKQIIDKIIYDRKNDSLKIYFFLYR

SEQ ID NO: 6353 - protein, 493 aa, Unknown
  Description of Unknown: Integrase B6354 sequence
  PTHR30461:SF3,IPR036162,PS51737,IPR011109,PTHR30461, PS00397,PF00239,G3DSA:1.10.10.2600,IPR006119,SSF53041, cd00338,SM00857,IPR025827,IPR038109,PS51736, IPR006118,PF13408,G3DSA:3.40.50.1390,PF07508,Coil
MKEKVSERKTGAIYIRVSTDKQEELSPDAQLRLLMDYAKTNHTDIPMEYIFQDNGISGRKANKRPAFQQMIALAKSKEHPIDTIIVWKFSRFARNQEESIVYKSLLKKNNVDVVSVSEPLIDGPFGSLIERIIEWMDEYYSIRLSGEVMRGMTQNALRGHYQGDAPIGYQSPGNKKPPEKDPKTIQIPIMMKDLLLSGSSLLQIARKLNEHGYRTKHGNLWDARGVRYVLENPFYAGISRWNYTDRGRQLKPADEVIYTKGNWEPLWDKATLEEIKKHLAMNMRKAKSRDVSAVKHWLSGLLICSSCGGTLAYSGTKNSRGFQCWKYTKGFCNESHYIGIHPIEKMVIEYLESILHSPAIVYTVISSASADADSKLADLEKQLQKVENKEKRIKAAYLNEIDSLEEYKANKAALLKERVAIEKNIKLLTISNTNMSKEEMDKKMKQNISALLTVLQDDSADYVQKGNMMRNVVDHIVFDRGNTSLDMFLKLVI

SEQ ID NO: 6354 - protein, 492 aa, Unknown
  Description of Unknown: Integrase B6355 sequence
  PTHR30461:SF3,SM00857,IPR006118,G3DSA:1.10.10.2600,IPR036162, PF13408,IPR025827,G3DSA:3.40.50.1390,IPR006119,IPR038109, PF07508,SSF53041,IPR011109,PF00239,PTHR30461, PS00397,Coil,cd00338
MSQLSTSNAQPLEIGAAYIRVSTDDQTELSPDAQLRMILDAAKADGFVIPKEYIFEEKKGISGRKADNRPEFQRMIAIAKSQKPAPFKRLYLWKFSRFARNQEESTFYKGILRKKCGIEIKSISEPIMEGMFGRLIETIIEWFDEYYSFNLSGEVKRGMTEKALREGYQTAPCLGYKAVGDGKPFLIDEDAYSIVEYIFQAYHSGRDMTGIARSVNTIGYRTQRGNLFDRRAIYRILTNHFYTGEVSWNGITFQGTHETRPAVTSVFDDVQKRITSEYHPKKRREASANAHWLSGMLFCGVCGSSLGFNRSNDQKKRPDFFQCWKYAKGFHPGSCCVSARIAERTVLRSLEKALRNNHLEYEHIPKTENDISEEEIAIKEALERITVKERRIREAYENEIDTLEEYKQNKLRLNAERKELENALDQLRQKAQQTEAAPPDQAEMMAKVSCVYQVLSDPTADNETKGNALRSLCEKIVFDRETRSFTFFYYTS

SEQ ID NO: 6355 - protein, 492 aa, Unknown
  Description of Unknown: Integrase B6356 sequence
  PTHR30461:SF3,SM00857,G3DSA:1.10.10.2600,IPR036162,PS51737, G3DSA:3.40.50.1390,IPR006119,IPR038109,PF07508,SSF53041, IPR011109,PTHR30461,Coil,PS51736,cd00338, PF00239
MAYAMYLRKSRIDEEAGLENTLSKHETMLRDMAANMGIHVDERHIYREIVSGESIDARPQMQRLLKAVEMGLYTGVLCVELERLSRGNGEDQARILRTFQFSGTKILTLNKVYDLAGDDEFDEEFFEFGLFMSRREYKTIKRRLLRGRLQAQRDGYFIGSVPPYGYGKRKDGKGWTLCPDPHESHIVRLIFDRYAQGAKINDILRELQASGVKQRTGNDFTRTRIGEILRNRTYLGELQTKRKIKNRRIIDGEIKETYIRNSGMEYVQGRHEPIVSTDTFDQCAARLRTMETRTRYAHTNRNPLASLVVCAQCGKTMQRTNGAQAEYLICKTFGCTTKSTKLDIVERLTVDAIQAELERLTYVWAGYETKANDNTNELQVLEAEIDRRQKMLDRACEAYETGVYDRSTYLQRVQKVNAEKAELTARLEALQAAEPERDIKRIPVLSKALDEYWTLDSEDRNRLLKDMAERIEYEKTERGTGLNPRLRVTLRV

SEQ ID NO: 6356 - protein, 492 aa, Unknown
  Description of Unknown: Integrase B6357 sequence
  PTHR30461:SF3,cd00338,SM00857,G3DSA:1.10.10.2600,IPR036162, PS51737,G3DSA:3.40.50.1390,IPR006119,IPR038109,PF07508, SSF53041,IPR011109,PTHR30461,PS51736,Coil, PF00239
MAYALYLRKSRADEELGHENTLARHEEMLRDLADRNNIYVDEAHIYREIVSGESIEARPQMQRLLKAVEAGMYTGVLCIELERLSRGNGADQARILKSFQFSDTKIITLTKTYDLAGDDSFDEEFFEFGLFMSRREYKMIKRRLHRGRMQAQQEGYFIGSTPPYGYGKRKDGKGWTLCPDPSEAQVVRLIFNRYAQGAKINDILRELQASGVRQRTGNDFTRTRIGEILRNRTYLGELQTKRKIKNRRIIDGEIKETYVRNSDMEYVQGRHEPIVSADIFEQCAARLRTMETRTRHEHTNRNPLASLVICSQCGKTLQRTNGAQAEYLICKTFGCTTKSTKLDIVERLTVNAIQAELERLTYVWSGYETEAKDNADEMRVLESEIDRRQKMLERACEAYETGIYDRSTYLQRVQKVNAEKAELTARLEALQAAEPERDIKRIPVLSKALDEYWTLDSEDRNRLLKGMAERIEYEKTERGTGLNPRLRVTLKI

SEQ ID NO: 6357 - protein, 492 aa, Unknown
  Description of Unknown: Integrase B6358 sequence
  SM00857,G3DSA:1.10.10.2600,IPR036162,PS51737,G3DSA:3.40.50.1390, IPR006119,IPR038109,PF07508,IPR011109,SSF53041, PTHR30461,Coil,PS51736,cd00338,PF00239
MAYAIYLRKSRIDEETGIENTLSKHETMLRDMAARMGIHIDETNIYREIVSGESIDARPQMQRLLKAVEMGLYTGVLCVELERLSRGNGEDQARILRTFQFSGTKILTLNKVYDLSSDDDFDEEFFEFGLFMSRREYKTIKRRLLRGRLQAQRDGYFIGSVPPYGYGKRKDGKGRTLCPDPHESHVVRLIFDRYAQGAKINDILRELQASGVKQRTGNDFTRTRIGEILRNRTYLGELQTKRKIKNRRIIDGEIKETYIRNSGMEYVQGRHEPIVSADTFDQCAARLRTMETRTRHAHTNRNPLASLVVCAECGKTMQRTNGAQAEYLICKTFGCTTKSTKLDIVERLTVDAIQAELERLTYVWAGYETKANDNTNELQVLEAEIGKRQKMLERACEAYETGVYDRSTYLQRVQKVNAEKAELIARLETLKDSEPEHDLKRIPVLSKALDEYWTLGSEDRNRLLKGMAEQIEYEKTERGTGLNPRLRVTLKI

SEQ ID NO: 6358 - protein, 492 aa, Unknown
  Description of Unknown: Integrase B6359 sequence
  cd00338,SM00857,G3DSA:1.10.10.2600,IPR036162, PS51737,G3DSA:3.40.50.1390,IPR006119,IPR038109, PF07508,SSF53041,IPR011109,PTHR30461, PS51736,Coil,PF00239
MAYAMYLRKSRIDEEAGIENTLSKHETMLRDMAANMGIHIDERHIYREIVSGESIDARPQMQRLLKAVEMGLYTGVLCVELERLSRGNGEDQARILRTFQFSGTKIITLNKVYDLAGDDEFDEEFFEFGLFMSRREYKMIKRRLLRGRLQAQRDGYFIGSVPPYGYGKRKDGKGWTLCPDPSEAQVVRLIFDRYAEGAKINDILRELQASGVRQRTGNEFTRTRIGEILRNRTYLGELQTKRKIKNRRIIDGEIKETYVRNGGMEYVQGRHEPIVSADAFDQCAARLKTMETRTRHAHTNRNPLASLVVCSQCGKTMQRTNGAQAEYLICKTFGCATKSTKLEIVERMVVDAIQAELERLTYVWSGYETEAKDNDNEMRVLESEIDRRQKMLDRACEAYETGVYDRSTYLQRVQKVNAEKAELTARLEALQAAEPERDIKRIPVLSKALDEYWTLGSEDRNRLLKGMAERIEYEKTERGTGLNPRLRVTLRI

SEQ ID NO: 6359 - protein, 492 aa, Unknown
  Description of Unknown: Integrase B6360 sequence
  PTHR30461:SF3,SM00857,G3DSA:1.10.10.2600,IPR036162,PS51737, G3DSA:3.40.50.1390,IPR006119,IPR038109,PF07508,IPR011109, SSF53041,PTHR30461,PS51736,cd00338,PF00239
MNVAMYLRKSRADENNPLETLERHKEILLSYAKDNNLTVIDIFEEVISGGMLYNRTEMLKLLDAIPSHIYDAVLCIDLDRLGRGSAADSEKIFDVLKENDVKIITLKKIYDLNNEYDEDYSEFEMFMARKELKFITRRMNRGRIKSINDGCFVSGAPFGYRNAVINKKHTLEVYEPEAKYVRMIFDMYVNQSMGITSISRQLANLGVLSKKNTPLHPTTIARMLRNHTYIGKIVWNKSKSVKGKNTQEKTSKDDWLYVPGLHEPIIDEDTFNKAQDIINLKYKPPMRTGTLQNPFAGLLKCANCGRAIVINTSNETVEKYRLCCRTLGCNKASALSIVEDKVFEVLTKEFKDIELSLKNIRQSHNKDKLSCLDTIATLETELKKLDKQQLRLYDLLEQEVYTKELFLERNNAISDRRKKINATIAQEREKFKLVDTSSIEERLPLLRELLTNYHSLSAAEKNSILKNFVKKIEYKREKSAPEGDIFLKIYYK

SEQ ID NO: 6360 - protein, 492 aa, Unknown
  Description of Unknown: Integrase B6361 sequence
  PTHR30461:SF3,IPR036162,PS51737,IPR011109,PTHR30461, PS00397,PF00239,G3DSA:1.10.10.2600,IPR006119,SSF53041, SM00857,IPR025827,IPR038109,PS51736, cd03768,IPR006118,PF13408,G3DSA:3.40.50.1390,PF07508,Coil
MAAIDFNNVVDLYIRVSTSEQAEEGYSVAEQEERLRSYCAAYNYTINAVHVDPGFSGASLDRPAIKKVMSDVEHGRCKKVIVWKLDRLSRSQKDTLILLEDVFLANDCNFISLMESFDTSTPFGRCIVGILAAFAQMERENIKIRTMMGRQARIREGHFHGSRCPLGYKFQYASDGTLLSNDLVVDPYTSKLVQEVYRLSLGGSSFSSIAAHMASTYGCSLYDWSRNTAIRRILSNPIYMGKVKVGNELYPGIHEPLVSETDWYMVAAMLKHNKEQQKRTYAYQISCGVYADNLLTGLLFCGDCGARMYARRVSQNKKKYICHSVAKTSPAMIKSDHCTNRLHPFTVHQLDEMVIDEILKLSLDRPGFDMLCDQPDDSSKSEDKEIYEERLAEVNRQLDRLVKLYQTGLIDLDNISARLGDLNQEKNFLEGNLATINEVTPAEIRETAWKSIQSLQSVLNNGDMDEVHRIIHTLIDKVVVLNTDVTIYWSFC

SEQ ID NO: 6361 - protein, 492 aa, Unknown
  Description of Unknown: Integrase B6362 sequence
  PTHR30461:SF3,SM00857,G3DSA:1.10.10.2600,IPR036162,PS51737, G3DSA:3.40.50.1390,IPR006119,IPR038109,PF07508,IPR011109, SSF53041,PTHR30461,PS51736,cd00338,PF00239
MNVAMYLRKSRADENNPLETLERHKEILLSYAKDNNLTVIDIFEEVISGGMLYNRTEMLKLLDAIPSHIYDAVLCIDLDRLGRGSAADSEKIFDVLKENDVKIITLKKIYDLNNEYDEDYSEFEMFMARKELKFITRRMNRGRIKSINDGCFVSGAPFGYRNAVINKKHTLEVYEPEAKYVRMIFDMYVNQSMGITSISRQLANLGVLSKKNTPLHPTTIARMLRNHTYIGKIVWNKSKSVKGKNTQEKTSKDDWLYVPGLHEPIIDEDTFNKAQDIINLKYKPPMRTGTLQNPFAGLLKCANCGRAIVINTSNETVEKYRLCCRTLDCNKASALSIVEDKVFEVLTKEFKDIELSLKNIRQSHNKDKLSCLDTIATLETELKKLDKQQLRLYDLLEQEVYTKELFLERNNAISDRRKKINATIAQEREKFKLVDTSSIEERLPLLRELLTNYHSLSAAEKNSILKNFVKKIEYKREKSAPEGDIFLKIYYK

SEQ ID NO: 6362 - protein, 492 aa, Unknown
  Description of Unknown: Integrase B6363 sequence
  PTHR30461:SF3,SM00857,IPR006118,G3DSA:1.10.10.2600,IPR036162, PF13408,IPR025827,G3DSA:3.40.50.1390,IPR006119,IPR038109, PF07508,SSF53041,IPR011109,PF00239, PTHR30461,PS00397,Coil,cd00338
MSQLSTSNTQPLEIGAAYIRVSTDDQTELSPDAQLRMILDAAKADGFVIPKEYIFEEKKGISGRKADNRPEFQRMIAIAKSQKPAPFKRLYLWKFSRFARNQEESTFYKGILRKKCGIEIKSISEPIMEGMFGRLIETIIEWFDEYYSFNLSGEVKRGMTEKALREGYQTAPCLGYKAVGDGKPFLIDEDAYSIVEYIFQAYHSGRDMTGIARSVNTIGYRTQRGNLFDRRAIYRILTNHFYTGEVSWNGITFQGTHETRPAVTSVFDDVQKRITSEYRPKKRREASANAHWLSGMLFCGVCGSSLGFNRSNDQKKRPDFFQCWKYAKGFHPGSCCVSARIAERTVLRSLEKALRNNHLEYEHIPKTENDISEEEIAIKEALERITVKERRIREAYENEIDTLEEYKQNKLRLNAERKELENALDQLRQKAQQTEAAPPDQAEMMAKVSCVYQVLSDPTADNETKGNALRSLCEKIVFDRETRSFTFFYYTS

SEQ ID NO: 6363 - protein, 492 aa, Unknown
  Description of Unknown: Integrase B6364 sequence
  PTHR30461:SF3,SM00857,G3DSA:1.10.10.2600,IPR036162,PS51737, G3DSA:3.40.50.1390,IPR006119,IPR038109,PF07508,IPR011109, SSF53041,PTHR30461,PS51736,cd00338,PF00239
MNVAMYLRKSRADENNPLETLERHKEILLSYAKDNNLTVIDIFEEVISGGMLYNRTEMLKLLDAIPSHIYDAVLCIDLDRLGRGSAADSEKIFDVLKENDVKIITLKKIYDLNNEYDEDYSEFEMFMARKELKFITRRMNRGRIKSINDGCFVSGAPFGYRNAVINKKHTLEVYEPEAKYVRMIFDMYVNQSMGITSISRQLANLGVLSKKNTPLHPTTIARMLRNHTYIGKIVWNKSKSVKGKNTQEKTSKDDWLYVPGLHEPIIDENTFNKAQDIINLKYKPPMRTGTLQNPFAGLLKCANCGRAIVINTSNETVEKYRLCCRTLGCNKASALSIVEDKVFEVLTKEFKDIELSLKNIRQSHNKDKLSCLDTIATLETELKKLDKQQLRLYDLLEQEVYTKELFLERNNAISDRRKKINATIAQEREKFKLVDTSSIEERLPLLRELLTNYNSLSATEKNSILKNFVKKIEYKREKSAPEGDIFLKIYYK

SEQ ID NO: 6364 - protein, 492 aa, Unknown
  Description of Unknown: Integrase B6365 sequence
  PTHR30461:SF3,SM00857,G3DSA:1.10.10.2600,IPR036162,PS51737, G3DSA:3.40.50.1390,IPR006119,IPR038109,PF07508,SSF53041, IPR011109,PTHR30461,PS51736,cd00338, PF00239
MNVAMYLRKSRADENNPLETLERHKEILLSYAKDNNLTVIDIFEEVISGGMLYNRTEMLKLLDAIPSHIYDAVLCIDLDRLGRGSAADSEKIFDVLKENDVKIITLKKIYDLNNEYDEDYSEFEMFMARKELKFITRRMNRGRIKSINDGCFVSGAPFGYRNAVINKKHTLEVYEPEAKYVRMIFDMYVNQSIGITSISRQLANLGVLSKKNTPLHPTTIARMLRNHTYIGKIVWNKSKSVKGKNTQEKTSKDDWLYVPGLHEPIIDEDTFNKAQDIINLKYKPPMRTGTLQNPFAGLLKCANCGRAIVINTSNETVEKYRLCCRTLGCNKASALSIVEDKVFEVLTKEFKDIELSLKNIRQSHNKDKLSCLDTIATLETELKKLDKQQLRLYDLLEQEVYTKELFLERNNAISDRRKKINATIAQEREKFKLVDTSSVEERLPLLRELLTNYHSLSAAEKNSILKNFVKKIEYKREKSAPKGDIFLKIYYK

SEQ ID NO: 6365 - protein, 492 aa, Unknown
  Description of Unknown: Integrase B6366 sequence
  PTHR30461:SF3,SM00857,G3DSA:1.10.10.2600,IPR036162,PS51737, G3DSA:3.40.50.1390,IPR006119,IPR038109,PF07508,IPR011109, SSF53041,PTHR30461,PS51736,cd00338,PF00239
MNVAIYLRKSRADENNPLETLERHKEILLSYAKDNNLTVIDIFEEVISGGMLYNRTEMLKLLDAIPSHIYDAVLCIDLDRLGRGSAADSEKIFDVLKENDVKIITLKKIYDLNNEYDEDYSEFEMFMARKELKFITRRMNRGRIKSINDGCFVSGAPFGYRNAVINKKHTLEVYEPEAKYVRMIFDMYVNQSMGITSISRQLANLGVLSKKNTPLHPTTIARMLRNHTYIGKIVWNKSKSVKGKNTQEKTSKDDWLYVPGLHEPIIDEDTFNKAQDIINLKYKPPMRTGTLQNPFAGLLKCANCGRAIVINTSNETVEKYRLCCRTLGCNKASALSIVEDKVFEVLTKEFKDIELSLKNIRQSHNKDKLSCLDTIATLETELKKLDKQQLRLYDLLEQEVYTKELFLERNNAISDRRKKINATIAQEREKFKLVDTSSIEERLPLLRELLTNYHSLSAAEKNSILKNFVKKIEYKREKSAPEGDIFLKIYYK

SEQ ID NO: 6366 - protein, 492 aa, Unknown
  Description of Unknown: Integrase B6367 sequence
  cd00338,SM00857,G3DSA:1.10.10.2600,IPR036162, PS51737,G3DSA:3.40.50.1390,IPR006119,IPR038109, PF07508,SSF53041,IPR011109,PTHR30461, PS51736,Coil,PF00239
MAYAMYLRKSRIDEEAGLENTLSKHETMLRDMAANMGIHVDERHIYREIVSGESIDARPQMQRLLKAVEMGLYTGVLCVELERLSRGNGEDQARILRTFQFSGTKIITLNKVYDLAGDDEFDEEFFEFGLFMSRREYKMIKRRLLRGRLQAQKGGYFIGSVPPYGYGKRKDGKGWTLYPDPSEAQVVRLIFDRYAEGAKINDILRELQASGVRQRTGNEFTRTRIGEILRNRTYLGELQTKRKIKNRRIIDGEIKETYVRNGGMEYVQGRHEPIVSADAFDQCAARLKTMETRTRHAHTNRNPLASLVVCSQCGKTMQRTNGAQAEYLICKTFGCATKSTKLEIVERMVVDAIQAELERLTYVWSGYETEAKDNDDEMRVLESEIDRRQKMLDRACEAYETGVYDRSTYLQRVQKVNAEKAELTARLEALQAAEPERDIKRIPVLSKALDEYWTLDSEDRNRLLKGMAERIEYEKTERGTGLNPRLRVTLRI

SEQ ID NO: 6367 - protein, 492 aa, Unknown
  Description of Unknown: Integrase B6368 sequence
  SM00857,G3DSA:1.10.10.2600,IPR036162,PF13408,PS51737, IPR025827,G3DSA:3.40.50.1390,IPR006119,IPR038109,PF07508, IPR011109,SSF53041,PF00239,PTHR30461,PS51736, Coil,cd00338
MAYAMYLRKSRIDEEAGLENTLSKHETMLRDMAARMGIHIDERHIYREIVSGESIDARPQMQRLLKAVEMGLYTGVLCVELERLSRGNGEDQARILRTFQFSGTKILTLNKVYDLAGDDEFDEEFFEFGLFMSRREYKTIKRRLLRGRLQAQRDGYFIGSVPPYGYSKRKDGKGWTLCPDPHESHIVRLIFDRYAEGAKINDILRELQASGVKQRTGNEFTRTRIGEILRNRTYLGELQTKRKIKNRQIIDGEIKETYVRNSGMEYVQGRHEPIVSADTFDQCAARLRTMETRTRYAHTNRNPLASLVVCSQCGKTMQRTNGAQAEYLICKTFGCTTKSTKLEIVERMVVDAIQAELERLTYVWSGYETEAKDNADEMRVLESEIDKRQKMLERACEAYETGIYDRTTYLQRVQKVNAEKAELLARLETLQDSEPEHDLKRIPVLSKALDEYWTLDSEDRNRLLKGMAERIEYEKTERGTGLNPRLRVTLRI

SEQ ID NO: 6368 - protein, 492 aa, Unknown
  Description of Unknown: Integrase B6369 sequence
  PTHR30461:SF3,SM00857,G3DSA:1.10.10.2600,IPR036162,PS51737, G3DSA:3.40.50.1390,IPR006119,IPR038109,PF07508,SSF53041, IPR011109,PTHR30461,PS51736,cd00338,PF00239
MNVAMYLRKSRADENNPLETLERHKEILLSYAKDNNLTVIDIFEEVISGGMLYNRTEMLKLLDAIPSHIYDAVLCIDLDRLGRGSAADSEKIFDVLKENDVKIITLKKIYDLNNEYDEDYSEFEMFMARKELKFITRRMNRGRIKSINDGCFVSGAPFGYRNAVINKKHTLEVYEPEAKYVRMIFDMYVNQSMGITSISRHLANLGVLSKKNTPLHPTTIARMLRNHTYIGKIVWNKSKSVKGKNTQEKTSKDDWLYVPGLHEPIIDEDTFNKAQDIINLKYKPPMRTGTLQNPFAGLLKCANCGRAIVINTSNETVEKYRLCCRTLGCNKASALSIVEDKVFEVLTKEFKDIELSLKNIRQSHNKDKLSCLDTIATLETELKKLDKQQLRLYDLLEQEVYTKELFIERNNAISDRRKKINATIAQEREKFKLVDTSSIEERLPLLRELLTNYNSLSAAEKNSILKNFVKKIEYKREKSAPEGDIFLKIYYK

SEQ ID NO: 6369 - protein, 492 aa, Unknown
  Description of Unknown: Integrase B6370 sequence
  PTHR30461:SF3,cd00338,SM00857,G3DSA:1.10.10.2600,IPR036162, PS51737,G3DSA:3.40.50.1390,IPR006119,IPR038109,PF07508, IPR011109,SSF53041,PTHR30461,PS51736, Coil,PF00239
MPKRAVIYARFSCNRQREASIEDQLRVCREWCAREGYEVAAEYCDRAVSGRTDDRPEFQRMIANAGESEIVLVYMMDRFSRGEYDAPIYKRELATHGVKLVSALEQIPDSPEGIIYEKLLEGLAACESRKTAIRTKRGMEGNALKCKTNGVRIFGYRRNGDDEYEVDEAQAAWVREAFALRLERMSMNAIAREFARRGLRTRKGNPCGQAMVQQMLRDRRYTGRYEWGGIVREGGMPAIVDEVTFMEVQGIKCRKQRSSENWGDFALAGAALCAECGRNLQGVSGRGRNNVKYEYYSCPGSCVRNIRREELEGSIASALRELLGDRGEALQIANMVAERADTAEVRARRRQAEDSLRAAERGLRNILNAIEQGVIAPGVNERIAELEEQQARARYDLEAITDERIDPERFADFLQCGTALDDATLLKAFVWQAVVSEDEILVTLNYDKKGEPARLDIQRVRAKLEWCPVCLDSRTEICAVGTVVLLRIPRAA

SEQ ID NO: 6370 - protein, 492 aa, Unknown
  Description of Unknown: Integrase B6371 sequence
  cd00338,SM00857,G3DSA:1.10.10.2600,IPR036162,PS51737, G3DSA:3.40.50.1390,IPR006119,IPR038109,PF07508,IPR011109, SSF53041,PTHR30461,PS51736,Coil,PF00239
MEQYLIYLRKSRSDLEAEAHGEGETLSRHEHTLLELAKRQHLNVTDIYREVVSGDTIAARPMMQRVLSEVEQGVWSGVLVMEVERLARGDTIDQGIIAQTFKFSGTKIITPIKTYDPDNEFDEEYFEFGLFMSRREYKIINRRLQRGRLASAKEGKWPSGLAPFGYRRVKLKNEKGCSLEPIEEQAAIVRMIFDLYTVGLQDEDGSARPLSLGSIATRLNDMHIPSPSGSQWARITIRGIIKNPTYIGMVRWGSRETKKKVVDGKVVSVRGPADPEKECIFKGIHPPLIPKETFELANDKLTRSENTSTHKEKVVRNPLAGLLVCSECGRQMMRMINPVHPDMPVVRCPRRGCPNCSSYLPIVEERVIQGLSEWMKGYELEWSSAAASSSVSSVGVREKALASAEAELRKLQQQLERTHDFLEQGIYDTDTFLSRSRMLSDKIAAAKDSVTRCSRELRRSSGRPAAVTSSLRLRICSTCTRCSKRPRRKTLS

SEQ ID NO: 6371 - protein, 492 aa, Unknown
  Description of Unknown: Integrase B6372 sequence
  PTHR30461:SF3,SM00857,G3DSA:1.10.10.2600,IPR036162,PS51737, G3DSA:3.40.50.1390,IPR006119,IPR038109,PF07508,IPR011109, SSF53041,PTHR30461,PS51736,cd00338, PF00239
MNVAMYLRKSRADENNPLETLERHKEILLSYAKDNNLTVIDIFEEVISGGMLYNRTEMLKLLDAIPSHIYDAVLCIDLDRLGRGSAADSEKIFDVLKENDVKIITLKKIYDLNNEYDEDYSEFEMFMARKELKFITRRMNRGRIKSINDGCFVSGAPFGYRNAVINKKHTLEVYEPEAKYVRMIFDMYVNQSMGITSISRQLANLGVLSKKNTPLHPTTIARMLRNHTYIGKIVWNKSKSVKGKNTQEKTSKDDWLYVPGLHEPIIDEDTFNKAQDIINLKYKPPMRTGTLQNPFAGLLKCANCGRAIVINTSNETVEKYRLCCRTLGCNKASALSIVEDKVFEVLTKEFKDIELSLKNIRQSHNKDKLSCLDTIATLETELKKLDKQQLRLYDLLEQEVYTKELFLERNNAISDRRKKINATIAQEREKFKLVDTSSVEERLPLLRELLTNYHSLSAAEKNSILKNFVKKIEYKREKSAPKGDIFLKIYYK

SEQ ID NO: 6372 - protein, 492 aa, Unknown
  Description of Unknown: Integrase B6373 sequence
  PTHR30461:SF3,SM00857,G3DSA:1.10.10.2600,IPR036162,PS51737, G3DSA:3.40.50.1390,IPR006119,IPR038109,PF07508,IPR011109, SSF53041,PF00239,PTHR30461,PS51736,Coil, cd00338
MAYAMYLRKSRIDEEAGLENTLSKHETMLRDMAANMGIHVDERHIYREIVSGESIDARPQMQRLLKAVEMGLYTGVLCVELERLSRGNGEDQARILRTFQFSGTKILTLNKVYDLAGDDEFDEEFFEFGLFMSRREYKTIKRRLLRGRLQAQRDGYFIGSVPPYGYGKRKDGKGWTLCPDPHESHIVRLIFDRYAQGAKINDILRELQASGVKQRTGNDFTRTRIGEILRNRTYLGELQTKRKIKNRRIIDGEIKETYIRNSGMEYVQGRHEPIVSTDTFDQCAARLRTMETRTRYAHTNRNPLASLVVCAQCGKTMQRTNGAQAEYLICKTFGCTTKSTKLDIVERLTVDAIQAELERLTYVWAEYETKANDNTNELQVLEAEIDKRQKMLERACEAYETGIYDRTTYLQRVQKVNAEKAELTARLEALQAAEPERDIKRIPVLSKALDEYWTLDSEDRNRLLKGMAERIEYEKTERGTGLNPRLRVTLRI

SEQ ID NO: 6373 - protein, 492 aa, Unknown
  Description of Unknown: Integrase B6374 sequence
  PTHR30461:SF3,IPR036162,PS51737,IPR011109,PTHR30461, PS00397,PF00239,G3DSA:1.10.10.2600,IPR006119,SSF53041, SM00857,IPR025827,IPR038109,PS51736,cd03768, IPR006118,PF13408,G3DSA:3.40.50.1390,PF07508,Coil
MAAIDFNNVVDLYIRVSTSEQAEEGYSVAEQEERLRSYCAAYNYTINAVHVDPGFSGASLDRPGIKKVMYDVEHGRCKKVIVWKLDRLSRSQKDTLILLEDVFLANDCNFISLMESFDTSTPFGRCIVGILAAFAQMERENIKIRTMMGRQARIRDGHFHGSRCPLGYKFQYAPDGTLLSNDLVVDPYTSKLVQEVFRLFLSGSSLSSISAHMASTYGCSMYDWSNSTAIRRILSNPIYMGKVRVGNELYPGIHEPLVSETDWYMVAAMLKHNKEQQKRTYAYQISGGAYADNLLTGLLFCGDCGARMYARRVSQNKKKYICHSVAKTSPAMIKSDHCTNRLHPFTVHQLDEMVINEILKLSLDRPGFDMLCDQPDESSKSEDKEIYEERLAEVNRQLDRLVKLYQTGLIDLDNISARLGDLNQEKNFLEGNIATINEITPADLRETAWKSIQSLQSVLDNGDMDEVHRIIHTLTDKVVVLNADVTIYWSFC

SEQ ID NO: 6374 - protein, 492 aa, Unknown
  Description of Unknown: Integrase B6375 sequence
  PTHR30461:SF3,SM00857,G3DSA:1.10.10.2600,IPR036162,PS51737, G3DSA:3.40.50.1390,IPR006119,IPR038109,PF07508,SSF53041, IPR011109,PTHR30461,PS51736,cd00338,PF00239
MNVAMYLRKSRADENNPLETLERHKEILLSYAKDNNLTVIDIFEEVISGGMLYNRTEMLKLLDAIPSHIYDAVLCIDLDRLGRGSAADSEKIFDVLKENDVKIITLKKIYDLNNEYDEDYSEFEMFMARKELKFITRRMNRGRIKSINDGCFVSGAPFGYRNAVINKKHTLEVYEPEAKYVRMIFDMYVNQSMGITSISRHLANLGVLSKKNTPLHPTTIARMLRNHTYIGKIVWNKSKSVKGKNTQEKTSKDDWLYVPGLHEPIIDEDTFNKAQDIINLKYKPPMRTGTLQNPFAGLLKCANCGRAIVINTSNETVEKYRLCCRTLGCNKASALSIVEDKVFEVLTKEFKDIELSLKNIRQSHNKDKLSCLDTIATLETELKKLDKQQLRLYDLLEQEVYTKELFIERNNAISDRRKKINATIAQEREKFKLVDTSSIEERLPLLRELLTNYNSLSATEKNSILKNFVKKIEYKREKSAPEGDIFLKIYYK

SEQ ID NO: 6375 - protein, 492 aa, Unknown
  Description of Unknown: Integrase B6376 sequence
  PTHR30461:SF3,IPR036162,PS51737,IPR011109,PTHR30461, PS00397,PF00239,G3DSA:1.10.10.2600,IPR006119,SSF53041, cd00338,SM00857,IPR025827,IPR038109, PS51736,IPR006118,PF13408,G3DSA:3.40.50.1390,PF07508,Coil
MTAALYIRVSTDEQLEFSPDAQKRALIEYAKKNNYQIDDHYIFIDEGITGTSAKKRPAFQNMIAMAKKKPKPFDAILVHKFDRFARSREDSVVYKSLLRKECGIKVISITEQLEDDKFSVILEAMLEAMAEYYSLNLSDEVIKGMTEKARRGGVQSKPILGYDIVDNKRVVNKEEAEIIKKIYDMCINGQSIGSIAKHLNMLGIKSKTGSPFEARRIKYIIQNPAYIGVTRWNYTHCQGSRIVVKPESEWITVENTHEPIVSQQTWDEAQKVLGTWHKDVKPRSTEYIHWLGGILRCSDCNGTLVYKTARFKRKDGSIRNADGYQCSRYKVGSCNTSNYIKIKDVEDHIIKTLTSTLDIVNETWSLKGLNIEYENKDDEIELYKTQLSKLNQKLERAKKAYLNDIDTLEEYKANKEMFQKEIIEITNLINTHRNNDTNPQKVAEFKDKLVTAIEAVKDDSISVMSKNIVLKTFIKSIIYNKREDTLTTIFYI

SEQ ID NO: 6376 - protein, 492 aa, Unknown
  Description of Unknown: Integrase B6377 sequence
  PTHR30461:SF3,SM00857,IPR006118,G3DSA:1.10.10.2600,IPR036162, PF13408,IPR025827,G3DSA:3.40.50.1390,IPR006119,IPR038109, PF07508,IPR011109,SSF53041,PF00239,PTHR30461, PS00397,Coil,cd00338
MSQLSTSNTQPLEIGAAYIRVSTDDQTELSPDAQLRMILDAAKADGFVIPKEYIFEEKKGISGRKADNRPEFQRMIAIAKSQKPAPFKRLYLWKFSRFARNQEESTFYKGILRKKCGIEIKSISEPIMEGMFGRLIETIIEWFDEYYSFNLSGEVKRGMTEKALREGYQTAPCLGYKAVGDGKPFLIDEDAYSIVEYIFQAYHGGRDMTGIARSVNTIGYRTQRGNLFDRRAIYRILTNHFYTGEVSWNGITFQGTHETRPAVTSVFDDVQKRITSEYRPKKRREASANAHWLSGMLFCGVCGSSLGFNRSNDQKKRPDFFQCWKYAKGFHPGSCCVSARIAERTVLRSLEKALRNNHLEYEHIPKTENDISEEEIAIKEALERITVKERRIREAYENEIDTLEEYKQNKLRLNAERKELENALDQLRQKAQQTEAAPPDQAEMMAKVSCVYQVLSDPTADNETKGNALRSLCEKIVFDRETRSFTFFYYTS

SEQ ID NO: 6377 - protein, 492 aa, Unknown
  Description of Unknown: Integrase B6378 sequence
  PTHR30461:SF3,SM00857,G3DSA:1.10.10.2600,IPR036162,PS51737, G3DSA:3.40.50.1390,IPR006119,IPR038109,PF07508,IPR011109, SSF53041,PTHR30461,PS51736,cd00338,PF00239
MNVAIYLRKSRADENNPLETLERHKEILLSYAKDNNLTVIDIFEEVISGGMLYNRTEMLKLLDAIPSHIYDAVLCIDLDRLGRGSAADSEKIFDVLKENDVKIITLKKIYDLNNEYDEDYSEFEMFMARKELKFITRRMNRGRIKSINDGCFVSGAPFGYRNAVINKKHTLEVYEPEAKYVRMIFDMYVNQSMGITSISRQLANLGVLSKKNTPLHPTTIARMLRNHTYIGKIVWNKSKSVKGKNTQEKTSKDDWLYVPGLHEPIIDEDTFNKAQDIINLKYKPPMRTGTLQNPFAGLLKCANCGRAIVINTSNETVEKYRLCCRTLGCNKASALSIVEDKVFEVLTKEFKDIELSLKNIRQSHNKDKLSCLDTIATLETELKKLDKQQLRLYDLLEQEVYTKELFLERNNAISDRRKKINATIAQEREKFKLVDTSSVEERLPLLRELLTNYHSLSAAEKNSILKNFVKKIEYKREKSAPKGDIFLKIYYK

SEQ ID NO: 6378 - protein, 492 aa, Unknown
  Description of Unknown: Integrase B6379 sequence
  PTHR30461:SF3,IPR036162,PS51737,IPR011109,PTHR30461, PS00397,PF00239,G3DSA:1.10.10.2600,IPR006119,SSF53041, SM00857,IPR025827,IPR038109,PS51736, cd03768,IPR006118,PF13408,G3DSA:3.40.50.1390,PF07508,Coil
MAAIDFNNVVDLYIRVSTSEQAEEGYSVAEQEERLRSYCAAFNYIINAIHIDPGFSGASLDRPGIKKVMYDVEHGRCKKVIVWKLDRLSRSQKDTLILLEDVFLANDCNFISLMESFDTSTPFGRCIVGILAAFAQMERENIKIRTMMGRQARIRDGHFHGSRCPLGYKFQYAPDGTLLSNDLVVDPYTSKLVQEVFRLFLSGSSLSSISAHMASTYGCSIYDWSNSTAIRRILSNPIYMGKVRVGNELYPGIHEPLVSETDWYMVAAMLKHNKEQQKRTYAYQISGGAYADNLLTGLLFCGDCGARMYARRVSQNKKKYICHSVAKTSPAMIKSDHCTNRLHPFTVHQLDEMVINEILKLSLDRPGFDMLCDQPDESSKSEDKEIYEERLAEVNRQLDRLVKLYQTGLIDLDNISARLGDLNQEKTFLEGNIATINEITPADLRETAWKSIQSLQSVLDNGDMDEVHRIIHTLIDKVVVLNADVTIYWSFC

SEQ ID NO: 6379 - protein, 492 aa, Unknown
  Description of Unknown: Integrase B6380 sequence
  PTHR30461:SF3,SM00857,G3DSA:1.10.10.2600,IPR036162,PS51737, G3DSA:3.40.50.1390,IPR006119,IPR038109,PF07508,SSF53041, IPR011109,PTHR30461,PS51736,cd00338,PF00239
MNVAMYLRKSRADEDNPLETLERHKEILLSYAKDNNLTVIDIFEEVISGGMLYNRTEMLKLLDAIPSHIYDAVLCIDLDRLGRGSAADSEKIFDVLKENDVKIITLKKIYDLNNEYDEDYSEFEMFMARKELKFITRRMNRGRIKSINDGCFVSGAPFGYRNAVINKKHTLKVYEPEAKYVRMIFDMYVNQSMGITSISRQLANLGVLSKKNTPLHPTTIARMLRNHTYIGKIVWNKSKSVKGKNTQEKTSKDDWLYVSGLHEPIIDEDTFNKAQDIINLKYKPPMRTGTLQNPFAGLLKCANCGRAIVINTSNETVEKYRLCCRTLGCNKASALSIVEDKVFEVLTKEFKDIELSLKNIRQSHNKDKLSCLDTIATLETELKKLDKQQLRLYDLLEQEVYTKELFLERNNAISDRRKKINATIAQEREKFKLVDTSSVEERLPLLRELLTNYHSLSAAEKNSILKNFVKKIEYKREKSAPEGDIFLKIYYK

SEQ ID NO: 6380 - protein, 492 aa, Unknown
  Description of Unknown: Integrase B6381 sequence
  PTHR30461:SF3,SM00857,G3DSA:1.10.10.2600,IPR036162,PS51737, G3DSA:3.40.50.1390,IPR006119,IPR038109,PF07508,IPR011109, SSF53041,PTHR30461,PS51736,cd00338, PF00239
MNVAMYLRKSRADENNPLETLERHKEILLSYAKDNNLTVIDIFEEVISGGMLYNRTEMLKLLDAIPSHIYDAVLCIDLDRLGRGSAADSEKIFDVLKENDVKIITLKKIYDLNNEYDEDYSEFEMFMARKELKFITRRMNRGRIKSINDGCFVSGAPFGYRNAIINKKHTLEVYEPEAKYVRMIFDMYVNQSMGITSISRQLANLGVLSKKNTPLHPTTIARMLRNHTYIGKIVWNKSKSVKGKNTQEKTSKDDWLYVPGLHEPIIDENTFNKAQDIINLKYKPPMRTGTLQNPFAGLLKCANCGRAIVINTSNETVEKYRLCCRTLGCNKASALSIVEDKVFEVLTKEFKDIELSLKNIRQSHNKDKLSCLDTIATLETELKKLDKQQLRLYDLLEQEVYTKELFLERNNAISDRRKKINATIAQEREKFKLVDTSSIEERLPLLRELLTNYHSLSAAEKNSILKNFVKKIEYKREKSAPEGDIFLKIYYK

SEQ ID NO: 6381 - protein, 492 aa, Unknown
  Description of Unknown: Integrase B6382 sequence
  cd00338,SM00857,G3DSA:1.10.10.2600,IPR036162,PS51737, G3DSA:3.40.50.1390,IPR006119,IPR038109,PF07508,IPR011109, SSF53041,PTHR30461,PS51736,Coil,PF00239
MAYAMYLRKSRIDEEAGLENTLSKHETMLRDMAARMGIHIDETNIYREIVSGESIDARPQMQRLLKAVEMGLYTGVLCVELERLSRGNGEDQARILRTFQFSGTKILTLNKVYDLAGDDEFDEEFFEFGLFMSRREYKTIKRRLLRGRLQAQRDGYFIGSVPPYGYSKRKDGKGWTLCPDPHESHIVRLIFDRYAQGAKINDILRELQASGVKQRTGNDFTRTRIGEILRNRTYLGELQTKRKIKNRRIIDGEIKETYIRNSGMEYVQGRHEPIVSADTFDQCAARLRTMETRTRYAHTNRNPLASLIVCTQCGKTMQRTNGAQAEYLICKTFGCTTKSTKLDIVERLTVDAIQAELERLTYVWAGYETKANDNTNELQVLEAEIDKRQKMLERACEAYETGIYDRTTYLQRVQKVNAEKAELLTRLETLKDSEPEHDLKRIPVLSKALDEYWTLDSENRNRLLKGMAERIEYEKTERGTGLNPRLRVTLRI

SEQ ID NO: 6382 - protein, 492 aa, Unknown
  Description of Unknown: Integrase B6383 sequence
  PTHR30461:SF3,IPR036162,PS51737,IPR011109,PTHR30461, PS00397,PF00239,G3DSA:1.10.10.2600,IPR006119,SSF53041, SM00857,IPR025827,IPR038109,PS51736, cd03768,IPR006118,PF13408,G3DSA:3.40.50.1390,PF07508,Coil
MAAIDFNNVVDLYIRVSTSEQAEEGYSVAEQEERLRSYCAAFNYIINAIHIDPGFSGASLDRPGIKKVMYDVEHGRCKKVIVWKLDRLSRSQKDTLILLEDVFLANDCNFISLMESFDTSTPFGRCIVGILAAFAQMERENIKIRTMMGRQARIRDGHFHGSRCPLGYKFQYAPDGTLLSNDLVVDPYTSKLVQEVFRLFLSGSSLSSISAHMASTYGCSMYDWSNSTAIRRILSNPIYMGKVRVGNELYPGIHEPLVSETDWYMVAAMLKHNKEQQKRTYAYQISGGAYADNLLTGLLFCGDCGARMYARRVSQNKKKYICHSVAKTSPAMIRSDHCTNRLHPFTVHQLDEMVINEILKLSLDRPGFDMLCDQPDESSKSEDKEIYEERLAEVNRQLDRLVKLYQTGLIDLDNISARLGDLNQEKIFLEGNIATINEITPADLRETAWKSIQSLQSVLDNGDMDEVHRIIHTLIDKVVVLNADVTIYWSFC

SEQ ID NO: 6383 - protein, 492 aa, Unknown
  Description of Unknown: Integrase B6384 sequence
  SM00857,G3DSA:1.10.10.2600,IPR036162,PF13408,IPR025827, G3DSA:3.40.50.1390,PS51737,IPR006119,IPR038109,PF07508, IPR011109,SSF53041,PTHR30461,Coil,PS51736, cd00338,PF00239
MNIQEIPTTRKEKPRVCAYVRVSTDSEAQEDSFAFQSNYWQKRFASDESVEYVGLFSDEGIGGAFMKKRDGLKRMFQKVRNGEIDRIYTKSVSRFARNKVELMEIVREFRDIGVEIIFESENIHTLDPKCGLILTVMASLAEEELISMSQNQKWAARKRFANGSVELARILGYDMVDGKLVINEKEAVIVRRIFELYLQGNSFRTICHILENEGYTPMHGGRWSKSTITGMLRNEKYCGDSIMQKSYSVMKVQKYNYGELPKYYIQGDHEPIVSREDYQKAQEIMMARGNKYRPRGSPTALYPLSGKLICGECGTSFKRKTSAHGTPYMCIKWTCRKKDVYGVKKCASHDIKDEVVTRLLIEAYNESLDANNDVNGITEQEEVLRKLIANEQELRQLRAKGYISESKCREETDKILIKIKEQETLIKNLRMRDMVKGKYKKSDELTEQMAEFLVKATVKDWTITFEFQNGYKTTKEYTNGRAGNVNGKLCKH

SEQ ID NO: 6384 - protein, 492 aa, Unknown
  Description of Unknown: Integrase B6385 sequence
  IPR036162,PS51737,IPR011109,PTHR30461,PS00397, PF00239,G3DSA:1.10.10.2600,IPR006119,SSF53041,SM00857, IPR025827,IPR038109,PS51736,cd03768,IPR006118, PF13408,G3DSA:3.40.50.1390,PF07508,Coil
MNVNVLDNVVDLYVRVSTTEQAEEGFSVGAQEEKLRAYCKAYNYQINAVHVDPGFSGATMDRPALKQVIRDVENNHCKKVIVWKLDRLSRSQKDTLILLEDVFAAHDCHFVSLMESFDTSTPIGRCMVGILAAFAQMERENIKARTMMGRQAKVKQGHYSGNKPPIGYAFNTASDGSVISNDLIVDPYNAKIVQDIFRWYLEGYSLNGIAKRLADAGTGSYAWQHSTSIRRILSNPVYIGKVKLNNELYEGMHEPLISESDFNEVSCMLARQKELHKRPAASYRTKNGCRSANLLSGLLYCGDCGARMYARKVCKDSPIRRYMCYSVAKTVKSMIRSDCCTNREHPYTVEQLDEIVLNEIKKLALDKAQFSRIASKSDTVHEDAKIYNERLEELNKQIKRLMNLYQTGIIDLADISDRLQALNDEKLSVQSRLDELKEADNSDTKLKAWEQLESFPAILDAGDVQQIHRIVNALIDKIVVLNRDVTIYWSFS

SEQ ID NO: 6385 - protein, 492 aa, Unknown
  Description of Unknown: Integrase B6386 sequence
  PTHR30461:SF3,SM00857,G3DSA:1.10.10.2600,IPR036162,PS51737, G3DSA:3.40.50.1390,IPR006119,IPR038109,PF07508,IPR011109, SSF53041,PTHR30461,PS51736,cd00338,PF00239
MNVAMYLRKSRADENNPLETLERHKEILLSYAKDNNLTVIDIFEEVISGGMLYNRTEMLKLLDAIPSHIYDAVLCIDLDRLGRGSAADSEKIFDVLKENDVKIITLKKIYDLNNEYDEDYSEFEMFMARKELKFITRRMNRGRIKSINDGCFVSGAPFGYRNAVINKKHTLEVYEPEAKYVRMIFDMYVNQSMGITSISRQLANLGVLSKKNTPLHPTTIARMLRNHTYIGKIVWNKSKSVKGKNTQEKTSKDDWLYVPGLHEPIIDEDTFNKAQDIINLKYKPPMRTGTLQNPFAGLLKCANCGRAIVINTSNETVEKYRLCCRTLGCNKASALSIVEDKVFEVLTKEFKDIELSLKNIRQSHNKDKLSCLDTIATLETELKKLDKQQLRLYDLLEQEVYTKELFLERNNAISDRRKKINATIAQEREKFKLVDTSSIEERLPLLHELLTNYHSLSAAEKNSILKNFVKKIEYKREKSAPEGDIFLKIYYK

SEQ ID NO: 6386 - protein, 492 aa, Unknown
  Description of Unknown: Integrase B6387 sequence
  PTHR30461:SF3,SM00857,G3DSA:1.10.10.2600,IPR036162,PS51737, G3DSA:3.40.50.1390,IPR006119,IPR038109,PF07508,SSF53041, IPR011109,PTHR30461,PS51736,cd00338, PF00239
MNVAIYLRKSRADENNPLETLERHKEILLSYAKDNNLTVIDIFEEVISGGMLYNRTEMLKLLDAIPSHIYDAVLCIDLDRLGRGSAADSEKIFDVLKENDVKIITLKKIYDLNNEYDEDYSEFEMFMARKELKFITRRMNRGRIKSINDGCFVSGAPFGYRNAVINKKHTLEVYEPEAKYVRMIFDMYVNQSIGITSISRQLANLGVLSKKNTPLHPTTIARMLRNHTYIGKIVWNKSKSVKGKNTQEKTSKDDWLYVPGLHEPIIDEDTFNKAQDIINLKYKPPMRTGTLQNPFAGLLKCANCGRAIVINTSNETVEKYRLCCRTLGCNKASALSIVEDKVFEVLTKEFKDIELSLKNIRQSHNKDKLSCLDTIATLETELKKLDKQQLRLYDLLEQEVYTKELFLERNNAISDRRKKINATIAQEREKFKLVDTSSIEERLPLLHELLTNYHSLSAAEKNSILKNFVKKIEYKREKSAPEGDIFLKIYYK

SEQ ID NO: 6387 - protein, 492 aa, Unknown
  Description of Unknown: Integrase B6388 sequence
  cd00338,SM00857,G3DSA:1.10.10.2600,IPR036162,PS51737, G3DSA:3.40.50.1390,IPR006119,IPR038109,PF07508,IPR011109, SSF53041,PTHR30461,PS51736,Coil,PF00239
MAYAMYLRKSRIDEEAGLENTLSKHETMLRDMAVNMGIHIDETHIYREIVSGESIEARPQMQKLLKAVEMGLYTGVLCVELERLSRGNGEDQARILRTFQFSGTKILTLNKVYDLAGDDEFDEEFFEFGLFMSRREYKMIKRRLLRGRLQAQKDGYFIGSVPPYGYGKRKDGKGWTLCPDPHESHVVRLIFDRYAQGAKINDILRELQASGVKQRTGNDFTRTRIGEILRNRTYLGELQTKRKIKNRRIIDGEIKETYIRNSGMEYVQGRHEPIVSADIFDQCAARLRTMETRTRHAHTNRNPLASLIVCTQCGKTMQRTNGAQAEYLICKTFGCTTKSTKLDIVERLTVDAIQAELERLTYVWAGYETKANDNTNELQVLEAEIDKRQKMLERACEAYETGVYDRSTYLQRVQKVNAEKAELLARLETLQDSEPEHDLKQIPVLSKALDEYWTLDSENRNRLLKGMAERIEYEKTERGTGLNPRLRVTLKI

SEQ ID NO: 6388 - protein, 492 aa, Unknown
  Description of Unknown: Integrase B6389 sequence
  cd00338,SM00857,G3DSA:1.10.10.2600,IPR036162, PS51737,G3DSA:3.40.50.1390,IPR006119,IPR038109, PF07508,SSF53041,IPR011109,PTHR30461, PS51736,Coil,PF00239
MAYAMYLRKSRIDEEAGLENTLSKHETMLRDMAARMGIHIDETNIYREIVSGESIDARPQMQRLLKAVEMGLYTGVLCVELERLSRGNGEDQARILRTFQFSGTKILTLNKVYDLAGDDEFDEEFFEFGLFMSRREYKTIKRRLLRGRLQAQRDGYFIGSVPPYGYGKRKDGKGWTLCPDPHESHIVRLIFDRYAQGAKINDILRELQASGVKQRTGNDFTRTRIGEILRNRTYLGELQTKRKIKNRRIIDGEIKETYIRNSGMEYVQGRHEPIVSADTFDQCAARLRTMETRTRYAHTNRNPLASLVVCSQCGKTMQRTNGAQAEYLICKTFGCTTKSTKLDIVERLTVDAIQAELERLTYVWAGYETKANDNTNELQVLEAEIDKRQKMLERACEAYETGIYDRTTYLQRVQKVNAEKAELLTRLETLQDSEPEHDLKRIPVLSKALDEYWTLDSENRNRLLKGMAERIEYEKTERGTGLNPRLRVTLRI

SEQ ID NO: 6389 - protein, 492 aa, Unknown
  Description of Unknown: Integrase B6390 sequence
  PTHR30461:SF3,SM00857,G3DSA:1.10.10.2600,IPR036162,PS51737, G3DSA:3.40.50.1390,IPR006119,IPR038109,PF07508,IPR011109, SSF53041,PTHR30461,PS51736,cd00338,PF00239
MNVAMYLRKSRADENNPLETLERHKEILLSYAKDNNLTVIDIFEEVISGGMLYNRTEMLKLLDAIPSHIYDAVLCIDLDRLGRGSAADSEKIFDVLKENDVKIITLKKIYDLNNEYDEDYSEFEMFMARKELKFITRRMNRGRIKSINDGCFVSGAPFGYRNAVINKKHTLEVYEPEAKYVRMIFDMYVNQSMGITSISRQLANLGVLSKKNTPLHPTTIARMLRNHTYIGKIVWNKSKSVKGKNTQEKTSKDDWLYVPGLHEPIIDEDTFNKAQDIINLKYKPPMRTGTLQNPFAGLLKCANCGRAIVINTSNETVEKYRLCCRTLGCNKASALSIVEDKVFEVLTKEFKDIELSLKNIRQSHNKDKLSCLDTIATLETELKKLDKQQLRLYDLLEQEVYTKELFLERNNAISDRRKKINATIAQEREKFKLVDTSSVEERLPLLRELLTNYHSLSAAEKNSILKNFVKKIEYKREKSAPEGDIFLKIYYK

SEQ ID NO: 6390 - protein, 492 aa, Unknown
  Description of Unknown: Integrase B6391 sequence
  PTHR30461:SF3,SM00857,G3DSA:1.10.10.2600,IPR036162,PS51737, G3DSA:3.40.50.1390,IPR006119,IPR038109,PF07508,SSF53041, IPR011109,PTHR30461,PS51736,cd00338, PF00239
MNVAMYLRKSRADENNPLETLERHKEILLSYAKDNNLTVIDIFEEVISGGMLYNRTEMLKLLDAIPSHIYDAVLCIDLDRLGRGSAADSEKIFDVLKENDVKIITLKKIYDLNNEYDEDYSEFEMFMARKELKFITRRMNRGRIKSINDGCFVSGAPFGYRNAVINKKHTLEVYEPEAKYVRMIFDMYVNQSMGITSISRQLANLGVLSKKNTPLHPTTIARMLRNHTYIGKIVWNKSKSVKGKNTQEKTSKDDWLYVPGLHEPIIDEDTFNKAQDIINLKYKPPMRTGTLQNPFAGLLKCANCGRAIVINTSNETVEKYRLCCRTLGCNKASALSIVEDKVFEVLTKEFKDIELSLKNIRQSHNKDKLSCLDTIATLETELKKLDKQQLRLYDLLEQEVYTKELFIERNNAISDRRKKINATIAQEREKFKLVDTSSIEERLPLLRELLTNYHSLSAAEKNSILKNFVKKIEYKREKSAPEGDIFLKIYYK

SEQ ID NO: 6391 - protein, 492 aa, Unknown
  Description of Unknown: Integrase B6392 sequence
  PTHR30461:SF3,SM00857,IPR006118,G3DSA:1.10.10.2600,IPR036162, PF13408,IPR025827,G3DSA:3.40.50.1390,Coil,IPR006119, IPR038109,PF07508,IPR011109,SSF53041,PTHR30461, PS00397,cd00338,PF00239
MPPLPTSNSQTLEIGAAYIRVSTDDQTELSPDAQLRVILDAAKADGFVIPKEYIFEEKKGISGRKADNRPEFQRMIAIAKSQKPAPFKRLYLWKFSRFARNQEESTFYKGILRKKCGIEIKSISEPIMDGMFGRLIETIIEWFDEYYSFNLSGEVMRGMTEKALREGYQTSPSLGYKAAGEGKPFLIDEMTYPIVEYIFRTYHDGRDMTATARAANAMGYRTRHGNLFDRRAVYRILTNRFYNGEVVWNGITFQGSHETRPAVTSIYENVQNRITSEYRPLKRREASANAHWLSGLLTCSVCGSSLGFNRSNNQKKRPDFFQCWKYAKGVHPGSCCVSARIAEQTVLSSLENAMGQNYLEYEYIPKTAVETNGEELALKEALDRIAIKEQRIREAYENEIDTLEEYKQNKIRLNAEREQLTAALEQLRQKIQQSTSAPPSQAEVMAKISCVYQVLSDQEVDNETKANALRAICKQIVFDRETRRFIFYYYTS

SEQ ID NO: 6392 - protein, 492 aa, Unknown
  Description of Unknown: Integrase B6393 sequence
  PTHR30461:SF3,IPR036162,PS51737,IPR011109,PTHR30461, PS00397,PF00239,G3DSA:1.10.10.2600,IPR006119,SSF53041, SM00857,IPR025827,IPR038109,PS51736,cd03768, IPR006118,PF13408,G3DSA:3.40.50.1390,PF07508,Coil
MAAIDFNNVVDLYIRVSTSEQAEEGYSVAEQEERLRSYCAAYNYTINAVHVDPGFSGASLDRPAIKKVMYDVEHGRCKKVIVWKLDRLSRSQKDTLILLEDVFLANDCNFISLMESFDTSTPFGRCIVGILAAFAQMERENIKIRTMMGRQARIREGHFHGSRCPLGYKFQYASDGTLLSNDLVVDPYTSKLVQEVYRLSLGGSSFSSIAAHMASIYGCSLYDWSRNTAIRRILSNPIYMGKVKVGNELYPGIHEPLVLETDWYMVAAMLKHNKEQQKRTYAYQISGGAYADNLLTGLLFCGDCGARMYARRVSQNKKKYICHSVAKTSPAMIRSDHCTNRLHPFTVHQLDEMVIDEILKLSLDRPGFDMLCDQPDASSKSEDKEIYEERLAEVNRQLDRLVKLYQTGLIDLDNISARLGDLNQEKNFLEGNLATINEVTPAEIRETAWKSIQSLQSVLNNGDMGEVHRIIHTLIDKVVVLNTDVTIYWSFC

SEQ ID NO: 6393 - protein, 492 aa, Unknown
  Description of Unknown: Integrase B6394 sequence
  PTHR30461:SF3,IPR036162,PS51737,IPR011109,PTHR30461, PS00397,PF00239,G3DSA:1.10.10.2600,IPR006119,SSF53041, SM00857,IPR025827,IPR038109,PS51736,cd03768, IPR006118,PF13408,G3DSA:3.40.50.1390,PF07508,Coil
MSSIDINNVVDLYIRVSTSEQAEEGYSVAEQEERLRSYCAAYNYTINAVHVDPGFSGASLDRPAIKKVMSDVEHGRCKKVIVWKLDRLSRSQKDTLILLEDVFLANDCNFISLMESFDTSTPFGRCIVGILAAFAQMERENIKIRTMMGRQARIREGHFHGSRCPLGYKFQYAPDGALLSNDLVVDPYTSKLVQEVYRLFLGGSSLSSISVHMTSTYGCCVYDWSNSTAIRRLLRNPIYMGKVKVGNELYPGIHEPLVSETDWYMVAAMLKHNKEQQKRTYAYQISGGAYADNLLTGLLFCGDCGARMYARRVSQNKKKYICHSVAKTSPAMIRSDHCTNRLHPFTVHQLDEMVIDEILKLSLDRPGFDMLCDQPDASSKSEDKEIYEERLAEVNRQLDRLVKLYQTGLIDLDNISARLGDLNQEKNFLEGNLATINEVTPAEIRETAWKSIQSLQSVLNNGDMGEVHRIIHTLIDKVVVLNTDVTIYWSFC

SEQ ID NO: 6394 - protein, 492 aa, Unknown
  Description of Unknown: Integrase B6395 sequence
  SM00857,G3DSA:1.10.10.2600,IPR036162,PF13408,IPR025827, G3DSA:3.40.50.1390,PS51737,IPR006119,IPR038109,PF07508, SSF53041,IPR011109,PTHR30461,Coil,PS51736, cd00338,PF00239
MNIQEIPTTRKEKPRVCAYVRVSTDSEAQEDSFAFQSNYWQRRFESDESVEYIGLFSDEGIGGAFMKKRDGLKRMFQKVRNGEIDRIYTKSVSRFARNKVELMEVVREFRDIGVEIIFESENIHTLDPKCGLILTVMASLAEEELLSMSQNQKWAARKRFANGSVELARILGYDMVDGKLVINEKEAVIVRRIFELYLQGNSFRTICHILENEGYTPMHGGRWSKSTITGMLRNEKYCGDSIMQKSYSTMKVQKYNYGELPKYYVQDNHEPIVSREDYQKAQEIMIARGNKYRPRGSPTALYPLSGKLICGECGTSFKRKTSAHGTPYMCIKWTCRKKDFYGVKECTSHDIKDEVVTRLLIEAYNESLDANNDVNGITEQEEVLRKLIANEQELRQLRAKGYISESKCREETDKILIKIKEQETLIKNLRTRDMVKGKYKKSDEMTEQMAEFLVKATVKDWKITFEFQNGYKTTKEYTNGRAGNVNGKLCKH

SEQ ID NO: 6395 - protein, 492 aa, Unknown
  Description of Unknown: Integrase B6396 sequence
  PTHR30461:SF3,SM00857,IPR006118,G3DSA:1.10.10.2600,IPR036162, PF13408,IPR025827,G3DSA:3.40.50.1390,Coil,IPR006119, IPR038109,PF07508,IPR011109,SSF53041,PTHR30461, PS00397,cd00338,PF00239
MSELSTNNSQPLEIGAAYIRVSTDDQTELSPDAQLRMILDAAKADGFVIPKEYIFEEKKGISGRKADNRPEFQRMIAIAKSQKPAPFKRLYLWKFSRFARNQEESTFYKGILRKKCGIEIKSISEPIMEGMFGRLIETIIEWFDEYYSFNLSGEVKRGMTEKALREGYQTSPCLGYKAVGDGKPFLINEDTYPIVEYIFQAYHSGRDMTGIARSVNTMGYRTQRGNPFERRSIYRILTNHFYIGEVSWNGITFQGSHETRPAVTSVFDDVQKRITSEYRPKKRREASANAHWLSGMLFCGVCGSSLGFNHSNSQKKRPDFFQCWKYAKGFHPGSCCVSARIAERTVLQSLEKALRNNHLEYEHIPKTESDISGEEIAIKEALERITVKERRIREAYENEIDTLEEYKQNKLRLNAERKELDTALDQLRQKAQQTEAAPPDQAEMMAKVSCVYQILSDPTANNETKGNALRSICKKIVFDRETRRFTFFFYTS

SEQ ID NO: 6396 - protein, 492 aa, Unknown
  Description of Unknown: Integrase B6397 sequence
  PTHR30461:SF3,IPR036162,PS51737,IPR011109,PTHR30461, PS00397,PF00239,G3DSA:1.10.10.2600,IPR006119,SSF53041, cd00338,SM00857,IPR025827,IPR038109,PS51736, IPR006118,PF13408,G3DSA:3.40.50.1390,PF07508,Coil
MKEKVSERKTGAIYIRVSTDKQEELSPDAQLRLLMDYARNNHTDIPQEYIFQDNGISGRKANKRPSFQQMIALAKSKEHPIDTIIVWKFSRFARNQEESIVYKSLLKKNNVDVVSVSEPLIDGPFGSLIERIIEWMDEYYSIRLSGEVMRGMTQNALRGHYQGDAPIGYRSPGNKKPPEKDQKTIQIPLLMKDLLLSGSSILQIARKLNEQGYRTKRGNLWDARGVRYVLENPFYAGISRWNYTDRGRQLKPAEEVIYTKGNWEPLWDKATLEEIQKRLSTNARKAKSRDVSTAKHWLSGLLVCSSCGGTLAYSGSKNSRGFQCWKYSKGFCNESHYIGIAPLEKLVMAYLKNILHSASIVYTVTSASSDSGSKLADLEKKLQKVDNKEKRIKAAYLNEIDTLEEYKANKAALLEERAAIEKNIKLLTISSTNMSKEEMDQKMKQNISALLTVLQDDSADYIKKGNMMRNVVDHITFDRKNTSLDMFLKLVI

SEQ ID NO: 6397 - protein, 492 aa, Unknown
  Description of Unknown: Integrase B6398 sequence
  PTHR30461:SF3,SM00857,G3DSA:1.10.10.2600,IPR036162,PS51737, G3DSA:3.40.50.1390,IPR006119,IPR038109,PF07508,IPR011109, SSF53041,PTHR30461,PS51736,cd00338,PF00239
MNVAMYLRKSRADENNPLETLERHKEILLSYAKDNNLTVIDIFEEVISGGMLYNRTEMLKLLDAIPSHIYDAVLCIDLDRLGRGSAADSEKIFDVLKENDVKIITLKKIYDLNNEYDEDYSEFEMFMARKELKFITRRMNRGRIKSINDGCFVSGAPFGYRNAVINKKHTLEVYEPEAKYVRMIFDMYVNQSMGITSISRQLANLGVLSKKNTPLHPTTIARMLRNHTYIGKIVWNKSKSVKGKNTQEKTSKDDWLYVPGLHEPIIDEDTFNKAQDIINLKYKPPMRTGTLQNPFAGLLKCANCGRAIVINTSNETVEKYRLCCRTLGCNKASALSIVEDKVFEVLTKEFKDIELSLKNIRQSHNKDKLSCLDTIATLETELKKLDKQQLRLYDLLEQEVYTKELFLERNNAISDRRKKINATIAQEREKFKLVDTSSIEERLPLFRELLTNYHSLSAAEKNSILKNFVKKIEYKREKSAPEGDIFLKIYYK

SEQ ID NO: 6398 - protein, 492 aa, Unknown
  Description of Unknown: Integrase B6399 sequence
  PTHR30461:SF3,SM00857,G3DSA:1.10.10.2600,IPR036162,PS51737, G3DSA:3.40.50.1390,IPR006119,IPR038109,PF07508,IPR011109, SSF53041,PTHR30461,PS51736,cd00338, PF00239
MNVAMYLRKSRADENNPLETLERHKEILLSYAKDNNLTVIDIFEEVISGGMLYNRTEMLKLLDAIPSHIYDAVLCIDLDRLGRGSAADSEKIFDVLKENDVKIITLKKIYDLNNEYDEDYSEFEMFMARKELKFITRRMNRGRIKSINDGCFVSGAPFGYRNAVINKKHTLEVYEPEAKYVRMIFDMYVNQSMGITSISRQLANLGVLSKKNTPLHPTTIARMLRNHTYIGKIVWNKSKSVKGKNTQEKTSKDDWLYVPGLHEPIIDENTFNKAQDIINLKYKPPMRTGTLQNPFAGLLKCANCGRAIVINTSNETVEKYRLCCRTLGCNKASALSIVEDKVFEVLTKEFKDIELSLKNIRQSHNKDKLSCLDTIATLETELKKLDKQQLRLYDLLEQEVYTKELFLERNNAISDRRKKINATISQEREKFKLVDTSSVEERLPLLRELLTNYHSLSAAEKNSILKNFVKKIEYKREKSAPEGDIFLKIYYK

SEQ ID NO: 6399 - protein, 492 aa, Unknown
  Description of Unknown: Integrase B6400 sequence
  PTHR30461:SF3,cd00338,SM00857,G3DSA:1.10.10.2600,IPR036162, PS51737,G3DSA:3.40.50.1390,IPR006119,IPR038109,PF07508, IPR011109,SSF53041,PTHR30461,PS51736,Coil, PF00239
MAYAMYLRKSRIDEEAGLENTLSKHETMLRDMAARMGIHIDETNIYREIVSGESIDARPQMQRLLKAVEMGLYTGVLCVELERLSRGNGEDQARILRTFQFSGTKIITLNKVYDLAGDDEFDEEFFEFGLFMSRREYKTIKRRLLRGRLQAQKDGYFIGSVPPYGYGKRKDGKGWTLCPDPHESHIVRLIFDRYAQGAKINDILRELQASGVKQRTGNDFTRTRIGEILRNRTYLGELQTKRKIKNRRIIDGEIKETYIRNSGMEYVQGRHEPIVSADTFDQCAARLRTMETRTRYAHTNRNPLASLVVCSQCGKTMQRTNGAQAEYLICKTFGCATKSTKLDIVERLTVDAIQAELERLTYVWAGYETKANDNTNELQVLEAEIDKRQKMLERACEAYETGIYDRTTYLQRVQKVNAEKAELLARLETIQDSEPEHDLKRIPVLSKALDEYWTLDSEDRNRLLKGMAERIEYEKTERGTGLNPRLRVTLRI

SEQ ID NO: 6400 - protein, 492 aa, Unknown
  Description of Unknown: Integrase B6401 sequence
  PTHR30461:SF3,SM00857,G3DSA:1.10.10.2600,IPR036162,PS51737, G3DSA:3.40.50.1390,IPR006119,IPR038109,PF07508,IPR011109, SSF53041,PTHR30461,PS51736,cd00338,PF00239
MNVAMYLRKSRADENNPLETLERHKEILLSYAKDNNLTVIDIFEEVISGGMLYNRTEMLKLLDAIPSHIYDAVLCIDLDRLGRGSAADSEKIFDVLKENDVKIITLKKIYDLNNEYDEDYSEFEMFMARKELKFITRRMNRGRIKSINDGCFVSGAPFGYRNAVINKKHTLEVYEPEAKYVRMIFDMYVNQSMGITSISRQLANLGVLSKKNTPLHPTTIARMLRNHTYIGKIVWNKSKSVKGKNTQEKTSKDDWLYVSGLHEPIIDEDTFNKAQDIINLKYKPPMRTGTLQNPFAGLLKCANCGRAIVINTSNETVEKYRLCCRTLGCNKASALSIVEDKVFEVLTKEFKDIELSLKNSRQSHNKDKFSCLDTIATLETELKKLDKQQLRLYDLLEQEVYTKELFIERNNAISDRRKKINATIAQEREKFKLVDTTSIEDRLPLLRELLTNYNSLSADEKNSILKNFVKKIEYKREKSAPEGDIFLKIYYK

SEQ ID NO: 6401 - protein, 492 aa, Unknown
  Description of Unknown: Integrase B6402 sequence
  PTHR30461:SF3,SM00857,G3DSA:1.10.10.2600,IPR036162,PF13408, IPR025827,G3DSA:3.40.50.1390,PS51737,IPR006119,IPR038109, PF07508,SSF53041,IPR011109,PF00239, PTHR30461,PS51736,Coil,cd00338
MKKIAIYSRKSVFTGKGESVENQIALCKDYCEKFLRYDNADYIVYEDEGFSGKNINRPQFKLLLDDIKKHKIDILVCYRLDRISRSVADFASTLEILNKYNVDFLSIREKFDTTSANGRAMLNISATFAQLERETIAERVKDNMLQMAKNGYWTGGQLPLGYDSIRYSTIDGTGKERSYSKLKENIKELDVVRLIYSEFLKNNSILDITKLLNENNLKGKNRCDFDRTQVKRILRNPLYVKSSDLTNLYLSNNYSVYGIANGNGYLTYNKSKAKDKWIVSVANHKGIIEDTNWLLVQKILDNNATKVSNRTGTGTGDNTSLFSGILKCSECGENMVIKYNNKNKYGNPNLYYICSSKTRKFTSKCKTKNLNVKATDIKILEDIKSYNKEVLIKKYEEYINELIANNNTGLKENLKEQIKHKEKQINNLVIKLSNIDTPEISDIILNQLATLTNEVKDLKTKLSNSDIQAANVEKAIGEFKNIKNLGYVTTNS

SEQ ID NO: 6402 - protein, 492 aa, Unknown
  Description of Unknown: Integrase B6403 sequence
  PTHR30461:SF3,IPR036162,PS51737,IPR011109,PTHR30461, PS00397,PF00239,G3DSA:1.10.10.2600,IPR006119,SSF53041, SM00857,IPR025827,IPR038109,PS51736,cd03768, IPR006118,PF13408,G3DSA:3.40.50.1390,PF07508,Coil
MAAIDFNNVVDLYIRVSTSEQAEEGYSVAEQEERLRSYCAAFNYIINAIHIDPGFSGASLDRPGIKKVMYDVEHGRCKKVIVWKLDRLSRSQKDTLILLEDVFLANDCNFISLMESFDTSTPFGRCIVGILAAFAQMERENIKIRTMMGRQARIREGHFHGSRCPLGYKFQYASDGTLLSNDLVVDPYTSKLVQEVYRLSLGGSSFSSIAAHMASIYGCSLYDWSRNTAIRRILSNPIYMGKVKVGNELYPGIHEPLVSETDWYMVAAMLKHNKEQQKRTYAYQISGGAYADNLLTGLLFCGDCGARMYARRVSQNKKKYICHSVAKTSPAMIRSDHCTNRLHPFTVHQLDEMVIDEILKLSLDRPGFDMLCDQPDASSKSEDKEIYEERLAEVNRQLDRLVKLYQTGLIDLDNISARLGDLNQEKNFLEGNLATINEVTPAEIRETAWKSIQSLQSVLNNGDMGEVHRIIHTLIDKVVVLNTDVTIYWSFC

SEQ ID NO: 6403 - protein, 492 aa, Unknown
  Description of Unknown: Integrase B6404 sequence
  cd03768,PTHR30461:SF3,SM00857,G3DSA:1.10.10.2600,IPR036162, PS51737,G3DSA:3.40.50.1390,IPR006119,IPR038109,PF07508, IPR011109,SSF53041,PTHR30461,PS51736,Coil, PF00239
MKKIAIYIRKSVKGDENSISLEAQTEVIKLYFKGENEFIIYKDDGFSGGNTNRPAFKKLMSDAIKNKFDTVACYKLDRIARNTLDFLTTFNTLKEYGIDLICVEDKYDPSTPSGRLMMTLLASLAEMERENIKQRVRDSMLNLARSGRWTGGTAPFGYKVITLEGGKYLKLDDEKNIKYIFNEFLNGKSIIKLGKEFNCNKKKISRILHNITYLQSSKDANAYIKQILEYEVIGEPNGCGYLPYGNHKMINGKKVKNTDGLKIAAISKHRAIINLDTFIKAQEKLKTFEGKRAPRISNKSFLAQMVQCKCGANMLIVLGYKRKDGTRKLYFACPDKCGNSFKDVNDMEADTISALKDITFLYNPNISNNNNNNINKDNSKIKKTIIKEIEDNKKKLDGLTDKLALVDSDLTNIIIEKMKKLNIHVNELETKLNLLEKEYLKINYNKEDLKLKEKNRKTFLKQFDYMDMKERQNAIRGVISKLTWDGENIIIS

SEQ ID NO: 6404 - protein, 492 aa, Unknown
  Description of Unknown: Integrase B6405 sequence
  PTHR30461:SF3,cd00338,SM00857,G3DSA:1.10.10.2600,IPR036162, PS51737,G3DSA:3.40.50.1390,IPR006119,IPR038109,PF07508, SSF53041,IPR011109,PTHR30461,PS51736,Coil, PF00239
MAYAMYLRKSRIDEEAGLENTLSKHETMLRDMAANMGIHVDERHIYREIVSGESIDARPQMQRLLKAVEMGLYTGVLCVELERLSRGNGEDQARILRTFQFSGTKILTLNKVYDLAGDDEFDEEFFEFGLFMSRREYKTIKRRLLRGRLQAQKDGYFIGSVPPYGYGKRKDGKGWTLCPDPHESHIVRLIFDRYAQGAKINDILRELQASGVKQRTGNDFTRTRIGEILRNRTYLGELQTKRKIKNRRIIDGEIKETYIRNSGMEYVQGRHEPIVSTDTFDQCAARLRTMETRTRYAHTNRNPLASLVVCSQCGKTMQRTNGAQAEYLICKTFGCTTKSTKLDIVERLTVDAIQAELERLTYVWSGYETEAKDNDDEMRVLESEIDRRQKMLDRACEAYETGVYDRSTYLQRVQKVNAEKAELTARLEALQAAEPERDIKRIPVLSKALDEYWTLDSEDRNRLLKGMAERIEYEKTERGTGLNPRLRVTLRI

SEQ ID NO: 6405 - protein, 492 aa, Unknown
  Description of Unknown: Integrase B6406 sequence
  PTHR30461:SF3,SM00857,G3DSA:1.10.10.2600,IPR036162,PS51737, G3DSA:3.40.50.1390,IPR006119,IPR038109,PF07508,IPR011109, SSF53041,PTHR30461,PS51736,cd00338,PF00239
MNVAMYLRKSRADENNPLETLERHKEILLSYAKDNNLTVIDIFEEVISGGMLYNRTEMLKLLDAIPSHIYDAVLCIDLDRLGRGSAADSEKIFDVLKENDVKIITLKKIYDLNNEYDEDYSEFEMFMARKELKFITRRMNRGRIKSINDGCFVSGAPFGYRNAVINKKHTLEVYEPEAKYVRMIFDMYVNQSMGITSISRQLANLGVLSKKNTPLHPTTIARMLRNHTYIGKIVWNKSKSVKGKNTQEKTSKNDWLYVPGLHEPIIDEDTFNKAQDIINLKYKPPMRTGTLQNPFAGLLKCANCGRAIVINTSNETVEKYRLCCRTLGCNKASALSIVEDKVFEVLTKEFKDIELSLKNIRQSHNKDKLSCLDTIATLETELKKLDKQQLRLYDLLEQEVYTKELFLERNNAISDRRKKINATIAQEREKFKLVDTSSIEERLPLLRELLTNYHSLSAAEKNSILKNFVKKIEYKREKSAPEGDIFLKIYYK

SEQ ID NO: 6406 - protein, 492 aa, Unknown
  Description of Unknown: Integrase B6407 sequence
  PTHR30461:SF3,SM00857,G3DSA:1.10.10.2600,IPR036162,PS51737, G3DSA:3.40.50.1390,IPR006119,IPR038109,PF07508,SSF53041, IPR011109,PTHR30461,PS51736,cd00338, PF00239
MNVAMYLRKSRADENNPLETLERHKEILLSYAKDNNLTVIDIFEEVISGGMLYNRTEMLKLLDAIPSHIYDAVLCIDLDRLGRGSAADSEKIFDVLKENDVKIITLKKIYDLNNEYDEDYSEFEMFMARKELKFITRRMNRGRIKSINDGCFVSGAPFGYRNAVINKKHTLEVYEPEAKYVRMIFDMYVNQSIGITSISRQLANLGVLSKKNTPLHPTTIARMLRNHTYIGKIVWNKSKSVKGKNTQEKTSKDDWLYVPGLHEPIIDEDTFSKAQDIINLKYKPPMRTGTLQNPFAGLLKCANCGRAIVINTSNETVEKYRLCCRTLGCNKASALSIVEDKVFEVLTKEFKDIELSLKNIRQSHNKDKLSCLDTIATLETELKKLDKQQLRLYDLLEQEVYTKELFLERNNAISDRRKKINATISQEREKFKLVDTSSVEERLPLLRELLTNYHSLSAAEKNSILKNFVKKIEYKREKSAPEGDIFLKIYYK

SEQ ID NO: 6407 - protein, 492 aa, Unknown
  Description of Unknown: Integrase B6408 sequence
  PTHR30461:SF3,IPR036162,PS51737,IPR011109,PTHR30461, PS00397,PF00239,G3DSA:1.10.10.2600,IPR006119,SSF53041, cd00338,SM00857,IPR025827,IPR038109,PS51736, IPR006118,PF13408,G3DSA:3.40.50.1390,PF07508,Coil
MKFKNVALYVRVSTDIQVDGYSIDEQIERLEKYCDANRWIIYNKYIDPGYSGSNMDRPGLTDLVKDIRRKKIDLVLVYKLDRLSRSQKDTLYLIEEEFLPNGVDFISITENFDTSSPFGRAMIGILSVFAQLERENIKHRLAMGHIGRAKAGYWRAGSNPPIGYDYIDGMLIPNEYEALQVKTIFKMFLEGETIHGITRYMNKHFTNKYSSYADAGQTGVILRNTLYIGKIKYKGVEYDGVHEPIIDLDTFERVQKRYKEISGKWSDNYRSPFKAKHLLTGLLYCGNCGARYFAYTQRRIDKETGKQTKKSEKYVYYKCYTRDGNKQMRKADYCKNPTIRVDKLDKAVLDEIKKLKLDPDYMDQIIKSERKEKIEDNTITILKNRLADIESKINKLMDLYTLGTIPISDIGDRVKPLYEEKSKLEIEIADREEEIQEPDTLSVYETRDILDQYVDNIDETDHDLKRELVQSLIKRIEVLPDPDSIKIYWKFV

SEQ ID NO: 6408 - protein, 492 aa, Unknown
  Description of Unknown: Integrase B6409 sequence
  PTHR30461:SF3,SM00857,G3DSA:1.10.10.2600,IPR036162,PS51737, G3DSA:3.40.50.1390,IPR006119,IPR038109,PF07508,IPR011109, SSF53041,PTHR30461,PS51736,cd00338,PF00239
MNVAMYLRKSRADENNPLETLERHKEILLSYAKDNNLTVIDIFEEVISGGMLYNRTEMLKLLDAIPSHIYDAVLCIDLDRLGRGSAADSEKIFDVLKENDVKIITLKKIYDLNNEYDEDYSEFEMFMARKELKFITRRMNRGRIKSINDGCFVSGAPFGYRNAVINKKHTLEVYEPEAKYVRMIFDMYVNQSMGITSISRQLANLGVLSKKNTPLHPTTIARMLRNHTYIGKIVWNKSKSVKGKNTQEKTSKDDWLYVPGLHEPIIDENTFNKAQDIINLKYKPPMRTGTLQNPFAGLLKCANCGRAIVINTSNETVEKYRLCCRTLGCNKASALSIVEDKVFEVLTKEFKDIELSLKNIRQSHNKDKLSCLDTIATLETELKKLDKQQLRLYDLLEQAVYTKELFLERNNAISDRRKKINATIAQEREKFKLVDTSSIEERLPLLRELLTNYNSLSAAEKNSILKNFVKKIEYKREKSAPEGDIFLKIYYK

SEQ ID NO: 6409 - protein, 492 aa, Unknown
  Description of Unknown: Integrase B6410 sequence
  cd00338,SM00857,G3DSA:1.10.10.2600,IPR036162, PS51737,G3DSA:3.40.50.1390,IPR006119,IPR038109, PF07508,IPR011109,SSF53041,PTHR30461, PS51736,Coil,PF00239
MAYAMYLRKSRIDEEAGLENTLSKHETMLRDMAANMGIHVDERYIYREIVSGESIDARPQMQRLLKAVEMGLYTGVLCVELERLSRGNGEDQARILRTFQFSGTKIITLNKVYDLAGDDEFDEEFFEFGLFMSRREYKMIKRRLLRGRLQAQKDGYFVGSVPPYGYGKRKDGKGWTLYPDPGEAQVVRLIFDRYAEGAKINDILRELQASGVRQRTGNEFTRTRIGEILRNRTYLGELQTKRKIKNRRIIDGEIKETYVRNGGMEYVQGRHEPIVSTDAFDQCAARLKTMETRTRHAHTNRNPLASLVVCSQCGKTMQRTNGAQAEYLICKTFGCATKSTKLEIVERMVVDAIQAELERLTYVWSGYETEAKDNDNEMRVLESEIDRRQKMLDRACEAYETGVYDRSTYLQRVQKVNAEKAELTARLEALQAAEPERDIKRIPVLSKALDEYWTLGSEDRNRLLKGMAERIEYEKTERGTGLNPRLRVTLRI

SEQ ID NO: 6410 - protein, 492 aa, Unknown
  Description of Unknown: Integrase B6411 sequence
  PTHR30461:SF3,SM00857,IPR006118,G3DSA:1.10.10.2600,IPR036162, PF13408,IPR025827,G3DSA:3.40.50.1390,Coil,IPR006119, IPR038109,PF07508,IPR011109,SSF53041,PTHR30461, PS00397,cd00338,PF00239
MSELSTNNSQPLEIGAAYIRVSTDDQTELSPDAQLRMILDAAKADGFVIPKEYIFEEKKGISGRKADNRPEFQRMIAIAKSQKPAPFKRLYLWKFSRFARNQEESTFYKGILRKKCGIEIKSISEPIMEGMFGRLIETIIEWFDEYYSFNLSGEVKRGMTEKALREGYQTSPCLGYKAVGDGKPFLINEDTYPIVEYIFQAYHSGRDMTGIARSVNTMGYRTQRGNLFERRSIYRILTNHFYIGEVSWNGITFQGSHETRPAVTSVFDDVQKRITSEYRPKKRREASANAHWLSGMLFCGVCGSSLGFNHSNSQKKRPDFFQCWKYAKGFHPGSCCVSARIAERTVLQSLEKALRNNHLEYEYIPKTESDISGEEIAIKEALERITVKERRIREAYENEIDTLEEYKQNKLRLNAERKELDTALDQLRQKAQQTEAAPPDQAEMMAKVSCVYQILSDPTTNNETKGNALRSICKKIVFDRETRRFTFFFYTS

SEQ ID NO: 6411 - protein, 492 aa, Unknown
  Description of Unknown: Integrase B6412 sequence
  SM00857,G3DSA:1.10.10.2600,IPR036162,PS51737,G3DSA:3.40.50.1390, IPR006119,IPR038109,PF07508,IPR011109,SSF53041, PF00239,PTHR30461,PS51736,Coil,cd00338
MAYAMYLRKSRIDEEAGLENTLSKHETMLRDMAARMGIHIDEMNIYREIVSGESIDARPQMQRLLKAVEMGLYTGVLCVELERLSRGNGEDQARILRTFQFSGTKILTLNKVYDLAGDDEFDEEFFEFGLFMSRREYKTIKRRLLRGRLQAQKDGYFIGSVPPYGYSKRKDGKGWTLCPDPHESHIVRLIFDRYAQGAKINDILRELQASGVKQRTGNDFTRTRIGEILRNRTYLGELQTKRKIKNRRIIDGEIKETYIRNSGMEYVQGRHEPIVSADTFDQCAARLRTMETRTRYAHTNRNPLASLIVCTQCGKTMQRTNGAQAEYLICKTFGCTTKSTKLDIVERLTVDAIQAELERLTYVWAGYETKANDNTNELQVLEAEIDKRQKMLERACEAYETGIYDRTTYLQRVQKVNAEKAELLARLETLQDSEPEHDLKRIPVLSKALDEYWALDSEDRNRLLKGMAERIEYEKTERGTGLNPRLRVTLRI

SEQ ID NO: 6412 - protein, 492 aa, Unknown
  Description of Unknown: Integrase B6413 sequence
  SM00857,G3DSA:1.10.10.2600,IPR036162,PF13408, PS51737,G3DSA:3.40.50.1390,IPR025827,IPR006119, IPR038109,PF07508,SSF53041,IPR011109, PTHR30461,Coil,PS51736,cd00338,PF00239
MNIQEIPTTRKEKPRVCAYVRVSTDSEAQEDSFAFQSNYWQRRFESDESVEYIGLFSDEGIGGAFMKKRDGLKRMFQKVRNGEIDRIYTKSVSRFARNKVELMEVVREFRDIGVEIIFESENIHTLDPKCGLILTVMASLAEEELLSMSQNQKWAARKRFANGSVELARILGYDMVDGKLVINEKEAVIVRRIFELYLQGNSFRTICHILENEGYTPMHGGRWSKSTITGMLRNEKYCGDSIMQKSYSTMKVQKYNYGELPKYYVQDNHEPIVSREDYQKAQEIMIARGNKYRPRGSPTALYPLSGKLICGECGTSFKRKTSAHGTPYMCIKWTCRKKDFYGVKECTSHDIKDEVVTRLLIEAYNESLDANNDVNGITEQEEVLRKLIANEQKLRQLRAKGYISESKCREETDKILIKIKEQETLIKNLRTRDMVKGKYKKSDEMTEQMAEFLVKATVKDWKITFEFQNGYKTTKEYTNGRAGNVNGKLCKH

SEQ ID NO: 6413 - protein, 492 aa, Unknown
  Description of Unknown: Integrase B6414 sequence
  PTHR30461:SF3,SM00857,G3DSA:1.10.10.2600,IPR036162,PS51737, G3DSA:3.40.50.1390,IPR006119,IPR038109,PF07508,SSF53041, IPR011109,PTHR30461,PS51736,cd00338,PF00239
MNVAMYLRKSRADENNPLETLERHKEILLSYAKDNNLTVIDIFEEVISGGMLYNRTEMLKLLDAIPSHIYDAVLCIDLDRLGRGSAADSEKIFDVLKENDVKIITLKKIYDLNNEYDEDYSEFEMFMARKELKFITRRMNRGRIKSINDGCFVSGAPFGYRNAVINKKHTLEVYEPEAKYVRMIFDMYVNQSMGITSISRQLANLGVLSKKNTPLHPTTIARMLRNHTYIGKIVWNKSKSVKGKNTQEKTSKDDWLYVPGLHEPIIDEDTFNKAQDIINLKYKPPMRTGTLQNPFAGLLKCANCGRAIVINTSNETVEKYRLCCRTLGCNKASALSIVEDKVFEVLTKEFKDIELSLKNIRQSHNKDKLSCLDTIATLETELKKLDKQQLRLYDLLEQEVYTKELFIERNNAISDRRKKINATIAQEREKFKLVDTSSIEERLPLLRELLTNYNSLSAAEKNSILKNFVKKIEYKREKSAPEGDIFLKIYYK

SEQ ID NO: 6414 - protein, 492 aa, Unknown
  Description of Unknown: Integrase B6415 sequence
  PTHR30461:SF3,IPR036162,PS51737,IPR011109,PTHR30461, PS00397,PF00239,G3DSA:1.10.10.2600,IPR006119,SSF53041, cd00338,SM00857,IPR025827,IPR038109, IPR006118,PF13408,G3DSA:3.40.50.1390,PF07508,Coil
MSQLSTSNAQPLEIGAAYIRVSTDDQTELSPDAQLRMILDAAKADGFVIPKEYIFEEKKGISGRKADNRPEFQRMIAIAKSQKPAPFKRLYLWKFSRFARNQEESTFYKGILRKKCGIEIKSISEPIMEGMFGRLIETIIEWFDEYYSFNLSGEVKRGMTEKALREGYQTSPCLGYKAVGDGKPFVIDADTYPIVEYIFQAYHSGRDMTGIARSVNTMGYRTRRGNPFERRSIYRILTNPFYTGEVTWNGITFHGTHETRPSITSVFDDVQKRITSEYRPKQRREASANAHWLSGMLFCGVCGSSLGFNRSNDQKKRPDFFQCWKYAKGFHPGSCCVSARIAERTVLRSLEEALGNNRLEYEHIPKTENDISEEEIAIKEALERITVKERRIREAYENEIDTLEEYKQNKLRLNAERKELENALDQLRQKAQQTEAAPPDQAEMMAKVSCVYQTLSDPTADNETKGNALRSLCEKIVFDRETRSFTFFYYTS

SEQ ID NO: 6415 - protein, 492 aa, Unknown
  Description of Unknown: Integrase B6416 sequence
  PTHR30461:SF3,SM00857,G3DSA:1.10.10.2600,IPR036162,PS51737, G3DSA:3.40.50.1390,IPR006119,IPR038109,PF07508,IPR011109, SSF53041,PTHR30461,PS51736,cd00338,PF00239
MNVAIYLRKSRADENNPLETLERHKEILLSYAKDNNLTVIDIFEEVISGGMLYNRTEMLKLLDAIPSHIYDAVLCIDLDRLGRGSAADSEKIFDVLKENDVKIITLKKIYDLNNEYDEDYSEFEMFMARKELKFITRRMNRGRIKSINDGCFVSGAPFGYRNAVINKKHTLEVYEPEAKYVRMIFDMYVNQSMGITSISRQLANLGVLSKKNTPLHPTTIARMLRNHTYIGKIVWNKSKSVKGKNTQEKTSKDDWLYVPGLHEPIIDEDTFNKAQDIINLKYKPPMRTGTLQNPFAGLLKCANCGRAIVINTSNETVEKYRLCCRTLGCNKASALSIVEDKVFEVLTKEFKDIELSLKNIRQSHNKDKLSCLDTIATLETELKKLDKQQLRLYDLLEQEVYTKELFLERNNAISDRRKKINATIAQEREKFKLVDTSSIEERLPLLRELLTNYHSLSATEKNSILKNFVKKIEYKREKSAPEGDIFLKIYYK

SEQ ID NO: 6416 - protein, 492 aa, Unknown
  Description of Unknown: Integrase B6417 sequence
  SM00857,G3DSA:1.10.10.2600,IPR036162,PF13408, IPR025827,G3DSA:3.40.50.1390,PS51737,IPR006119, IPR038109,PF07508,SSF53041,IPR011109, PTHR30461,Coil,PS51736,cd00338,PF00239
MNIQEIPTTRKEKPRVCAYVRVSTDSEAQEDSFAFQSNYWQKRFASDESVEYVGLFSDEGIGGAFMKKRDGLKRMFQKVRNGEIDRIYTKSVSRFARNKVELMEIVREFRDIGVEIIFESENIHTLDPKCGLILTVMASLAEEELISMSQNQKWAARKRFANGSVELARILGYDMVDGKLVINEKEAVIVRRIFELYLQGNSFRTICHILENEGYTPMHGGRWSKSTITGMLRNEKYCGDSIMQKSYSVMKVQKYNYGELPKYYVQDDHEPIVSREDYQKAQEIMMARGNKYRPRGSPTTLYPLSGKLICGECGTSFKRKTSAHGTPYMCIKWTCRKKDVYGVKECTSHDIKDEVVTRLLIEAYNESIDANNEVNGVTEQEEVLRKLIANEQELRQLRAKGYISESKFREETDKILIKIKEQETLIKNLQTRDMVKGKYKKSDELTEQMAEFLVKATVKDWTITFEFQNGYKATKEYTNGRAGNVNGKLCKH

SEQ ID NO: 6417 - protein, 492 aa, Unknown
  Description of Unknown: Integrase B6418 sequence
  PTHR30461:SF3,SM00857,G3DSA:1.10.10.2600,IPR036162,G3DSA:3.40.50 .1390,IPR006119,IPR038109,PF07508,IPR011109,SSF53041, PTHR30461,cd00338,PF00239
MNVAMYLRKSRADENNPLETLERHKEILLSYAKDNNLTVIDIFEEVISGGMLYNRTEMLKLLDAIPSHIYDAVLCIDLDRLGRGSAADSEKIFDVLKENDVKIITLKKIYDLNNEYDEDYSEFEMFMARKELKFITRRMNRGRIKSINDGCFVSGAPFGYRNAVINKKHTLEVYEPEAKYVRMIFDMYVNQSMGITSISRQLANLGVLSKKNTPLHPTTIARMLRNHTYIGKIVWNKSKSVKGKNTQEKTSKDDWLYVPGLHEPIIDEDTFNKAQDIINLKYKPPMRTGTLQNPFAGLLKCANCGRAIVINTSNETVEKYRLCCRTLGCNKASALSIVEDKVFEVLTKEFKDIELSLKNIRQSHNKDKLSCLDTIAALETELKKLDKQQLRLYDLLEQEVYTKELFLERNNAISDRRKKINATIAQEREKFKLVDTSSVEERLPLLRELLTNYHSLSAAEKNSILKNFVKKIEYKREKSAPEGDIFLKIYYK

SEQ ID NO: 6418 - protein, 492 aa, Unknown
  Description of Unknown: Integrase B6419 sequence
  SM00857,G3DSA:1.10.10.2600,IPR036162,PF13408, PS51737,G3DSA:3.40.50.1390,IPR025827,IPR006119, IPR038109,PF07508,SSF53041,IPR011109, PTHR30461,Coil,PS51736,cd00338,PF00239
MNIQEIPTKKVEKPRVCAYVRVSTDSDAQEDSFAFQSNYWQNRFENDESVEYIGLFSDEGIGGAFMKKRDGLKRMFQKVRNGEIDRIYTKSVSRFARNKVELMEVVREFRDLGVEIIFESENIHTLDPKCGLILTVMASLAEEELLSMSQNQKWAARKRFANGSVELARILGYDMVDGKLVINEKEAVIVRRIFELYLQGNSFRTICHILENEGYTPMHGGRWSKSTITGMLRNEKYCGDSIMQKSYSTMKVQKYNYGELPKYYIQGDHEAIVSREDYQKAQEIMMARGNKYRPRGSPTALYPLSGKLICGECGTSFKRKTSAHGTPYMCIKWTCRKKDVYGVKECASHDIKDEVVTRLLIEAYNESLDANNDVNGITEQEEVLRKLIANEQELRQLRAKGYISESKCREETDKILIKIKEQETLIKNLQTRDMVKGKYKKSDKLTEQMAEFLVKAIVKEWTITFEFQNGYKATKEYTNGRAGNVNGKLCKH

SEQ ID NO: 6419 - protein, 492 aa, Unknown
  Description of Unknown: Integrase B6420 sequence
  PTHR30461:SF3,SM00857,G3DSA:1.10.10.2600,IPR036162,PS51737, G3DSA:3.40.50.1390,IPR006119,IPR038109,PF07508,IPR011109, SSF53041,PTHR30461,PS51736,cd00338,PF00239
MNVAIYLRKSRADENNPLETLERHKEILLSYAKDNNLTVIDIFEEVISGGMLYNRTEMLKLLDAIPSHIYDAVLCIDLDRLGRGSAADSEKIFDVLKENDVKIITLKKIYDLNNEYDEDYSEFEMFMARKELKFITRRMNRGRIKSINDGCFVSGAPFGYRNAVINKKHTLEVYEPEAKYVRMIFDMYVNQSMGITSISRQLANLGVLSKKNTPLHPTTIARMLRNHTYIGKIVWNKSKSVKGKNTQEKTSKDDWLYVPGLHEPIIDEDTFNKAQDIINLKYKPPMRTGTLQNPFAGLLKCANCGRAIVINTSNETVEKYRLCCRTLGCNKASALSIVEDKVFEVLTKEFKDIELSLKNIRQSHNKDKLSCLDTIATLETELKKLDKQQLRLYDLLEQEVYTKELFLERNNAISDRRKKINATIAQEREKFKLVDTSSIEERLPLLRELLTNYHSLSAAEKNSILKNFVKKIEYKREKSAPKGDIFLKIYYK

SEQ ID NO: 6420 - protein, 492 aa, Unknown
  Description of Unknown: Integrase B6421 sequence
  SM00857,G3DSA:1.10.10.2600,IPR036162,PS51736, PS51737,G3DSA:3.40.50.1390,IPR006119,IPR038109, PF07508,IPR011109,SSF53041,PTHR30461, Coil,mobidb-lite,cd00338,PF00239
MDGLAIERQREDCENLARFRHWEVVETYVDQSISASDKTKKRPAYLQMVADYEAGLLDAIVCYDLDRLTRQPRELEDWIDRAESRGLLLVTANGDADLSTDGGRMYARIKAAVARAEVERKGARQSRAHVQRARQGRPPKGVRPLGYSTSGQIIPHEAEGVRAIYAAFLRGDSLQGIARALSGTQMDGEGLGVPHLPLHSRTVVLERNARREVEGKVPRPVPEDRPWSASTVLGILRNPRYAGYSVYTSKDVRRQETGESRRKALRDNLVKDENGELVLGQWNAIVETDQWWTVQNFLDDPARVTNRSGSTVRKHLGAGLYRCEVCGEPVRTRARYYSCKAGHLNRTRSAIDDFVRALVVERLKRKDLRRRKKQADPEIKDAFSERIAEQRARIARAERDYDAEVIEGEDLARIRKAARAEITRLEAERLTSGTGTVLAPILGTSDPAQAFLEAPMALQRTMIDTLMTVTLRRAQQGKKGFAPESVEIVWKQ

SEQ ID NO: 6421 - protein, 492 aa, Unknown
  Description of Unknown: Integrase B6422 sequence
  PTHR30461:SF3,SM00857,G3DSA:1.10.10.2600,IPR036162,PS51737, G3DSA:3.40.50.1390,IPR006119,IPR038109,PF07508,IPR011109, SSF53041,PTHR30461,PS51736,cd00338,PF00239
MNVAIYLRKSRADENNPLETLERHKEILLSYAKDNNLTVIDIFEEVISGGMLYNRTEMLKLLDAIPSHIYDAVLCIDLDRLGRGSAADSEKIFDVLKENDVKIITLKKIYDLNNEYDEDYSEFEMFMARKELKFITRRMNRGRIKSINDGCFVSGAPFGYRNAVINKKHTLEVYEPEAKYVRMIFDMYVNQSMGITSISRQLANLGVLSKKNTPLHPTTIARMLRNHTYIGKIVWNKSKSVKGKNTQEKTSKDDWLYVPGLHEPIIDENTFNKAQDIINLKYKPPMRTGTLQNPFAGLLKCANCGRAIVINTSNETVEKYRLCCRTLGCNKASALSIVEDKVFEVLTKEFKDIELSLKNIRQSHNKDKLSCLDTIATLETELKKLDKQQLRLYDLLEQEVYTKELFLERNNAISDRRKKINATIAQEREKFKLVDTSSIEERLPLLRELLTNYNSLSATEKNSILKNFVKKIEYKREKSAPEGDIFLKIYYK

SEQ ID NO: 6422 - protein, 492 aa, Unknown
  Description of Unknown: Integrase B6423 sequence
  PTHR30461:SF3,SM00857,G3DSA:1.10.10.2600,IPR036162,PF13408, IPR025827,G3DSA:3.40.50.1390,PS51737,IPR006119,IPR038109, PF07508,SSF53041,IPR011109,PTHR30461, Coil,PS51736,cd00338,PF00239
MIMETYCIYLRKSRADAEAEARGEGETLARHENTLLELAKRKSLTIAHIYREIVSGDSIAARPQMQQMLQDVTDKIYTGVLVMEIERLARGDTIDQGVVAQAFRDSGTKIITPVKTYDPNNEFDEEYFEFSLFMSRREYKTIKRRMQAGRIASIKEGNYIGTNPPYGYRKIQPEPKVKTLEIVPEEAEAVKMMFGMYLSGNGARAIAAHLNQLNIQPRKAAMWEPVSVRKILRNPIYAGKIEWNTKKDGTILSDGLHPAIISLEQFQQAAERHKRTAPQVPTGYTTQNYYHGILFCGNCGHQMKRRPSQNGTPHMLCRRNECRGKVVSSAITKIDEAVLESIKYRISELNLSKAQSGEEQKEKERQKEIQKNQLEKALEKLKKQKEKLHTLLETDVYTVDVFLERSKALEAQKEELEKALHSITDSAQGKEHLAPEQAVIWLQYVLDNFSAADASQKNKMLQRIIKRIEYRKTERMCYRKRDSDMSLRIDFL

SEQ ID NO: 6423 - protein, 492 aa, Unknown
  Description of Unknown: Integrase B6424 sequence
  PTHR30461:SF3,SM00857,G3DSA:1.10.10.2600,IPR036162,PF13408, PS51737,IPR025827,G3DSA:3.40.50.1390,IPR006119,IPR038109, PF07508,IPR011109,SSF53041,PTHR30461,Coil, PS51736,cd00338,PF00239
MNPTKAVIYARYSSDNQREESIEGQIRECTEYAVRNDITILSSYIDRALSARTADRPEFQRMIADSEKGLFDVVLVWKLDRFSRDRYDSAHYKHILKKNGVRVISARENISEGPEGIILESMLEGYAEYYSAELSEKIQRGQKENALKCRSNGGNVPLGYKIGSDGVLEIDPATAPLVEEIFTRYESGETIKAIADSLNERGLRTRKNRPFRVASLSVTLKNRKYIGEYKYADTVIPNGIPAIINPDLFERVQERMLTNKKAPSRTKADEDYLLTTKLFCGDCGRLMAGECGTSGTNSVKYYYYKCGGAKRKLGCKRKAVKKRWIERAAVIATIERVLRDDEIDRIADAIIDLQNREDTTLPALRQQLKDCEQGIENMLNAIQMGILTPSTKTRLEELESRRESLKVSILQAELEKPKYTKEQIVNWINRFKYGNVDDIEYQRQIIDTFINAIYVYDDKLVFTYNFKDGTETVPLKAVEDAFGSDLTQVAPP

SEQ ID NO: 6424 - protein, 492 aa, Unknown
  Description of Unknown: Integrase B6425 sequence
  PTHR30461:SF3,cd00338,SM00857,G3DSA:1.10.10.2600,IPR036162, PS51737,G3DSA:3.40.50.1390,IPR006119,IPR038109,PF07508, IPR011109,SSF53041,PTHR30461,PS51736,Coil, PF00239
MPKKAVIYARFSCNRQREASIEDQLRVCREWCAREGYEVAAEYCDRAVSGRTDDRPEFQRMIANAGESEIVLVYMMDRFSRGEYDAPIYKRELATHGVKLVSALEAIPDSPEGIIYEKLLEGLAACESRKTAIRTKRGMEGNALMCKTNGVRIFGYRRNGDDEYEVDEAQAAWVREAFALRLERMSMNAIAREFARRGLRTRKGNPCGQAMVQQMLRDRRYTGRYEWGGIVREGGMPAIVDEVTFMEVQGIKCRKQRSSENWGDFALAGTALCAECGRNLQGVSGRGRNNVKYEYYSCPGSCVRNIRREELEGSIASALRGLLGDRGEALQIANMVAERADTAEVRARRRQAEDSLRAAERGLRNILNAIEQGVIAPGVNERIAELEEQQARARYDLEAITDERIDPERFADFLQCGTALDDATLLKAFVWQAVVSEDEILVTLNYDKKGEPARLDIQRVRAKLEWCPVCIDSRTEICAVGTVVLLRIPRAA

SEQ ID NO: 6425 - protein, 492 aa, Unknown
  Description of Unknown: Integrase B6426 sequence
  PTHR30461:SF3,SM00857,IPR006118,G3DSA:1.10.10.2600,IPR036162, PF13408,IPR025827,G3DSA:3.40.50.1390,Coil,IPR006119, IPR038109,PF07508,IPR011109,SSF53041,PTHR30461, PS00397,cd00338,PF00239
MSELSTNNSQPLEIGAAYIRVSTDDQTELSPDAQLRMILDAAKADGFVIPKEYIFEEKKGISGRKADNRPEFQRMIAIAKSQKPAPFKRLYLWKFSRFARNQEESTFYKGILRKKCGIEIKSISEPIMEGMFGRLIETIIEWFDEYYSFNLSGEVKRGMTEKALREGYQTSPCLGYKAVGDGKPFLINEDTYPIVEYIFQAYHSGRDMTGIARSVNTMGYRTQRGNPFERRSIYRILTNHFYIGEVSWNGITFQGSHETRPAVTSVFDDVQKRITSEYRPKKRREASANAHWLSGMLFCGVCGSSLGFNHSNSQKKRPDFFQCWKYAKGFHPGSCCVSARIAERTVLQSLEKALRNNHLEYEYIPKTESDISGEEIAIKEALERITVKERRIREAYENEIDTLEEYKQNKLRLNAERKELDTALDQLRQKAQQTEAAPPDQAEMMAKVSCVYQILSDPTANNETKGNALRSICKKIVFDRETRRFTFFFYTS

SEQ ID NO: 6426 - protein, 492 aa, Unknown
  Description of Unknown: Integrase B6427 sequence
  SM00857,G3DSA:1.10.10.2600,IPR036162,PF13408,PS51737, IPR025827,G3DSA:3.40.50.1390,IPR006119,IPR038109,PF07508, IPR011109,SSF53041,PTHR30461,Coil,PS51736, cd00338,PF00239
MNIQEIPTKKVEKPRVCAYVRVSTDSDAQEDSFAFQSNYWQRRFESDESVEYIGLFSDEGIGGAFMKKRDGLKRMFQKVRNGEIDRIYTKSVSRFARNKVELMEIVREFRDIGVEIIFESENIHTLDPKCGLILTVMASLAEEELISMSQNQKWAARKRFANGSVELTQILGYDMIDGKLVINEKEAVIVRRIFELYLQGNSFRTICHILENEGYTPMHGGRWSKSTITGMLRNEKYCGDSIMQKSYSTMKVQKYNYGELPKYYVQDNHEPIVSREDYQKVQEIMIARGNKYRPRGSPTALYPLSGKLICGECGTSFKRKTSAHGTPYMCIKWTCRKKDFYGVKECTSHDIKDEVVTRLLIEAYNESLDANNDVNGITEQEEVLRKLIANEQELRQLRAKGYISENKCREETDKILIKIKEQETLIKNLRTRDMVKGKYKKSDEMTEQMAEFLVKATVKDWKITFEFQNGYKTTKEYTNGRAGNVNGKLCKH

SEQ ID NO: 6427 - protein, 492 aa, Unknown
  Description of Unknown: Integrase B6428 sequence
  PTHR30461:SF3,IPR036162,PS51737,IPR011109,PTHR30461, PS00397,PF00239,G3DSA:1.10.10.2600,IPR006119,SSF53041, SM00857,IPR025827,IPR038109,PS51736,cd03768, IPR006118,PF13408,G3DSA:3.40.50.1390,PF07508,Coil
MAAIDFNNVVDLYIRVSTSEQAEEGYSVAEQEERLRSYCAAYNYTINAIHVDPGFSGASLDRPGIKKVMYDVEHGRCKKVIVWKLDRLSRSQKDTLILLEDVFLANDCNFISLMESFDTSTPFGRCIVGILAAFAQMERENIKIRTMMGRQARIREGHFHGSRCPLGYKFQYAPDGTLLSNDLVVDPYNSKLVQEVYRLSLGGSSISSIAAHMTSTYGCSLYDWSRNTAIRRILSNPIYMGKVKVGNELYPGIHEPLVSETDWYMVAAMLKHNKEQQKRTYAYQISGGAYADNLLTGLLFCGDCGARMYARRVSQNKKKYICHSVAKTSPAMIKSDHCTNRLHPFTVHQLDEMVIDEILKLSLDRPGFDMLCDQPDDSSKSEDKEIYEERLAEVNRQLDRLVKLYQTGLIDLDNISARLGDLNQEKNFLEGNLATINEVTPAEIRETAWKSIQSLQSVLNNGDMDEVHRIIHTLIDKVVVLNTDVTIYWSFC

SEQ ID NO: 6428 - protein, 492 aa, Unknown
  Description of Unknown: Integrase B6429 sequence
  PTHR30461:SF3,cd00338,SM00857,G3DSA:1.10.10.2600,IPR036162, PS51737,G3DSA:3.40.50.1390,IPR006119,IPR038109,PF07508, SSF53041,IPR011109,PTHR30461,PS51736,Coil, PF00239
MAYALYLRKSRADEELGHENTLARHEEMLRDLADRNNIYVDEAHIYREIVSGESIEARPQMQRLLKAVEAGMYTGVLCIELERLSRGNGADQARILKSFQFSDTKIITLTKTYDLAGDDSFDEEFFEFGLFMSRREYKMIKRRLHRGRMQAQQEGYFIGSVPPYGYGKRKDGKGWSLCPDPSEAQVVRLIFDRYAQGARINDILRELQASGVKQRTGNDFTRTRIGEILRNRTYLGELQTKRKIKNRRIIDGEIKETYVRNSGMEYVQGRHEPIVSADIFDQCAARLKTMETRTRHAHTNRNPLASLVVCSQCGKTMQRTNGAQAEYLICKTFGCTTKSTKLDIVERLTVDAIQAELERLTYVWAGYETKANDNTNELQVLEAEIDKRQKMLERACEAYETGVYDRSTYLQRVQKVNAEKAELLARLETLQDSEPGHDLKQIPVLSKALDEYWTLDSENRNRLLKGMAERIEYEKTERGTGLNPRLRVTLKI

SEQ ID NO: 6429 - protein, 492 aa, Unknown
  Description of Unknown: Integrase B6430 sequence
  PTHR30461:SF3,IPR036162,PS51737,IPR011109,PTHR30461, PS00397,PF00239,G3DSA:1.10.10.2600,IPR006119,SSF53041, cd00338,SM00857,IPR025827,IPR038109,PS51736, IPR006118,PF13408,G3DSA:3.40.50.1390,PF07508,Coil
MSDIAVIYARVSSKEQETGGYSLPAQLDFLKEYAKSKGLEVVKVFTESMTAKEAGRIEFNNMLKFAKKQRYGCHVIVEKNDRLLRNEDDEALIINLTVRQGLIDLHLVKDHLILNRYSTPHEIFMFHMMCGMSSMYPRNLSGEIKKGLDKKADLGDYPAKAPIGYKNVRSSKKRSTIEIDPTNAGYVSKIFELYATGMYSYKTLAERISLDGFYPKNKPCSPKLVEKIIINPFYMGEFEFNGKRYHEANHTPIITKELFYTCKKIRERHDNPRKITHDFLYSGLITCSHCGCQLTAEIKKGKYIYYHCTGNKGGTCKRNKYLKEEYIDEHIRTLLEKIQPSKEDAKAIVEKFKEIVNANFDYDKKSIEEIGKKISLLKNRLNKLYIDRLDGMITDEFYREKKNEFQGELDELELKHDNFLAETDILVDMATQIIELCKNAYNYYLRSDNENKRLLLKILCSNFLYDGSNLVIKLKSTVEPMLLGANFNNGGG

SEQ ID NO: 6430 - protein, 492 aa, Unknown
  Description of Unknown: Integrase B6431 sequence
  cd00338,SM00857,G3DSA:1.10.10.2600,IPR036162,PS51737, G3DSA:3.40.50.1390,IPR006119,IPR038109,PF07508,IPR011109, SSF53041,PTHR30461,PS51736,Coil,PF00239
MAYAIYLRKSRIDEEAGIENTLSKHETMLRDMAARMGIHIDETNIYREIVSGESIDARPQMQRLLKAVEMGLYTGVLCVELERLSRGNGEDQARILRTFQFSGTKILTLNKVYDLSSDDDFDEEFFEFGLFMSRREYKTIKRRLLRGRLQAQRDGYFIGSVPPYGYGKRKDGKGWTLCPDPHESHVVRLIFDRYAQGAKINDILRELQASGVKQRTGNDFTRTRIGEILRNRTYLGELQTKRKIKNRRIIDGEIKETYIRNSGMEYVQGRHEPIVSADTFDQCAARLRTMETRTRYAHTNRNPLASLVVCAQCGKTMQRTNGAQAEYLICKTFGCTTKSTKLDIVERLTVDAIQAELERLTYVWAGYETKANDNTNELQVLEAEIDRRQKMLERACEAYETGIYDRSTYLQRVQKVNAEKAELLARLETLQDSEPEHDMKRIPVLSKALDEYWTLDSENRNRLLKGMAERIEYEKTERGTGLNPRLRVTLRI

SEQ ID NO: 6431 - protein, 492 aa, Unknown
  Description of Unknown: Integrase B6432 sequence
  PTHR30461:SF3,IPR036162,PS51737,IPR011109,PTHR30461, PS00397,PF00239,G3DSA:1.10.10.2600,IPR006119,SSF53041, cd00338,SM00857,IPR025827,IPR038109, PS51736,IPR006118,PF13408,G3DSA:3.40.50.1390,PF07508,Coil
MPKAKDFRTACAYIRVSTDKQEELSPDAQKRLLLEYAKKNDLNIINEHIFTENGISGKKADKRPEFMRMIGMAKSKEHPFDVILVWKFSRFARNQEESIVYKSLLKKANVEVVSVSEPLIDGPFGSLIERIIEWMDEYYSIRLSGEVMRGMTEKALHGGYQSTLPLGYSMDKSTGIPVINNDINIVKLIYSEFENGMTCIEIARKLNSLGYKTQHGNNYEYRTIKYILENPFYVGKVRWNRQHHETHTIKDKSEWITASGKHEAVFSEEYFEHIQELMIKRSRPYKARITGTRHWLSGMVKCSNCGASLGIKRSNGSYTYFNCLNYTKGSCNESHYITLKNLENAVYETFIKSINYGGKLQFALRQRNTDEHPVDTAAIIKEQLKRLEWKESRIKTAYMDGIDTLDEYRENKELLMKERKELEDELNKIPDSSDIDYEAQLKKEMLTVYDIITDKNVDDRKKADALRSIVDKIVYDKAKDEIHIFFYLLDPL

SEQ ID NO: 6432 - protein, 492 aa, Unknown
  Description of Unknown: Integrase B6433 sequence
  PTHR30461:SF3,cd00338,SM00857,G3DSA:1.10.10.2600,IPR036162, PS51737,G3DSA:3.40.50.1390,IPR006119,IPR038109,PF07508, IPR011109,SSF53041,PTHR30461,PS51736,Coil, PF00239
MPKRAVIYARFSCNRQREASIEDQLRVCREWCAREGYEVAAEYCDRAVSGRTDDRPEFQRMIANAGESEIVLVYMMDRFSRGEYDAPIYKRELATHGVKLVSALEQIPDSPEGIIYEKLLEGLAACESRKTAIRTKRGMEGNALKCKTNGVRIFGYRRNGDDEYEVDEAQAAWVREAFALRLERMSMNAIAREFARRGLRTRKGNPCGQAMVQQMLRDRRYTGRYEWGGIVREGGMPQIVDEVTFMEVQGIKCRKQRSSENWGDFALAGAALCAECGRNLQGVSGRGRNNVKYEYYSCPGSCVRNIRREELEGSIASALRGLLGDRGEALQIANMVAERADTAEVRARRRQAEDSLRAAERGLRNILNAIEQGVIAPGVNERIAELEEQQARARYDLEAITDERIDPERFADFLQCGTALDDATLLKAFVWQAVVSEDEILVTLNYDKKGEPARLDIQRVRAKLEWCPVCIDSRTEICAVGTVVLLRIPRAA

SEQ ID NO: 6433 - protein, 492 aa, Unknown
  Description of Unknown: Integrase B6434 sequence
  SM00857,G3DSA:1.10.10.2600,IPR036162,PS51737,G3DSA:3.40.50.1390, IPR006119,IPR038109,PF07508,SSF53041,IPR011109, PS50096,PF00239,PTHR30461,IPR000048,PS51736, Coil,cd00338
MSYLWGLVVAIYLRKSRSDIEDEKKALARGEVYDTLQRHRKELLTFARKNKLKIVDIFEEVVSGDTIEARPEVQSLLENAKNGKYDGVLVVAYDRLGRGDKMDQGLIEKTFKESDTLIITPKTTIDLNDEQGEMQADFEGFLSRMEYRKIKGRLRDGKIRAINEGRNISAAAPIGYYVDNEQKLAIDPKEVHIPRMIFELAIQGFGCVQIANQLYEAGIRHRTGNPIGEQTVRHIIGNPKYIGTQFYSRYSKKPTFAPNSHTPIVSEEVFNEANRMIKIRKPSHNPASFPMRNPLSTILRCSKCDSAMVLRRYIVKGKEYNYYYCRKNYCETVSAGMDEVIDDLVKKLNNTLSNVAVEYEEDENSLLPTLENQLSQAQKKLKTFETKRDNIHDLLEDGTYTKDTFIDRLNKVEMEEQQVLDTIASLNEKIALEREKDSNLNRTLPAISNALEVFEQCDARQKNILLKSFIDKIMYTRTSKKEDFKLDISYHQ

SEQ ID NO: 6434 - protein, 492 aa, Unknown
  Description of Unknown: Integrase B6435 sequence
  PTHR30461:SF3,SM00857,G3DSA:1.10.10.2600,IPR036162,PS51737, G3DSA:3.40.50.1390,IPR006119,IPR038109,PF07508,SSF53041, IPR011109,PTHR30461,PS51736,cd00338,PF00239
MNVAMYLRKSRADENNPLETLERHKEILLSYAKDNNLTVIDIFEEVISGGMLYNRTEMLKLLDAIPSHIYDAVLCIDLDRLGRGSAADSEKIFDVLKENDVKIITLKKIYDLNNEYDEDYSEFEMFMARKELKFITRRMNRGRIKSINDGCFVSGAPFGYRNAVINKKHTLEVYEPEAKYVRMIFDMYVNQSIGITSISRQLANLGVLSKKNTPLHPTTIARMLRNHTYIGKIVWNKSKSVKGKNTQEKTSKDDWLYVPGLHEPIIDEDTFNKAQDIINLKYKPPMRTGTLQNPFAGLLKCANCGRAIVINTSNETVEKYRLCCRTLGCNKASALSIVEDKVFEVLTKEFKDIELSLKNIRQSHNKDKLSCLDTIATLETELKKLDKQQLRLYDLLEQEVYTKELFLERNNAISDRRKKINATIAQEREKFKLVDTSSIEERLPLLRELLTNYNSLSATEKNSILKNFVKKIEYKREKSAPEGDIFLKIYYK

SEQ ID NO: 6435 - protein, 492 aa, Unknown
  Description of Unknown: Integrase B6436 sequence
  PTHR30461:SF3,SM00857,IPR006118,G3DSA:1.10.10.2600,IPR036162, PF13408,IPR025827,G3DSA:3.40.50.1390,IPR006119,IPR038109, PF07508,SSF53041,IPR011109,PF00239, PTHR30461,PS00397,Coil,cd00338
MSQLSTSNAQPLEIGAAYIRVSTDDQTELSPDAQLRMILDAAKADGFVIPKEYIFEEKKGISGRKADNRPEFQRMIAIAKSQKPAPFKRLYLWKFSRFARNQEESTFYKGILRKKCGIEIKSISEPIMEGMFGRLIETIIEWFDEYYSFNLSGEVKRGMTEKALREGYQTAPCLGYKAVGDGKPFLIDEDAYSIVEYIFQAYHSGRDMTGIARSVNTIGYRTQRGNLFDRRAIYRILTNHFYTGEVSWNGITFQGTHETRPAVTSVFDDVQKRITSEYRPKKRREASANAHWLSGMLFCGVCGSSLGFNRSNDQKKRPDFFQCWKYAKGFHPGSCCVSARIAERTVLRSLEKALRNNHLEYEHIPKTENDISEEEIAIKEALERITVKERRIREAYENEIDTLEEYKQNKLRLNAERKELENALDQLRQKAQQTEAAPPDQAEMMAKVSCVYQVLSDPTADNETKGNALRSLCEKIVFDRETRSFTFFYYTS

SEQ ID NO: 6436 - protein, 492 aa, Unknown
  Description of Unknown: Integrase B6437 sequence
  cd00338,SM00857,G3DSA:1.10.10.2600,IPR036162,PS51737, G3DSA:3.40.50.1390,IPR006119,IPR038109,PF07508,IPR011109, SSF53041,PTHR30461,PS51736,Coil,PF00239
MAYAMYLRKSRIDEEAGLENTLSKHETMLRDMAARMGIHIDETNIYREIVSGESIDARPQMQRLLKAVEMGLYTGVLCVELERLSRGNGEDQARILRTFQFSGTKILTLNKVYDLAGDDEFDEEFFEFGLFMSRREYKTIKRRLLRGRLQAQRDGYFIGSVPPYGYSKRKDGKGWTLCPDPHESHIVRLIFDRYAQGAKINDILRELQASGVKQRTGNDFTRTRIGEILRNRTYLGELQTKRKIKNRRIIDGEIKETYIRNSGMEYVQGRHEPIVSADTFDQCAARLRTMETRTRYAHTNRNPLASLIVCTQCGKTMQRTNGAQAEYLICKTFGCTTKSTKLDIVERLTVDAIQAELERLTYVWAGYETKANDNTNELQVLEAEIDKRQKMLERACEAYETGIYDRTTYLQRVQKVNAEKAELLTRLETLQDSEPEHDLKRIPVLSKALDEYWTLDSENRNRLLKGMAERIEYEKTERGTGLNPRLRVTLRI

SEQ ID NO: 6437 - protein, 492 aa, Unknown
  Description of Unknown: Integrase B6438 sequence
  PTHR30461:SF3,SM00857,G3DSA:1.10.10.2600,IPR036162,PS51737, G3DSA:3.40.50.1390,IPR006119,IPR038109,PF07508,SSF53041, IPR011109,PTHR30461,PS51736,cd00338, PF00239
MNVAMYLRKSRADENNPLETLERHKEILLSYAKDNNLTVIDIFEEVISGGMLYNRTEMLKLLDAIPSHIYDAVLCIDLDRLGRGSAADSEKIFDVLKENDVKIITLKKIYDLNNEYDEDYSEFEMFMARKELKFITRRMNRGRIKSINDGCFVSGAPFGYRNAVINKKHTLEVYEPEAKYVRMIFDMYVNQSMGITSISRHLANLGVLSKKNTPLHPTTIARMLRNHTYIGKIVWNKSKSVKGKNTQEKTSKDDWLYVPGLHEPIIDEDTFNKAQDIINLKYKPPMRTGTLQNPFAGLLKCANCGRAIVINTSNETVEKYRLCCRTLGCNKASALSIVEDKVFEVLTKEFKDIELSLKNIRQSHNKDKLSCLDTIATLETELKKLDKQQLRLYDLLEQEVYTKELFIERNNAISDRRKKINATIAQEREKFKLVDTSSIEERLPLLRELLTNYHSLSAAEKNSILKNFVKKIEYKREKSAPEGDIFLKIYYK

SEQ ID NO: 6438 - protein, 492 aa, Unknown
  Description of Unknown: Integrase B6439 sequence
  PTHR30461:SF3,cd00338,SM00857,G3DSA:1.10.10.2600,IPR036162, PS51737,G3DSA:3.40.50.1390,IPR006119,IPR038109,PF07508, IPR011109,SSF53041,PTHR30461,PS51736,Coil, PF00239
MAYAIYLRKSRIDEEAGIENTLSKHETMLRDMAARMGIHIDETNIYREIVSGESIDARPQMQRLLKAVEMGLYTGVLCVELERLSRGNGEDQARILRTFQFSGTKILTLNKVYDLAGDDEFDEEFFEFGLFMSRREYKTIKRRLLRGRLQAQKDGYFIGSVPPYGYGKRKDGKGWTLCPDPSEAQVVRLIFDRYAEGAKINDILRELQASGVKQRTGNDFTRTRIGEILRNRTYLGELQTKRKIKNRRIIDGEIKETYIRNSCMEYVQGRHESIVSADTFDQCAARLRTMETRTRHAHTNRNPLASLVVCSQCGKTMQRTNGAQAEYLICKTFGCTTKSTKLDIVERLTVDAIQAELERMTYVWAGYETKANDNNNELQVLEAEIDKRQKMLERACEAYETGIYDRTTYLQRVQKVNAEKAELLARLETLKDSEPEHDLKRIPVLSKALDEYWTLDSENRNRLLKGMAERIEYEKTERGTGLNPRLRVTLRI

SEQ ID NO: 6439 - protein, 492 aa, Unknown
  Description of Unknown: Integrase B6440 sequence
  PTHR30461:SF3,IPR036162,PS51737,IPR011109,PTHR30461, PS00397,PF00239,G3DSA:1.10.10.2600,IPR006119,SSF53041, SM00857,IPR025827,IPR038109,PS51736,cd03768, IPR006118,PF13408,G3DSA:3.40.50.1390,PF07508,Coil
MAAIDFNNVVDLYIRVSTSEQAEEGYSVAEQEERLRSYCAAYNYTINAVHVDPGFSGASLDRPGIKKVMYDVEHGRCKKVIVWKLDRLSRSQKDTLILLEDVFLANDCNFISLMESFDTSTPFGRCIVGILAAFAQMERENIKIRTMMGRQARIRDGHFHGSRCPLGYKFQYAPDGTLLSNDLVVDPYTSKLVQEVFRLFLSGSSLSSISAHMASTYGCSMYDWSNSTAIRRILSNPIYMGKVRVGNELYPGIHEPLVSETDWYMVAAMLKHNKEQQKRTYAYQISGGAYADNLLTGLLFCGDCGARMYARRVSQNKKKYICHSVAKTSPAMIKSDHCTNRLHPFTVHQLDEMVINEILKLSLDRPGFDMLCDQPDESSKSEDKEIYEERLAEVNRQLDRLVKLYQTGLIDLDNISARLGDLNQEKNFLEGNIATINEITPADLRETAWKSIQSLQSVLDNGDMDEVHRIIHTLTDKVVVLNANVTIYWSFC

SEQ ID NO: 6440 - protein, 491 aa, Unknown
  Description of Unknown: Integrase B6441 sequence
  PTHR30461:SF3,IPR036162,PS51737,IPR011109,PTHR30461, PS00397,PF00239,G3DSA:1.10.10.2600,IPR006119,SSF53041, cd00338,SM00857,IPR025827,IPR038109,PS51736, IPR006118,PF13408,G3DSA:3.40.50.1390,PF07508,Coil
MKQLNFRECALYVRVSTDKQDELSPDAQIRLGTEYAKKNGLHVSKEHTYIEHGISGRKADKRPEFLRMIAAAKSEEHPFDVILVWKFSRFARNQEESIVYKSLLRKKCGVDVVSVSEPIIDGPFGGLIERIIEWMDEYYSVRLSGEVTRGMTEKALRGGYQARPPLGYRIETKKEPPVVVPEEAKIVRSVFDMYVNQHKGFFDIARELNRLGCKTSHGKAFERRSIEYIIQNPTYCGMIRWNRTTNETNVIKPKDEWIITEGNHEAIISKELFEQAQKRFESEYRPRGARPSSTYRHWLSGLMKCPACGRTMTAKHTAGYCYFTCYGYSKGKCLAKQSISSRIIEKSVLQSISEVLADSNLSFRLVKQESKEEINRESLILDQLSRIAGKERRIRDAYRDGIDTLEEYKENKAILVKEQETLEAELEQLRSVSPKEDDPTSAMLARVSSVYEILMSDADDTLKNEMLKTIVEKIVYDKNTDTLKVYYFYNP

SEQ ID NO: 6441 - protein, 491 aa, Unknown
  Description of Unknown: Integrase B6442 sequence
  PTHR30461:SF3,IPR036162,PS51737,IPR011109,PTHR30461, PS00397,PF00239,G3DSA:1.10.10.2600,IPR006119,SSF53041, cd00338,SM00857,IPR025827,IPR038109,PS51736, IPR006118,PF13408,G3DSA:3.40.50.1390,PF07508,Coil
MRFLNVALYVRVSTDIQVDGYSIDEQLERLEKYCDAKDWIIYNKYIDPGFTGSNINRPGLTKLLQDIHKGKIDLVLVYKLDRLSRSQKDTLYLIEEEFLPNNVDFISMTENFDTSTPFGKAMIGILSVFAQLERENIKTRLAMGHVGRAKAGYWRGGSNPPIGYDFINGKLIINEYEALQVRTIYKMFLDGETIHGITRYMSEHFTNRYSNYRTPGQTGVILRNRLYIGKIKYKGVEYDGVHEPIIDIDTFERVQKRYKEISGKWSDHYRSPFKAKHLLTGLLYCGNCGARYFACTQRRKDKTTGKYIKSTESYVYYKCYTRDGNKSMRKGDYCKNPTIRVDKLDKVILDEIKKLKLDPDRLERIINTESKEKVENTELTVLRNKLDNTQSKIDKLMDLYTIGTIPITEIGDRIKPLYEEKEKIELEINTRENELQEPHGLSISETRDILDQFADIDNLDHDLKRELVQSLIKRIEVLPEPDSIKIYWKFV

SEQ ID NO: 6442 - protein, 491 aa, Unknown
  Description of Unknown: Integrase B6443 sequence
  PTHR30461:SF3,cd00338,SM00857,IPR006118,G3DSA:1.10.10.2600, IPR036162,PS51737,G3DSA:3.40.50.1390,IPR006119,IPR038109, PF07508,IPR011109,SSF53041,PTHR30461,PS00397, PS51736,Coil,PF00239
MIKTACAYVRVSTDKQEELSPDSQIREIKEYAARNNMLISKIYVEEHGISGKNASKRPAFQEMIATCKEKSHPYDVVLVWKFSRFARNIDESTYYKSILRKKCNVDVQSVSEPIIEGMYGRLIEMVIEWSDEFYLYNLSGEVHRGMTENALRGGYNSNAPLGYVKKKGCIPEIDPPKADIVKHIFDMYTKDDMAMADIAAKLNALGYRSNRGSKFELKTVAYILDNPFYIGKIRWNYYDRNNHQRKNEDEIIIVDGKHEPIITDEQWGLAQAKRCKARKHGGFGRKRTSVTAGHWLSGMIACSECGSNLGYHRDVHFFNCWKHAKGVCRSTSSITEAKAVQEVLSALQSLAASDFYYIYSEQAGAETDDLEVKRTQSELDSLSVKLKRVKEAYRNGVDTLDEYRENKQLIMARQNELEAKLATLETPIAPKQNRKKVDFGEIIRLIQDESVTTEQKATAIRKIFDHFEWNREKQQFSAFLSDDIMSTQCSS

SEQ ID NO: 6443 - protein, 491 aa, Unknown
  Description of Unknown: Integrase B6444 sequence
  PTHR30461:SF3,cd00338,SM00857,IPR006118,G3DSA:1.10.10.2600, IPR036162,PS51737,G3DSA:3.40.50.1390,IPR006119,IPR038109, PF07508,IPR011109,SSF53041,PTHR30461,PS00397, PS51736,Coil,PF00239
MIKTACAYVRVSTDKQEELSPDSQIREIKEYAARNNMLISKIYVEEHGISGKNASKRPAFQEMIATCKEKSHPYDVVLVWKFSRFARNIDESTYYKSILRKKCNVDVQSVSEPIIEGMYGRLIEMVIEWSDEFYLYNLSGEVHRGMTENALRGGYNSNAPLGYIKKKGCIPEIDPPKADIVKYIYDMYTKDDMAMADIAAKLNALGYRSNRGSKFELKTVAYILDNPFYIGKIRWNYYDRNNHQRKNEDEVIIVDGKHEPIITDEQWGLAQAKRCKARKHGGFGRKRTSVTAGHWLSGMIACSECGSNLGYHRDVHFFNCWKHAKGVCRSTSSITETKAIQEVLSALQSLAASDFYYIYSEQAGTETDDLEVKRTQSELDSLSVKLKRVKEAYRNGVDTLDEYRENKQLIMARQNELEAKLATLETPIAPKQNRKKVDFGEIIRLIQDESVTTEQKATAIRKIFDHFEWNREKQQFSAFLSDDIMSTQCSS

SEQ ID NO: 6444 - protein, 491 aa, Unknown
  Description of Unknown: Integrase B6445 sequence
  cd03768,SM00857,IPR036162,PF13408,PS51737, G3DSA:3.40.50.1390,IPR025827,IPR006119,PF07508,SSF53041, IPR011109,PTHR30461,PS51736,Coil,PF00239
MIAIYTRQSIDKKDSISIETQVEMCQKEIKTQGLEFKIYKDKGFSGKNTDRPAFQNLMADVKQGNIDTIVVYRLDRISRSVLDFANIIDILQKHNVSFISASEKFDTSTPVGKAMLYIVMVFAQLERETIAERVKDNYYQRGETGAWGGGIAPFGYSNTKTTIGGKKVATIQQNDDIELVKQIFYEYANTDKSLGNIASDLTEKLNVMWNNIKLSRMLHSPAYVQADVDIYNYYVAKGCVIESDVSLFNGVNGLNVYGKRDRGANKYNNLKDHHIAVGFHSGVIPSDLWLKCQYKLDKNIQIKNNGKGKHTWLTGLIKCGYCGRAMTVKTYKETKYFNCSGRAIKMCDAEVVTHYVSDIEELVHQKMINYVENFSDCKIKDIENDNRQEINSLKAELVQIEKDIENIVNNLAVANTTLMEYANKKIEELDNKKKQTLDKINKLNVTKDVELKIPNLDGWNSWDIEAKRDVAKTLIDKVYVYKDRIHIKWAY

SEQ ID NO: 6445 - protein, 491 aa, Unknown
  Description of Unknown: Integrase B6446 sequence
  PTHR30461:SF3,SM00857,G3DSA:1.10.10.2600,IPR036162,PF13408, IPR025827,PS51737,G3DSA:3.40.50.1390,IPR006119,IPR038109, PF07508,IPR011109,SSF53041,PTHR30461, Coil,PS51736,cd00338,PF00239
MPEALNAVIYARYSSDRQTEQSIEGQLRECYAFAKANDIAVIDTYIDRAISGKTDNRPAFQKMIEDSAKRQFQAVIVYRLDRFTRNRYDSAIYKARLKKNGVKVLSAMENLNGSPESIIMESLLEGMAEYYSVELSQKITRGMRENALKGKALGGQRVLGYKVNSDCYFEIDETTAPVVVDIFKLYSSGKTVKEICDILNARGVKTARGGAFNKNSLHTILTNKKYIGIYKTKYGEIVGGIPAIIDKELFEMVALRMEQNKKAPARAKAEINYLLSTKLFCGKCRSAMVGESGTSKTGKKYYYYACVKKKREKACDKSNVKKDWIEDLVIQRTVTDILKDDVIEKIADRLVELQKAEAAESGTMLYLQNSLAEIQVSIKNIMTAIEKGIITESTKTRLTELEDEKRNVEIEIAKESIARRIISREQIIYWISSFKDGDITSEKYRQQLIDTFVHAVFVYDDKIVITYNYSGENNTATISDLDLSSPPCELG

SEQ ID NO: 6446 - protein, 491 aa, Unknown
  Description of Unknown: Integrase B6447 sequence
  PTHR30461:SF3,cd00338,SM00857,G3DSA:1.10.10.2600,IPR036162, PF13408,PS51737,G3DSA:3.40.50.1390,IPR025827,IPR006119, IPR038109,PF07508,IPR011109,SSF53041,PTHR30461, PS51736,Coil,PF00239
MDIITRLRAAAYGRYSTELQTENSIAYQLEKIREYCLTNDMDICAVYTDEAMSGTNTERPGFQNLIAAAHRKEFDAVVIYDISRCSRDIGDWFAFRKEMAALGIKVISATQQLGDIVDPNSFLVEFVTAALGQHQVLDARKKSIDGVAVRAKQGVFLGGIPPLGYDVVDQQYVINPREAEAVRRIFSMYADGKSYNYIINQLKDFRGKRGQPLGKNSLNSILKNERYIGVYTWNKRKVKLMRKWAGGALNPDCVRIEGIIPKIIDIKTWERVQKRMCDNKRRASAKAKRTYLLSGLIECAKCGATYVGHTSTNKKGYQSRYYVCGNKYRTHNCDAKNINADELEMFVSQQLKVYLLNTDFSSEAKLIADQINNASPDLSAEKSELAEINNKIKNGVNALLSGMVIPELEEEVNRLRVRKSELEDIIAAHSQKRTTIDPKAIEMLFNDSVHDYSDGNMARVIKAHITKIYANIDGSFTVNIGVHTSGCGGRI

SEQ ID NO: 6447 - protein, 491 aa, Unknown
  Description of Unknown: Integrase B6448 sequence
  PTHR30461:SF3,IPR036162,PS51737,IPR011109,PTHR30461, PS00397,PF00239,G3DSA:1.10.10.2600,IPR006119,SSF53041, cd00338,SM00857,IPR025827,IPR038109,PS51736, IPR006118,PF13408,G3DSA:3.40.50.1390,PF07508,Coil
METKYAFGYVRVSTGKQDELSPDSQAKLLKDYAKSNGYVVSKIFYEVGISGRKADKRPEFQKMISLAKSSDHPADAILVWKYSRFARNQEESIVYKSLLKKKHNVDVISVSEPLVDGPFGSLIERIIEWMDEYYSVRLSGEVTRGMKEKAERGGYQARPPLGYKIVTHKEPPVIVPEEAEIVKLIFEKYANENLGIFEIARLLNMHNFKTSHGKEFERRSIEYILQNPTYCGMIRWNRTINESNEIRPESEWIVTDGEHPAIISKELFDKAQERYKREYRPRGARPVSTYKHWLSGVVKCPACGRTMTANTIRNNTRVYSHFRCYGYTKGKCMANNSISSIKLEPAVLESIKTVLNNGKITYRKIEAKTDDTVDLKTILEDQIKKIDVKLQRIKEAYMNGIDTMEEYKENKQAVQEEKQHLEKQLSEIKEEKNNSKNDDKDMLLRVKNVYDILSSDSVDVMTKNEVLRSVVEKIVYEKDKDLLKVYYYYMP

SEQ ID NO: 6448 - protein, 491 aa, Unknown
  Description of Unknown: Integrase B6449 sequence
  PTHR30461:SF3,SM00857,G3DSA:1.10.10.2600,IPR036162,PF13408, IPR025827,G3DSA:3.40.50.1390,PS51737,IPR006119,IPR038109, PF07508,IPR011109,SSF53041,PTHR30461,Coil, PS51736,cd00338,PF00239
MNKKINAVGYARYSTEFQTDNSIAYQTTAIQEYCEKHDINLLKVYSDEAMTGTNTNRPAFQQMLAAAEQHLFDAVIIYDISRGSRNVVDWFSFRQEMARIDIQVISCNQHLGDILDPNTYLTELITAGIGQHMVLDTRKKSIDGKNERAKKGIFCGGNPPLGYDINDGNYIINPKEAKIVQTIFTMYADGHSYNEILKELDGAVGKAGRPLGKNSLYSILKNERYIGVYTWNKRKIKIMGKWAGGRPNPDIVRIENAIPPIIDETIWRKVEERMKDNSRRATSKSCRHNYLLSGLIQCDKCGATFVGHTSTNQKKISTPYYICGNKYRTHTCCTKNINADRLETFVVMQIKHYLKTADFETLADEICKQVNSAAPDVSAEKKELSEIETKITNGINAILGGVNIPELKDEVDKLRIRKSELEDVITYKEKNKTRTLNRDKLVEMLKESAENIDSTDSNTLIRNFVTKIYAHADGTVTVNLGVHINGCGDWT

SEQ ID NO: 6449 - protein, 491 aa, Unknown
  Description of Unknown: Integrase B6450 sequence
  IPR036162,PS51737,IPR011109,PTHR30461,PS00397, PF00239,G3DSA:1.10.10.2600,IPR006119,SSF53041,cd00338, SM00857,IPR025827,IPR038109,PS51736,IPR006118, PF13408,G3DSA:3.40.50.1390,PF07508,Coil
METKYAFGYVRVSTGKQDELSPDSQAKLLKDYAKSHGYVVSKIFYEVGISGRKADKRPEFQKMIGLAKASDHPADAILVWKYSRFARNQEESIVYKSLLKKKHNVDVISVSEPLVDGPFGSLIERIIEWMDEYYSVRLSGEVTRGMKEKAERGGYQARPPLGYKIVTHKEPPVIVPEEAEIVKLIFEKYANENLGIFEIARLLNMHNFKTSHGKEFERRSIEYILQNPTYCGMIRWNRTINESNEIRPESEWIVTDGEHPAIISKELFDKAQERYKREYRPRGSRPVSTYKHWLSGVVKCPACGRTMTANTIRNNTRVYSHFRCYGYTKGKCMANNSISSIKLEPAVLESIKTVLNNGKITYRKIEAKTDDTVDLKTILEDQIKKIDVKLQRIKEAYMNGIDTMEEYKENKQAVQEEKQHLEKQLSEIKEEKSNSKDDDEDMLLRVKNVYDILSSDSVDATTKNDVLRSVVEKIIYEKDKDLLKVYYYYMP

SEQ ID NO: 6450 - protein, 491 aa, Unknown
  Description of Unknown: Integrase B6451 sequence
  PTHR30461:SF3,IPR036162,PS51737,IPR011109,PTHR30461, PS00397,PF00239,G3DSA:1.10.10.2600,IPR006119,SSF53041, cd00338,SM00857,IPR025827,IPR038109,PS51736, IPR006118,PF13408,G3DSA:3.40.50.1390,PF07508,Coil
MRFLNVALYVRVSTDIQVDGYSIDEQLERLEKYCDAKDWIIYNKYIDPGFTGSNINRPGLTKLLQDIHKGKIDLVLVYKLDRLSRSQKDTLYLIEEEFLPNNVDFISMTENFDTSTPFGRAMIGILSVFAQLERENIKTRLAMGHVGRAKAGYWRGGANPPIGYDFVDGKLVINEYEAYQVRLMYKMYLEGESIYSIFMYIRKHFTNRYSSYRTAKQIGVILKNRIYIGKIKYKGVEYDGIHEPIIDIDTFEKVQKRYKEISSKWSDHYRSPFKGKYLLTGLLFCGNCGARYFASTQRRKDKTTGKYIKSTESYVYYKCYTRDGNKAMRKADYCKNPTIRVDKLDKVILDEIKKLKLNPDRLEQIINSESEKKVEDVELTILKNKLADTQCKIDKLMELYTIGTIPITEIGDRIKPLYEAKEKIELVIDIRKKKLQEPDKLSISETKDILDQFADIDNLNHNLKRELVQSLIKRIEILPEPDSIKIYWKFV

SEQ ID NO: 6451 - protein, 491 aa, Unknown
  Description of Unknown: Integrase B6452 sequence
  PTHR30461:SF3,IPR036162,PS51737,IPR011109,PTHR30461, PS00397,PF00239,G3DSA:1.10.10.2600,IPR006119,SSF53041, SM00857,IPR025827,IPR038109,PS51736,cd03768, IPR006118,PF13408,G3DSA:3.40.50.1390,PF07508,Coil
MRVICYVRVSTREQAEKGYSVGEQQERLRAYCMAKDWIVEDVITDPGFSGAKLERPGIQRVIQLVQEKKCEAVLVWKLDRLSRSQKDTLYLIEDVFLKNGCAFVSMNENFDTSTAFGRAMIGILSVFAQLEREQIRERMAVGRVGRAKAGLFHGGGFAPIGYDYKTIAEGGEGLVVNEYEAMQVREVFSLYLQGWPVNRIRKYMTARYTTKSGDWGNDTTIRDVLKNPLYIGKINWAKKIYDGKHEPIIDEETFNAAAARLASSQWKRDCSDGLERNSPFHSTHLLGGILWCGRCGARYFASGNYSGKGENRKYWPYYVCYSRAKSAKRMIRDPNCKNDRWPVAKLDKIILDQVRQLIFDPEALERAAGGNQEAPPSERRALLNARRAEAKGQIDRLLDLCQMGTLPAAAVADRLKSLQDEVEGIDTALRELAEDDPAERLEAARATLVGAAEILDNGSLDEKRELVHSLIHRIDLDGENIDIHWSFAPES

SEQ ID NO: 6452 - protein, 491 aa, Unknown
  Description of Unknown: Integrase B6453 sequence
  PTHR30461:SF3,cd00338,SM00857,IPR006118,G3DSA:1.10.10.2600, IPR036162,PS51737,G3DSA:3.40.50.1390,IPR006119,IPR038109, PF07508,IPR011109,SSF53041,PTHR30461,PS00397, PS51736,Coil,PF00239
MIKTACAYVRVSTDKQEELSPDSQIREIKEYAARNNMLISKIYVEEHGISGKNASKRPAFQEMIATCKEKSHPYDVVLVWKFSRFARNIDESTYYKSILRKKCNVDVQSVSEPIIEGMYGRLIEMVIEWSDEFYLYNLSGEVHRGMTENALRGGYNSNAPLGYIKKKGCIPEIDPPKADIVKHIFDMYTKNDIAMADIAAKLNALGYRSNRGSKFELKTVAYILDNPFYIGKIRWNYYDRNNHQRKNEDEIIIVDGKHEPIITDEQWGLAQAKRCKARKHGGFGRKRTSVTAGHWLSGMIACSECGSNLGYHRDVHFFNCWKHAKGVCRSTSSITEAKAVQEVLSALQSLAASDFYYIYSEQAGAETDDLEVKRTQSELDSLSVKLKRVKEAYRNGVDTLDEYRENKQLIMARQNELEAKLATLETPIAPKQNRKKVDFGEIIRLIQDESVTTEQKATAIRKIFDHFEWNREKQQFSAFLSDDIMSTQCSS

SEQ ID NO: 6453 - protein, 491 aa, Unknown
  Description of Unknown: Integrase B6454 sequence
  cd03768,SM00857,IPR036162,PF13408,PS51737, G3DSA:3.40.50.1390,IPR025827,IPR006119,PF07508,SSF53041, IPR011109,PTHR30461,PS51736,Coil,PF00239
MIAIYTRQSIDKKDSISIETQVEMCQKEIKTQGLEFKIYKDKGFSGKNTDRPAFQNLMADVKQGNIDTIVVYRLDRISRSVLDFANIIDILQKHNVSFISASEKFDTSTPVGKAMLYIVMVFAQLERETIAERVKDNYYQRGETGAWGGGIAPFGYSNTKTTIGGKKVATIQQNDDIELVKQIFYEYANTDKSLGNIASDLTEKLNVMWNNIKLSRMLHSPAYVQADVDIYNYYVAKGCVIESDVSLFNGVNGLNVYGKRDRGANKYNNLKDHHIAVGFHSGVIPSDLWLKCQYKLDKNIQIKNNGKGKHTWLTGLIKCGYCGRAMTVKTYKETKYFNCSGRAIKMCDAEVVTHYVSDIEELVHQKMINYVENFSDCKIKDIENDNRQEINSLKAELVQIEKDIENIVNNLAVANTTLMEYANKKIEELDNKKKQTLDKINKLNVTKDVELKIPNLDGWDSWDIEAKRDVAKTLIDKVYVYKDRIHIKWAY

SEQ ID NO: 6454 - protein, 491 aa, Unknown
  Description of Unknown: Integrase B6455 sequence
  cd00338,SM00857,IPR006118,G3DSA:1.10.10.2600, IPR036162,PS51737,G3DSA:3.40.50.1390,IPR006119, IPR038109,PF07508,IPR011109,SSF53041, PTHR30461,PS00397,PS51736,Coil,PF00239
MSTTIKTAAAYIRVSTDRQEELSPDAQRRELKNYAKKNGIMITDIFEDTGISGRNAEKRPAFQKMISYAKSKEHPYDYILVWKFSRFARNQEESIVYKSLLQKNGVEVVSITEPLIDGPFASLIERIIEWMDEYYSIRLASDVKRGMEEKALRGGYQAAPPLGYHMEDHIPVIYEPEAVIVREIYRLAAEGKTSTTIARIINDAGYRTRRGKLFEHRGIVYILQNPFYKGYVRWNYRKHSSYHNNADNDIITTKGLHKPLIDENHWTQVQKIVPFVPGHTGQRRRKSDTLFNHYLCGIMRCPACGANLSFHTNKTYTSFVCWKYSKGMHTNTGNIVAWRCEEALVDSLRKTIDSTSADMTFHATLPDAPLASDMLRQYQDSLAKLEQKEQRIKDAYIEGIDTKEEYKENKFRIAEERDHLKKLIKKEERRCTPHTAAINGTTYISMIKNLLDTLEDESVDVVEKHDAVVQIVDHIEYHRDSDTFDIFYSYS

SEQ ID NO: 6455 - protein, 491 aa, Unknown
  Description of Unknown: Integrase B6456 sequence
  PTHR30461:SF3,cd00338,SM00857,IPR006118,G3DSA:1.10.10.2600, IPR036162,PS51737,G3DSA:3.40.50.1390,IPR006119,IPR038109, PF07508,IPR011109,SSF53041,PTHR30461,PS00397, PS51736,Coil,PF00239
MIKTACAYVRVSTDKQEELSPDSQIREIKEYAARNNMLISKIYVEEHGISGKNASKRPAFQEMIATCKEKSHPYDVVLVWKFSRFARNIDESTYYKSILRKKCNVDVQSVSEPIIEGMYGRLIEMVIEWSDEFYLYNLSGEVHRGMTENALRGGYNSNAPLGYIKKKGCIPEIDPPKADIVKHIYDMYTKDDMAMADIATKLNALGYRSNRGSKFELKTVAYILDNPFYIGKIRWNYYDRNNHQRKNEDEIIIVDGKHEPIITDEQWGLAQAKRCKARKHGGFGRKRTSVTAGHWLSGMIACSECGSNLGYHRDVHFFNCWKHAKGVCRSTSSITETKAIQEVLSALQSLAASDFYYIYSEQAGTETDDLEVKRTQSELDSLSVKLKRVKEAYRNGVDTLDEYRENKQLIMARQNELEAKLATLETPIAPKQNRKKVDFGEIIRLIQDESVTTEQKATAIRKIFDHFEWNREKQQFSAFLSDDIMNTQCSS

SEQ ID NO: 6456 - protein, 491 aa, Unknown
  Description of Unknown: Integrase B6457 sequence
  PTHR30461:SF3,SM00857,G3DSA:1.10.10.2600,IPR036162,PF13408, IPR025827,G3DSA:3.40.50.1390,PS51737,IPR006119,IPR038109, PF07508,IPR011109,SSF53041,PTHR30461,PS51736, cd00338,PF00239
MENTRKCKRAVAYVRVSSGSDAQIHSFEFQSAYWHQELDGNPDVEMVGIYADKGISGRSMYKRPQFLTMMQDARDGKFDVIYTKSISRFGRNTVHLLEAVRELRDLGIAVIFQNENINTLSSTSEVFMTIAAALAEGELEEDSKRQRWSYQDRFQNGWISIGTGMYGYRMVKDNQLEIVEDEAAVVREIYAMYLSGMGTIAISNVLNDRGLKTSRGNPWGTNSILEIISNEKYTGDSLMGKHVRVNGVHMDNTGGRYSKQYMVENTHEAIVSHETFDKAQAERARRKNPKMVGVQHDPHDFTGLIECGVCGMRFNHKVNSSGLKWQNPIWACHNQLKHTKKACDNTRIKEDVLCDKFVEAYNRFVIERPCGHSVRAMEIRVKTLQDEERDLAGLALKHLIPDAAFRAEQKKLKAEIAALTERICEQTSKEVTEADYTVISEYDPEKVKKFVTKVIVLKGTVTFVFYNGVEITLEYSNGAPGNKPGWNVKEA

SEQ ID NO: 6457 - protein, 491 aa, Unknown
  Description of Unknown: Integrase B6458 sequence
  PTHR30461:SF3,IPR036162,PS51737,IPR011109,PTHR30461, PS00397,PF00239,G3DSA:1.10.10.2600,IPR006119,SSF53041, cd00338,SM00857,IPR025827,IPR038109,PS51736, IPR006118,PF13408,G3DSA:3.40.50.1390,PF07508,Coil
METKYAFGYVRVSTGKQDELSPDSQAKLLKDYAKSHGYVVSKIFFELGISGRKADKRPEFQKMIGLAKSSDHPADAILVWKFSRFARNQEESIVYKSLLKKKHNVDVISISEPLVDGPFGSLIERIIEWMDEYYSVRLSGEVTRGMREKAERGGYQARPPLGYKIVSHKEPPVIVPEEAEIVKLIFEKYVHDGMGLFEIARLLNSHNFKTSHGKEFERRSIEYILQNPTYCGMVRWNRTINESKEIRPESEWIIAEGEQPAIISKELFDKAQERYKREYRPRGARPASTYKHWLSGIVKCPACGRTMTACKIENNKQTYCYFRCYGYSKGKCAAKNSISSLKLEPAVLESIKSVLDTGKITYRKIEVKTEDTADLKTILEDQIKKIDVKLQRIKEAYMNGIDTMEEYKENKRIVQGEKDSLEKQLSELKEEKISTKNEDNDMLMRVKNVYDILSSDSVDATTKNEVLRSVVEKIVYDREEDELKVYYYHMP

SEQ ID NO: 6458 - protein, 491 aa, Unknown
  Description of Unknown: Integrase B6459 sequence
  cd03768,SM00857,IPR036162,PF13408,PS51737, G3DSA:3.40.50.1390,IPR025827,IPR006119,PF07508,SSF53041, IPR011109,PTHR30461,PS51736,Coil,PF00239
MIAIYTRQSIDKKDSISIETQVEMCQKEIKTQGLEFKIYKDKGFSGKNTDRPAFQNLMADVKQGNIDTIVVYRLDRISRSVLDFANIIDILQKHNVSFISASEKFDTSTPVGKAMLYIVMVFAQLERETIAERVKDNYYQRGETGAWGGGIAPFGYSNTKTTIGGKKVATIQQNDDIELVKQIFYEYANTDKSLGNIASDLTEKLNVMWNNIKLSRMLHSPAYVQADVDIYNYYVAKGCVIESDVSLFNGVNGLNVYGKRDRGANKYNNLKDHHIAVGFHSGVIPSDLWLKCQYKLDKNVQIKNNGKGKHTWLTGLIKCGYCGRAMTVKTYKETKYFNCSGRAIKMCDTEVVTHYVSDIEELVHQKMINYVENFSDCKIKDIENDNRQEINSLKAELVQIEKDIENIVNNLAVANTTLMEYANKKIEELDNKKKQTLDKINKLNVTKDVELKIPNLDGWDSWDIEAKRDVAKTLIDKVYVYKDRIHIKWAY

SEQ ID NO: 6459 - protein, 491 aa, Unknown
  Description of Unknown: Integrase B6460 sequence
  cd00338,SM00857,IPR006118,G3DSA:1.10.10.2600, IPR036162,PS51737,G3DSA:3.40.50.1390,IPR006119, IPR038109,PF07508,IPR011109,SSF53041, PTHR30461,PS00397,PS51736,Coil,PF00239
MSTTIKTAAAYIRVSTDRQEELSPDAQRRELKNYAKKNGIMITDIFEDTGISGRNAEKRPAFQKMISYAKSKEHPYDYILVWKFSRFARNQEESIVYKSLLQKNGVEVVSITEPLIDGPFASLIERIIEWMDEYYSIRLASDVKRGMEEKALRGGYQAAPPLGYHMEDHVPVIYEPEAVIVREIYRLAAEGKTSTTIARIINDAGYRTRRGKLFEHRGIVYILQNPFYKGYVRWNYRKHSSYHNNADNDIITTKGLHKPLINENHWTQVQKIVPFVPGHTGQRRRKSDTLFNHYLCGIMRCPACGANLSFHTNKTYTSFVCWKYSKGMHTNTGNIVAWRCEEALVDSLRKTIDSTSADMTFHATLPDTPLASDMLRQYQDSLAKLEQKEQRIKDAYIEGIDTKEEYKENKFRIAEERDHLKKLIKKEERRCTPHTAAINGTTYISMIKNLLDTLEDESVDVVEKHDAVVQIVDHIEYHRDSDTFDIFYSYS

SEQ ID NO: 6460 - protein, 491 aa, Unknown
  Description of Unknown: Integrase B6461 sequence
  PTHR30461:SF3,cd00338,SM00857,IPR006118,G3DSA:1.10.10.2600, IPR036162,PS51737,G3DSA:3.40.50.1390,IPR006119,IPR038109, PF07508,IPR011109,SSF53041,PTHR30461,PS00397, PS51736,Coil,PF00239
MIKTACAYVRVSTDKQEELSPDSQIREIKEYAARNNMLISKIYVEEHGISGKNASKRPAFQEMIATCKEKSHPYDVVLVWKFSRFARNIDESTYYKSILRKKCNVDVQSVSEPIIEGMYGRLIEMVIEWSDEFYLYNLSGEVHRGMTENALRGGYNSNAPLGYIKKKGCIPEIDPPKADIVKYIYDMYTKDDMAMADIAAKLNALGYRSNRGSKFELKTVAYILDNPFYIGKIRWNYYDRNNHQRKNEDEIIIVDGKHEPIITDEQWGLAQAKRCKARKHGGFGRKRTSVTAGHWLSGMIACSECGSNLGYHRDVHFFNCWKHAKGVCRSTSSITEAKAVQEVLSALQSLAASDFYYIYSEQAGTETDDLEVKRTQSELDSLSVKLKRVKEAYRNGVDTLDEYRENKQLIMARQNELEAKLATLETPIAPKQNRKKVDFGEIIRLIQDESVTTEQKATAIRKIFDHFEWNREKQQFSAFLSDDIMSTQCSS

SEQ ID NO: 6461 - protein, 491 aa, Unknown
  Description of Unknown: Integrase B6462 sequence
  PTHR30461:SF3,SM00857,G3DSA:1.10.10.2600,IPR036162,PS51737, G3DSA:3.40.50.1390,IPR006119,IPR038109,PF07508,IPR011109, SSF53041,PF00239,PTHR30461,PS51736,Coil, cd00338
MYLRKSRQDNPEETVEEVLFRHEIQLQEYAMKNFHYRIAEEDIYREVVSGETIEDRPEMKKVLKLIESSTVKGVLVIEPQRLSRGDMLDCGTIVHVFRYTNTLVVTPPKTYDLTEKYDRKFFEMELSRGSDYLEYTKEILNRGRVLSRKQGNYIGSVAPYGYTKIKNGKEHSLVINEEEAQYVRMAYDLFINGHGSHYIAEQLEAMGAKPRKAKHFTPANIRKMLRNPVYIGQIVLNRSQSVKVYEDGCLKTKRVYNPDYETVPGKHEPIISEEIFELANSEACRKARVPSSKEIRFIFAGLAKCSVCGGSLGLKIHTGREHPYRVGCLKKKYCTNTSILYEDFIDLVVNALKAQIQDFEVQIETNVYKEAFETQSLLESLTKRLEKTDEKMGQLCQYLEEGMYTPDMFVKRRDTLIQEKDELQKAVKEARKKMSGMKDIKEKTSSLHEALNLLRDDSISPRLKNTFLKKIIKAIYFSRLNDKIVLKVVLR

SEQ ID NO: 6462 - protein, 491 aa, Unknown
  Description of Unknown: Integrase B6463 sequence
  PTHR30461:SF3,SM00857,G3DSA:1.10.10.2600,IPR036162,PF13408, PS51737,G3DSA:3.40.50.1390,IPR025827,IPR006119,IPR038109, PF07508,SSF53041,IPR011109,PTHR30461,Coil, PS51736,cd00338,PF00239
MTIIGEYCDRAISGKTDNRPNFQRLIKDSEKGQFEAVIMYTLDRFARNRYDSAIYKAKLKKNGVRVYYAKQPMPDTPEGIILESVLEGYAEYYSENLSRNIKRGMKENALQCLANGGAGMPLGYIVGEDRKYKVDPVGAKIVQEIFQMYADGMSATQIINECNKRGYKTSRGNAFNKNSLRTMLKNDRYIGIYRFADVIVEDGIPPIISRELFNKVQAMLKHNYSARARKKAKDDYLLTTKLFCGHCGSAMVGESGTSKSGKLHHYYKCIDRKRNRKCKKAVEKKDWIEELVVRFTVQKVLTDENIERIAEKAMEIIEKESADTTYIDGLQSKLKDIKKKIKNLMNAIEQGIITSTTKERMNELELEKNEVEGKIAREEMKKPLLTKERIMYWLYSFKSGDIDDIEYRRRVIDTLVNSVYVYDDGEKGRRIVFTFNISGQNTATLSCSDIACAAPPVESLDAQVAFGAFLFIWLGVRVYSGHLFCRCFPSG

SEQ ID NO: 6463 - protein, 491 aa, Unknown
  Description of Unknown: Integrase B6464 sequence
  PTHR30461:SF3,IPR036162,PS51737,IPR011109,PTHR30461, PS00397,PF00239,G3DSA:1.10.10.2600,IPR006119,SSF53041, cd00338,SM00857,IPR025827,IPR038109,PS51736, IPR006118,PF13408,G3DSA:3.40.50.1390,PF07508,Coil
MRFLNVALYVRVSTDIQVDGYSIDEQLERLEKYCDAKDWIIYNKYIDPGFTGSNINRPGLTKLLQDIHKGKIDLVLVYKLDRLSRSQKDTLYLIEEEFLPNNVDFISMTENFDTSTPFGKAMIGILSVFAQLERENIKTRLAMGHIGRAKAGYWRGGSNPPIGYDFINGKLIINEYEALQVRTIYKMFLDGETIHGITRYMSEHFTNRYSNYRTPGQTGVILRNRLYIGKIKYKGVEYDGVHDPIIDIDTFERVQKRYKEISGKWSDHYRSPFKAKHLLTGLLYCGNCGARYFACTQRRKDKTTGKYIKSTESYVYYKCYTRDGNKSMRKGDYCKNPTIRVDKLDKVILDEIKKLKLDPDRLERIINIESKEKVENTELTVLRNKLDNTQSKIDKLMDLYTIGTIPITEIGDRIKPLYEEKEKIELEINTRENELQEPHGLSISETRDILNQFADIDNLDHDLKRELVQSLIERIEVLPEPDSIKIYWKFV

SEQ ID NO: 6464 - protein, 491 aa, Unknown
  Description of Unknown: Integrase B6465 sequence
  IPR036162,PS51737,IPR011109,PTHR30461,PS00397, PF00239,G3DSA:1.10.10.2600,IPR006119,SSF53041,cd00338, SM00857,IPR025827,IPR038109,PS51736,IPR006118, PF13408,G3DSA:3.40.50.1390,PF07508,Coil
METKYAFGYVRVSTGKQDELSPDSQAKLLKDYAKSHGYVVSKIFFELGISGRKADKRPEFQKMIGLAKSSDHPADAILVWKFSRFARNQEESIVYKSLLKKKHNVDVISISEPLVDGPFGSLIERIIEWMDEYYSVRLSGEVTRGMREKAERGGYQARPPLGYKIVSHKEPPVIVPEEAEVVKLIFEKYVHDGMGLFEIARLLNSRNFKTSHGKEFERRSIEYILQNPTYCGMVRWNRTINESKEIRPESEWIIAEGEQPAIISKELFDKAQERYKREYRPRGARPVSTYKHWLSGIVKCPACGRTMTACKIENNKQTYCYFRCYGYSKGKCAAKNSISSLKLEPAVLESIKSVLDTGKITYRKIEVKTEDTADLKTILEDQIKKIDVKLQRIKEAYMNGIDTMEEYKENKRIVQGEKDSLEKQLSELEEEKISTKNEDNDMLMRVKNVYDILSSDSVDATTKNEVLRSVVEKIVYDREEDELKVYYYHMP

SEQ ID NO: 6465 - protein, 491 aa, Unknown
  Description of Unknown: Integrase B6466 sequence
  IPR036162,PS51737,IPR011109,PTHR30461,PS00397, PF00239,G3DSA:1.10.10.2600,IPR006119,SSF53041,cd00338, SM00857,IPR025827,IPR038109,PS51736,IPR006118, PF13408,G3DSA:3.40.50.1390,PF07508,Coil
MEAKYAFGYVRVSTGKQDELSPDSQAKLLKDYAKSHGYVVSKIFYEVGISGRKADKRPEFQKMIGLAKASDHPADAILVWKYSRFARNQEESIVYKSLLKKKHNVDVISVSEPLVDGPFGSLIERIIEWMDEYYSVRLSGEVTRGMKEKAERGGYQARPPLGYKIVTHKEPPVIVPEEAEIVKLIFEKYANENLGIFEIARLLNMHNFKTSHGKEFERRSIEYILQNPTYCGMIRWNRTINESNEIRPESEWIVTDGEHPAIISKELFDKAQERYKREYRPRGARPVSTYKHWLSGVVKCPTCGRTMTANTIRNNTRVYSHFRCYGYTKGKCMANNSISSIKLEPAVLESIKTVLDNGKITYRKIEAKTDDTVDLKTILEDQIKKIDVKLQRIKEAYMNGIDTIEEYKENKQAVQEEKQHLEKQLSEIKEEKSNSKDDDEDMLLRVKNVYDILSSDSVDATTKNDVLRSVVEKIIYEKDKDLLKVYYYYMP

SEQ ID NO: 6466 - protein, 491 aa, Unknown
  Description of Unknown: Integrase B6467 sequence
  PTHR30461:SF3,IPR036162,PS51737,IPR011109,PTHR30461, PS00397,PF00239,G3DSA:1.10.10.2600,IPR006119,SSF53041, SM00857,IPR025827,IPR038109,PS51736,cd03768, IPR006118,PF13408,G3DSA:3.40.50.1390,PF07508,Coil
MRVICYVRVSTREQAEKGYSVGEQQERLRAYCMAKDWIVEDVITDPGFSGAKLERPGIQRVIQLVQEKKCEAVLVWKLDRLSRSQKDTLYLIEDVFLKNGCAFVSMNENFDTSTAFGRAMIGILSVFAQLEREQIRERMAVGRVGRAKAGLFHGGGFAPIGYDYKTIAEGGEGLVVNEYEAMQVREVFSLYLQGWPVNRIRKYMTARYTTKSGDWGNDTTIRDVLKNPLYIGKINWAKKIYDGKHEPIIDEETFNAAAARLASSQWKRDCSDGLERNSPFHSTHLLGGILWCGRCGARYFASGNYSGKGENRKYWPYYVCYSRAKSAKRMIRDPNCKNDRWPVAKLDKIILDQVRQLIFDPEALERAAGGNQEAPPSERRGLLNARRAEAKGQIDRLLDLCQMGTLPAAAVADRLKSLQDEVEGIDTALRELAEDDPAERLEAARGTLVGAAEILDNGSLDEKRELVHSLIHRIDLDGENIDIHWSFAPES

SEQ ID NO: 6467 - protein, 491 aa, Unknown
  Description of Unknown: Integrase B6468 sequence
  PTHR30461:SF3,IPR036162,PS51737,IPR011109,PTHR30461, PS00397,PF00239,G3DSA:1.10.10.2600,IPR006119,SSF53041, cd00338,SM00857,IPR025827,IPR038109,PS51736, IPR006118,PF13408,G3DSA:3.40.50.1390,PF07508,Coil
METQYAFGYVRVSTGKQDELSPDSQAKLLKDYAKSHGYVVSKIFYEVGISGRKADKRPEFQKMIGLAKASDHPADAILVWKYSRFARNQEESIVYKSLLKKKHNVDVISVSEPLVDGPFGSLIERIIEWMDEYYSVRLSGEVTRGMKEKAERGGYQARPPLGYKIVTHKEPPVIVPEEAEIVKLIFEKYANENLGIFEIARLLNMHNFKTSHGKEFERRSIEYILQNPTYCGMIRWNRTINESNEIRPESEWIVTDGEHPAIISKELFDKAQERYKREYRPRGSRPVSTYKHWLSGVVKCPACGRTMTANTIRNNTRVYSHFRCYGYTKGKCMANNSISSIKLEPAVLESIKTVLDSGKITYRKIEAKTDDTVDLKTILEDQIKKIDVKLQRIKEAYMNGIDTMEEYKENKQAVQEEKQHLEKQLSEIKEEKSNSKDDDEDMLLRVKNVYDILSSDSVDATTKNDVLRSVVEKIIYEKDKDLLKVYYYYMP

SEQ ID NO: 6468 - protein, 491 aa, Unknown
  Description of Unknown: Integrase B6469 sequence
  PTHR30461:SF3,cd00338,SM00857,IPR006118,G3DSA:1.10.10.2600, IPR036162,PS51737,G3DSA:3.40.50.1390,IPR006119,IPR038109, PF07508,IPR011109,SSF53041,PTHR30461,PS00397, PS51736,Coil,PF00239
MIKTACAYVRVSTDKQEELSPDSQIREIKEYAARNNMLISKIYVEEHGISGKNASKRPAFQEMIATCKEKSHPYDVVLVWKFSRFARNIDESTYYKSILRKKCNVDVQSVSEPIIEGMYGRLIEMVIEWSDEFYLYNLSGEVHRGMTENALRGGYNSNAPLGYIKKKGCIPEIDPPKADIVKHIFDMYTKNDMAMADIAAKLNALGYRSNRGSKFELKTVAYILDNPFYIGKIRWNYYDRNNHQRKNENEIIIVDGKHEPIITDEQWGLAQAKRCKARKHGGFGRKRTSVTAGHWLSGMIACSECGSNLGYHRDVHFFNCWKHAKGVCRSTSSITEAKAIQEVLSALQSLAASDFYYIYSEQAGAETDDLEVKRTQSELDSLSVKLKRVKEAYRNGVDTLDEYRENKQLIMARQNELEAKLATLETPIAPKQNRKKVDFGEIIRLIQDESVTTEQKATAIRKIFDHFEWNREKQQFSAFLSDDIMSTQCSS

SEQ ID NO: 6469 - protein, 491 aa, Unknown
  Description of Unknown: Integrase B6470 sequence
  cd03768,SM00857,IPR036162,PF13408,PS51737, G3DSA:3.40.50.1390,IPR025827,IPR006119,PF07508,SSF53041, IPR011109,PTHR30461,PS51736,Coil,PF00239
MIAIYTRQSIDKKDSISIETQVEMCQKEIKTQGLEFKIYKDKGFSGKNTDRPAFQNLMADVKQGNIDTIVVYRLDRISRSVLDFANIIDVLQKHNVSFISASEKFDTSTPVGKAMLYIVMVFAQLERETIAERVKDNYYQRGETGAWGGGIAPFGYSNTKITIGGKKVATIQQNDDIELVKQIFYEYANTDKSLGNIASDLTEKLNVMWNNIKLSRMLHSPAYVQADVDIYNYYIAKGCVVESDISLFNGVNGLNVYGKRDRGANKYNNLKDHHIAVGFHEGVISSDLWLKCQYKLDKNVQIKNNGKGKHTWLTGLIKCGYCGRAMTVKTYKETKYFNCSGRAIKMCDAEVVTHYVSDIEELVHQKMINYVENFSDCKIKDIENDNRQEINSLKAELVQIEKDIENIVNNLTVANTTLMEYANKKIEELDNKKKQTLDKINKLNVTKDVELKIPNLDGWNNWDIEAKRDVAKTLIEKVYVYKDRIHIKWAY

SEQ ID NO: 6470 - protein, 491 aa, Unknown
  Description of Unknown: Integrase B6471 sequence
  PTHR30461:SF3,IPR036162,PS51737,IPR011109,PTHR30461, PS00397,PF00239,G3DSA:1.10.10.2600,IPR006119,SSF53041, SM00857,IPR025827,IPR038109,PS51736, cd03768,IPR006118,PF13408,G3DSA:3.40.50.1390,PF07508,Coil
MRVICYVRVSTREQAEKGYSVGEQQERLRAYCIAKDWIVEDVITDPGFSGAKLERPGIQRVIQLVQEKKCEAVLVWKLDRLSRSQKDTLYLIEDVFLKNGCAFVSMNENFDTSTAFGRAMIGILSVFAQLEREQIRERMAVGRVGRAKAGLFHGGGYAPIGYDYKTIAEGGEGLVVNEYEAMQVRKVFSLYLQGWPVNRIRKYMTARYTTKSGDWGNDTTIRDVLKNPLYIGKINWAKKIYDGKHEPIIDEETFNAAAARLASSQWKRDCSDGLERNSPFHSTHLLGGILWCGRCGARYFASGNYSGKGENRKYWPYYVCYSRAKSAKRMIRDPNCKNDRWPVAKLDKIILDQVRQLIFDPEALERAAGGNQETPPSERRALLNARRAETKGQIDRLLDLCQMGTLPAAAVADRLKSLQDEVEGIDTALRELAEDDPAERLEAARATLVGAAEILDNGSLDEKRELVHSLIHRIDLEGENIDIHWSFAPES

SEQ ID NO: 6471 - protein, 491 aa, Unknown
  Description of Unknown: Integrase B6472 sequence
  PTHR30461:SF3,cd00338,SM00857,IPR006118,G3DSA:1.10.10.2600, IPR036162,PS51737,G3DSA:3.40.50.1390,IPR006119,IPR038109, PF07508,IPR011109,SSF53041,PTHR30461,PS00397, PS51736,Coil,PF00239
MIKTACAYVRVSTDKQEELSPDSQIREIKEYAARNNMLISKIYVEEHGISGKNASKRPAFQEMIATCKEKSHPYDVVLVWKFSRFARNIDESTYYKSILRKKCNVDVQSVSEPIIEGMYGRLIEMVIEWSDEFYLYNLSGEVHRGMTENALRGGYNSNAPLGYVKKKGCIPEIDPPKADIVKHIFDMYTKDDMAMADIAAKLNALGYRSNRGSKFELKTVAYILDNPFYIGKIRWNYYDRNNHQRKNEDEIIIVDGKHEPIITDEQWGLAQAKRCKARKHGGFGRKRTSVTAGHWLSGMIACSECGSNLGYHRDVHFFNCWKHAKGVCRSTSSITEAKAVQEVLSALQSLAASDFYYIYSEQAGAETDDLEVKRTQSELDSLSVKLKRVKEAYRNGVDTLDEYRENKQLIMARQNELEAKLATLETPIAPKQNRKKVDFGEIIRLIQDESVTTEQKATAIRKIFDHFEWNREKQQFTAFLSDDIMSTQCSS

SEQ ID NO: 6472 - protein, 491 aa, Unknown
  Description of Unknown: Integrase B6473 sequence
  PTHR30461:SF3,cd00338,SM00857,IPR006118,G3DSA:1.10.10.2600, IPR036162,PS51737,G3DSA:3.40.50.1390,IPR006119,IPR038109, PF07508,IPR011109,SSF53041,PTHR30461,PS00397, PS51736,Coil,PF00239
MIKTACAYVRVSTDKQEELSPDSQIREIKEYAARNNMLISKIYVEEHGISGKNASKRPAFQEMIATCKEKSHPYDVVLVWKFSRFARNIDESTYYKSILRKKCNVDVQSVSEPIIEGMYGRLIEMVIEWSDEFYLYNLSGEVHRGMTENALRGGYNSNAPLGYIKKKGCIPEIDPPKADIVKHIYDMYTKDDMAMADIAAKLNALGYRSNRGSKFELKTVAYILDNPFYIGKIRWNYYDRNNHQRKNEDEIIIVDGKHEPIITDEQWGLAQAKRCKARKHGGFGRKRTSVTAGHWLSGMIACSECGSNLGYHRDVHFFNCWKHAKGVCRSTSSITETKAIQEVLSALQSLAASDFYYIYSEQAGTETDDLEMKRTQSELDNLSVKLKRVKEAYRNGVDTLDEYRENKQLIMARQNELEAKLATLETPIAPKQNRKKVDFGEIIRLIQDESVTTEQKATAIRKIFDHFEWNREKQQFTAFLSDDIMSTQCSS

SEQ ID NO: 6473 - protein, 491 aa, Unknown
  Description of Unknown: Integrase B6474 sequence
  SM00857,G3DSA:1.10.10.2600,IPR036162,PS51737,G3DSA:3.40.50.1390, IPR006119,IPR038109,PF07508,IPR011109,SSF53041, PF00239,PTHR30461,PS51736,Coil,cd00338
MASRRGSRKAPEKDHKRCVIYARYSSARQREESIEDQVRVCTMFAKSNGMEVERVYADKALSGKSDDRPQFQRMVADSRDAGWGVVVVYRLDRFARDRFDSASYRMRLRDNGVSLLSAMERIPDAPEGSILESVLEGVNEWYSRELSQNVRRGMAGNARKCKANGVRVFGYRVGDDGRYAVDEDEAACVRRAFAMAANGSTKTEVRDWLNTACRNVRGGAWTVNSVTTLLGNRKYLGIYKFGDVVVEGGMPALVTQERFDAANGKRKHGRVGAFPLTGKLFDAESGHAYRGDGGTGCTGKRYFYYSCPLDGGGMIRYRQEAVEDAVTDVVSSVMARPGQAEALADAVLAAIERRDEAKRLERAREELREVQRGRERLVDAIIGGVDPELVQERLEGMGDEARRLECEIANLERATTPDRDWAIRWLRAKFPKKITKQVLRRTIGRVEISGDGTVTVEVPWAVTGSMGKEKPSELPGSWQFGGITFGGRYKI

SEQ ID NO: 6474 - protein, 491 aa, Unknown
  Description of Unknown: Integrase B6475 sequence
  cd00338,SM00857,IPR006118,G3DSA:1.10.10.2600, IPR036162,PS51737,G3DSA:3.40.50.1390,IPR006119, IPR038109,PF07508,IPR011109,SSF53041, PTHR30461,PS00397,PS51736,Coil,PF00239
MSTTIKTAAAYIRVSTDRQEELSPDAQRRELKNYAKKNGIMITDIFEDTGISGRNAEKRPAFQKMISYAKSKEHPYDYILVWKFSRFARNQEESIVYKSLLQKNGVEVVSITEPLIDGPFASLIERIIEWMDEYYSIRLASDVKRGMEEKALRGGYQAAPPLGYHMEDHIPVIYEPEAVIVREIYRLAAEGKTSTTIARIINDAGYRTRRGKLFEHRGIVYILQNPFYKGYVRWNYRKHSSYHNNADNDIITTKGLHKPLIDENHWTQVQKIVPFVPGHTGQRRRKSDTLFNHYLCGIMRCPACGANLSFHTNKTYTSFVCWKYSKGMHANTGNIVAWRCEEALVDSLRKTIDNTSADMTFHATLPDTPLASDMLRQYQDSLAKLEQKEQRIKDAYIEGIDTKEEYKENKFRIAEERDHLKKLIKKEERRCTPHTAAINGTTYISMIKNLLDTLEDESGDVVEKHDAVVQIVDHMEYHRDSDTFDIFYSYS

SEQ ID NO: 6475 - protein, 491 aa, Unknown
  Description of Unknown: Integrase B6476 sequence
  PTHR30461:SF3,IPR036162,PS51737,IPR011109,PTHR30461, PS00397,PF00239,G3DSA:1.10.10.2600,IPR006119,SSF53041, SM00857,IPR025827,IPR038109,PS51736,cd03768, IPR006118,PF13408,G3DSA:3.40.50.1390,PF07508,Coil
MRVICYVRVSTREQAEKGYSVGEQQERLRAYCMAKDWIVEDVITDPGFSGAKLERPGIQRVIQLVQEKKCEAVLVWKLDRLSRSQKDTLYLIEDVFLKNGCAFVSMNENFDTSTAFGRAMIGILSVFAQLEREQIRERMAVGRVGRAKAGLFHGGGFAPIGYDYKTIAEGGEGLVVNEYEAMQVREVFSLYLQGWPVNRIRKYMTARYTTKSGDWGNDTTIRDVLKNPLYIGKINWAKKIYDGKHEPIIDEETFNAAAARLASSQWKRDCSDGLERNSPFHSTHLLGGILWCGRCGARYFASGNYSGKGENRKYWPYYVCYSRAKSAKRMIRDPNCKNDRWPVAKLDKIILDQVRQLIFDPEALERAAGGNQEAPPSERRALLNARRAEAKGQIDRLLDLCQMGTLPAAAVADRLKSLQDEVEGIDTALRELAEDDPAERLGAARATLVGAAEILDNGSLDEKRELVHSLIRRIDLDGENIDIHWSFAPES

SEQ ID NO: 6476 - protein, 491 aa, Unknown
  Description of Unknown: Integrase B6477 sequence
  PTHR30461:SF3,cd00338,SM00857,IPR006118,G3DSA:1.10.10.2600, IPR036162,PS51737,G3DSA:3.40.50.1390,IPR006119,IPR038109, PF07508,IPR011109,SSF53041,PTHR30461,PS00397, PS51736,Coil,PF00239
MIKTACAYVRVSTDKQEELSPDSQIREIKEYAARNNMLISKIYVEEHGISGKNASKRPAFQEMIATCKEKSHPYDVVLVWKFSRFARNIDESTYYKSILRKKCNVDVQSVSEPIIEGMYGRLIEMVIEWSDEFYLYNLSGEVHRGMTENALRGGYNSNAPLGYIKKKGCIPEIDPPKADIVKYIYDMYTKDDMAMADIAAKLNALGYRSNRGSKFELKTVAYILDNPFYIGKIRWNYYDRNNHQRKNADEIIIVDGKHEPIITDEQWGLAQAKRCKARKHGGFGRKRTSVTAGHWLSGMIACSECGSNLGYHRDVHFFNCWKHAKGVCRSTSSITEAKAIQEVLSALQSLAASDFYYIYSEQAGAETDDLEVKRTQSELDSLSVKLKRVKEAYRNGVDTLDEYRENKQLIIARQNELEAKLATLETPIAPKQNRKKVDFGEIIRLIQDESVTTEQKATAIRKIFDHFEWNREKQQFTAFLSDDIISTQCSS

SEQ ID NO: 6477 - protein, 491 aa, Unknown
  Description of Unknown: Integrase B6478 sequence
  PTHR30461:SF3,SM00857,G3DSA:1.10.10.2600,IPR036162,PF13408, IPR025827,G3DSA:3.40.50.1390,PS51737,IPR006119,IPR038109, PF07508,SSF53041,IPR011109,PF00239,PTHR30461, PS51736,Coil,cd00338
MYLRKSRAEEGQSTEEVLAKHRAALEELADRLGLPVDGVYEEVASGEKLYARPEMLKLLERIRAGEVEAVLCMDIDRLGRGGMADQGTILDAFRESGTLIITPEKTYDLTNDVDIEMTEFKAFFARAEWRAIRKRMRRGLMQTIEAGGYTANAPYGYRRCRIGKLPSLEVIPEEARFVRYIYERYLAGIGAQTIAQELNAMGSTPRRGAEWNRNTVRHVLRNPTFAGKVAWNRVKHYRPGAHGKDKHHVVYTPEGEWLMVDGVHEAIIPWDTWLEAQERRKQRYIPPSNTGQRANPFAGIIRCSKCGNNMQRMGTNKGEPYLLCTTKGCAAGAKFEYVEERMVELLYDELARLRLLIDSGAAPNIDALEAALAAAQREQERVQARIPRLYEFLEDGTYDRSTFRSRLDAAEKELAELASKRAGLERQIDERRRIDPRKAAAALENLVQLYPTMSPADKNSALKALGAEVTYTKEKKTKPRDFTLELQLRDF

SEQ ID NO: 6478 - protein, 491 aa, Unknown
  Description of Unknown: Integrase B6479 sequence
  PTHR30461:SF3,cd00338,SM00857,IPR006118,G3DSA:1.10.10.2600, IPR036162,PS51737,G3DSA:3.40.50.1390,IPR006119,IPR038109, PF07508,IPR011109,SSF53041,PTHR30461,PS00397, PS51736,Coil,PF00239
MIKTACAYVRVSTDKQEELSPDSQIREIKEYAARNNMLISKIYIEEHGISGKNASKRPAFQEMIATCKEKSHPYDVVLVWKFSRFARNIDESTYYKSILRKKCNVDVQSVSEPIIEGMYGRLIEMVIEWSDEFYLYNLSGEVHRGMTENALRGGYNSNAPLGYIKKKGCIPEIDPPKADIVKHIYDMYTKDDMAMADIAAKLNALGYRSNRGSKFELKTVAYILDNPFYIGKIRWNYYDRNNHQRKNEDEIIIVDGKHEPIITDEQWGLAQAKRCKARKHGGFGRKRTSVTAGHWLSGMIACSECGSNLGYHRDVHFFNCWKHAKGVCRSTSSITEAKAVQEVLSALQSLAASDFYYIYSEQAGAETDDLEVKRTQSELDSLSVKLKRVKEAYRNGVDTLDEYRENKQLIMARQNELEAKLATLETPIAPKQNRKKVDFGEIIRLIQDESVTTEQKATAIRKIFDHFEWNREKQQFSAFLSDDIMSTQCSS

SEQ ID NO: 6479 - protein, 491 aa, Unknown
  Description of Unknown: Integrase B6480 sequence
  SM00857,G3DSA:1.10.10.2600,IPR036162,PS51737,G3DSA:3.40.50.1390, IPR006119,IPR038109,PF07508,IPR011109,SSF53041, PF00239,PTHR30461,PS51736,Coil,cd00338
MYLRKSRQDNPEETVEEVLFRHEVQLQEYAMKNFHYRIKEEDIYREVVSGETIEDRPKMKKVLKLIESSTVKGVLVIEPQRLSRGDMLDCGTIVHVFRYTNTLVVTPPKTYDLTEKYDRKFFEMELSRGSDYLEYTKEILNRGRVLSRKQGNYIGSVAPYGYTKIKNGKEHSLVINEEEAQYVRMAYDLFIQGHGSHYIGEQLEAMGAKPRKAKHFTPANIRKMLRNPVYIGQIVLNRSQSVKVYEDGCLKTKRVYNPDYETVPGKHEPIISNEIFELANSEACRKARVPSSKEIRFIFAGLAKCSVCGGSLGLKIHTGREHPYRVGCLKKKYCTNTSILYEDFIDLVVNALKEQIQDFEVQIETNVYKDAFETQSLLESLTKRLEKTDEKMGQLCQYLEEGMYTPDMFVKRRDTLIQEKDELQKAVREARKKMSGMKDIKEKTSSLHEALNLLRDDSISPRLKNTFLKKIIKVIYFSRINDEIVLKVVLR

SEQ ID NO: 6480 - protein, 491 aa, Unknown
  Description of Unknown: Integrase B6481 sequence
  PTHR30461:SF3,SM00857,G3DSA:1.10.10.2600,IPR036162,PF13408, IPR025827,G3DSA:3.40.50.1390,PS51737,IPR006119,IPR038109, PF07508,SSF53041,IPR011109,PF00239, PTHR30461,PS51736,Coil,cd00338
MYLRKSRAEEGQSTEEVLAKHRAALEELADRLGLPVDGVYEEVASGEKLYARPEMLKLLERIRAGEVEAVLCMDIDRLGRGGMADQGTILDAFRESGTLIITPEKTYDLTNDVDIEMTEFKAFFARAEWRAIRKRMRRGLMQTIEAGGYTANAPYGYRRCRIGKLPSLEVIPEEARFVRYIYERYLAGIGAQTIAQELNAMGSCPRRGAEWNRNTVRHVLRNPTFAGKVAWNRVKHYRPGAHGKDKHHVVYTPEGEWLMVDGVHEAIIPWDTWLEAQERRKQRYIPPSNTGQRANPFAGIIRCSKCGNNMQRMGTNKGEPYLLCTTKGCTAGAKFEYVEERMVELLYDELARLRLLIDSGAAPNVDALEAALAAAQREQERVQARIPRLYEFLEDGTYDRSTFRSRLEAAEKELAELANKRADLERHIDERRRSDPRKAAAALENLVQLYPTMSPADKNSALKALGVEVTYTKEKKTKPRDFTLELQLRDF

SEQ ID NO: 6481 - protein, 491 aa, Unknown
  Description of Unknown: Integrase B6482 sequence
  IPR036162,PS51737,IPR011109,PTHR30461,PS00397, PF00239,G3DSA:1.10.10.2600,IPR006119,SSF53041,cd00338, SM00857,IPR025827,IPR038109,PS51736,IPR006118, PF13408,G3DSA:3.40.50.1390,PF07508,Coil
METKYAFGYVRVSTGKQDELSPDSQAKLLKDYAKSHGYVVSKIFYEVGISGRKADKRPEFQKMVGLAKASDHPADAILVWKFSRFARNQEESIVYKSLLKKKHNVDVISISEPLVDGPFGSLIERIIEWMDEYYSVRLSGEVTRGMREKAERGGYQARPPLGYKIVSHKEPPVIVPEEAEIVKLIFEKYVHDGMGLFEIARLLNSHNFKTSHGKEFERRSIEYILQNPTYCGMVRWNRTINESKEIRPESEWIIAEGEQPAIISKELFDKAQERYKREYRPRGARPVSTYKHWLSGIVKCPACGRTMTACKIENNKQTYCYFRCYGYSKGKCAAKNSISSLKLEPAVLESIKSVLDTGKITYRKIEVKTEDTADLKTILEDQIKKIDVKLQRIKEAYMNGIDTMEEYKENKRIVQGEKDSLEKQLSELKEEKISTKNEDNDMLMRVKNVYDILSSDSVDATTKNEVLRSVVEKIVYDREEDELKVYYYHMP

SEQ ID NO: 6482 - protein, 491 aa, Unknown
  Description of Unknown: Integrase B6483 sequence
  PTHR30461:SF3,IPR036162,PS51737,IPR011109,PTHR30461, PS00397,PF00239,G3DSA:1.10.10.2600,IPR006119,SSF53041, cd00338,SM00857,IPR025827,IPR038109,PS51736, IPR006118,PF13408,G3DSA:3.40.50.1390,PF07508,Coil
METKYAFGYVRVSTGKQDELSPDSQAKLLKDYAKSHGYVVSKIFYEVGISGRKADKRPEFQKMIGLAKASDHPADVILVWKYSRFARNQEESIVYKSLLKKKHNVDVISVSEPLVDGPFGSLIERIIEWMDEYYSVRLSGEVTRGMKEKAERGGYQARPPLGYKIVTHKEPPVIVPEEAEIVKLIFEKYANENLGIFEIARLLNMHNFKTSHGKEFERRSIEYILQNPTYCGMIRWNRTINESNEIRPESEWIVTDGEHPAIISKELFDKAQERYKREYRPRGSRPVSTYKHWLSGVVKCPACGRTMTANTIRNNTRVYSHFRCYGYTKGKCMANNSISSIKLEPAVLESIKTVLNNGKITYRKIETKTDDTVDLKTILKDQIKKIDVKLQRIKEAYMNGIDTMEEYKENKQAVQEEKQHLEKQLSEIKEEKNNSKNDDKDMLLRVKNVYDILSSNSVDVMTKNEVLRSVVEKIVYEKDKDLLKVYYYYMP

SEQ ID NO: 6483 - protein, 491 aa, Unknown
  Description of Unknown: Integrase B6484 sequence
  PTHR30461:SF3,SM00857,G3DSA:1.10.10.2600,IPR036162,PF13408, PS51737,G3DSA:3.40.50.1390,IPR025827,IPR006119,IPR038109, PF07508,SSF53041,IPR011109,PTHR30461,Coil, PS51736,cd00338,PF00239
METKYAFGYVRVSTGKQDELSPDSQAKLLKDYAKSHGYVVSKIFYEVGISGRKADKRPEFQKMIGLAKASDHPADVILVWKYSRFARNQEESIVYKSLLKKKHNVDVISVSEPLIDGPFGSLIERIIEWMDEYYSVRLSGEVTRGMREKAERGGYQARPPLGYKIVTHKEPPVIVPEEAEIVKLIFEKYANENLGIFEIARLLNMHNFKTSHGKEFERRSIEYILQNPTYCGMIRWNRTINESNEIRPESEWIVTDGEHPAIISKELFDKAQERYKREYRPRGSRPVSTYKHWLSGVVKCPACGRTMTANTIRNNTRVYSHFRCYGYTKGKCMANNSISSIKLEPAVLESIKTVLDNGKITYRKIEAKTDDTVDLKTILEDQIKKIDVKLQRIKEAYMNGIDTIEEYKENKQAVQEEKQHLEKQLSEIKEEKSNSKDDDEDMLLRVKNVYDILSSDSVDATTKNDVLRSVVEKIIYEKDKDLLKVYYYYMP

SEQ ID NO: 6484 - protein, 491 aa, Unknown
  Description of Unknown: Integrase B6485 sequence
  SM00857,G3DSA:1.10.10.2600,IPR036162,PS51737,G3DSA:3.40.50.1390, IPR006119,IPR038109,PF07508,IPR011109,SSF53041, PF00239,PTHR30461,PS51736,Coil,cd00338
MYLRKSRQDNPEETVEEVLFRHEIQLQEYALKNFHYRIKEEDIYREVVSGETIEDRPEMKKVLKLIESSTVKGVLVIEPQRLSRGDMLDCGTIVHVFRYTNTLVVTPPKTYDLTEKYDRKFFEMELSRGSDYLEYTKEILNRGRVLSRKQGNYIGSVAPYGYTKIKNGKEHSLVINEEEAQYVRMAYDLFIHGHGSHYIGEQLEAMGAKPRKAKHFTPANIRKMLRNPVYIGQIVLNRSQSVKVYEDGCLKTKRVYNPDYETVPGKHEPIISEEIFELANSEACRKARVPSSKEIRFIFAGLAKCSVCGGSLGLKIHTGREHPYRVGCLKKKYCTNTSILYEDFIDLVVNALKEQIQDFEVQIETNVYKEAFETQSLLESLTKRLEKTDEKMGQLCQYLEEGMYTPDMFVKRRDTLIQEKDELQKAVKETRKKMSGMKDIKEKTSSLHEALNLLRDDSISPRLKNTFLKKIIKVIYFSRINDEIVLKVVLR

SEQ ID NO: 6485 - protein, 491 aa, Unknown
  Description of Unknown: Integrase B6486 sequence
  cd03768,SM00857,IPR036162,PF13408, IPR025827,G3DSA:3.40.50.1390,PS51737,IPR006119, PF07508,SSF53041,IPR011109,PTHR30461, PS51736,Coil,PF00239
MIAIYTRQSIDKKDSISIETQVEMCQKEIKTQGLEFKIYKDKGFSGKNTDRPAFQNLMADVKQGNIDTIVVYRLDRISRSVLDFANIIDILQKHNVSFISASEKFDTSTPVGKAMLYIVMVFAQLERETIAERVKDNYYQRGETGAWGGGIAPFGYSNTKITIGGKKVATIQQNDDIELVKQIFYEYANADKSLGNIASDLTEKLNVMWNNIKLSRMLHSPAYVQADVDIYNYYVAKGCVIESDVSLFNGVNGLNVYGKRDRGANKYNNLKDHHIAVGFHSGVIPSDLWLKCQYKLDKNIQIKNNGKGKHTWLTGLIKCGYCGRAMTVKIYKETKYFNCSGRAIKMCDAEVVTHYVSDIEELVHQKMINYVDNFSDCKIKDIENDNRQEINSLKAELVQIEKDIENIVNNLTVANTTLMEYANKKIEELDNKKKQTLDKINKLNVTKDVELKIPSLDGWNSWDIEAKRDVAKTLIEKVYIYKDRIHIKWAY

SEQ ID NO: 6486 - protein, 491 aa, Unknown
  Description of Unknown: Integrase B6487 sequence
  PTHR30461:SF3,cd00338,SM00857,IPR006118,G3DSA:1.10.10.2600, IPR036162,PS51737,G3DSA:3.40.50.1390,IPR006119,IPR038109, PF07508,IPR011109,SSF53041,PTHR30461,PS00397, PS51736,Coil,PF00239
MIKTACAYVRVSTIQQEELSPDSQIREIKEYAARNNMLISKIYVEEHGISGKNASKRPAFQEMIATCKEKSHPYDVVLVWKFSRFARNIDESTYYKSILRKKCNVDVQSVSEPIIEGMYGRLIEMVIEWSDEFYLYNLSGEVHRGMTENALRGGYNSNAPLGYIKKKGCIPEIDPPKADIVKYIYDMYTKDDMAMADIAAKLNALGYRSNRGSKFELKTVAYILDNPFYIGKIRWNYYDRNNHQRKNEDEIIIVDGKHEPIITDEQWGLAQAKRCKARKHGGFGRKRTSVTAGHWLSGMIACSECGSNLGYHRDVHFFNCWKHAKGVCRSTSSITETKAIQEVLSALQSLAASDFYYIYSEQAGTETDDLEVKRTQSELDSLSVKLKRVKEAYRNGVDTLDEYRENKQLIMARQNELEAKLATLETPIAPKQNRKKVDFREIIRLIQDESVTTEQKATAIRKIFDHLEWNREKQQFSAFLSDDIMSTQCSS

SEQ ID NO: 6487 - protein, 491 aa, Unknown
  Description of Unknown: Integrase B6488 sequence
  PTHR30461:SF3,IPR036162,PS51737,IPR011109,PTHR30461, PS00397,PF00239,G3DSA:1.10.10.2600,IPR006119,SSF53041, SM00857,IPR025827,IPR038109,PS51736,cd03768, IPR006118,PF13408,G3DSA:3.40.50.1390,PF07508,Coil
MNNNLVPLSNSAINELVDLYVRVSTLEQAEEGYSIAEQEAKLRAYCSAMGYTVYNVHIDPGYSGASLDRPGIKKIISDVRAGKVRKVIVWKLDRLSRSQKDTMVMLEDVFLENKCDFVSLLESFDTSTPFGRAIVGLLAVFAQLERENIKERTAMGRQARIKKGYFHGSHAPLGYQFKSGCNDLVIDEYSANMVREVFRLFLSGGSINGIASHMICKYGSNRYEWNNTSVRRILRNPVYIGNVTLGDKIYEGIHESIISESEFYMASAILEHNKSLDKRNYSYSTGKFKADNLLTGLLFCGDCGARMYARKVSKSKKKYICHSVARTSKPMIKSDNCTNRLHPFTVGQVDNMIIDEIKKLSLDRDYFKSILADVPPKLDDLQTYRERIEEIEKQINRMLNLYQTGIIDMDEVMDRVNPLKDEKDKLETHVKKHEDAPVGISSEEAWDLACTLEDAISAGSNEEVHRIIHTLVDKIVMLNDEITIHWSFCQN

SEQ ID NO: 6488 - protein, 491 aa, Unknown
  Description of Unknown: Integrase B6489 sequence
  PTHR30461:SF3,IPR036162,PS51737,IPR011109,PTHR30461, PS00397,PF00239,G3DSA:1.10.10.2600,IPR006119,SSF53041, cd00338,SM00857,IPR025827,IPR038109,PS51736, mobidb-lite,IPR006118,PF13408,G3DSA:3.40.50.1390,PF07508,Coil
METKYAFGYVRVSTGKQDELSPDSQAKLLKDYAKSHGYVVSKIFYEVGISGRKADKRPEFQKMIGLAKSSDHPADAILVWKYSRFARNQEESIVYKSLLKKKHNVDVISVSEPLVDGPFGSLIERIIEWMDEYYSVRLSGEVTRGMKEKAERGGYQARPPLGYKIVTHKEPPVIVPEEAEIVKLIFEKYANENLGIFEIARLLNMHNFKTSHGKEFERRSIEYILQNPTYCGMIRWNRTINESNEIRPESEWIVTDGEHPAIISKELFGKAQERYKREYRPRGARPVSTYKHWLSGVVKCPACGRTMTANTIRNNTRVYSHFRCYGYTKGKCMANNSISSIKLEPAVLESIKTVLDSSKITYRKIETKTDDTVDLKTILEDQIKKIDVKLQRIKEAYMNGIDTMEEYKENKQAVQEEKQHLEKQLSEIKEEKSNSKDDDEDMLLRVKNVYDILSSDSVDATTKNDVLRSVVEKIIYEKDKDLLKVYYYYMP

SEQ ID NO: 6489 - protein, 491 aa, Unknown
  Description of Unknown: Integrase B6490 sequence
  PTHR30461:SF3,cd00338,SM00857,IPR006118,G3DSA:1.10.10.2600, IPR036162,PS51737,G3DSA:3.40.50.1390,IPR006119,IPR038109, PF07508,IPR011109,SSF53041,PTHR30461,PS00397, PS51736,Coil,PF00239
MIKTACAYVRVSTDKQEELSPDSQIREIKEYAARNNMLISKIYVEEHGISGKNASKRPAFQEMIATCKEKSHPYDVVLVWKFSRFARNIDESTYYKSILRKKCNVDVQSVSEPIIEGMYGRLIEMVIEWSDEFYLYNLSGEVHRGMTENALRGGYNSNAPLGYIKKKGCIPEIDPPKADIVKYIYDMYTKDDMAMADIAAKLNALGYRSNRGSKFELKTVAYILDNPFYIGKIRWNYYDRNNHQRKNEDEVIIVDGKHEPIITDEQWGLAQAKRCKARKHGGFGRKRTSVTAGHWLSGMIACSECGSNLGYHRDVHFFNCWKHAKGVCRSTSSITETKAIQEVLSALQSLAASDFYYIYSEQAGTETDDLEVKRTQSELDSLSVKLKRVKEAYRNGVDTLDEYRENKQLIMARQNELEAKLATLETPIAPKQNRKKVDFGEIIRLIQDESVTTEQKATAIRKIFDHFEWNREKQQFSAFLSDDIMNTQCSS

SEQ ID NO: 6490 - protein, 491 aa, Unknown
  Description of Unknown: Integrase B6491 sequence
  PTHR30461:SF3,SM00857,G3DSA:1.10.10.2600,IPR036162,PS51737, G3DSA:3.40.50.1390,IPR006119,IPR038109,PF07508,SSF53041, IPR011109,PTHR30461,Coil,PS51736,cd00338, PF00239
MYLRKSRQDNPEETVEEVLFRHEIQLQEYAMKNFHYRIKEEDIYREVVSGETIEDRPEMKKVLKLIESSTVKGVLVIEPQRLSRGDMLDCGTIVHVFRYTNTLVVTPPKTYDLTEKYDRKFFEMELSRGSDYLEYTKEILNRGRVLSRKQGNYIGSVAPYGYTKIKNGKEHSLVINEEEAQYVRMAYDLFIQGHGSHYIGEQLEAMGAKPRKAKHFTPANIRKMLRNPVYIGQIVLNRSQSVKVYEDGCLKTKRVYNPDYETVPGKHEPIISNEIFELANSEACRKARVPSSKEIRFIFAGLAKCSVCGGSLGLKVHTGREHPYRVGCLKKKYCTNTSILYEDFIDLVVNALKEQIQDFEVQIETNVYKEAFETQSLLESLTKRLEKTDEKMGQLCQYLEEGMYTPDMFVKRRDTLIQEKDELQKAVREARKKMSGMKDIKEKTSSLHEALNLLRDDSISPRLKNTFLKKIIKVIYFSKINDEIVLKVVLR

SEQ ID NO: 6491 - protein, 491 aa, Unknown
  Description of Unknown: Integrase B6492 sequence
  PTHR30461:SF3,SM00857,G3DSA:1.10.10.2600,IPR036162,PS51737, G3DSA:3.40.50.1390,IPR006119,IPR038109,PF07508,IPR011109, SSF53041,PF00239,PTHR30461,PS51736,Coil, cd00338
MYLRKSRQDNPEETVEEVLFRHEIQLQEYAMKNFHYRIAEEDIYREVVSGETIEDRPEMKKVLKLIESSTVKGVLVIEPQRLSRGDMLDCGTIVHVFRYTNTLVVTPPKTYDLTEKYDRKFFEMELSRGSDYLEYTKEILNRGRILSRKQGNYIGSVAPYGYTKIKNGKEHSLVINEEEAQYVRMAYDLFIQGHGSHYIGEQLEAMGAKPRKAKHFTPANIRKMLRNPVYIGQIVLNRSQSVKVYEDGCLKTRRVYNPDYETVPGKHEPIISNEIFELANSEACRKARVPSSKEIRFIFAGLAKCSVCGGSLGLKIHTGREHPYRVGCLKKKYCTNTSILYEDFIDLVVNALKEQIQDFEVQIETNVYKEAFETQSLLESLTKRLEKTDEKMGQLCQYLEEGMYTPDMFVKRRDTLIQEKDELQKAVKEARKKMSGMKDIKEKTSSLHEALNLLRDDSISPRLKNTFLKKIIKVIYFSRINDEIVLKVVLR

SEQ ID NO: 6492 - protein, 491 aa, Unknown
  Description of Unknown: Integrase B6493 sequence
  cd03768,SM00857,IPR036162,PF13408,PS51737, G3DSA:3.40.50.1390,IPR025827,IPR006119,PF07508,IPR011109, SSF53041,PTHR30461,PS51736,Coil,PF00239
MIAVYTRQSIDKKDSISIETQVEMCQKEIKTQGLEFKIYKDKGFSGKNTDRPAFQNLMADVKQGNIDTIVVYRLDRISRSVLDFANIIDILQKHNVSFISASEKFDTSTPVGKAMLYIVMVFAQLERETIAERVKDNYYQRGETGAWGGGIAPFGYSNTKITIGGKKVATIQQNNDIELVKQIFYEYANTDKSLGNIASDLTEKLNVMWNNIKLSRMLHSPAYVQADVDIYNYYVAKGCVIESDVSLFNGVNGLNVYGKRDRGANKYNNLKDHHIAVGFHSGVIPSDLWLKCQYKLDKNIQIKNNGKGKHTWLTGLIKCGYCGRAMTVKTYKETKYFNCSGRAIKMCDAEVVTHYVSDIEELVHQKMINYVENFSDCKVKSIENENKQEINSLKAGLVQIEKEIENIINNLTVANSTLMEYANKKIEELDNKKKQTLDKINKLNITKDVELKIPNLDGWNSWDIEAKRDVAKTLIDKVYVYKDRIHIKWAY

SEQ ID NO: 6493 - protein, 491 aa, Unknown
  Description of Unknown: Integrase B6494 sequence
  cd03768,PTHR30461:SF3,SM00857,G3DSA:1.10.10.2600, IPR036162,PF13408,IPR025827,G3DSA:3.40.50.1390, PS51737,IPR006119,IPR038109,PF07508, IPR011109,SSF53041,PTHR30461,PS51736,PF00239
MIAIYSRQSIDKKDSISIETQIEFCRHEAKGEEYKVYSDKGYSGKNTNRPGFENMMDDIKRGLINKVVVYRLDRISRSIVDFADFIDSLEKYNTSFISATEKFDTAAPMGRAMLYIIIVFAQLERETIAERIKDNYYERIKRGGIGGGPAPYGFDISKITIDGTKMSSYTPNGNIETVKKIFDMYTSAGVSLADIQRYLKEKNIKTASGKPWDNTKLSTLIKSPSYVKADISIYNYYKQKGAVIASPLEDFNGENACLLVGKRNSNTRKYSDITDHILAVSAHKGIVDSGTFLLCQQKLSENRQIKNLHKGKYSWLTGFVKCGYCGYSFSVRKSRTSEGETAYFYDSGKYLYKTCTHNQTHRVKDVEDVVESELIRIIEKIDFKEKEDTPVNNQNINKIKEIDAKISNLILALEDCSGVSSSYINTRIAELDMEKQELLDKISSDALNRKKIALPKIEDYNNMSFEEKRLLAKMLIDKVILTDDKIEISYK

SEQ ID NO: 6494 - protein, 491 aa, Unknown
  Description of Unknown: Integrase B6495 sequence
  cd00338,SM00857,IPR006118,G3DSA:1.10.10.2600,IPR036162, PS51737,G3DSA:3.40.50.1390,IPR006119,IPR038109,PF07508, IPR011109,SSF53041,PTHR30461,PS00397,PS51736, Coil,PF00239
MSTTIKTAAAYIRVSTDRQEELSPDAQRRELKNYAKKNGIMITDIFEDTGISGRNAEKRPAFQKMISYAKSKEHPYDYILVWKFSRFARNQEESIVYKSLLQKNGVEVVSITEPLIDGPFASLIERIIEWMDEYYSIRLASDVKRGMEEKALRGGYQAAPPLGYHMEDHIPVIYEPEAVIVREIYRLAAEGKTSTTIARIINDAGYRTRRGKLFEHRGIVYILQNPFYKGYVRWNYRKHSSYHNNADNDIITTKGLHKPLIDENHWTQVQKIVPFVPGHTGQRRRKSDTLFNHYLCGIMRCPACGANLSFHTNKTYTSFVCWKYSKGMHTNTGNIVAWRCEEALVDSLRKTIDSTSADMTFHATLPDTPLASDMLRQYQDSLAKLEQKEQRIKDAYIEGIDTKEEYKENKFRIAEERDHLKKLIKKEERRCTPHTAAINGATYISMIKNLLDTLEDESIDVAEKHEAVAKIIDHMEYHRDSDTFNIFYSYS

SEQ ID NO: 6495 - protein, 491 aa, Unknown
  Description of Unknown: Integrase B6496 sequence
  cd03768,SM00857,IPR036162,PF13408,IPR025827, G3DSA:3.40.50.1390,PS51737,IPR006119,PF07508,SSF53041, IPR011109,PTHR30461,PS51736,Coil,PF00239
MIAIYTRQSIDKKDSISIETQVEMCQKEIKTQGLEFKIYKDKGFSGKNTDRPAFQNLMADVKQGNIDTIVVYRLDRISRSVLDFANIIDILQKHNVSFISASEKFDTSTPVGKAMLYIVMVFAQLERETIAERVKDNYYQRGETGAWGGGIAPFGYSNTKTTIGGKKVATIQQNDDIELVKQIFYEYANTDKSLGNIASDLTEKLNVMWNNIKLSRMLHSPAYVQADVDIYNYYVAKGCVIESDVSLFNGVNGLNVYGKRDRGANKYNNLKDHHIAVGFHSGVIPSDLWLKCQYKLDKNIQIKNNGKGKHTWLTGLIKCGYCGRAMTVKTYKETKYFNCSRRAIKMCDAEVVTHYVSDIEELVHQKMINYVENFSDCKIKDIENDNRQEINSLKAELVQIEKDIENIVNNLAVANTTLMEYANKKIEELDNKKKQTLDKINKLNVTKDVELKIPNLDGWDSWDIEAKRDVAKTLIDKVYVYKDRIHIKWAY

SEQ ID NO: 6496 - protein, 491 aa, Unknown
  Description of Unknown: Integrase B6497 sequence
  PTHR30461:SF3,IPR036162,PS51737,IPR011109,PTHR30461, PS00397,PF00239,G3DSA:1.10.10.2600,IPR006119,SSF53041, cd00338,SM00857,IPR025827,IPR038109, PS51736,IPR006118,PF13408,G3DSA:3.40.50.1390,PF07508,Coil
MRFLNVALYVRVSTDIQVDGYSIDEQLERLEKYCDAKDWIIYNKYIDPGFTGSNINRPGLTKLLQDIHKGKIDLVLVYKLDRLSRSQKDTLYLIEEEFLPNNVDFISMTENFDTSTPFGKAMIGILSVFAQLERENIKTRLAMGHVGRAKAGYWRGGSNPPIGYDFINGKLIINEYEALQVRTIYKMFLDGETIHGITRYMSEHFTNRYSNYRTPGQTGVILRNRLYIGKIKYKGVEYDGVHEPIIDIDTFERVQKRYKEISGKWSDHYRSPFKAKHLLTGLLYCGNCGARYFACTQRRKDKTTGKYIKSTESYVYYKCYTRDGNKSMRKGDYCKNPTIRVDKLDKVILDEIKKLKLDPDRLERIINTESKEKVENTELTVLRNKLDNTQSKIDKLMDLYTIGTIPITEIGDRIKPLYEEKEKIELEINTRENELQEPHGLSISETRDILDQFADIDNLDHDLKRELVQSLIERIEVLPEPDSIKIYWKFV

SEQ ID NO: 6497 - protein, 490 aa, Unknown
  Description of Unknown: Integrase B6498 sequence
  PTHR30461:SF3,SM00857,G3DSA:1.10.10.2600,IPR036162,PF13408, IPR025827,G3DSA:3.40.50.1390,PS51737,IPR006119,IPR038109, PF07508,IPR011109,SSF53041,PF00239,PTHR30461, PS51736,Coil,cd00338
MKAALYTRVSTDEQAEHGFSLEAQKKRLIEYCNKNNIEIYKLYSDEGISGHSIIKRKALQEMLQDAKEHKFNYVIAYKTDRISRNLLDLLTIKNQLDEADVELLLSDEAIDTKDDAGMTMFSIMGAFAELERKKITERMMAGKRQKLMNEHIKLKNGRVPYGYLYDDENKKYIIDESRRSIVELIYKLASQGWSYNKITRHIAEETAANSSDSKKKWYISDIRAILTNPIYKGYSGISYYYNFNDRAKKPKNSAILYKATNVEPYFTEEYWDTLYSQLEKKTQYFKRKHPIDSYIFSDVLFCATCGLKIGTRQHHANYLYYVCNSKHKMYDNDHICDYAININKFNNWFIEFIRGIDENNIKLSVSKPKDLDRELQAVRSQISIKEKNREVLLDKLMNGVIDDTEYRLASNMVIASLNSLKSQEKELSDKMDSLKEKEQTKRYNRLKIKALKVLVNDWDNLTDQAKKTLINSSINKIMITKDGIQEIEFN

SEQ ID NO: 6498 - protein, 490 aa, Unknown
  Description of Unknown: Integrase B6499 sequence
  SM00857,IPR006118,G3DSA:1.10.10.2600,IPR036162,PF13408, PS51737,PS00397,G3DSA:3.40.50.1390,IPR025827,IPR006119, IPR038109,PF07508,SSF53041,IPR011109,PTHR30461, Coil,cd00338,PF00239
MTAKNAESFLEIGAAYIRVSTDDQTELSPDAQVRVIQEEAKKDGFFIPTEYIFIEHKGISGRKASNRPEFQKMIATAKSQKPSPFKRLYLWKFSRFARNQEESTFYKGILRKKCGVEIKSVSEPIMEGMFGRLIETIIEWFDEYYSYNLSGEVLRGMTEKALRSGYQATPCLGYQAIGEGKPFVLDPKAVPLVEYIFQSYNQGKDMTYIARNLNKQGHVTRRGNAFGRRTVHGILTNPFYKGEVCWNGIKFTGSHELIPSVASIFDSVQERINAEYHPKQRREASSTAHWLSGLLKCGTCGSSLGFCRSKDQKKRPDFFQCWRYSKGFHPDSCSVSARIAEKAVLDSLKSAIDTQSINYEYVPSADIQNQSEEALIQEALTRLETKERRIKEAYENEVDTLEEYKDNKCRLQAERKSLLTSLERLHQEQPDFSNQIAHKQKLLAEIATIYDFVLDPNVSNEDKGNALRRVLKKIVFDRKTSVFTFFYYVS

SEQ ID NO: 6499 - protein, 490 aa, Unknown
  Description of Unknown: Integrase B6500 sequence
  PTHR30461:SF3,IPR036162,PS51737,IPR011109,PTHR30461, PS00397,PF00239,G3DSA:1.10.10.2600,IPR006119,SSF53041, cd00338,SM00857,IPR025827,IPR038109,PS51736, IPR006118,PF13408,G3DSA:3.40.50.1390,PF07508,Coil
MAKDILNMKSACAYIRVSTDKQEELSPDAQKRLLIDFAKKNNMSLLASNIYLDNGISGKKADKRPEFMKMIGMAKSKEHPFDVILVWKFSRFARNQEESIVYKSLLKKNHVEVVSISEPLIDGPFGSLIERIIEWMDEYYSIRLSGEVLRGMTEKALRGGYQSSLPLGYKMNKDTGIPYIYDDEAVIVRKIYHDYISGHSYLEIARELNSLGYRTKRGSTYEGRTVEYILSNPFYYGAVRWNRQKHDDHTIKSVSDWIIAEGKHESLIDKETWDEVQHLIALRSRPYKARAAGHMKHWLGGIVKCSDCGASLMAGLNATRYQCGNYNKGKCSHSHYIKTVALEHAVYEAFERVLDGSGELHYELKKSSNEPDTDDRSVILNQLSKLEDKEARIKQAYRDGIDTLEEYKENKQLLKDEREALEKQLEAFSSASDDSNSNATMLKSISTVYDIIKDTSRDTLTRSNAIRSIVDHFVYDKEKDKLEVYFFMQK

SEQ ID NO: 6500 - protein, 490 aa, Unknown
  Description of Unknown: Integrase B6501 sequence
  PTHR30461:SF3,IPR036162,PS51737,IPR011109,PTHR30461, PS00397,PF00239,G3DSA:1.10.10.2600,IPR006119,SSF53041, cd00338,SM00857,IPR025827,IPR038109,PS51736, IPR006118,PF13408,G3DSA:3.40.50.1390,PF07508,Coil
MAKDILNMKSACAYIRVSTDKQEELSPDAQKRLLIDFAKKNNMSLLASNIYLDNGISGKKADKRPEFMKMIGMAKSKEHPFDVILVWKFSRFARNQEESIVYKSLLKKNHVEVVSISEPLIDGPFGSLIERIIEWMDEYYSIRLSGEVLRGMTEKALRGGYQSSLPLGYKMNKDTGIPYIYDDEAVIVRKIYHDYISGHSYLEIARELNSLGYRTKRGSTYEGRTVEYILSNPFYYGAVRWNRQKHDDHTIKSVSDWIIAEGKHESLIDKETWDEVQHLIALRSRPYKSRAAGHMKHWLGGIVKCSDCGASLMAGLNATRYQCGNYNKGKCSHSHFIKTTALEEAVYKSLERVLDGSIELHYELKKSTNEPEEDSKSMLLNRLSKLDDKETRIKQAYRDGIDTIEEYKENKQLLKDEREELQRKLESFKNTSSDEDGNKLLLKNISSVLNIIKDTSNDTLTRANAIRSIVDHFVYDKEKDKLEVYFFLQE

SEQ ID NO: 6501 - protein, 490 aa, Unknown
  Description of Unknown: Integrase B6502 sequence
  PTHR30461:SF3,IPR036162,PS51737,IPR011109,PTHR30461, PS00397,PF00239,G3DSA:1.10.10.2600,IPR006119,SSF53041, cd00338,SM00857,IPR025827,IPR038109,IPR006118, PF13408,G3DSA:3.40.50.1390,PF07508,Coil
MTTKNTESFLEIGAAYIRVSTDDQTELSPDAQLRVIQEEAKKDGYIIPKEFIFEEKKGISGRKADNRPAFQRMIAVAKSQKPAPFKRLYLWKFSRFARNQEESTFYKGILRKKCGVEIKSVSEPITDGMFGRLIETIIEWFDEYYSYNLSGEVLRGMTEKALRSGYQTVPCLGYKAVGGGRPFVLDPDAVPIVEYIFQAYSQGKDMLSIARDLNLQGYKTNRGGSFELRGVHRILVNRFYIGDVTWNGITFHGTHETIPAVVSVFGSVQERIQAEYQPRHRKQASATAHWLSGLLKCSTCGASLGYTCTKDSKKHPAFFQCWKYAKGLHQGSCSVSASIAERAVLNSLRSALESHDVNYEYIPPKNSVTLTEEALLTEALARLDVKERRVKEAYENEIDTLEEYKNNKLRLKLEREDLLSQLERLRQDSPSAPDPQQCKEKLLEQISTVYDFITDPNVNYVEKNNALRRIIKKIVFDRKTGTFTFFYYTL

SEQ ID NO: 6502 - protein, 490 aa, Unknown
  Description of Unknown: Integrase B6503 sequence
  PTHR30461:SF3,IPR036162,PS51737,IPR011109,PTHR30461, PS00397,PF00239,G3DSA:1.10.10.2600,IPR006119,SSF53041, cd00338,SM00857,IPR025827,IPR038109,PS51736, IPR006118,PF13408,G3DSA:3.40.50.1390,PF07508,Coil
MAKDILNMKSACAYIRVSTDKQEELSPDAQKRLLIDFAKKNNMSLLAENIYIDNGISGKKADKRPEFMKMIGLSKSKEHPFDVILVWKFSRFARNQEESIVYKSLLKKNHVDVMSVSEPLIDGPFGTLIERIIEWMDEYYSIRLSGEVLRGMTEKALRGGYQSSLPLGYRMNKDTGIPYIYEEEAVIVRKIYNDYIAGHSYLEIARELNALGYKTKRGAAFEGRTVEYILSNPFYYGAVRWNRQNHDNHTIKDISEWIIVMGKHPAIINKETWDLVQHLIALRSKPYKARAAGHMKHWLGGIVKCSDCGASLMAGLNATRYQCGNYNKGKCLHSHFIKTAALEEAVYESLERVLNGSIELHYELKKSSNEPEEDSKSILLGQLSKLEDKEARIKQAYRDGIDTIEEYKENKQLLKDERESLSAKLQSLKDTLSDKDDTAAMLNNISNVLDIIKDASKDTLTRANAIRSIVDHFVYDKEKDKLEVYFFLQK

SEQ ID NO: 6503 - protein, 490 aa, Unknown
  Description of Unknown: Integrase B6504 sequence
  cd00338,SM00857,G3DSA:1.10.10.2600,IPR036162,PF13408, PS51737,G3DSA:3.40.50.1390,IPR025827,IPR006119,IPR038109, PF07508,IPR011109,SSF53041,PTHR30461,PS51736, Coil,PF00239
MAYCMYLRKSRADKDYENLSTETILNRHEKALMELAQKHNYDISKIFREVVSGETLSQRPQMQILLNEVENNMYDGVLVMEVERLARGNSVDQGIIAQAFKYSNTLIITPTKTYDPQNEFDEEYFEFGLFMSRREYKTINRRLNAGRLASCKEGKFVGSVTPYGYTKEKLKNQKGYKLVPDLEESKVLKLIFDLYTNSMGIRNICKHLDSLGIKPRNSENWSTSTIRDILKNPVYIGKILWQKTYSTKTTKDGFVKSKRYKNKEDFYTFNGIHSPLISEDTFQKAQNILLQNSHPPVNNTSLKNPFAGILYCNLCGKAIVRRFVNNKYQYLMCNNPNCQNTATELKNIENCILNIIENHFNYTTSPTVFEKEDNTNELFYINKEIKKLKLQFSNIFDLLEQKIYSKETFLERKQMLEKNIEILTLQKEKFENNASQINPINTPVTILELYNKLDDIKNKNQLLKNIFSKIYYSKIDNNIKITIYSKLPIK

SEQ ID NO: 6504 - protein, 490 aa, Unknown
  Description of Unknown: Integrase B6505 sequence
  PTHR30461:SF3,IPR036162,PS51737,IPR011109,PTHR30461, PS00397,PF00239,G3DSA:1.10.10.2600,IPR006119,SSF53041, cd00338,SM00857,IPR025827,IPR038109,PS51736, IPR006118,PF13408,G3DSA:3.40.50.1390,PF07508,Coil
MAKDILNMKSACAYIRVSTDKQEELSPDAQKRLLIDFAKKNNMSLLAENIYIDNGISGKKADKRPEFMKMIGLSKSKEHPFDVILVWKFSRFARNQEESIVYKSLLKKNHVDVMSVSEPLIDGPFGTLIERIIEWMDEYYSIRLSGEVLRGMTEKALRGGYQSSLPLGYRMNKDTGIPYIYEEEAVIVRKIYNDYIAGHSYLEIARELNALGYKTKRGAAFEGRTVEYILSNPFYYGAVRWNRQNHDNHTIKSISDWIIAEGKHKPLIDKETWDLVQHLIALRSKPYKARAAGHMKHWLGGIVKCSDCGASLMAGLNATRYQCGNYNKGKCLHSHFIKTAALEEAVYESLERVLNGSIELHYELKKSSNEPEEDSKSILLGQLSKLEDKEARIKQAYRDGIDTIEEYKENKQLLKDEREELQRKLESFKNTSSDEDGNKLLLKNISSVLNIIKDTSNDTLTRANAIRSIVDHFVYDKEKDKLEVYFFLQE

SEQ ID NO: 6505 - protein, 490 aa, Unknown
  Description of Unknown: Integrase B6506 sequence
  SM00857,IPR006118,G3DSA:1.10.10.2600,IPR036162,PF13408, PS51737,G3DSA:3.40.50.1390,IPR025827,PS00397,IPR006119, IPR038109,PF07508,SSF53041,IPR011109,PTHR30461, Coil,cd00338,PF00239
MTAKNAESFLEIGAAYIRVSTDDQTELSPDAQVRVIQEEAKKDGFFIPTEYIFIEHKGISGRKASNRPEFQKMIATAKSQKPSPFKRLYLWKFSRFARNQEESTFYKGILRKKCGVEIKSVSEPIMEGMFGRLIETIIEWFDEYYSYNLSGEVLRGMTEKALRSGYQATPCLGYQAIGEGKPFVLDPKAVPLVEYIFQSYNQGKDMTYIARNLNKQGHVTRRGNAFGRRTVHGILTNPFYKGEVCWNGIKFTGSHELIPSVASIFDSVQERINAEYHPKQRREASSTAHWLSGLLKCGTCGSSLGFCRSKDQKKRPDFFQCWRYSKGFHPDSCSVSARIAEKAVLDSLKSAIDTQSINYEYVPSADIQNQSEEALILEALTRLETKERRIKEAYENEVDTLEEYKDNKCRLQAERKSLLTSLERLHQEQPDFSNQIAHKQKLLAEIATIYDFVLDPNVSNEDKGNALRRVLKKIVFDRKTSVFTFFYYVS

SEQ ID NO: 6506 - protein, 490 aa, Unknown
  Description of Unknown: Integrase B6507 sequence
  SM00857,IPR006118,G3DSA:1.10.10.2600,IPR036162,PF13408, PS51737,G3DSA:3.40.50.1390,IPR025827,PS00397,IPR006119, IPR038109,PF07508,SSF53041,IPR011109,PTHR30461, Coil,cd00338,PF00239
MTAKNAESFLEIGAAYIRVSTDDQTELSPDAQVRVIQEEAKKDGFFIPTEYIFIEHKGISGRKASNRPEFQKMIATAKSQKPSPFKRLYLWKFSRFARNQEESTFYKGILRKKCGVEIKSVSEPIMEGMFGRLIETIIEWFDEYYSYNLSGEVLRGMTEKALRSGYQATPCLGYQAIGEGKPFVLDPKAVPLVEYIFQSYNQGKDMTYIARNLNKQGHVTRRGNAFGRRTVHGILTNPFYKGEVCWNGIKFTGSHELIPSVASIFDSVQERINAEYHPKQRREASSTAHWLSGLLKCGTCGSSLGFCRSKDQKKRPDFFQCWRYSKGFHPDSCSVSARIAEKAVLDSLKSAIDTQSINYEYVPSADIQNQSEEALIQEALTRLETKERRIKEAYENEVDTLEEYKDNKCRLQAERKSLLTNLERLHQEQPDISNQIAHKQKLLAEIATIYDFVLDPNVSNEDKGNALRRVLKKIVFDRKTSVFTFFYYVS

SEQ ID NO: 6507 - protein, 490 aa, Unknown
  Description of Unknown: Integrase B6508 sequence
  PTHR30461:SF3,IPR036162,PS51737,IPR011109,PTHR30461, PS00397,PF00239,G3DSA:1.10.10.2600,IPR006119,SSF53041, cd00338,SM00857,IPR025827,IPR038109,PS51736, IPR006118,PF13408,G3DSA:3.40.50.1390,PF07508,Coil
MAKDILNMKSACAYIRVSTDKQEELSPDAQKRLLIDFAKKNNMSLLASNIYLDNGISGKKADKRPEFMKMIGMAKSKEHPFDVILVWKFSRFARNQEESIVYKSLLKKNHVEVVSVSEPLVDGPFGTLIERIIEWMDEYYSIRLSGEVLRGMTEKALRGGYQSTLPLGYRMNKDTGIPYIYEPEAVIVRKIYKDYIAGLSYLEIARELNALGYKTKRGAAFEGRTVEYILSNPFYYGAVRWNRQKHDDHTIKSISDWIIAEGKHPALIDKAIWDEVQHLIALRSRPYKARAAGHMKHWLGGIVKCSDCGASLMAGLNATRYQCGNYNKGKCLHSHFIKTAALERAVYEAFKRILDGSVELHYELKKSSNEPDTDDRSIILNQLSKLDDKDARIKQAYRDGIDTIDEYKENKQLLKDERAALEKQLEAFNNSSSDTDSNAAMLKNISSVYDIIKDTSKDTLTRANAIRSVVDHMVYDRENDKLEIYFFLQK

SEQ ID NO: 6508 - protein, 490 aa, Unknown
  Description of Unknown: Integrase B6509 sequence
  PTHR30461:SF3,IPR036162,PS51737,IPR011109,PTHR30461, PS00397,PF00239,G3DSA:1.10.10.2600,IPR006119,SSF53041, SM00857,IPR025827,IPR038109,PS51736,cd03768, IPR006118,PF13408,G3DSA:3.40.50.1390,PF07508
MERKVACYIRVSTQEQATHGFSVGEQETRLRKYCEAHEWTIAGVYEDPGFSGAYLDRPGIQKLIRDVDLGIFDTVLVWKLDRLSRSQKNTMYMIEDVFLKHNINFISMNENFDTSTPFGRAMVGILSVFAQLDRDQITQRMTMGRIGRAKAGYYSGGSQPPIGYTYTRADGGEKKTLEVDEYEAMQVRMVYDLFLNGLDGKDMTFSDITRYMAAHYSNRYGGWQQPCTVSRMLSNPVYIGKVKFSGEFYDGTHEPIISEETFKKAQEKYQRHIQNFSKSIQNFKGCYLLTGLIHCGACGSRYFVTSTKNTNKTASIKPYYHSYACYGRKPVNVNMMKNGRCKNKIYKMEVLDAYVLDEIQKLKENPELIGDLRTGPKDDKTAAIESRIRELDKQMGKLVDLYQLGTIAFDEIRKRTDAIRAERDKLKGELGHEKRPDGVISETEFRDRLDAFDADIFSDLDIERKQAIVRSLINKIVIYPDLIEIRWAFH

SEQ ID NO: 6509 - protein, 490 aa, Unknown
  Description of Unknown: Integrase B6510 sequence
  PTHR30461:SF3,IPR036162,PS51737,IPR011109,PTHR30461, PS00397,PF00239,G3DSA:1.10.10.2600,IPR006119,SSF53041, cd00338,SM00857,IPR025827,IPR038109,PS51736, IPR006118,PF13408,G3DSA:3.40.50.1390,PF07508,Coil
MAKDILNMKSACAYIRVSTDKQEELSPDAQKRLLIDFAKKNNMSLLASNIYLDNGISGKKADKRPEFMKMIGMAKSKEHPFDVILVWKFSRFARNQEESIVYKSLLKKNHVEVVSISEPLIDGPFGSLIERIIEWMDEYYSIRLSGEVLRGMTEKALRGGYQSSLPLGYKMNKDTGIPYIYDDEAVIVRKIYHDYISGHSYLEIARELNSLGYRTKRGSTYEGRTVEYILSNPFYYGAVRWNRQKHDDHTIKSVSDWIIAEGKHESLIDKETWDEVQHLIALRSRPYKARAAGHMKHWLGGIVKCSDCGASLMAGLNATRYQCGNYNKGKCSHSHYIKTVALEHAVYEAFERVLDGSVELHYELKKSSNEPDTDDRSVILNQLSKLEDKEARIKQAYRDGIDTLEEYKENKQLLKDEREALEKQLEAFSSASDDSNSNATMLKSISTVYDIIKDTSRDTLTRSNAIRSIVDHFVYDKEKDKLEVYFFMQK

SEQ ID NO: 6510 - protein, 490 aa, Unknown
  Description of Unknown: Integrase B6511 sequence
  SM00857,G3DSA:1.10.10.2600,IPR036162,PF13408,PS51737, G3DSA:3.40.50.1390,IPR025827,IPR006119,IPR038109,PF07508, IPR011109,SSF53041,PF00239,PTHR30461,PS51736, Coil,cd00338
MAYCMYLRKSRADKDYENLSTETILNRHEKTLMELAQKHNYDISKIFREVVSGETLSQRPQMQILLNEVENNMYDGVLVMEVERLARGNSVDQGIIAQAFKYSNTLIITPTKTYDPQNEFDEEYFEFGLFMSRREYKTINRRLNAGRLASCKEGKFVGSVTPYGYTKEKLKNQKGYKLVPDLEESKVLKLIFDLYTNSMGIRNICKHLDSLGIKPRNSENWSTSTIRDILKNPVYIGKILWQKTYSTKTTKDGFVKSKRYKNKEDFYTFNGIHSPLISEDTFQKAQNILLQNSHPPVNNTSLKNPFAGILYCNLCGKAIVRRFVNNKYQYLMCNNPNCQNTATELKNIENCILNIIENHFNYTTSPTVFEKEDNTNELFYINKEIKKLKLQFSNIFDLLEQKIYSKETFLERKQMLEKNIEILTLQKEKFENNASQINPINTPVTILELYNKLDDIKNKNQLLKNIFSKIYYSKIDNNIKITIYSKLPIK

SEQ ID NO: 6511 - protein, 490 aa, Unknown
  Description of Unknown: Integrase B6512 sequence
  PTHR30461:SF3,IPR036162,PS51737,IPR011109,PTHR30461, PS00397,PF00239,G3DSA:1.10.10.2600,IPR006119,SSF53041, cd00338,SM00857,IPR025827,IPR038109,PS51736, IPR006118,PF13408,G3DSA:3.40.50.1390,PF07508,Coil
MAKDILNMKSACAYIRVSTDKQEELSPDAQKRLLIDFAKKNNMSLLASNIYLDNGISGKKADKRPEFMKMIGMAKSKEHPFDVILVWKFSRFARNQEESIVYKSLLKKNHVEVVSISEPLIDGPFGSLIERIIEWMDEYYSIRLSGEVLRGMTEKALRGGYQSSLPLGYKMNKDTGIPYIYDDEAVIVRKIYHDYIFGHSYLEIARELNSLGYRTKRGSTYEGRTVEYILSNPFYYGAVRWNRQKHDDHTIKSVSDWIIAEGKHESLIDKETWDEVQHLIALRSRPYKARAAGHMKHWLGGIVKCSDCGASLMAGLNATRYQCGNYNKGKCSHSHFIKTTALEEAVYKSLERVLDGSIELHYELKKSTNEPEEDSKSMLLNRLSKLDDKETRIKQAYRDGIDTIEEYKENKQLLKDEREELQRKLESFKNTSSDEDGNKLLLKNISSVLNIIKDTSNDTLTRANAIRSIVDHFVYDKEKDKLEVYFFLQE

SEQ ID NO: 6512 - protein, 490 aa, Unknown
  Description of Unknown: Integrase B6513 sequence
  PTHR30461:SF3,cd00338,SM00857,G3DSA:1.10.10.2600,IPR036162, PF13408,PS51737,G3DSA:3.40.50.1390,IPR025827,IPR006119, IPR038109,PF07508,SSF53041,IPR011109,PTHR30461, PS51736,Coil,PF00239
MRVVLYMRYSSDRQTEQSIEGQNRVCTAFCEQQGYEIVDRYIDRATSAFKDTDKRTEFQRMIRDSEKQLWEGIVIYKLDRFARNRYDSATYKARLKKNGVRVISATENISDNPEGVILEAVLEGMAEFYSKELSQKITRGMFESANKCHSIGGHIPLGYKIENKKLVIDEAGAAIVREAFDLYANGATVAEICDTFNTKGYRTAKNAEFNKNSFRSMFKNERYIGIYKYKDLRIEGGVPAIVDKDIFAIVQKKLSKNAEAPSRGKAKIDYLLSQKLFCGHCGSLMTGESGTGKGGTTYFYYTCGKRKREHTCDKKPLKKDFIERAVVEDALTLLTPETIDELADIAVNESIREMEENSIIPALKDQLHDTERSINNLVKMVEKGVESDTIADRLKELEKEKRAIEKRLVVAQDDYVLLEKDHIVWWLSEFCNGDIEDEEFRRHIIDLLVNSVTVWDEPDGWYKITSVYNLTSNKTKTFRCSDLSGQAPPI

SEQ ID NO: 6513 - protein, 490 aa, Unknown
  Description of Unknown: Integrase B6514 sequence
  PTHR30461:SF3,IPR036162,PS51737,IPR011109,PTHR30461, PS00397,PF00239,G3DSA:1.10.10.2600,IPR006119,SSF53041, cd00338,SM00857,IPR025827,IPR038109,PS51736, IPR006118,PF13408,G3DSA:3.40.50.1390,PF07508,Coil
MAKDILNMKSACAYIRVSTDKQEELSPDAQKRLLIDFAKKNNMSLLASNIYLDNGISGKKADKRPEFMKMIGMAKSKEHPFDVILVWKFSRFARNQEESIVYKSLLKKNHVEVVSVSEPLADGPFGTLIERIIEWMDEYYSIRLSGEVLRGMTEKALRGGYQSTLPLGYRMNKDTGIPYIYEPEAVIVRKIYKDYIAGLSYLEIARELNALGYKTKRGAAFEGRTVEYILSNPFYYGAVRWNRQKHDDHTIKSISDWIIAEGKHPALIDKAIWDEVQHLIALRSRPYKARAAGHMKHWLGGIVKCSDCGASLMAGLNATRYQCGNYNKGKCLHSHFIKTATLEQAVYEAFKRILDGSVELHYELKKSSNEPDTDDRSIILNQLSKLDDKEARIKQAYRDGIDTIDEYKENKLLLKDERAALEKQLEAFNNSSSDTDSNAAMLKNISSVYDIIKDTSKDTLTRANAIRSVVDHMVYDRENDKLEIYFFLHM

SEQ ID NO: 6514 - protein, 490 aa, Unknown
  Description of Unknown: Integrase B6515 sequence
  PTHR30461:SF3,IPR036162,PS51737,IPR011109,PTHR30461, PS00397,PF00239,G3DSA:1.10.10.2600,IPR006119,SSF53041, cd00338,SM00857,IPR025827,IPR038109,PS51736, IPR006118,PF13408,G3DSA:3.40.50.1390,PF07508,Coil
MATDIANMKVACAYIRVSTDKQEELSPDAQKRLLIDYAKKHNMSLLAENIYIDNGISGKKADKRPEFMKMISLAKSKEHPFDIILVWKFSRFARNQEESIVYKSLLKKNNVEVVSISEPLIDGPFGSLIERIIEWMDEYYSIRLSGEVLRGMTEKALRGGYQSLSSLPLGYKMNKDTGIPYIYEDEAIIVKKIYKDYIAGHSYLEISRELNALGYTTKRGAAFEGRTVEYILSNPFYYGAIRWNRQKHDDHTIKDISEWIIVIGKHPAIIDKETWDEVQHLMALRSRPYKARAAGHMKHWLGGIVKCSDCGASLMAGLNATRYQCGNYNKGKCSHSHYIKTAALEQAIYEAFERVLDGSMDLHYELKKSPNDGNTTDRDMILNQISKLGDKEARIKQAYRDGIDTIEEYKENKQLIENERKSLEAQLDSLKSSEADSSDEMLQHITSALNIIKDTSKDTLTRANAIRSVVDHCVYDKENDKLEVYFFLQK

SEQ ID NO: 6515 - protein, 490 aa, Unknown
  Description of Unknown: Integrase B6516 sequence
  IPR036162,PS51737,IPR011109,PTHR30461,PS00397, PF00239,G3DSA:1.10.10.2600,IPR006119,SSF53041,cd00338, SM00857,IPR025827,IPR038109,PS51736,IPR006118, PF13408,G3DSA:3.40.50.1390,PF07508,Coil
MNQNESLKTAFGYIRVSTHMQEEISPEAQKHELQKWAKQHNILITQWFQDNGISGKKAENRTAFQNMIALAKEKDHPDYILAWKFSRFARNQEESIVYKSLLRKNNVQVVSISEPLPDGPFAPLIERIIEWMDEYYSIRLSGEVKRGMKEKAKKGGYQSAPPLGYRREKGDTVPVIYEPEAKIYRLIKKYFIQDEYNPTTIARTLNDQGYRTRQGNRFEARVVIYILRNPFYIGKIRWNRSSHGGYYENSDGQHEPLCTSEEWDTISKRIKKYTPGSTGRRRSKTLLPHYLSGGLFRCPICGASMCYQRGVSKKLPRAYPYFCCWKYAKGIHSENVNASAPKTEEALLNSLQEFVDHGHSDITYTVEKVEEPSGNNAAQYEQLLDKLAIRKQRAKEAYLDGIDTKEEYRENRELIDAEVKSIKEKLATLETAAVITTTEEFHVDIREIILKLKDDTLSTLEKHTALASILDYMEYDKEKNEYSFYYKFEE

SEQ ID NO: 6516 - protein, 490 aa, Unknown
  Description of Unknown: Integrase B6517 sequence
  PTHR30461:SF3,IPR036162,PS51737,IPR011109,PTHR30461, PS00397,PF00239,G3DSA:1.10.10.2600,IPR006119,SSF53041, cd00338,SM00857,IPR025827,IPR038109,IPR006118, PF13408,G3DSA:3.40.50.1390,PF07508,Coil
MTTKNTESFLEIGAAYIRVSTDDQTELSPDAQVRVIQEESKKDGFFIPTEYIFIEHKGISGRKASNRPEFQKMIATAKSQKPSPFKRLYLWKFSRFARNQEESTFYKGILRKKCGVEIKSVSEPIMEGMFGRLIETIIEWFDEYYSYNLSGEVLRGMTEKALRSGYQATPCLGYQAIGEGKPFVLDPKAVPLVEYIFQSYNQGKDMTYIARNLNKQGHVTRRGNAFGRRTVHGILTNPFYKGEVCWNGIKFTGSHELIPSVASIFDSVQERINAEYHPKQRREASSTAHWLSGLLKCGTCGSSLGFCRSKDQKKRPDFFQCWKYSKGFHPDSCSVSARIAEKAVLDSLKSAIDTQSINYEYVPSADIQNQSEEALIQEALTRLETKERRIKEAYENEVDTLEEYKDNKCRLQAERKSLLTNLERLHQEQPDISNQIAHKQKLLAEIATIYDFVLDPNVSNEDKGNALRRVLKKIVFDRKTSVFTFFYYVS

SEQ ID NO: 6517 - protein, 490 aa, Unknown
  Description of Unknown: Integrase B6518 sequence
  PTHR30461:SF3,SM00857,G3DSA:1.10.10.2600,IPR036162,PF13408, PS51737,G3DSA:3.40.50.1390,IPR025827,IPR006119,IPR038109, PF07508,IPR011109,SSF53041,PF00239,PTHR30461, PS51736,Coil,cd00338
MKAALYTRVSTDEQAEHGFSLEAQKKRLIEYCNKNNIEIYKLYSDEGISGHSIIKRKALQEMLQDAKEHKFNYVIAYKTDRISRNLLDLLTIKNQLDEADVELLLSDEAIDTKDDAGMTMFSIMGAFAELERKKITERMMAGKRQKLMNEHIKLKNGRVPYGYLYDDENKRYVIDESRRSVVELIYKLASQGWSYNKITRHIAEETAANSSDSKKKWYISDIRAILTNPIYKGYSGISYYYNFNDRAKKPKNSAILYKATNVEPYFTEEYWDTLYSQLEKKTQYFKRKHPIDSYIFSDVLFCATCGLKIGTRQHHANYLYYVCNSKHKMYDNDHICDYAININKFNNWFIEFIRGIDENNIKLSVSKPKDLDRELQAVRSQISIKEKNREVLLDKLMNGVIDDTEYRLASNMVIASLNSLKSQEKELSDKMDSLKEKEQTKRYNRLKIKALKVLVNDWDNLTDQAKKTLINSSINKIMITKDGIQEIEFN

SEQ ID NO: 6518 - protein, 490 aa, Unknown
  Description of Unknown: Integrase B6519 sequence
  PTHR30461:SF3,IPR036162,PS51737,IPR011109,PTHR30461, PS00397,PF00239,G3DSA:1.10.10.2600,IPR006119,SSF53041, cd00338,SM00857,IPR025827,IPR038109,IPR006118, PF13408,G3DSA:3.40.50.1390,PF07508,Coil
MTTKNTESFLEIGAAYIRVSTDDQTELSPDAQVRVIQEEAKKDGFFIPTEYIFIEHKGISGRKASNRPEFQKMIATAKSQKPSPFKRLYLWKFSRFARNQEESTFYKGILRKKCGVEIKSVSEPIMEGMFGRLIETIIEWFDEYYSYNLSGEVLRGMTEKALRSGYQATPCLGYQAIGEGKPFVLDPKAVPLVEYIFQSYNQGKDMTYIARNLNKQGHVTRRGNAFGRRTVHGILTNPFYKGEVCWNGIKFTGSHELIPSVASIFDSVQERINAEYHPKQRREASSTAHWLSGLLKCGTCGSSLGFCRSKDQKKRPDFFQCWKYSKGFHPDSCSVSARIAEKAVLDSLKSAIDTQSINYEYVPSADIQNQSEEALIQEALTRLETKERRIKEAYENEVDTLEEYKDNKCRLQAERKSLLTNLERLHQEQPDISNQIAHKQKLLAEIATIYDFVLDPNVSNEDKGNALRRVLKKIVFDRKTSVFTFFYYVS

SEQ ID NO: 6519 - protein, 490 aa, Unknown
  Description of Unknown: Integrase B6520 sequence
  PTHR30461:SF3,IPR036162,PS51737,IPR011109,PTHR30461, PS00397,PF00239,G3DSA:1.10.10.2600,IPR006119,SSF53041, cd00338,SM00857,IPR025827,IPR038109,IPR006118, PF13408,G3DSA:3.40.50.1390,PF07508,Coil
MSDKPTPKNLEIGAAYIRVSTDDQAELSPDAQIRVIMETAKADGYIIPKEFIFEEKKGISGRKADNRPEFQRMIAVAKSQKPSPFKRLYLWKFSRFARNQEESTFYKGILRKKCGVEIKSVSEPIADGMFGRLIETIIEWFDEYYSYNLSGEVLRGMTEKALRSGYQAVPCLGYKAVGGGRPFVLDPDAVPIVEYIFQAYSHGKDMLTIARDLNLQGYKTNRGCPFELRGVQRILVNRFYVGDVTWNGITFHGTHETIPAVTSVFESVQARIQSEYQPRHRKQASATAHWLSGLLKCGVCGGSLGFNRTKDEKRRPSFFQCWKYSKGVHPDSCSVSVSIAERAVLDSLRSALESHDVTYEYIPPENPVTLTEEALLKEALSRLDVKERRIKEAYESEIDTLEEYKNNKVRLKSERAEILSQLEKLQQGQPSAPDPQQSKEKLLAQISTVYDLILDPDVSYVEKNNALRRILKKIVFDRKTGTFTFFYYTL

SEQ ID NO: 6520 - protein, 490 aa, Unknown
  Description of Unknown: Integrase B6521 sequence
  SM00857,G3DSA:1.10.10.2600,IPR036162,PF13408,PS51737, G3DSA:3.40.50.1390,IPR025827,IPR006119,IPR038109,PF07508, IPR011109,SSF53041,PF00239,PTHR30461,PS51736, Coil,cd00338
MAYCMYLRKSRADKDYENSSTEAILNRHEKALLELAQNNNYKISQIFREVVSGETLSQRPEMQKLLAQVENNMYDGVLVMEVERLARGNSVDQGIIAQAFKYSNTLIITPTKVYDPQNEFDEEYFEFGLFMSRREYKTINRRLNAGRLASCKEGKFVGSITPYGYSKEKLKNQKGYKLVPDLEESKVLKLIFELYTNSMGIRNICKYLDSLGIKPRNSQNWSTSTIRDILKNPVYTGKILWNKTYSTKTTKDGIVKSKRHRNKDNFYTFDGIHSPLISDDIFQKAQNILLQNSHTPVNNLLLKNPFAGILYCNLCGKAIVRRLVNNKYQYLMCNNPNCQNNSIDLKAIEKYILNSIQKYFNYTVDFSNYERKDNSTELFYIDRELKKLTLQLNNIFDLLEQKIYNRETFLERKQVLEENINILNSQKEKILSNTPQLNSIDSPITILELYNRLENIKSKNQLLKNIFSKIYYSKIDNNIEITIYSKIPIK

SEQ ID NO: 6521 - protein, 490 aa, Unknown
  Description of Unknown: Integrase B6522 sequence
  cd03768,PTHR30461:SF3,SM00857,G3DSA:1.10.10.2600,IPR036162, PS51737,G3DSA:3.40.50.1390,IPR006119,IPR038109,PF07508, IPR011109,SSF53041,PTHR30461,PS51736,Coil, PF00239
MKKIAIYIRKSVKGDENSISLEAQTEVIKHYFKGENKFTVYKDDGFSGGNTNRPAFQKLMADAMEGKFDTVACYKLDRIARNTLDFLTTFNTLKEYNIDLICVEDKYDPSTPAGRLMMTLLASLAEMERENIKQRVSDSMLNLAKQGRWTGGTAPFGYRVISKDGGKYLELEDSKNIKYIFNEFINGKGIIKLGNEFNCDKKKISRMLHNITYLQSSKDANIYLKQVLGYEVIGQVDGCGYLPYGKYKILNGKKVRNYDGLKVATVSKHEAVIDLDTFIKAQDRLKTFAGKKAPRISTKTFLAQMVQCGICGANMLVTLGQKRKDGTRKLYFSCSNKCGNKFKDVSELENDVLTTLKDVNFFDEIRKNTNIMNKDNSKIKKSMLKELEEKKKILDGLMDKLALVDSNLANVIIEKMNSVNVDINDLQNKINLLEKEEIASSYNKEDFKLKEENRKHFIEDFENMTMEEKQNSIRGVINKVVWDGKNIIIS

SEQ ID NO: 6522 - protein, 490 aa, Unknown
  Description of Unknown: Integrase B6523 sequence
  PTHR30461:SF3,IPR036162,PS51737,IPR011109,PTHR30461, PS00397,PF00239,G3DSA:1.10.10.2600,IPR006119,SSF53041, cd00338,SM00857,IPR025827,IPR038109,IPR006118, PF13408,G3DSA:3.40.50.1390,PF07508,Coil
MSDKPTPKSLEIGAAYIRVSTDDQAELSPDAQIRVIMETAKADGYIIPKEFIFEEKKGISGRKADNRPEFQRMIAVAKSQKPSPFKRLYLWKFSRFARNQEESTFYKGILRKKCGVEIKSVSEPIADGMFGRLIETIIEWFDEYYSYNLSGEVLRGMTEKALRSGYQAVPCLGYKAVGGGRPFVLDPDAVPIVEYIFQAYSQGKDMLTIARDLNLQGYKTNRGCPFELRGVQRILVNRFYVGDVTWNGITFHGTHETIPAVTSVFESVQARIQSEYQPRHRKQASATAHWLSGLLKCGVCGGSLGFNRTKDEKRRPSFFQCWKYSKGVHPDSCSVSVSIAERAVLDSLRSALESHDVTYEYIPPENPVTLTEEALLKEALSRLDVKERRIKEAYESEIDTLEEYKNNKVRLKSERAEILSQLEKLQQGQPSAPNPQQSKEKLLAQISTVYDLILDPDVSYVEKSNALRRILKKIVFDRKTGTFTFFYYTL

SEQ ID NO: 6523 - protein, 490 aa, Unknown
  Description of Unknown: Integrase B6524 sequence
  PTHR30461:SF3,IPR036162,PS51737,IPR011109,PTHR30461, PS00397,PF00239,G3DSA:1.10.10.2600,IPR006119,SSF53041, cd00338,SM00857,IPR025827,IPR038109,IPR006118, PF13408,G3DSA:3.40.50.1390,PF07508,Coil
MTTKNTESFLEIGAAYIRVSTDDQTELSPDAQVRVIQEESKKDGFFIPTEYIFIEHKGISGRKASNRPEFQKMIATAKSQKPSPFKRLYLWKFSRFARNQEESTFYKGILRKKCGVEIKSVSEPIMEGMFGRLIETIIEWFDEYYSYNLSGEVLRGMTEKALRSGYQATPCLGYQAIGEGKPFVLDPKAVPLVEYIFQSYNQGKDMTYIARNLNKQGHVTRRGNAFGRRTVHGILTNPFYKGEVCWNGIKFTGSHELIPSVASIFDSVQERINAEYHPKQRREASSTAHWLSGLLKCGTCGSSLGFCRSKDQKKRPDFFQCWKYSKGFHPDSCSVSARIAEKAVLDSLKSAIDTQSINYEYVPSADIQNQSEEALILEALTRLETKERRIKEAYENEVDTLEEYKDNKCRLQAERKSLLTSLERLHQEQPDFSNQIAHKQKLLAEIATIYDFVLDPNVSNEDKGNALRRVLKKIVFDRKTSVFTFFYYVS

SEQ ID NO: 6524 - protein, 490 aa, Unknown
  Description of Unknown: Integrase B6525 sequence
  PTHR30461:SF3,IPR036162,PS51737,IPR011109,PTHR30461, PF00239,G3DSA:1.10.10.2600,IPR006119,SSF53041,cd00338, SM00857,IPR025827,IPR038109,PS51736,mobidb-lite, PF13408,G3DSA:3.40.50.1390,PF07508,Coil
MEKAVAYIRVSTKSDFQLHSYEYQLEYWKNKIESEDNKILVSVYQDYGISGRSIHKRPQLLKLLEDAKKHEFSIVYTKSVSRFARNTTELLEMVRTLREENVKVIFEKENIDTFDPSAELYLTIAASVAENDLKIYSENQRWSYKERFKKGYIWANKMLGYRMNNETNTLEVVEDEAKIVKKIFELYISGYGITKICKILQSENLINTKGTMTWSKSAIRYIISNEKYKGCSLNQKSVYVNGIKQLNKGYEKQYYIEDSHKAIISKEVFDKVQKIIYERASKKQLGRGIIPPYPFTGKIYCGICGHKYHHKFNNTNKSWRVAIWSCKNKQDNGKTVCDSTDIKETVLKEKFIEAYNEFITTNRFTSEEQVLQDKVKILIEEETELKKLKINRMIENIDYDKEIKEIHQEIEEINNALLKYSLKNITKKDLQTISIFDEDKVDKFINKVIITRYKVKFIFINGIEIEKEYSNGQSGNKKGWNLNKQRKEQN

SEQ ID NO: 6525 - protein, 490 aa, Unknown
  Description of Unknown: Integrase B6526 sequence
  PTHR30461:SF3,cd00338,SM00857,G3DSA:1.10.10.2600,IPR036162, PF13408,IPR025827,G3DSA:3.40.50.1390,PS51737,IPR006119, IPR038109,PF07508,IPR011109,SSF53041,PTHR30461, PS51736,Coil,PF00239
MNKRVAGYARYSTDNQTENSIEFQMRCIEEYCQKNNLNLVLRYHDDAISGTTMERPAFKQLCRDASQHLFDAVVIYDITRGSRDVSDWFAFRKAMDLLGVEIISTQDKLGDIMNPNDFLVELLGIGIGQHHVLQTRQKTIEGTTQKALEGKFLGGIPPYGYDIVDQEYVINETEAKNVQMIFEMYADGYSYADIIEKLHGALGKRGKPFGKTSLYSILRNDRYTGLYTWNRRNVKKLGKWAGGTPNSNIVQLENKIPRIISRELFDAVQMRLSKNNHRTSSDPVAPKSAKRTYLLSGYIVCEKCGCNYVGHTTHSHGYKNAYYYCGTKYRTRNCDAPNLPAERIEKWVIEQINVFLLNFSDAAADRILEEMKKRMNNCDSEKNRLREIELKLKNATDAILSGITYPELMEEIKSLRQERAELEATIARASSEKVPVTKKDIMNAFSERLDNENVDYRQLMRKYVISIKVNERQIKLSLGVVHFASSGNWI

SEQ ID NO: 6526 - protein, 490 aa, Unknown
  Description of Unknown: Integrase B6527 sequence
  PTHR30461:SF3,SM00857,G3DSA:1.10.10.2600,IPR036162,PF13408, PS51737,G3DSA:3.40.50.1390,IPR025827,IPR006119,IPR038109, PF07508,IPR011109,SSF53041,PF00239,PTHR30461, PS51736,Coil,cd00338
MKAVIYARYSSDNQREESIEGQLRECKEYAERNGILVLQSYIDRALSAKTDNRPEFQRMIRDSAKGLFDTVLVWKLDRFARNRYDSAHYKSQLRKNGVKVVSATESIADGPEGIILESMLEGMAEYYSAELAQKVNRGMRENALKARSNGGTIPLGYRLDEEHRLKIDPLTAPVVREVFQRYADGENLRTIIRSLNERGIRTSRNYPFRHSSFNTMLKNRKYIGEYHYKDVVIPDAVPPIIPKELFERVQERMKKNQHAPARAKAEEEYLLTTKLFCGHCGRLMIGESGKGRNGTIHRYYKCAGAKRRLGCHKKAAKKDWIERVAVQYTIQRVFQDDLIAQIADELVALQGTEDSALPLLRRQLADTERGIENMLNAIQQGIFTSSTRQRLEELENLRAELKSSILQAELERPQYSREDIIQWISRFKGGDPNDKAYQRQIIDIFLNSIYVFDDKLVFTYNYKNGSQTVSLADIFAAFGSDSRAGASPYV

SEQ ID NO: 6527 - protein, 490 aa, Unknown
  Description of Unknown: Integrase B6528 sequence
  SM00857,IPR006118,G3DSA:1.10.10.2600,IPR036162,PF13408, IPR025827,G3DSA:3.40.50.1390,PS00397,PS51737,IPR006119, IPR038109,PF07508,SSF53041,IPR011109,PTHR30461, Coil,cd00338,PF00239
MTIKSTESFLEIGAAYIRVSTDDQTELSPDAQVRVIQEEAKKDGFFIPTEYIFIEHKGISGRKASNRPEFQKMIATAKSQKPSPFKRLYLWKFSRFARNQEESTFYKGILRKKCGVEIKSVSEPIMDGMFGRLIETIIEWFDEYYSYNLSGEVLRGMTEKALRSGYQATPCLGYQAIGEGKPFVLDPKAVPLVEYIFQSYNQGKDMTYIARNLNKQGHVTRRGNAFGRRTVHGILTNPFYKGEVCWNGIKFTGSHELIPSVASIFDSVQERINAEYHPKQRREASSTAHWLSGLLKCGTCGSSLGFCRSKDQKKRPDFFQCWRYSKGFHPYSCSVSARIAEKAVLDSLKSAIDTQSINYEYVPSADIQNQSEEALIQEALTRLETKERRIKEAYENEVDTLEEYKDNKCRLQAERKSLLTSLERLHQEQPDFSNQIAHKQKLLAEIATIYDFVLDPNVSNEDKGNALRRVLKKIVFDRKTSVFTFFYYVS

SEQ ID NO: 6528 - protein, 490 aa, Unknown
  Description of Unknown: Integrase B6529 sequence
  SM00857,G3DSA:1.10.10.2600,IPR036162,PF13408,PS51737, G3DSA:3.40.50.1390,IPR025827,IPR006119,IPR038109,PF07508, SSF53041,IPR011109,PF00239,PTHR30461,PS51736, Coil,cd00338
MAYCMYLRKSRADKDYENLSTETILNRHEKTLMELAQKHNYDISKIFREVVSGETLSQRPQMQILLNEVENNMYDGVLVMEVERLARGNSVDQGIIAQAFKYSNTLIITPTKTYDPQNEFDEEYFEFGLFMSRREYKTINRRLNAGRLASCKEGKFVGSVTPYGYTKEKLKNQKGYKLVPDLEESKVLKLIFDLYTNSMGIRNICKHLDSLGIKPRNSENWSTSTIRDILKNPVYIGKILWQKTYSTKTTKDGFVKSKRYKNKEDFYTFNGIHSPLISEDTFQKAQNILLQNSHPPVNNTSLKNPFAGILYCNLCGKAIVRRFVNNKYQYLMCNNPNCQNTATELKNIENCILNIIENHFNYTTSPTVFEKEDNTNELFYINKEIKKLKLQFSNIFDLLEQKIYSKETFLERKQMLEKNIEILTLQKGKFENNASQINPINTPVTILELYNKLDDIKNKNQLLKNIFSKIYYSKIDNNIKITIYSKLPIK

SEQ ID NO: 6529 - protein, 490 aa, Unknown
  Description of Unknown: Integrase B6530 sequence
  PTHR30461:SF3,IPR036162,PS51737,IPR011109,PTHR30461, PS00397,PF00239,G3DSA:1.10.10.2600,IPR006119,SSF53041, cd00338,SM00857,IPR025827,IPR038109,PS51736, IPR006118,PF13408,G3DSA:3.40.50.1390,PF07508,Coil
MAKDILNMKSACAYIRVSTDKQEELSPDAQKRLLIDFAKKNNMSLLAENIYIDNGISGKKADKRPEFMKMIGMAKSKEHPFDVILVWKFSRFARNQEESIVYKSLLKKNRVDVVSVSEPLIDGPFGTLIERIIEWMDEYYSIRLSGEVLRGMTEKALRGGYQSSLPLGYRMNKDTGIPYIYEEEAVIVRKIYNDYIAGHSYLEIARELNALGYKTKRGAAFEGRTVEYILSNPFYYGAVRWNRQNHDNHTIKDISEWIIVMGKHPAIINKETWDLVQHLMALRSKPYKARAAGHMKHWLGGIVKCSDCGASLMAGLNATRYQCGNYNKGKCLHSHFIKTAALEKAVYESLERVLNGSIELHYELKKSSNEPEEDSQSILLGQLSKLEDKEARIKQAYRDGIDTIDEYKENKQLLAEERESLSAKLQSLKDTLSDKDDTAAMLNNISNVLDIIKDASKDTLTRANAIRSIVDHFVYDKEKDKLEVYFFLQK

SEQ ID NO: 6530 - protein, 490 aa, Unknown
  Description of Unknown: Integrase B6531 sequence
  SM00857,IPR006118,G3DSA:1.10.10.2600,IPR036162,PF13408, PS51737,G3DSA:3.40.50.1390,Coil,IPR025827,IPR006119, IPR038109,PF07508,SSF53041,IPR011109,PTHR30461, PS00397,cd00338,PF00239
MTIKSTESFLEIGAAYIRVSTDDQTELSPDAQVRVIQEEAKKDGFFIPTEYIFIEHKGISGRKASNRPEFQKMIATAKSQKPSPFKRLYLWKFSRFARNQEESTFYKGILRKKCGVEIKSVSEPIMEGMFGRLIETIIEWFDEYYSYNLSGEVLRGMTEKALRSGYQATPCLGYQAIGEGKPFVLDPKAVPLVEYIFQSYNQGKDMTYIARNLNKQGHVTRRGNAFGRRTVHGILTNPFYKGEVCWNGIKFTGSHELIPSVASIFDSVQERINAEYHPKQRREASSTAHWLSGLLKCGTCGSSLGFCRSKDQKKRPDFFQCWRYSKGFHPDSCSVSARIAEKAVLDSLKSAIDTQSINYEYVPSADIQNQSEEALIQEALTRLETKERRIKEAYENEVDTLEEYKDNKCRLQAERKSLLTSLERLHQEQPDFSNQIAHKQKLLAEIATIYDFVLDPNVSNEDKGNALRRVLKKIVFDRKTSVFTFFYYVS

SEQ ID NO: 6531 - protein, 490 aa, Unknown
  Description of Unknown: Integrase B6532 sequence
  PTHR30461:SF3,cd00338,SM00857,IPR006118,G3DSA:1.10.10.2600, IPR036162,PS51737,G3DSA:3.40.50.1390,IPR006119,IPR038109, SSF53041,IPR011109,PTHR30461,PS00397,PS51736, Coil,PF00239
MIRAAIYIRVSTEEQARHGFSLAEQEHDLTDYADKHHYLVVGVYADEGSSARKAITRRKQLQRLLDDVRADRVDIILLKCLDRWFRNVADFYKVQAILDEHHVQWVCTQEDYNTTTTNGRLMLNLKLSIAQNESDQTSDRIKYVNQGILRRKREIGGKAPFGYHFVDLEDGGKRIAVVEEQRAAVEFIFASHLSGHSPMRIAHDVFAQYGIPITCRRVRCVLRNETYTGRRYGIDNFCPAIISPDTFRQAQERITGNKFWPKNRDFLYLFRGKIICPGCGKILLGHHGSRKRNGYVSHYCNYWCSKHFVSGAPDVAAGGCVYGGAVGERPIERYLLDHLAELLESYQLDISKRHSSSRLSPDQRIQTVTAKLTRLKDLYVDGFIDKPTYQTDYAKLQQEVSTALAEKQATRTPPEAVQNLILHANDIRKIYATMDRQHKYDLWQSTIKSIKIGEPKPSPGHAYKNLSSSFINFFAHLSIPLSDPCVMALS

SEQ ID NO: 6532 - protein, 490 aa, Unknown
  Description of Unknown: Integrase B6533 sequence
  PTHR30461:SF3,SM00857,G3DSA:1.10.10.2600,IPR036162,PF13408, IPR025827,G3DSA:3.40.50.1390,PS51737,IPR006119,IPR038109, PF07508,SSF53041,IPR011109,PF00239,PTHR30461, PS51736,Coil,cd00338
MKAALYTRVSTDEQAEHGFSLEAQKKRLIEYCNKNNIEIYKLYSDEGISGHSIIKRKALQEMLQDAKEHKFNYVIAYKTDRISRNLLDLLTIKNQLDEADVELLLSDEAIDTKDDAGMTMFSIMGAFAELERKKITERMMSGKRQKLMNEHIKLKNGRVPYGYLYDDENKKYIIDESRRSIVELIYKLASQGWSYNKITRHIAEETAANSSDSKKKWYISDIRAILTNPIYKGYSGISYYYNFNDRAKKPKNSAILYKATNVEPYFTEEYWDTLYSQLEKKTQYFKRKHPIDSYIFSDVLFCATCGLKIGTRQHHANYLYYVCNSKHKMYDSDHICDYAININKFNNWFIEFIRGIDENNIKLSVSKPKDLDKELQAVRSQISLKEKNREVLLDKLMNGVIDDTEYRLASNMVIASLNSLKSQEKELSDKMDSLKEKEQTKRYNRLKIKALKVLVNDWDNLTDQAKKTLINSSINKIMITKDGIQEIEFN

SEQ ID NO: 6533 - protein, 490 aa, Unknown
  Description of Unknown: Integrase B6534 sequence
  IPR036162,PS51737,IPR011109,PTHR30461,PS00397, PF00239,G3DSA:1.10.10.2600,IPR006119,SSF53041,SM00857, IPR025827,IPR038109,PS51736,cd03768,IPR006118, PF13408,G3DSA:3.40.50.1390,PF07508,Coil
MNVLDNVVDLYVRVSTTEQAEEGFSVGAQEEKLRAYCKAYNYQINAVHVDPGFSGATMDRPALKQIIHDVENNHCKKVIVWKLDRLSRSQKDTLILLEDVFAAHDCHFVSLMESFDTSTPIGRCMVGILAAFAQMERENIKARTMMGRQAKVKQGHYSGNKPPIGYVFNTASDGSVISNDLIVDPYNAKIVQDIFRWYLEGYSLNGIAKRLADAGTGSYAWQHSTSIRRILSNPVYIGKVKLNNELYEGMHEPLISESDFNEVSCMLARQKELHKRPAASYRTKNGCRSANLLSGLLYCGDCGARMYARKVCKDSPIRRYMCYSVAKTVKSMIRSDCCTNREHPYTVEQLDEIVLNEIKKLALDKAQFSRIASKSDTVHEDAKIYNERLEELNKQIKRLMNLYQTGIIDLADISDRLQALNDEKLGVQSRLDELKEADNSDAKLKAWEQLESFPAILDAGDVQQIHRIVNALIDKIVVLNRDVTIYWSFS

SEQ ID NO: 6534 - protein, 490 aa, Unknown
  Description of Unknown: Integrase B6535 sequence
  PTHR30461:SF3,IPR036162,PS51737,IPR011109,PTHR30461, PS00397,PF00239,G3DSA:1.10.10.2600,IPR006119,SSF53041, cd00338,SM00857,IPR025827,IPR038109,IPR006118, PF13408,G3DSA:3.40.50.1390,PF07508,Coil
MTTKNTESFLEIGAAYIRVSTDDQTELSPDAQVRVIQEEAKKDGFFIPAEYIFIEHKGISGRKASNRPEFQKMIATAKSQKPSPFKRLYLWKFSRFARNQEESTFYKGILRKKCGVEIKSVSEPIMEGMFGRLIETIIEWFDEYYSYNLSGEVLRGMTEKALRSGYQATPCLGYQAIGEGKPFVLDPKAVPLVEYIFQSYVQGKDMTYIARNLNKQGHVTRRGNAFGRRTVHGILTNPFYKGEVCWNGIKFTGSHELIPSVASIFDSVQERINAEYHPKQRREASSTAHWLSGLLKCGTCGSSLGFCRSKDQKKRPDFFQCWRYSKGFHPDSCSVSARIAEKAVLDSLKSAIDTQSINYEYVPSADIQNQSEEALILEALTRLETKEQRIKEAYENEVDTLEEYKDNKCRLQAERKSLLTSLERLHQEQPDFSNQIAHKQKLLAEIATIYDFVLDPNVSNEDKGNALRRVLKKIVFDRKTSVFTFFYYVS

SEQ ID NO: 6535 - protein, 490 aa, Unknown
  Description of Unknown: Integrase B6536 sequence
  SM00857,IPR006118,G3DSA:1.10.10.2600,IPR036162,PF13408, PS51737,G3DSA:3.40.50.1390,IPR025827,PS00397,IPR006119, IPR038109,PF07508,IPR011109,SSF53041,PTHR30461, Coil,cd00338,PF00239
MTTKNTESFLEIGAAYIRVSTDDQTELSPDAQVRVIQEEAKKDGFFIPTEYIFIEHKGISGRKASNRPEFQKMIATAKSQKPSPFKRLYLWKFSRFARNQEESTFYKGILRKKCGVEIKSVSEPIMEGMFGRLIETIIEWFDEYYSYNLSGEVLRGMTEKALRSGYQATPCLGYQAIGEGKPFVLDPKAVPLVEYIFQSYNQGKDMTYIARNLNKQGHVTRRGNAFGRRTVHGILTNPFYKGEVCWNGIKFTGSHELISSVASIFDSVQERINAEYHPKQRREASSTAHWLSGLLKCGTCGSSLGFCRSKDQKKRPDFFQCWKYSKGFHPDSCSVSARIAEKAVLDSLKSAIDTQSINYEYVPSADIQNQSEEALIQEALTRLETKERRIKEAYENEVDTLEEYKDNKCRLQAERKSLLTNLERLHQEQPDISNQIAHKQKLLAEIATIYDFVLDPNVSNEDKGNALRRVLKKIVFDRKTSVFTFFYYVS

SEQ ID NO: 6536 - protein, 490 aa, Unknown
  Description of Unknown: Integrase B6537 sequence
  cd03768,PTHR30461:SF3,SM00857,G3DSA:1.10.10.2600,IPR036162, PS51737,G3DSA:3.40.50.1390,IPR006119,IPR038109,PF07508, IPR011109,SSF53041,PTHR30461,PS51736,Coil, PF00239
MKSIAIYIRKSVKGDDNSISLEAQTEVIKHYFKNENKFTIYKDDGFSGGNTNRPAFQKLMHDATQNKFEAVACYKLDRIARNTLDFLTTFNTLKEYGIDLICVEDKYDPSTPAGRLMMTLLASLAEMERENIKQRVTDSMLNLARSGRWTGGTPPFGYKVITIDGGKYLELEDKNNILYIFDEFINGKGILKLSNEFNCDKKKISRILHNITYLKSSTEANTYLKQTLKYEIVGTPNGCGYLPYGKNKVINGKKIKNVEGLKIAAVSKHKAIIELETFIKAQEKLKTFEGRKAPRISNKSFLAQMVQCTCGSNMLIVLGHKKKDGTRKLYFSCPSKCGNTFGDVKEIEEDTLLTLKDVNFFEKINKNKPTINNKDSSRIKASLLKELENKKKLLDGLVQKLALVDSDLANILIDKMETLNENIKELQSKIDLLEKEEISLSYNKEDLNLKEKNRKHFIKEFENMNMQEKQTSIRKVINKITWTGENIIIS

SEQ ID NO: 6537 - protein, 490 aa, Unknown
  Description of Unknown: Integrase B6538 sequence
  PTHR30461:SF3,cd00338,SM00857,G3DSA:1.10.10.2600,IPR036162, PF13408,PS51737,G3DSA:3.40.50.1390,IPR025827,IPR006119, IPR038109,PF07508,IPR011109,SSF53041,PTHR30461, PS51736,Coil,PF00239
MKAALYTRVSTDEQAEHGFSLEAQKKRLIEYCNKNNIEIYKLYSDEGISGHSIVKRKALQEMLQDAKEHKFNYVIAYKTDRISRNLLDLLTIKNQLDEADVELLLSDEAIDTKDDAGMTMFSIMGAFAELERKKITERMMSGKRQKLMNEHIKLKNGRVPYGYLYDDENKKYIIDESRRSIVELIYKLASQGWSYNKITRHIAEETAANSSDSKKKWYISDIRAILTNPMYKGYSGISYYYNFNDRAKKPKNSAILYKATNVEPYFTEEYWDTLYSQLEKKTQYFKRKHPIDSYIFSDVLFCATCGLKIGTRQHHANYLYYVCNSKHKMYDNDHICDYAININKFNNWFIEFIRGIDENNIKLSVSKPKDLDKELQAVRSQISLKEKNREVLLDKLMNGVIDDTEYRLASNMVIASLNSLKSQEKELSDKMDSLKEKEQTKRYNRLKIKALKVLVNDWDNLTDQAKKTLINSSINKIMITKDGIQEIEFN

SEQ ID NO: 6538 - protein, 490 aa, Unknown
  Description of Unknown: Integrase B6539 sequence
  cd00338,SM00857,IPR006118,G3DSA:1.10.10.2600,IPR036162, PF13408,IPR025827,G3DSA:3.40.50.1390,PS51737,IPR006119, IPR038109,PF07508,IPR011109,SSF53041,PTHR30461, PS00397,Coil,PF00239
MTIKNTESFLEIGAAYIRVSTDDQTELSPDAQVRVIQEEAKKDGFFIPAEYIFIEHKGISGRKASNRPEFQKMIATAKSQKPSPFKRLYLWKFSRFARNQEESTFYKGILRKKCGVEIKSVSEPIMEGMFGRLIETIIEWFDEYYSYNLSGEVLRGMTEKALRSGYQATPCLGYQAVGEGKPFILDPKAAPIVEYIFQTYSQGKDMTYIARALNKQGHITRRGRPFERRTIYRILTNQFYAGQVSWNGIQFTGSHELIPSVTAVFDTVQERIKAEYRPKQRREASSTAHWLSGLLKCGTCGASLGYNRTNNSKRHPATFNCWKYGKGFHPDSCSVTVRIAEQAVLDSLKTAIDTQSIDYEYVSPIDINQKNEEALIKEALSRLETKERRIKEAYENEIDTLEEYKDNKQRLQAERESLLTDMERLHQEHPNASDQIAHKQKLLAEIATIYDFVSNPNVSNEDKGNALRRVLKKIVFDRKNGVFTFFYYVS

SEQ ID NO: 6539 - protein, 490 aa, Unknown
  Description of Unknown: Integrase B6540 sequence
  PTHR30461:SF3,IPR036162,PS51737,IPR011109,PTHR30461, PS00397,PF00239,G3DSA:1.10.10.2600,IPR006119,SSF53041, SM00857,IPR025827,IPR038109,PS51736,cd03768, IPR006118,PF13408,G3DSA:3.40.50.1390,PF07508
MERRVACYIRVSTQEQATHGFSVGEQETRLRKYCEAHEWTIAGVYEDPGFSGAYLDRPGIQKLIRDVDLGIFDTVLVWKLDRLSRSQKNTMYMIEDVFLKHNINFISMNENFDTSTPFGRAMVGILSVFAQLDRDQITQRMTMGRIGRAKAGYYSGGSQPPIGYTYTRADGGEKKTLEVDEYEAMQVRMVYDLFLNGLDGKDMTFSDITRYMAAHYSNRYGGWQQPCTVSRMLSNPVYIGKVKFSGEFYNGTHEPIISEETFKKAQEKYQRHIQNFSKSIQNFKGCYLLTGLIHCGACGSRYFVTSTKNTNKTASIKPYYHSYACYGRKPVNVNMMKNGRCKNKIYKMEVLDAYVLDEIQKLKENPELIGDLRTGPKEDKTAAIESRIRELDKQMGKLVDLYQLGTIAFDEIRKRTDAIRAERDKLKGELEHEKRPDGVISETEFRDRLDAFDADIFSDLDIERKQAIVRSLINKIVIYPDLIEIHWAFH

SEQ ID NO: 6540 - protein, 490 aa, Unknown
  Description of Unknown: Integrase B6541 sequence
  PTHR30461:SF3,IPR036162,PS51737,IPR011109,PTHR30461, PS00397,PF00239,G3DSA:1.10.10.2600,IPR006119,SSF53041, cd00338,SM00857,IPR025827,IPR038109,PS51736, IPR006118,PF13408,G3DSA:3.40.50.1390,PF07508,Coil
MAKDILNMKSACAYIRVSTDKQEELSPDAQKRLLIDFAKKNNMSLLASNIYLDNGISGKKADKRPEFMKMIGMAKSKEHPFDVILVWKFSRFARNQEESIVYKSLLKKNHVEVVSISEPLIDGPFGSLIERIIEWMDEYYSIRLSGEVLRGMTEKALRGGYQSSLPLGYRMNKDTGIPYIYEDEAIIVKKIYKDYIAGHSYLEIARELNALGYKTKRGAAFEGRTVEYILSNPFYYGAVRWNRQKHDDHTIKSISDWIIAEGKHPALIDKAIWDEVQHLIALRSRPYKARAAGHMKHWLGGIVKCSDCGASLMAGLNATRYQCGNYNKGKCLHSHFIKTAALEQAVYEAFKRILDGSVELHYELKKSSNEPDTDDRSIILNQLSKLDDKEARIKQAYRDGIDTIDEYKENKLLLKDERAALEKQLEAFNNTSSDTDSNAAMLKNISSVYDIIKDTSKDTLTRANAIRSIVDHMVYDRENDKLEIYFFLHM

SEQ ID NO: 6541 - protein, 490 aa, Unknown
  Description of Unknown: Integrase B6542 sequence
  PTHR30461:SF3,SM00857,G3DSA:1.10.10.2600,IPR036162,PF13408, PS51737,G3DSA:3.40.50.1390,IPR025827,IPR006119,IPR038109, PF07508,IPR011109,SSF53041,PF00239,PTHR30461, PS51736,Coil,cd00338
MKAALYTRVSTDEQAEHGFSLEAQKKRLIEYCNKNNIEIYKLYSDEGISGHSIIKRKALQEMLQDAKEHKFNYVIAYKTDRISRNLLDLLTIKNQLDEADVELLLSDEAIDTKDDAGMTMFSIMGAFAELERKKITERMMAGKRQKLMNEHIKLKNGRVPYGYLYDDENKKYIIDESRRSIVELIYKLASQGWSYNKITRHIAVETAANSSDSKKKWYISDIRAILTNPIYKGYSGISYYYNFNDRAKKPKNSAILYKATNVEPYFTEEYWDTLYSQLEKKTQYFKRKHPIDSYIFSDVLFCATCGLKIGTRQHHANYLYYVCNSKHKMYDSDHICDYAININKFNNWFIEFIRGIDENNIKLSVSKPKDLDKELQAVRSQISLKEKNREVLLDKLMNGVIDDTEYRLASNMVIASLNSLKSQEKELSDKMDSLKEKEQTKRYNRLKIKALKVLVNDWDNLTDQAKKTLINSSINKIMITKDGIQEIEFN

SEQ ID NO: 6542 - protein, 490 aa, Unknown
  Description of Unknown: Integrase B6543 sequence
  cd03768,PTHR30461:SF3,SM00857,G3DSA:1.10.10.2600,IPR036162, PS51737,G3DSA:3.40.50.1390,IPR006119,IPR038109,PF07508, SSF53041,IPR011109,PTHR30461,PS51736,Coil, PF00239
MKNIAIYIRKSVKGDDNSISLEAQTEVIKHYFKNENKFTIYKDDGFSGGNTNRPAFQKLMHDATQNKFEAVACYKLDRIARNTLDFLTTFNTLKEYGIDLICVEDKYDPSTPAGRLMMTLLASLAEMERENIKQRVTDSMLNLARSGRWTGGTPPFGYKVITIDGGKYLELEDKNNILYIFDEFINGKGILKLSNEFNCDKKKISRILHNITYLKSSTEANTYLKQTLKYEIVGTPNGCGYLPYGKNKVINGKKIKNVEGLKIAAVSKHKAIIELETFIKAQEKLKTFEGRKAPRISNKSFLAQMVQCTCGSNMLIVLGHKKKDGTRKLYFSCPSKCGNTFGDVKEIEEDTLLTLKDVNFFEKINKNKPTINNKDSSRIKASLLKELENKKKLLDGLVQKLALVDSDLANILIDKMETLNENIKELQSKIDLLEKEEISLSYNKEDLNLKEKNRKHFIKEFENMNMQEKQTSIRKVINKITWTGENIIIS

SEQ ID NO: 6543 - protein, 490 aa, Unknown
  Description of Unknown: Integrase B6544 sequence
  PTHR30461:SF3,IPR036162,PS51737,IPR011109,PTHR30461, PS00397,PF00239,G3DSA:1.10.10.2600,IPR006119,SSF53041, cd00338,SM00857,IPR025827,IPR038109,PS51736, IPR006118,PF13408,G3DSA:3.40.50.1390,PF07508,Coil
MAKDILNMKSACAYIRVSTDKQEELSPDAQKRLLIDFAKKNNMSLLASNIYLDNGISGKKADKRPEFMKMIGMAKSKEHPFDVILVWKFSRFARNQEESIVYKSLLKKNHVEVVSVSEPLADGPFGTLIERIIEWMDEYYSIRLSGEVLRGMTEKALRGGYQSTLPLGYRMNKDTGIPYIYEPEAVIVRKIYKDYIAGLSYLEIARELNALGYKTKRGAAFEGRTVEYILSNPFYYGAVRWNRQKHDDHTIKSISDWIIAEGKHPALIDKAIWDEVQHLIALRSRPYKARAAGHMKHWLGGIVKCSDCGASLMAGLNATRYQCGNYNKGKCLHSHFIKTAALEQAVYEAFKRILDGSVELYYELKKSSNEPDTDDRSIILNQLSKLDDKEARIKQAYRDGIDTIDEYKENKLLLKDERATLEKQLEAFNNSSSDTDSNAAMLKNISSVYDIIKDTSKDTLTRANAIRSVVDHIVYDRENDKLEIYFFLHM

SEQ ID NO: 6544 - protein, 490 aa, Unknown
  Description of Unknown: Integrase B6545 sequence
  PTHR30461:SF3,IPR036162,PS51737,IPR011109,PTHR30461, PS00397,PF00239,G3DSA:1.10.10.2600,IPR006119,SSF53041, SM00857,IPR025827,IPR038109,PS51736,cd03768, IPR006118,PF13408,G3DSA:3.40.50.1390,PF07508
MERRVACYIRVSTQEQATHGFSVGEQETRLRKYCEAHEWTIAGVYEDPGFSGAYLDRPGIQKLIRDVDLGIFDTVLVWKLDRLSRSQKNTMYMIEDVFLKHNINFISMNENFDTSTPFGRAMVGILSVFAQLDRDQITQRMTMGRIGRAKAGYYSGGSQPPIGYTYTRADGGEKKTLEVDEYEAMQVRMVYDLFLNGLDGKDMTFSDITRYMAAHYSNRYGGWQQPCTVSRMLSNPVYIGKVKFSGEFYDGTHEPIISEETFKKAQEKYQRHIQNFSKSIQNFKGCYLLTGLIHCGACGSRYFVTSTKNTNKTASIKPYYHSYACYGRKPVNVNMMKNGRCKNKIYKMEVLDAYVLDEIQKLKENPELIGDLRTGPNDDKTAAIESRIRELDKQMGKLVDLYQLGTIAFDEIRKRTDAIRAERDKLKGELEHEKRPDGVISETEFRDRLDAFDADIFSDLDIERKQAIVRSLINKIVIYPDLIEIHWAFH

SEQ ID NO: 6545 - protein, 490 aa, Unknown
  Description of Unknown: Integrase B6546 sequence
  cd03768,PTHR30461:SF3,SM00857,G3DSA:1.10.10.2600,IPR036162, PS51737,G3DSA:3.40.50.1390,IPR006119,IPR038109,PF07508, IPR011109,SSF53041,PTHR30461,PS51736,Coil, PF00239
MKKIAIYIRKSVKGDENSISLEAQTEVIKHYFKGENKFTVYKDDGFSGGNTNRPAFQKLMADAMEGKFDTVACYKLDRIARNTLDFLTTFNTLKEYNIDLICVEDKYDPSTPAGRLMMTLLASLAEMERENIKQRVSDSMLNLAKQGRWTGGTAPFGYRVISKDGGKYLELEDSKNIKYIFNEFINGKGIIRLGNEFNCDKKKISRMLHNITYLQSSKDANIYLKQVLGYEVVGQVDGCGYLPYGKYKILNGKKVRNYDGLKVATVSKHEAVIDLDTFIKAQDRLKTFAGKKAPRISTKTFLAQMVQCGICGANMLVTLGQKRKDGTRKLYFSCPNKCGNKFKDVSELENDVLTTLKDVNFFDEIKKNTNIMNKDNSKIKKSMLKELEEKKKILDGLMDKLALVDSNLANVIIEKMNSVNVDINDLQNKIDLLEKEEIASSYNKEDFKLKEENRKHFIEDFENMDMEEKQNSIRGIINKVVWDGKNIIIS

SEQ ID NO: 6546 - protein, 489 aa, Unknown
  Description of Unknown: Integrase B6547 sequence
  IPR036162,PS51737,IPR011109,PTHR30461,PS00397, PF00239,G3DSA:1.10.10.2600,IPR006119,SSF53041,cd00338, SM00857,IPR025827,IPR038109,PS51736,IPR006118, PF13408,G3DSA:3.40.50.1390,PF07508,Coil
MVKDILNMKSACAYIRVSTDKQEELSPDAQKRLLIDFAKKNNMSLLAENIYIDNGISGKKADKRPEFLKMIGLAKSKEHPFDVILVWKFSRFARNQEESIVYKSLLKKNHVEVVSVSEPLVDGPFGTLIERIIEWMDEYYSIRLSGEVLRGMTEKALRGGYQSSLPLGYKMNKDTGVPYIYEDEAIIVKKIYKDYIAGHSYLEIARELNALGYKTKRGAAFEGRTVEYILSNPFYYGAVRWNRQKHDDHTIKSVNDWIISQGKHEPLIDKTKWDEIQHLIALRSKPYRARAAGHMRHWLGGLVKCSDCGASLMAGLNATRYQCGNYNKGKCLHSHFIKAAALEDAVYKSLERVLQNSDELHYELKKSSNEPDTNDRDIILNQLSKLNDKEARIKQAFRDGIDTIEEYKENKQLLANERGELQSQLESLSPASSNDSSAEMLKNISTVLDIVKDTSNDTLTRANAIRSVVDHCIYDKENDKLEVYFFLQK

SEQ ID NO: 6547 - protein, 489 aa, Unknown
  Description of Unknown: Integrase B6548 sequence
  PTHR30461:SF3,IPR036162,PS51737,IPR011109,PTHR30461, PS00397,PF00239,G3DSA:1.10.10.2600,IPR006119,SSF53041, cd00338,SM00857,IPR025827,IPR038109,PS51736, IPR006118,PF13408,G3DSA:3.40.50.1390,PF07508,Coil
MKKTLNEMKNACAYIRVSTDKQEELSPDAQKRLLLDYAKSNHIMILPEHIFIENGISGKKADKRPQFMQMIGMAKSKEHPFNMILVWKFSRFARNQEESIVYKSLLKKCGVEVVSVSEPLVDGPFGSLIERIIEWMDEYYSIRLSGEVMRGMKEKALRGGYQSAMPLGYRMNRETKIPEIYEPEAVIVRKIYDEYSGNGKSYLEIARELNTLGYKTRRGANYEERTIKYILQNPFYTGMVRWNRQNHNEHTIKDESEWIISQGRHEAIITQEVYDLVQEQIVKRSRPYKAHSTGSIKHWLSGIVKCSSCGSSLNGSVLSAGGKVTSFQCGNYSRGSCMTSHFIKAEKLEQAVYAAFEQVIKTNEFSYEVRKPQNEADDSLLLRRQLEKLDDKEKRIKQAYRDGIDTLEEYKENKKLLADERQRIEEQLSALTDNEPERKEQLARNIRSIYDIIRDETLDKRTRANALRSVVNVMVYDKAEDTLSVEFYI

SEQ ID NO: 6548 - protein, 489 aa, Unknown
  Description of Unknown: Integrase B6549 sequence
  PTHR30461:SF3,IPR036162,PS51737,IPR011109,PTHR30461, PS00397,PF00239,G3DSA:1.10.10.2600,IPR006119,SSF53041, cd00338,SM00857,IPR025827,IPR038109,PS51736, IPR006118,PF13408,G3DSA:3.40.50.1390,PF07508,Coil
MKKTLNEMKNACAYIRVSTDKQEELSPDAQKRLLLDYAKSNHIMILPEHIFIENGISGKKADKRPQFMRMIGMAKSKERPFDVILVWKFSRFARNQEESIVYKSLLKKCGVEVVSVSEPLVDGPFGSLIERIIEWMDEYYSIRLSGEVMRGMKEKALRGGYQSAMPLGYRMNRETKIPEIYEPEAVIVRKIYDEYSGNGKSYLEIARELNTLGYKTRRGANYEERTIKYILQNPFYTGMVRWNRQNHNEHTIKDESEWIISQGRHEAIITQEVYDLVQEQIVKRSRPYKAHSTGSIKHWLSGMVKCSSCGSSLNGSVLSAGGKVTSFQCGNYSRGSCMTSHFIKAEKLEQAVYAAFEQVIKTNEFSYEVRTPQNEADDSLLLNRQLEKLDDKEKRIKQAYRDGIDTLEEYKENKQLLADERQRIEEQLSALTDSEPERKEQLARNIRSIYDIIRDESLDKRTRANALRSVVNVMVYDKAEDTLSVEFYI

SEQ ID NO: 6549 - protein, 489 aa, Unknown
  Description of Unknown: Integrase B6550 sequence
  PTHR30461:SF3,IPR036162,PS51737,IPR011109,PTHR30461, PS00397,PF00239,G3DSA:1.10.10.2600,IPR006119,SSF53041, cd00338,SM00857,IPR025827,IPR038109,PS51736, IPR006118,PF13408,G3DSA:3.40.50.1390,PF07508,Coil
MAKDILNMKSACAYIRVSTDKQEELSPDAQKRLLIDFAKKNNMSLLASNIYLDNGISGKKADKRPEFMKMIGMAKSKEHPFDVILVWKFSRFARNQEESIVYKSLLKKNHVEVVSISEPLIDGPFGSLIERIIEWMDEYYSIRLSGEVLRGMTEKALRGGYQSSLPLGYKMNKDTGIPYIYDDEAVIVRKIYHDYISGHSYLEIARELNSLGYRTKRGSTYEGRTVEYILSNPFYYGAVRWNRQKHDDHTIKSVSDWIIAEGKHESLIDKETWDEVQHLIALRSRPYKARAAGHMKHWLGGIVKCSDCGASLMAGLNATRYQCGNYSKGKCSHSHYIKTVALEQAVYEAFERALNGSVELHYELKKGSNEPDTDDRSVILSQLSKLEDKEARIKQAYRDGIDTLEEYKENKQLLKDERAALEKQLEAFNNTSSTDSNAAMLKSISTVYDIIKDTSNNTLTRANAIRSVVDHMVYDKENDKLEVYFFLQK

SEQ ID NO: 6550 - protein, 489 aa, Unknown
  Description of Unknown: Integrase B6551 sequence
  PTHR30461:SF3,IPR036162,PS51737,IPR011109,PTHR30461, PS00397,PF00239,G3DSA:1.10.10.2600,IPR006119,SSF53041, cd00338,SM00857,IPR025827,IPR038109,PS51736, IPR006118,PF13408,G3DSA:3.40.50.1390,PF07508,Coil
MKKTLNEMKNACAYIRVSTDKQEELSPDAQKRLLLDYAKSNHIMILPEHIFIENGISGKKADKRPQFMQMIGMAKSKEHPFDVILVWKFSRFARNQEESIVYKSLLKKCGVEVVSVSEPLVDGPFGSLIERIIEWMDEYYSIRLSDEVMRGMKEKALRGGYQSAMPLGYRMNRETKIPEIYEPEAVIVRKIYDEYSGNGKSYLEIARELNTLGYKTRRGANYEERTVKYILQNPFYTGMVRWNRQNHNEHTIKDESEWIISRGQHEAIISQEAFDLVQEQIIKRSRPYKAHSAGAIKHWLSGMVKCSSCGSSLNGSVLSAGGKVTSFQCGNYRRGSCMTSHFIKAEKLEQAVYAAFEQVIKTNEFSYEVRKPQNKADDSLLLSRQLEKLDDKEKRIKQAYRDGIDTLEEYKENKKLLADERQRIEEQLSALTDSEPERKEQLAQNIRSIYDIIRDESLDKRTRANALRSVVNVMVYDKAEDLLSVEFYI

SEQ ID NO: 6551 - protein, 489 aa, Unknown
  Description of Unknown: Integrase B6552 sequence
  SM00857,IPR006118,G3DSA:1.10.10.2600,IPR036162,PF13408, PS51737,IPR025827,G3DSA:3.40.50.1390,Coil,IPR006119, IPR038109,PF07508,SSF53041,IPR011109,PTHR30461, PS00397,cd00338,PF00239
MATKISENLEIGAAYIRVSTDDQTELSPDAQVRVIQEEAKKDGFFIPAEFIFIERKGISGRKASNRPEFQKMIATAKSQKPAPFKRLYLWKFSRFARNQEESTFYKGILRKKCGVEIKSVSEPIMEGMFGRLIETIIEWFDEYYSYNLSGEVLRGMTEKALKAGYQATPCLGYQAVGEGKPFVLDPKAVPVIEYIFQAYSQGKDMTYIARNLNRQGHVTRRGRPFERRTIYRILTNPFYSGQVIWNGIQFTGSHELIPAAASAFDAVQERVKEEYRPRQRREASSTAHWLSGLLKCGACGASLGFNRTKDQKKRPDFFQCWRYGKGFHPGSCAVAARIAEQAVLDSLKTAIDTQSIDYEYIPPTDVQMQGEEVLIQEALSRLEVKERRIREAYESEVDTLEEYKNNKKRLQAERENLLADLDRLQKEQPSVPDQDACKKKLLAEIATVYDYVSDPSVSNEDKGNALRRILKKIVFDRESGVFTFFYYVS

SEQ ID NO: 6552 - protein, 489 aa, Unknown
  Description of Unknown: Integrase B6553 sequence
  PTHR30461:SF3,IPR036162,PS51737,IPR011109,PTHR30461, PS00397,PF00239,G3DSA:1.10.10.2600,IPR006119,SSF53041, cd00338,SM00857,IPR025827,IPR038109,PS51736, IPR006118,PF13408,G3DSA:3.40.50.1390,PF07508,Coil
MAKDILNMKSACAYIRVSTDKQEELSPDAQKRLLIDYAKKNNMSLLADNIYLDNGISGKKADKRPEFMKMIGMAKAKEHPFDVILVWKFSRFARNQEESIVYKSLLKKNHVEVVSVSEPLVDGPFGTLIERIIEWMDEYYSIRLSGEVLRGMTEKALRGGYQSTLPLGYRMNKDTGIPYIYEPEAVIVRKIYKDYISGLSYLEIARELNALGYKTKRGAAFEGRTVEYILSNPFYYGAVRWNRQKHDDHTIKSISDWIIAEGKHPALIDKAIWDEVQHLIALRSRPYKARAAGHMKHWLGGIVKCSDCGASLMAGLNATRYQCGNYNKGKCLHSHFIKTAALEQAVYEAFKRILDGSVELHYELKKSPNEPDTDDRSIILNQLSKLDDKEARIKQAYRDGIDTIDEYKENKQLLKDERAALEKQLEAFNNTSSTDSNAAMLKSISTVYDIIKDTSKDTLTRANAIRSVVDHCVYDKENDKLEIYFFLQK

SEQ ID NO: 6553 - protein, 489 aa, Unknown
  Description of Unknown: Integrase B6554 sequence
  PTHR30461:SF3,IPR036162,PS51737,IPR011109,PTHR30461, PS00397,PF00239,G3DSA:1.10.10.2600,IPR006119,SSF53041, cd00338,SM00857,IPR025827,IPR038109,PS51736, IPR006118,PF13408,G3DSA:3.40.50.1390,PF07508,Coil
MAKDILNMKSACAYIRVSTDKQEELSPDAQKRLLIDFAKKNNMSLLASNIYLDNGISGKKADKRPEFMKMIGMAKSKEHPFDVILVWKFSRFARNQEESIVYKSLLKKNHVEVVSISEPLIDGPFGSLIQRIIEWMDEYYSIRLSGEVLRGMTEKALRGGYQSSLPLGYKMNKDTGIPYIYDDEAVIVRKIYHDYISGHSYLEIARELNSLGYRTKRGSTYEGRTVEYILSNPFYYGAVRWNRQKHDDHTIKSVSDWIIAEGKHESLIDKETWDEVQHLIALRSRPYKARAAGHMKHWLGGIVKCSDCGASLMAGLNATRYQCGNYSKGKCSHSHYIKTVALEQAVYEAFERALNGSVELHYELKKGSNEPDTDDRSVILSQLSKLEDKEARIKQAYRDGIDTLEEYKENKQLLKDERAALEKQLEAFNNTSSTDSNAAMLKSISTVYDIIKDTSNNTLTRANAIRSVVDHMVYDKENDKLEVYFFLQK

SEQ ID NO: 6554 - protein, 489 aa, Unknown
  Description of Unknown: Integrase B6555 sequence
  PTHR30461:SF3,SM00857,G3DSA:1.10.10.2600,IPR036162,PF13408, IPR025827,G3DSA:3.40.50.1390,PS51737,IPR006119,IPR038109, PF07508,SSF53041,IPR011109,PTHR30461,Coil, PS51736,cd00338,PF00239
MLKNIPAVVYARYSSSNQREESIEDQLRECYKFADREGYNVIGQYCDHAISGRTDDRPEFLRMICDAEKQLFKAVIVYRLDRFARNRFDSVLYKSRLAQYKVNVVSATECIPEGSDGVLIEALHEALAQKYSDDLSQIIRRGLYGNAEHCKSNGPLPFGYKANPTTRLVEIDEETAPIVKQIFTMIAEGSNYNQALAYCTRMGYPKTKNALYHILRNERYKGIYIYANKRTEGGIPCIVSEELFAAANATRQKHINKPNAGSYKYLLTGKLYCKDCENLYSGGYGTSRWGKKSYYYVCSGKKRKHICAAANINAPKIESMVVDALYMFILNEDIISAIIDAALECQERNSPHKNNIMVINRRIAEIEKKLNNLLKAIEAGVLTETTMSRMQELEEKKKSLQRSLMKEKLKAPKISRSQLEFFFEKLRGEDPHARKFQKCLIDTFVNRIYPDGNTVKMVVNLGAPDDETLTYSKLSACFAGFDKRNFWWR

SEQ ID NO: 6555 - protein, 489 aa, Unknown
  Description of Unknown: Integrase B6556 sequence
  PTHR30461:SF3,cd00338,SM00857,G3DSA:1.10.10.2600,IPR036162, PS51737,G3DSA:3.40.50.1390,IPR006119,IPR038109,PF07508, SSF53041,IPR011109,PTHR30461,PS51736,Coil, PF00239
METYCIYLRKSRADAEAEARGEGETLARHEHTLLELAKRQRLTIAHIYREIVSGDSIAARPQMQQMLQDITDGKYTGVLVMEIERLARGDTIDQGVVAQAFRESETKIITPVKTYDPNNEFDEEYFEFSLFMSRREYKTIKRRMQAGRIAAVKEGNYIGTNPPYGYRKIHPQPKVNTLEIVPEEAEYIRCVFEWYLSGMGARAIAARLNQLQVPPRKAAAWEPISIRKILGNPTYAGKVEWHTKKDGTILADGLHPGIISWEQFQQVQERRKQKAPPVPTGYTTQNYYHNVLYCANCGHQMKRRPTADGGAHMLCRRNECRGKVVSASVTKVDEAVLESIRYRIQELELRKDKMEQMAKTESETREKQRARIEKALEKLHRQKEKLHTLLETDVYSVETFLERSKALEKQKAELEAQLQACSADVAAESLTPEQALLWLQYVLDHFETADAEQKNKMLCRVIRRIEYSKTERMCCNKRHSDMQLHVVFL

SEQ ID NO: 6556 - protein, 489 aa, Unknown
  Description of Unknown: Integrase B6557 sequence
  PTHR30461:SF3,cd00338,SM00857,G3DSA:1.10.10.2600,IPR036162, PS51737,G3DSA:3.40.50.1390,IPR006119,IPR038109,PF07508, SSF53041,IPR011109,PTHR30461,PS51736,Coil, PF00239
METYCIYLRKSRADAEAEARGEGETLARHEHTLLELAKRQRLTIAHIYREIVSGDSIAARPQMQQMLQDITDGKYTGVLVMEIERLARGDTIDQGVVAQAFRESETKIITPVKTYDPNNEFDEEYFEFSLFMSRREYKTIKRRMQAGRIAAVKEGNYIGTNPPYGYRKIHPQPKVNTLEIVPEEAEYIRCVFEWYLSGMGARAIAARLNQLQVPPRKAAAWEPISIRKILGNPTYAGKVEWHTKKDGTILADGLHPGIISWEQFQQVQERRKQKAPPVPTGYTTQNYYHNVLYCANCGHQMKRRPTADGGAHMLCRRNECRGKVVSASVTKVDEAVLESIRYRIQELELRKDKMEQTAKTESETREKQRARIERALEKLHKQKEKLHTLLETDVYSVETFLERSKALEKQKAELETELQACSADVAAESLTPEQALLWLQYVLDHFETADAEQKNKMLCRVIRRIEYSKTERMCCNKRHSDMQLHVVFL

SEQ ID NO: 6557 - protein, 489 aa, Unknown
  Description of Unknown: Integrase B6558 sequence
  PTHR30461:SF3,IPR036162,PS51737,IPR011109,PTHR30461, PS00397,PF00239,G3DSA:1.10.10.2600,IPR006119,SSF53041, cd00338,SM00857,IPR025827,IPR038109,PS51736, IPR006118,PF13408,G3DSA:3.40.50.1390,PF07508,Coil
MAKDILNMKSACAYIRVSTDKQEELSPDAQKRLLIDFAKKNNMSLLASNIYLDNGISGKKADKRPEFMKMIGMAKSKEHPFDVILVWKFSRFARNQEESIVYKSLLKKNHVEVVSVSEPLVDGPFGTLIERIIEWMDEYYSIRLSGEVLRGMTEKALRGGYQSSLPLGYRMNKDTGIPYISDDEAIIVKRIYKDYIAGHSYLEIARELNSLGYRTKRGSTYEGRTVEYILSNPFYYGAVRWNRQKHDDHTIKSVSDWIIAEGKHESLIDKETWDEVQHLIALRSRPYKARAAGHMKHWLGGIVKCSDCGASLMAGLNATRYQCGNYSKGKCSHSHYIKTVALEQAVYEAFERALNGSVELHYELKKGSNEPDTDDRSVILSQLSKLEDKEARIKQAYRDGIDTLEEYKENKQLLKDERAALEKQLEAFNNTSSTDSNAAMLKSISTVYDIIKDTSKDTLTRANAIRSVVDHCVYDKENDKLEIYFFLQK

SEQ ID NO: 6558 - protein, 489 aa, Unknown
  Description of Unknown: Integrase B6559 sequence
  PTHR30461:SF3,IPR036162,PS51737,IPR011109,PTHR30461, PS00397,PF00239,G3DSA:1.10.10.2600,IPR006119,SSF53041, cd00338,SM00857,IPR025827,IPR038109,PS51736, IPR006118,PF13408,G3DSA:3.40.50.1390,PF07508,Coil
MAKDILNMKSACAYIRVSTDKQEELSPDAQKRLLIDFAKKNNMSLLASNIYLDNGISGKKADKRPEFMKMIGMAKSKEHPFDVILVWKFSRFARNQEESIVYKSLLKKNHVEVVSISEPLIDGPFGSLIERIIEWMDEYYSIRLSGEVLRGMTEKALRGGYQSSLPLGYKMNKDTGIPYIYDDEAVIVRKIYHDYISGHSYLEIARELNSLGYRTKRGSTYEGRTVEYILSNPFYYGAVRWNRQKHDDHTIKSVSDWIIAEGKHESLIDKETWDEVQHLIALRSRPYKARAAGHMKHWLGGIVKCSDCGASLMAGLNATRYQCGNYSKGKCSHSHYIKTVALEQAVYEAFERALNGSVELHYELKKGSNEPDTDDRSVILSQLSKLEDKEARIKQAYRDGIDTLEEYKENKQLLKDERAALEKQLEAFNNTSSTDSNAAMLKSISTVYDIIKDTSKDTLTRANAIRSVVDHCVYDKENDKLEIYFFLQK

SEQ ID NO: 6559 - protein, 489 aa, Unknown
  Description of Unknown: Integrase B6560 sequence
  SM00857,G3DSA:1.10.10.2600,IPR036162,PF13408,IPR025827, PS51737,G3DSA:3.40.50.1390,IPR006119,IPR038109,PF07508, IPR011109,SSF53041,PF00239,PTHR30461,PS51736, Coil,cd00338
MLKTVIYARYSSDKQNEQSIEGQIHECEQFAKTHDMVIIKHYIDRALSGKTDDRPSFLQMIKDSSSGLFDAILVYKTDRFARNRYDSAVYKAKLKKNGIKIFYAKENIPDGPEGIILESMLEGFAEYYSAELSQKVKRGIKENIRKGLSFGGACPFGYKIVNKKYVIDDEQAPYVKKIFEDYAKGRRAIDIFNELNTLPNYAGKGRKWNRSSLNRMLTNKKYIGIYELEDVCVKDAIPPIIDEALFNKVQSRILFNRRHTTRAKVNYLLSGKLFCGLCEHSMTGKTGTSKTKAKYHYYVCSHRHCKQKKYRKELLEDIIIQYTVKDILNPKHFKMIAKKCLEIQQADNKTNDMLLMLKKQLTAIKTKINNLMNAIEAGIITTSTKDRLEQLEQEKYKLELEISTQQLNSNRLLSEKQIIYMLNVFYNKRVDVSFYNKIIDCFIYKIYIYSDKICIVYNLNNSDKDVTYSDINELYKSSHLNSCGSPYDL

SEQ ID NO: 6560 - protein, 489 aa, Unknown
  Description of Unknown: Integrase B6561 sequence
  SM00857,G3DSA:1.10.10.2600,IPR036162,PF13408,IPR025827, PS51737,G3DSA:3.40.50.1390,IPR006119,IPR038109,PF07508, SSF53041,IPR011109,PF00239,PTHR30461,PS51736, Coil,cd00338
MLKTIIYARYSSDKQNEQSIEGQIHECEQFAKTHDMVIIKHYIDRALSGKTDDRPSFLQMIKDSSSGLFDAILVYKTDRFARNRYDSAVYKAKLKKNGIKIFYAKENIPDGPEGIILESMLEGFAEYYSAELSQKVKRGIKENIRKGLSFGGACPFGYKIVNKKYVIDDEQAPYVKKIFEDYAKGRRAIDIFNELNTLPNYAGKGRKWNRSSLNRMLTNKKYIGIYELEDVCVKDAIPSIIDEALFNKVQSRILFNRRHTTRAKVNYLLSGKLFCGLCEHSMTGKTGTSKTKVKYHYYVCSNRHCKQKKYRKELLEDIIIQYTVKDILNPKHFKMIAKKCLEIQQADNKINDILLMLKKQLTATKTKINNLMNAIEAGIITTSTKDRLEQLEQEKYKLELEISTQQLNSNRLLSEKQIIYMLNVFYNKRVDVSFYNQIIDCFIYKIYIYSDKICIVYNLNNSDKDVTYSDINELYKSSHLNSCGSPYDL

SEQ ID NO: 6561 - protein, 489 aa, Unknown
  Description of Unknown: Integrase B6562 sequence
  PTHR30461:SF3,IPR036162,PS51737,IPR011109,PTHR30461, PS00397,PF00239,G3DSA:1.10.10.2600,IPR006119,SSF53041, cd00338,SM00857,IPR025827,IPR038109,PS51736, IPR006118,PF13408,G3DSA:3.40.50.1390,PF07508,Coil
MAKDILNMKSACAYIRVSTDKQEELSPDAQKRLLIDFAKKNNMSLLASNIYLDNGISGKKADKRPEFMKMIGMAKSKEHPFDVILVWKFSRFARNQEESIVYKSLLKKNHVEVVSISEPLIDGPFGSLIERIIEWMDEYYSIRLSGEVLRGMTEKALRGGYQSSLPLGYKMNKDTGIPYIYDDEAVIVRKIYHDYISGHSYLEIARELNSLGYRTKRGSTYEGRTVEYILSNPFYYGAVRWNRQKHDDHTIKSVSDWIIAEGKHESLIDKETWDEVQHLIALRSRPYKARAAGHMKHWLGGIVKCSDCGASLMAGLNATRYQCGNYSKGKCSHSHYIKTVALEQAVYEAFERALNGSVELHYELKKGSNEPDTDDISVILSQLSKLEDKEARIKQAYRDGIDTLEEYKENKQLLKDERAALEKQLEAFNNTSSTDSNAAMLKSISTVYDIIKDTSKDTLTRANAIRSVVDHCVYDKENDKLEIYFFLQK

SEQ ID NO: 6562 - protein, 489 aa, Unknown
  Description of Unknown: Integrase B6563 sequence
  PTHR30461:SF3,IPR036162,PS51737,IPR011109,PTHR30461, PS00397,PF00239,G3DSA:1.10.10.2600,IPR006119,SSF53041, cd00338,SM00857,IPR025827,IPR038109,PS51736, IPR006118,PF13408,G3DSA:3.40.50.1390,PF07508,Coil
MKKALNEMKNACAYIRVSTDKQEELSPDAQKRLLLDYAKSNHIMILPEHIFIENGISGKKADKRPQFMQMVGMAKSKEHPFDVILVWKFSRFARNQEESIVYKSLLKKCGVEVVSVSEPLVDGPFGSLIERIIEWMDEYYSIRLSDEVMRGMKEKALRGGYQSAMPLGYRMNRETKIPEIYEPEAVIVRKIYDEYSGNGKSYLEIARELNTLGYKTRRGANYEERTVKYILQNPFYTGMVRWNRQNHAEHTIKDESEWIISRGQHEAIISREAFDLVQEQIVKRSRPYKAHSTGSIKHWLSGMVKCSSCGSSLNGSVLSADGKVTSFQCGNYSRGSCMTSHFIKAEKLEQAVYAAFEQVIKTNEFSYEVRTPQNEADDSLLLNRQLEKLDDKEKRIKQAYRDGIDTLEEYKENKQLLADERQRIEEQLSALTDSEPERKEQLARNIRSIYDIIRDETLDKRTRANALRSVVNVMVYDKAEDTLSVEFYI

SEQ ID NO: 6563 - protein, 489 aa, Unknown
  Description of Unknown: Integrase B6564 sequence
  PTHR30461:SF3,IPR036162,PS51737,IPR011109,PTHR30461, PS00397,PF00239,G3DSA:1.10.10.2600,IPR006119,SSF53041, cd00338,SM00857,IPR025827,IPR038109,PS51736, IPR006118,PF13408,G3DSA:3.40.50.1390,PF07508,Coil
MVKDILNMKSACAYIRVSTDKQEELSPDAQKRLLIDFAKKNNMSLLAENIYIDNGISGKKADKRPEFLKMIGLAKSKEHPFDVILVWKFSRFARNQEESIVYKSLLKKNHVEVVSVSEPLVDGPFGTLIERIIEWMDEYYSIRLSGEVIRGMTEKALRGGYQSSLPLGYKMNKDTSIPYIYEDEAVIVRKIYADYTAGHSYLEIARALNSLGYKTKRGAAFEGRTIEYILSNPFYNGSVRWNRQKHDDHTIKSVNEWIIAQGKHEPLIDKTKWDEIQHLIALRSKPYRARAAGHMRHWLGGLVKCSDCGASLMAGLNATRYQCGNYNKGKCLHSHFIKAAALEDAVYKSLERVLQNSDELHYELKKSSNEPDTNDRDIILNQLSKLNDKEARIKQAFRDGIDTIEEYKENKQLLANERKALQSQLESLSPASSNDSSAEMLKNISTVLDIVKDTSNDTLTRANAIRSVVDHCVYDKENDKLEVYFFLQK

SEQ ID NO: 6564 - protein, 489 aa, Unknown
  Description of Unknown: Integrase B6565 sequence
  PTHR30461:SF3,IPR036162,PS51737,IPR011109,PTHR30461, PS00397,PF00239,G3DSA:1.10.10.2600,IPR006119,SSF53041, cd00338,SM00857,IPR025827,IPR038109,PS51736, IPR006118,PF13408,G3DSA:3.40.50.1390,PF07508,Coil
MKKTLNEMKNACAYIRVSTDKQEELSPDAQKRLLLDYAKSNHIMILPEHIFIENGVSGKKADKRPQFMQMIGMAKSKEHPFDVILVWKFSRFARNQEESIVYKSLLKKCGVEVVSVSEPLVDGPFGSLIERIIEWMDEYYSIRLAGEVMRGMKEKALRGGYQSAMPLGYRMNRETKIPEIYEPEAVIVRKIYDEYSGNGKSYLEIARELNTLGYKTRRGANYEERTVKYILQNPFYTGMVRWNRQNHNEHTIKDESEWIISMGQHEAIISREAFDLVQEQIVKRSRPYKAHSTGSIKHWLSGMVKCSSCGSSLNGSVLSAGGKVTSFQCGNYRRGSCMTSHFIKAEKLEQAVYAAFEQVIKTNEFSYEVRKPQNKADDSLLLSRQLEKLDDKEKRIKQAYRDGIDTLEEYKENKKLLADERQRIEEQLSALTDSEPERKEQLAQNIRSIYDIIRDESLDKRTRANALRSVVNVMVYDKAEDLLSVEFYI

SEQ ID NO: 6565 - protein, 489 aa, Unknown
  Description of Unknown: Integrase B6566 sequence
  SM00857,G3DSA:1.10.10.2600,IPR036162,PF13408,IPR025827, PS51737,G3DSA:3.40.50.1390,IPR006119,IPR038109,PF07508, SSF53041,IPR011109,PF00239,PTHR30461,PS51736, Coil,cd00338
MLKTVIYARYSSDKQNEQSIEGQIHECEQFAKTHDMVIIKHYIDRALSGKTDDRPSFLQMIKDSSSGLFDAILVYKTDRFARNRYDSAVYKAKLKKNGIKIFYAKENIPDGPEGIILESMLEGFAEYYSAELSQKVKRGIKENIRKGLSFGGACPFGYKIVNKKYVIDDEQSPYVKKIFEDYAKGRRAIDIFNELNTLPNYAGKGRKWNRSSLNRMLTNKKYIGIYELEDVCVKDAIPPIIDEALFNKVQSRILFNRRHTTRAKVNYLLSGKLFCGLCEHSMTGKTGTSKTKVKYHYYVCSNRHCKQKKYRKELLEDIIIQYTVKDILNPKHFKMIAKKCLEIQQADNKINDILLMLKKQLTATKTKINNLMNAIEAGIITTSTKDRLEQLEQEKYKLELEISTQQLNSNRLLSEKQIIYMLNVFYNKRVDVSFYNQIIDCFIYKIYIYSDKICIVYNLNNSDKDVTYSDINELYKSSHLNSCGSPYDL

SEQ ID NO: 6566 - protein, 489 aa, Unknown
  Description of Unknown: Integrase B6567 sequence
  PTHR30461:SF3,cd00338,SM00857,G3DSA:1.10.10.2600,IPR036162, PF13408,IPR025827,G3DSA:3.40.50.1390,PS51737,IPR006119, IPR038109,PF07508,IPR011109,SSF53041,PTHR30461, PS51736,Coil,PF00239
MDDLLKIGASYIRVSDERQDEYSPDSQLKKIREYASKEGYIIPDEYVFYDDGISGRSVKRRGDFKRMIATAKEKDHPFDTIYVWKFSRFARNQEEAMVYKNLLRKSNVSVVSVSEPIPEGHFGTLIERIIEWMDEFYSVNLGAEVSRGMEEKFTRGEPTCSPPFAYYMKDKKWLVDEENAAIVREVFQRFADGEGTRAIAVDLGNRGIKTKHGSVPDNRWIDYMLNNPAYIGKLRRSPNGSRAISKRSYRNDEIMIIDGCHQAIISKELWDSVQERIKMIKSIYPKYAKREQPIDYMLKGIVKCSSCGGTLIMSSVTSGKSNTPTLQCCNYSRGSCTVSHSITVPKMEKALMDGLDRVIRTKQFNIVPRTPKDPDAAPVDYDRLIAIEERKLERAKQAFLAEVDTIEQYAQNKEEITARIERLTAKRDEEAPRTEIDLDAYVRRVTEIVNFVNRNDVSEGAKNEALRTIIESVICEKNRDNLAIYFYEF

SEQ ID NO: 6567 - protein, 489 aa, Unknown
  Description of Unknown: Integrase B6568 sequence
  PTHR30461:SF3,IPR036162,PS51737,IPR011109,PTHR30461, PS00397,PF00239,G3DSA:1.10.10.2600,IPR006119,SSF53041, cd00338,SM00857,IPR025827,IPR038109,PS51736, IPR006118,PF13408,G3DSA:3.40.50.1390,PF07508,Coil
MAKDILNMKSACAYIRVSTDKQEELSPDAQKRLLIDFAKKNNMSLLASNIYLDNGISGKKADKRPEFMKMIGMAKSKEHPFDVILVWKFSRFARNQEESIVYKSLLKKNHVEVVSISEPLIDGPFGSLIERIIEWMDEYYSIRLSGEVLRGMTEKALRGGYQSSLPLGYKMNKDTGIPYIYDDEAVIVRKIYHDYISGHSYLEIARELNSLGYRTKRGSTYEGRTVEYILSNPFYYGAVRWNRQKHDDHTIKSVSDWIIAEGKHKSLIDKETWDEVQHLIALRSRPYKARAAGHMKHWLGGIVKCSDCGASLMAGLNATRYQCGNYSKGKCSHSHYIKTVALEQAVYEAFERALNGSVELHYELKKGSNEPDTDDRSVILSQLSKLEDKEARIKQAYRDGIDTLEEYKENKQLLKDERAALEKQLEAFNNTSSTDSNAAMLKSISTVYDIIKDTSNNTLTRANAIRSVVDHMVYDKENDKLEVYFFLQK

SEQ ID NO: 6568 - protein, 489 aa, Unknown
  Description of Unknown: Integrase B6569 sequence
  SM00857,G3DSA:1.10.10.2600,IPR036162,PF13408,IPR025827, G3DSA:3.40.50.1390,PS51737,IPR006119,IPR038109,PF07508, SSF53041,IPR011109,PF00239,PTHR30461,PS51736, Coil,cd00338
MLKTVIYARYSSDKQNEQSIEGQIHECEQFAKTHDMVIIKHYIDRALSGKTDDRPSFLQMIKDSSSGLFDAVLVYKTDRFARNRYDSAVYKAKLKKNGIKIFYAKENIPDGPEGIILESMLEGFAEYYSAELSQKVKRGIKENIRKGLSFGGACPFGYKIVNKKYVIDDEQAPYVKKIFEDYAKGRRAIDIFNELNTLPNYAGKGRKWNRSSLNRMLTNKKYIGIYELEDVCVKDAIPPIIDEALFNKVQSRILFNRRHTTRAKVNYLLSGKLFCGLCEHSMTGKTGTSKTKVKYHYYVCSNRHCKQKKYRKELLEDIIIQYTVKDILNPKHFKMIAKKCLEIQQADNKINDILLMLKKQLTATKTKINNIMNAIEAGIITTSTKDRLEQLEQEKYKLELEISTQQLNSNRLLSEKQIIYMLNVFYNKRVDVSFYNQIIDCFIYKIYIYSDKICIVYNLNNSDKDVTYSDINELYKSSHLNSCGSPYDL

SEQ ID NO: 6569 - protein, 489 aa, Unknown
  Description of Unknown: Integrase B6570 sequence
  PTHR30461:SF3,cd00338,SM00857,G3DSA:1.10.10.2600,IPR036162, PS51737,G3DSA:3.40.50.1390,IPR006119,IPR038109,PF07508, IPR011109,SSF53041,PTHR30461,PS51736,Coil, PF00239
MRKKNVCLMRVSTDVQETTSQRVAIEKYIKENHISIDEWLEEDGVSGFKTKLENRVALMKLKEMALNDELDTLVVFNLDRIGRRMELVGFLTLLDSCNVKILSVTEGCLNDGNDTDILVNSIKMWVAEYESKKKSKAVKAGKKVSAMRGNFLGGKPNFGYTVKDKKLEIDEDEASIVRLLFDLYINKGTAKTIDKFEQLGIKRRGSNWTRANIVKTIKNTVYVGKKPLQDGEIPYDETLRIVSDEVFYKAQEMIKQRTSKSKGTSTKFVNRSEALLEGLLFHRCPDGNLRKLSIDYNSGTKKSPNKKLLYRCSNCKDHRYEGVQKSFGGKKLNELIVGNIKDIIKSITQQDLKLYYEKYKYGDIEELQQEVLRLKAKLEKKEKALSNAQIELEKIFMGDSSMDKDTINSIIVKLKDEVKQIHEEIQNKETEVESKTKKNIKSFKILEKYKDFEKIYDQAENYNKKMILQEIVDKIIIDEDKIEIKLNIW

SEQ ID NO: 6570 - protein, 489 aa, Unknown
  Description of Unknown: Integrase B6571 sequence
  PTHR30461:SF3,IPR036162,PS51737,IPR011109,PTHR30461, PS00397,PF00239,G3DSA:1.10.10.2600,IPR006119,SSF53041, cd00338,SM00857,IPR025827,IPR038109,PS51736, IPR006118,PF13408,G3DSA:3.40.50.1390,PF07508,Coil
MAKDILNMKSACAYIRVSTDKQEELSPDAQKRLLIDFAKKNNMSLLASNIYLDNGISGKKADKRPEFMKMIGMAKSKEHPFDVILVWKFSRFARNQEESIVYKSLLKKNHVEVVSVSEPLVDGPFGTLIERIIEWMDEYYSIRLSGEVLRGMTEKALRGGYQSSLPLGYRMNKDTGIPYISDDEAIIVKRIYKDYIAGHSYLEIARELNSLGYRTKRGSTYEGRTVEYILSNPFYYGAVRWNRQKHDDHTIKSVSDWIIAEGKHESLIDKETWDEVQHLIALRSRPYKARAAGHMKHWLGGIVKCSDCGASLMAGLNATRYQCGNYSKGKCSHSHYIKTVALEQAVYEAFERALNGSVELHYELKKGSNEPDTDDRSVILSQLSKLEDKEARIKQAYRDGIDTLEEYKENKQLLKDERAALEKQLEAFNNTSSTDSNAAMLKSISTVYDIIKDTSNNTLTRANAIRSVVDHMVYDKENDKLEVYFFLQK

SEQ ID NO: 6571 - protein, 489 aa, Unknown
  Description of Unknown: Integrase B6572 sequence
  cd00338,SM00857,G3DSA:1.10.10.2600,IPR036162,PF13408, IPR025827,G3DSA:3.40.50.1390,PS51737,IPR006119,IPR038109, PF07508,SSF53041,IPR011109,PTHR30461,PS51736, Coil,PF00239
MLKTVIYARYSSDKQNEQSIEGQIHECEQFAKTHDMVIIKHYIDRALSGKTDDRPSFLQMIKDSSSGLFDAILVYKTDRFARNRYDSAVYKAKLKKNGIKIFYAKENIPDGPEGIILESMLEGFAEYYSAELSQKVKRGIKENIRKGLSFGGACPFGYKIVNKKYVIDDEQAPYVKKIFEDYAKGRRAIDIFNELNTLPNYAGKGRKWNRSSLNRMLTNKKYIGIYELEDVCVKDAIPPIIDEALFNKVQSRILFNRRHTTRAKVNYLLSGKLFCGLCEHSMTGKTGTSKTKVKYHYYVCSNRHCKQKKYRKELLEDIIIQYTVKDILNPKHFKMIAKKCLEIQQADNKINDILLMLKKQLTATKTKINNIMNAIEAGIITTSTKDRLEQLEQEKYKLELEISTQQLNSNRLLSEKQIIYMLNVFYNKRVDVSFYNQIIDCFIYKIYIYSDKICIVYNLNNSDKDVTYSDINELYKSSHLNSCGSPYDL

SEQ ID NO: 6572 - protein, 489 aa, Unknown
  Description of Unknown: Integrase B6573 sequence
  SM00857,G3DSA:1.10.10.2600,IPR036162,PF13408,IPR025827, G3DSA:3.40.50.1390,PS51737,IPR006119,IPR038109,PF07508, SSF53041,IPR011109,PF00239,PTHR30461,PS51736, Coil,cd00338
MLKTVIYARYSSDKQNEQSIEGQIHECEQFAKTHDMVIIKHYIDRALSGKTDDRPSFLQMIKDSSSGLFDAVLVYKTDRFARNRYDSAVYKAKLKKNGIKIFYAKENIPDGPEGIILESMLEGFAEYYSAELSQKVKRGIKENIRKGLSFGGACPFGYKIVNKKYVIDDEQAPYVKKIFEDYAKGRRAIDIFNELNTLPNYAGKGRKWNRSSLNRMLTNKKYIGIYELEDVCVKDAIPPIIDEALFNKVQSRILFNRRHTTRAKVNYLLSGKLFCGLCEHSMTGKTGTSKTKAKYHYYVCSHRHCKQKKYRKELLEDIVIQYTVKDILNPKHFKMIAKKCLEIQQADNKTNDMLLILKKQLTAIKTKINNLMNAIEAGIITTSTKDRLEQLEQEKYKLELEISTQQLNSNRLLSEKQIIYMLNVFYNKRVDVSFYNQIIDCFIYKIYIYSDKICIVYNLNNSDKDVTYSDINELYKSSHLNSCGSPYVN

SEQ ID NO: 6573 - protein, 489 aa, Unknown
  Description of Unknown: Integrase B6574 sequence
  PTHR30461:SF3,IPR036162,PS51737,IPR011109,PTHR30461, PS00397,PF00239,G3DSA:1.10.10.2600,IPR006119,SSF53041, cd00338,SM00857,IPR025827,IPR038109,PS51736, IPR006118,PF13408,G3DSA:3.40.50.1390,PF07508,Coil
MKKTLNEMKNACAYIRVSTDKQEELSPDAQKRLLLDYAKNNHIMILPEHIFIENGISGKKADKRPQFMQMIGMAKSKEHPFDVILVWKFSRFARNQEESIVYKSLLKKCGVEVVSVSEPLVDGPFGSLIERIIEWMDEYYSIRLSDEVMRGMKEKALRGGYQSAMPLGYRMNRETKIPEIYEPEAVIVRKIYDEYSGNGKSYLEIARELNTLGYKTRRGANYEERTVKYILQNPFYTGMVRWNRQNHNEHTIKDESEWIISKGQHEAIISQEAFDLVQEQIIKRSRPYKAHSAGAIKHWLSGMVKCSSCGSSLNGSVLSAGGKVTSFQCGNYSRGSCMTSHFIKAEKLEQAVYAAFEQVIKTNEFSYEVRTPQNEADDSLLLNRQLEKLDDKEKRIKQAYRDGIDTLEEYKENKKLLADERQRIEEQLSALTDSEPERKEQLAQNIRSIYDIIKNETLDKRTRANALRSVVNVMVYDKAEDSLSVEFYI

SEQ ID NO: 6574 - protein, 489 aa, Unknown
  Description of Unknown: Integrase B6575 sequence
  PTHR30461:SF3,IPR036162,PS51737,IPR011109,PTHR30461, PS00397,PF00239,G3DSA:1.10.10.2600,IPR006119,SSF53041, cd00338,SM00857,IPR025827,IPR038109,PS51736, IPR006118,PF13408,G3DSA:3.40.50.1390,PF07508,Coil
MAKDILNMKSACAYIRVSTDKQEELSPDAQKRLLIDFAKKNNMSLLASNIYLDNGISGKKADKRPEFMKMIGMAKNKEHPFDVILVWKFSRFARNQEESIVYKSLLKKNHVEVVSISEPLIDGPFGSLIERIIEWMDEYYSIRLSGEVLRGMTEKALRGGYQSSLPLGYRMNKDTGIPYIYEDEAIIVKKIYKDYIAGHSYLEIARELNALGYKTKRGAAFEGRTIEYILCNPFYYGAIRWNRQKHDDHTIKSVSDWIIAEGKHEALINKETWDEVQHLMALRSRPYKSRAAGHMKHWLGGIVKCSSCGASLMAGLNATRYQCGNYSKGKCSHSHYIKTVALEQAVYEAFERALNGSVELHYELKKSSNEPDTDDRSVILSQLSKLEDKEARIKQAYRDGIDTLEEYKENKQLLKDERAALEKQLEAFNNTSSTDSNAAMLKSISTVYDIIKDTSKDTLTRANAIRSVVDHCVYDKENDKLEIYFFLQK

SEQ ID NO: 6575 - protein, 489 aa, Unknown
  Description of Unknown: Integrase B6576 sequence
  cd00338,SM00857,G3DSA:1.10.10.2600,IPR036162,PF13408, PS51737,G3DSA:3.40.50.1390,IPR025827,IPR006119,IPR038109, PF07508,IPR011109,SSF53041,PTHR30461,PS51736, Coil,PF00239
METYCIYLRKSRADAEAETRGEGETLARHEHTLLDLAKRQNLTITCIYREIVSGDSIAARPQMQQMLQDITDGKYAGVLVMEIERLARGDTIDQGVVAQAFRESGTKILTPIKTYDPNNEFDEEYFEFSLFMSRREYKTIKRRMQAGRAASVKEGNYIGTNPPYGYRKVQPEPKVKTLEVVPEEAEAIRMMFEMYLSGDGARAIAARLNQLQILPRKAAMWEPVSVRKILHNPIYAGKIEWHTKKDGTILADGRHPAIISWEQYQQSIERRKQTAPQVPTGYTTQNYYHGILFCANCGHQMKRRPAANGTAHMLCRRNECRGKVVSSTVKKIDEAVLEAIRYRMQELMLCKDTIQQNEGHKKETAKRQRAKIEKALEKLQHQKEKLHTLLETDVYTVEVFLERSKIIQQQIEALEAELEAIQHEAEAQGLSPEQSLLWLQYVLDNFLGATPEQKNQMLRKVIRRIEYRKTQRMCYRKQDSDLSLHIDFL

SEQ ID NO: 6576 - protein, 489 aa, Unknown
  Description of Unknown: Integrase B6577 sequence
  PTHR30461:SF3,cd00338,SM00857,G3DSA:1.10.10.2600,IPR036162, PF13408,PS51737,IPR025827,G3DSA:3.40.50.1390,IPR006119, IPR038109,PF07508,IPR011109,SSF53041,PTHR30461, PS51736,Coil,PF00239
MLKAVIYARYSSEKQNEQSIEGQIHECEQFARTHDMVVVNHYIDRALSGKTDDRPSFLQMIKDSATGSFDAVLVYKTDRFARNRYDSAVYKAKLKKNGIKIFYAKENIPDGPEGIILESMLEGFAEYYSAELSQKVKRGIKENIRKGLSFGGACPYGYKIVNKKYTVNDEQAPYVQKIFSDYASGRRAVDIFNELNSMPNYAGKGRKWNRSSLNRMLTNKKYIGIYELEDVCVKDAIPPIISEELFNKVQAIIVYNRRHTTKHRINYLLSGRLFCGLCGSPMTGKTGTSKTGVKYHYYVCSDKRCQQKKYRQDLLEDSVIQYTVRDILNPHNFKRIAKRCMQIQKENNPYDAILISLQKQLSDTNTKLSNIMKAIEAGIITASTKERLNELERQKFSLETEIKQQKMANNLLLTEEQITYVLNEFYQKRVDKNFYNRIIDGFVHKIYLYDDKISIIYNLTSNGKELLKSDIDNLYKSSQADACGSPYDL

SEQ ID NO: 6577 - protein, 489 aa, Unknown
  Description of Unknown: Integrase B6578 sequence
  cd00338,SM00857,G3DSA:1.10.10.2600,IPR036162,PF13408, IPR025827,PS51737,G3DSA:3.40.50.1390,IPR006119,IPR038109, PF07508,IPR011109,SSF53041,PTHR30461,PS51736, Coil,PF00239
MNAYCIYLRKSRADAEAEARGEGETLARHEHTLLDLAKRQNLTITCIYREIVSGDSIAARPQMQQMLQDITDGKYAGVLVMEIERLARGDTIDQGVVAQAFRESGTKILTPIKTYDPNNEFDEEYFEFSLFMSRREYKTIKRRMQAGRAASVKEGNYIGTNPPYGYRKVQPEPKVKTLEIVPEEAEAIRMMFEMYLSGDGARAIAARLNQLQILPRKAAMWEPVSVRKILHNPIYAGKIEWHTKKDGTILADGRHPAIISWEQYQQSIERRKQTAPQVPTGYTTQNYYHGILFCANCGHQMKRRPAANGTAHMLCRRNECRGKVVSSTVKKIDEAVLEAIRYRMQELMLCKDTIRQDETHKKETAKRQRAKIEKALEKLQHQKEKLHTLLETDVYTVEVFLERSKIIQQQIEALEAELGAIQHEAEAQGLSPEQSLLWLQYVLDNFLGATPEQKNQMLRKVIRRIEYRKTQRMCYRKQDSDLSLHIDFL

SEQ ID NO: 6578 - protein, 489 aa, Unknown
  Description of Unknown: Integrase B6579 sequence
  PTHR30461:SF3,IPR036162,PS51737,IPR011109,PTHR30461, PS00397,PF00239,G3DSA:1.10.10.2600,IPR006119,SSF53041, cd00338,SM00857,IPR025827,IPR038109,PS51736, IPR006118,PF13408,G3DSA:3.40.50.1390,PF07508,Coil
MKKTLNEMKNACAYIRVSTDKQEELSPDAQKRLLLDYAKSNHIMILPEHIFIENGISGKKADKRPQFMQMIGLAKSKEHPFDVILVWKFSRFARNQEESIVYKSLLKKCGVEVVSVSEPLVDGPFGSLIERIIEWMDEYYSIRLSDEVMRGMKEKALRGGYQSAMPLGYRMNRETKIPEIYEPEAVIVRKIYDEYSGNGKSYLEIARELNTLGYKTRRGANYEERTVKYILQNPFYTGMVRWNRQNHNDHTIKDESEWIISRGQHEAIISREAFDLVQEQIVKRSRPYKAHSTGSIKHWLSGMVKCSSCGSSLNGSVLSAGGKVTSFQCGNYSRGSCMTSHFIKAEKLEQAVYAAFEQVIKTNKFSYEVRKPQNKADDSLLLNRQLEKLDDKEKRIKQAYRDGIDTLEEYKENKKLLADERQRIEEQLSALTDNEPERKEQLARNIRSIYDIIKDESLDKRTRANALRSVVNVMVYDKAEDTLSVEFYI

SEQ ID NO: 6579 - protein, 489 aa, Unknown
  Description of Unknown: Integrase B6580 sequence
  PTHR30461:SF3,IPR036162,PS51737,IPR011109,PTHR30461, PS00397,PF00239,G3DSA:1.10.10.2600,IPR006119,SSF53041, cd00338,SM00857,IPR025827,IPR038109,PS51736, IPR006118,PF13408,G3DSA:3.40.50.1390,PF07508,Coil
MAKNILNMKTAAGYIRVSTDKQEELSPDAQKRLLIDYAKKHSISLLAENIYIDNGISGKKADKRPEFMKMIGMAKSKEHPFDVILVWKFSRFARNQEESIVYKSLLKKNSVEVVSVSEPLIDGPFGSLIERIIEWMDEYYSIRLSGEVLRGMTEKALRGGYQSSLPLGYKMNKDTGIPYIYESEAIIVRKIYKEYIDGHSYLEIARELNALGYKTKRGAAYEGRTVEYILSNPFYYGAVRWNRQKHDDHTIKDVGDWIIVMGKHQAIIDKETWDQVQHLMALRSRPYKARAAGHMKHWLGGIVKCSDCGASLMAGLNATRYQCGNYNKGKCSHSHFIKTAALEEAVYEAFDRVMKNPDELLHYELKKASNEANTNDRDMILNQISKLSDKEARIKQAYRDGIDTIDEYKENKQIIDNERKALEAQLDSLKASEADSSDEMLQHITSVLNIIKDSSKDTLTRANAIRSVVDHCVYDKENDRLEVYFFLQK

SEQ ID NO: 6580 - protein, 489 aa, Unknown
  Description of Unknown: Integrase B6581 sequence
  cd00338,SM00857,G3DSA:1.10.10.2600,IPR036162,PF13408, IPR025827,G3DSA:3.40.50.1390,PS51737,IPR006119,IPR038109, PF07508,IPR011109,SSF53041,PTHR30461,PS51736, Coil,PF00239
MLKTVIYARYSSDKQNEQSIEGQIHECEQFAKTHDMVIIKHYIDRALSGKTDDRPSFLQMIKDSSSGLFDAVLVYKTDRFARNRYDSAVYKAKLKKNGIKIFYAKENIPDGPEGIILESMLEGFAEYYSAELSQKVKRGIKENIRKGLSFGGACPFGYKIVNKKYVIDDEQAPYVKKIFEDYAKGRRAIDIFNELNTLPNYAGKGRKWNRSSLNRMLTNKKYIGIYELEDVCVKDAIPPIIDEALFNKVQSRILFNRRHTTRAKVNYLLSGKLFCGLCEHSMTGKTGTSKTKVKYHYYVCSNRHCKQKKYRKELLEDIIIQYTVKDILNPKHFKMIAKKCLEIQQADNKINDILSMLKKQLTATKTKINNLMNAIEAGIITTSTKDRLEQLELEKYKLELEISTQQLNSNRLLSEEQIIYMLNEFYKKRADVSFYNQIIDCFIYKIYIYSDKICIVYNLNNSDKDVTYSDINELYKSSHLNSCGSPYDL

SEQ ID NO: 6581 - protein, 489 aa, Unknown
  Description of Unknown: Integrase B6582 sequence
  PTHR30461:SF3,cd00338,SM00857,G3DSA:1.10.10.2600,IPR036162, PS51737,G3DSA:3.40.50.1390,IPR006119,IPR038109,PF07508, SSF53041,IPR011109,PTHR30461,PS51736,Coil, PF00239
METYCIYLRKSRADAEAEARGEGETLARHEHTLLELAKRQRLTIAHIYREIVSGDSIAARPQMQQMLQDITDGKYTGVLVMEIERLARGDTIDQGVVAQAFRESETKIITPVKTYDPNNEFDEEYFEFSLFMSRREYKTIKRRMQAGRIAAVKEGNYIGTNPPYGYRKIHPQPKVNTLEIVPEEAEYIRCVFEWYLSGMGARAIAARLNQLQVPPRKAAAWEPISIRKILGNPTYAGKVEWHTKKDGTILADGLHPGIISWEQFQQVQERRKQKAPPVPTGYTTQNYYHNVLYCANCGHQMKRRPTADGGAHMLCRRNECRGKVVSASVTKVDEAVLESIRYRIQELELRKDKMEQMAKTELETREKQRARIEKALEKLHRQKEKLHTLLETDVYSVETFLERSKALEKQKAELETELQACSADVAAESLTPEQALLWLQYVLDHFETADAEQKNKMLCRVIRRIEYSKTERMCCNKRHSDMQLHVVFL

SEQ ID NO: 6582 - protein, 489 aa, Unknown
  Description of Unknown: Integrase B6583 sequence
  cd00338,SM00857,G3DSA:1.10.10.2600,IPR036162,PF13408, IPR025827,G3DSA:3.40.50.1390,PS51737,IPR006119,IPR038109, PF07508,SSF53041,IPR011109,PTHR30461,PS51736, Coil,PF00239
MLKTVIYARYSSDKQNEQSIEGQIHECEQFAKTHDMVIIKHYIDRALSGKTDDRPSFLQMIKDSSSGLFDAVLVYKTDRFARNRYDSAVYKAKLKKNGIKIFYAKENIPDGPEGIILESMLEGFAEYYSAELSQKVKRGIKENIRKGLSFGGACPFGYKIVNKKYVIDDEQAPYVKKIFEDYAKGRRAIDIFNELNTLPNYAGKGRKWNRSSLNRMLTNKKYIGIYELEDVCVKDAIPPIIDEALFNKVQSRILFNRRHTTRAKVNYLLSGKLFCGLCEHSMTGKTGTSKTKAKYHYYVCSHRHCKQKKYHKELLEDIVIQYTVKDILNPKHFKMIAKKCLEIQQADNKTNDMLLILKKQLTAIKTKINNLMNAIEAGIITTSTKDRLEQLEQEKYKLELEISTQQLNSNRLLSEKQIIYMLNVFYNKRVDVSFYNQIIDCFIYKIYIYSDKICIVYNLNNSDKDVTYSDINELYKSSHLNSCGSPYVN

SEQ ID NO: 6583 - protein, 489 aa, Unknown
  Description of Unknown: Integrase B6584 sequence
  cd00338,SM00857,G3DSA:1.10.10.2600,IPR036162,PF13408, IPR025827,G3DSA:3.40.50.1390,PS51737,IPR006119,IPR038109, PF07508,IPR011109,SSF53041,PTHR30461,PS51736, Coil,PF00239
MLKTVIYARYSSDKQNEQSIEGQIHECEQFAKTHDMVIIKHYIDRALSGKTDDRPSFLQMIKDSSSGLFDAVLVYKTDRFARNRYDSAVYKAKLKKNGIKIFYAKENIPDGPEGIILESMLEGFAEYYSAELSQKVKRGIKENIRKGLSFGGACPFGYKIVNKKYVIDDEQAPYVKKIFEDYAKGRRAIDIFNELNTLPNYAGKGRKWNRSSLNRMLTNKKYIGIYELEDVCVKDAIPPIIDEALFNKVQSRILFNRRHTTRAKVNYLLSGKLFCGLCEHSMTGKTGTSKTKAKYHYYVCSHRHCKQKKYRKELLEDIIIQYTVKDILNPKHFKMIAKKCLEIQQADNKTNDMLLMLKKQLTATKTKINNLMNAIEAGIITTSTKDRLEQLEQEKYKLELEISTQQLNSNRLLSEKQIIYMLNVFYNKRVDVSFYNQIIDCFIYKIYIYSDKICIVYNLNNSDKDVTYSDINELYKSSHLNSCGSPYVN

SEQ ID NO: 6584 - protein, 489 aa, Unknown
  Description of Unknown: Integrase B6585 sequence
  cd00338,SM00857,G3DSA:1.10.10.2600,IPR036162,PF13408, IPR025827,G3DSA:3.40.50.1390,PS51737,IPR006119,IPR038109, PF07508,SSF53041,IPR011109,PTHR30461,PS51736, Coil,PF00239
MLKTVIYARYSSDKQNEQSIEGQIHECEQFAKTHDMVIIKHYIDRALSGKTDDRPSFLQMIKDSSSGLFDAVLVYKTDRFARNRYDSAVYKAKLKKNGIKIFYAKENIPDGPEGIILESMLEGFAEYYSAELSQKVKRGIKENIRKGLSFGGACPFGYKIVNKKYVIDDEQAPYVKKIFEDYAKGRRAIDIFNELNTLPNYAGKGRKWNRSSLNRMLTNKKYIGIYELEDVCVKDAIPPIIDEALFNKVQSRILFNRRHTTRAKVNYLLSGKLFCGLCEHSMTGKTGTSKTKVKYHYYVCSNRHCKQKKYRKELLEDIIIQYTVKDILNPKHFKMIAKKCLEIQQADNKTNDMLLMLKKQLTATKTKINNLMNAIEAGIITTSTKDRLEQLEQEKYKLELEISTQQLNSNRLLSEKQIIYMLNVFYNKRVDVSFYNQIIDCFIYKIYIYSDKICIVYNLNNSDKDVTYSDINELYKSSHLNSCGSPYVN

SEQ ID NO: 6585 - protein, 489 aa, Unknown
  Description of Unknown: Integrase B6586 sequence
  PTHR30461:SF3,SM00857,G3DSA:1.10.10.2600,IPR036162,PF13408, IPR025827,G3DSA:3.40.50.1390,PS51737,IPR006119,IPR038109, PF07508,IPR011109,SSF53041,PTHR30461,Coil, PS51736,cd00338,PF00239
MKEYKKGAISVRVSTDMQTKYSPDSQIKMCLAYAKQHEIYISEEHIYRDDGISGRNADKRTDFQRMIADAKKKPKPFDCILVYDFSRFARNKEESVMYKAMLRKKYDIDVVSITQPLGDGKERVILESMYEAMDEYYVLNLSENVKRGKKEKATRGEHQGATPFGYRYDKNTQMLYPNENTKDSVVFIFEEWIKPETTINNLTVKINAMGIKTSRGNKWCEESLKVVLNNPIYIGYTRFTDGGMGRNYDNPNIVLTKGKHEPIISDELWNKAQEKIKEHNKIWFKYKKPSVKHQYWLRGLIKCSNCGKNLIMIERHSGSKKKPFYQCNGYNKKSCNESHSILQEKLEDALLNELEIIFKDKININIVQSKSETNEISVINNSINKCKNRLERIEVAYMDGIDSLEEYKIKKKKIIEEIEKLNAELQNINTKEYEDLKKERVYSLCEYAHKILKDNKIDFKIKEKIANELFDNIIYNKKENTLYVTFKEV

SEQ ID NO: 6586 - protein, 489 aa, Unknown
  Description of Unknown: Integrase B6587 sequence
  PTHR30461:SF3,IPR036162,PS51737,IPR011109,PTHR30461, PS00397,PF00239,G3DSA:1.10.10.2600,IPR006119,SSF53041, cd00338,SM00857,IPR025827,IPR038109,PS51736, IPR006118,PF13408,G3DSA:3.40.50.1390,PF07508,Coil
MKKTLNEMKNACAYIRVSTDKQEELSPDAQKRLLLDYAKSNHIMILPEHIFIENGISGKKADKRPQFMRMIGMAKSKERPFDVILVWKFSRFARNQEESIVYKSLLKKCGVEVVSVSEPLVDGPFGSLIERIIEWMDEYYSIRLSGEVMRGMKEKALRGGYQSAMPLGYRMNRETKIPEIYELEAVIVRKIYDEYSGNGKSYLEIARELNTLGYKTRRGANYEERTIKYILQNPFYTGMVRWNRQNHNEHTIKDESEWIISQGRHEAIITQEVYDLVQEQIVKRSRPYKAHSTGSIKHWLSGIVKCSSCGSSLNGSVLSAGGKVTSFQCGNYSRGSCMTSHFIKAEKLEQAVYAAFEQVIKTNEFSYEVRKPQNEADDSLLLRRQLEKLDDKEKRIKQAYRDGIDTLEEYKENKKLLADERQRIEEQLSALTDSEPERKEQLARNIRSIYDIIKDESLDKRTRANALRSVVNVMVYDKAEDTLSVEFYI

SEQ ID NO: 6587 - protein, 489 aa, Unknown
  Description of Unknown: Integrase B6588 sequence
  PTHR30461:SF3,SM00857,G3DSA:1.10.10.2600,IPR036162,PF13408, PS51737,G3DSA:3.40.50.1390,IPR025827,IPR006119,IPR038109, PF07508,IPR011109,SSF53041,PF00239,PTHR30461, PS51736,Coil,cd00338
MLKAVIYARYSSEKQNEQSIEGQIHECEQFARMHDMVVVNHYVDRALSGKTDDRPSFLQMIKDSATGSFDAVLVYKTDRFARNRYDSAVYKAKLKKNGIKIFYAKENIPDGPEGIILESMLEGFAEYYSAELSQKVKRGIKENIRKGLSFGGACPYGYKIVNKKYTVNDEQAPYVQKIFSDYASGRRAVDIFNELNSMPNYAGKGRKWNRSSLNRMLTNKKYIGIYELEDVCVKDAIPPIISEELFNKVQAIIVYNRRHTTKHRINYLLSGRLFCGLCNSPMTGKTGTSKTGVKYHYYVCSDKRCQQKKYRQDLLEDTVIQYTVRDILNPHNFKRIAKRCMQIQKENNPYDAILISLQKQLSDTNIKLSNIMKAIEAGIITASTKERLNELERQKFSLETEIKQQKMANNLLLTEEQIIYVLNEFYQKRVDKNFYNRIIDGFVHKVYLYKDKISIVYNLTGNGKELLKSDIDNLYKSSQADACGSPYNL

SEQ ID NO: 6588 - protein, 489 aa, Unknown
  Description of Unknown: Integrase B6589 sequence
  PTHR30461:SF3,IPR036162,PS51737,IPR011109,PTHR30461, PS00397,PF00239,G3DSA:1.10.10.2600,IPR006119,SSF53041, cd00338,SM00857,IPR025827,IPR038109,PS51736, IPR006118,PF13408,G3DSA:3.40.50.1390,PF07508,Coil
MAIDIANMKVACAYIRVSTDKQEELSPDAQKRLLIDYAKKHNMSLLAENIYIDNGISGKKADKRPEFMKMIGMAKSKEHPFDVILVWKFSRFARNQEESIVYKSLLKKNSVEVVSVSEPLIDGPFGSLIERIIEWMDEYYSIRLSGEVLRGMTEKALRGGYQSSLPLGYKMNKDTGIPYIYESEAIIVRKIYKEYIDGHSYLEIARELNTLGYKTKRGAAYEGRTVEYILSNPFYYGAVRWNRQKHDDHTIKDVGDWIIVMGKHQAIIDKETWDQVQHLMALRSRPYKARAAGHMKHWLGGIVKCSDCGASLMAGLNATRYQCGNYNKGKCSHSHFIKTAALEEAVYEAFDRVMQNPDELLHYELKKASNEANTNDRDMILNQISKLSDKEARIKQAYRDGIDTIDEYKENKQIIDNERKALEAQLDSLKASEADSSDEMLQHITSVLNIIKDTSKDTLTRANAIRSVVDHCVYDKENDRLEVYFFLQK

SEQ ID NO: 6589 - protein, 489 aa, Unknown
  Description of Unknown: Integrase B6590 sequence
  PTHR30461:SF3,cd00338,SM00857,G3DSA:1.10.10.2600,IPR036162, PS51737,G3DSA:3.40.50.1390,IPR006119,IPR038109,PF07508, IPR011109,SSF53041,PTHR30461,PS51736,Coil, PF00239
METYCIYLRKSRADAEAEARGEGETLARHEHTLLELAKRQRLTIAHIYREIVSGDSIAARPQMQQMLQDITDGKYTGVLVMEIERLARGDTIDQGVVAQAFRESETKIITPVKTYDPNNEFDEEYFEFSLFMSRREYKTIKRRMQAGRIAAVKEGNYIGTNPPYGYRKIHPQPKVNTLEIVPEEAEYIRCVFEWYLSGMGARAIAARLNQLQVPPRKAAAWEPISIRKILGNPTYAGKVEWHTKKDGTILADGLHPGIISWEQFQQVQERRKQKAPPVPTGYTTQNYYHNVLYCANCGHQMKRRPTADGGAHMLCRRNECRGKVVSASVTKVDEAVLESIRYRIQELELRKDKMEQMAKTESETREKQRARIERALEKLHKQKEKLHTLLETDVYSVETFLERSKALEKQKAELEAQLQACSTDAAAKALDPEQALLWLQYVLDHFETADAEQKNKMLCRVIRRIEYSKTERMCCNKRHSDMQLHVVFL

SEQ ID NO: 6590 - protein, 489 aa, Unknown
  Description of Unknown: Integrase B6591 sequence
  PTHR30461:SF3,IPR036162,PS51737,IPR011109,PTHR30461, PS00397,PF00239,G3DSA:1.10.10.2600,IPR006119,SSF53041, cd00338,SM00857,IPR025827,IPR038109,PS51736, IPR006118,PF13408,G3DSA:3.40.50.1390,PF07508,Coil
MISNKKECFAYIRVSTDDQLDYSPDSQLRLLKDYATQHDMIITSVFKDLGISGRQAKKRPQFQEMIDRAKRGECDAILVWKYSRFARNQEESVIYKSMLRKMGVDVISISEELPEDWLASHLVEAVYEIMDEQYSRNLSVEVKRGMQQKAMEGGYNGPIPIGYIKERGSDTIPVPDPVYAPVIERIFDEYLSGKALSDIAYRLNADGFRTKRGGKFENRVISYILRNPFYTGHVRFNYYDKESKTYNTDPIIVKAKHEPIISQKIFDKAQHIYQTTNLNKRKPRTAASVKHWLSGVVKCSVCGASLGYHAVNKSVKTAHFACWKSAKGQCESRSYANATQLEQAVIDGFTRIANSPELNYERIPADSKADKNLEYYNNLLSKLDKKEKRIKEAYINGIDTLEEYKLNKEIILNERQSIQEKLNAFSESCTEKNINTDNLMRAKLTNLIELLNNPDATDIDKANALRSICDRIIFSKETFELKFYLFLKL

SEQ ID NO: 6591 - protein, 489 aa, Unknown
  Description of Unknown: Integrase B6592 sequence
  PTHR30461:SF3,SM00857,G3DSA:1.10.10.2600,IPR036162,PF13408, IPR025827,G3DSA:3.40.50.1390,PS51737,IPR006119,IPR038109, PF07508,IPR011109,SSF53041,PTHR30461,Coil, PS51736,cd00338,PF00239
MNKKINAVGYARYSTEFQTDNSIAYQTTAIQEYCEKHDINLLKVYSDEAMTGTNTNRPAFQQMLAAAEQHLFDAVIIYDISRGSRNVVDWFSFRQEMARIDIQVISCNQHLGDILDPNTYLTELITAGIGQHMVLDTRKKSIDGKNERAKKGIFCGGTPPLGYDINDGNYIINPKEAKIVQTIFTMYADGHSYNEILKELDGAVGKAGRPLGKNSLYSILKNERYIGVYTWNKRKIKIMGKWAGGRPNPDIVRIENAIPPIIDETIWRKVEERMKDNSRRATSKSCRHNYLLSGLIQCDKCGATFVGHTSTNQKKISTPYYICGNKYRTHTCCTKNINADRLETFVVMQIKHYLKTADFETLADEICKQVNSAAPDVSAEKKELSEIETKITNGINAILGGVNIPELKDEVDKLRIRKSELEDVITYKEKNKTRTLNRDKLVEMLKESAENIDSTDSNTLIRNFVTKIYAHADGTVTVNLGVHINGCGD

SEQ ID NO: 6592 - protein, 489 aa, Unknown
  Description of Unknown: Integrase B6593 sequence
  SM00857,G3DSA:1.10.10.2600,IPR036162,PF13408,IPR025827, G3DSA:3.40.50.1390,PS51737,IPR006119,IPR038109,PF07508, SSF53041,IPR011109,PF00239,PTHR30461,PS51736, Coil,cd00338
MLKTVIYARYSSDKQNEQSIEGQIHECEQFAKTHDMVIIKHYIDRALSGKTDDRPSFLQMIKDSSSGLFDAILVYKTDRFARNRYDSAVYKAKLKKNGIKIFYAKENIPDGPEGIILESMLEGFAEYYSAELSQKVKRGIKENIRKGLSFGGACPFGYKIVNKKYVINDEQAPYVKKIFEDYAKGRRAIDIFNELNTLPNYAGKGRKWNRSSLNRMLTNKKYIGIYELEDVCVKDAIPPIIDEALFNKVQSRILFNRRHTTRAKVNYLLSGKLFCGLCEHSMTGKTGTSKTKVKYHYYVCSNRHCKQKKYRKELLEDIIIQYTVKDILNPKHFKMIAKKCLEIQQADNKINDILLMLKKQLTATKTKINNLMNAIEAGIITTSTKDRLEQLEQEKYKLELEISAQQLNSNRLLSEKQIIYMLNVFYNKRVDVSFYNQIIDCFIYKIYIYSDKICIVYNLNNSDKDVTYSDINELYKSSHLNSCGSPYVN

SEQ ID NO: 6593 - protein, 489 aa, Unknown
  Description of Unknown: Integrase B6594 sequence
  PTHR30461:SF3,IPR036162,PS51737,IPR011109,PTHR30461, PS00397,PF00239,G3DSA:1.10.10.2600,IPR006119,SSF53041, cd00338,SM00857,IPR025827,IPR038109,PS51736, IPR006118,PF13408,G3DSA:3.40.50.1390,PF07508,Coil
MKKTLNEMKNACAYIRVSTDKQEELSPDAQKRLLLDYAKSNHIMILPEHIFIENGISGKKADKRPQFMQMVGMAKSKEHPFDMILVWKFSRFARNQEESIVYKSLLKKCDVEVVSVSEPLVDGPFGSLIERIIEWMDEYYSIRLAGEVMRGMKEKALRGGYQSAMPLGYRMNRETKIPEIYEPEAVIVRKIYDEYSGNGKSYLEIARELNTLGYKTRRGANYEERTVKYILQNPFYTGMVRWNRQNHNEHTIKDESEWIISRGQHEAIISREAFDLVQEQIVKRSRPYKAHSTGSIKHWLSGMVKCSSCGSSLNGSVLSAGGKVTSFQCGNYSRGSCMTSHFIKAEKLEQAVYAAFEQVIKTNEFSYEVRKPQNEADDSLLLRRQLEKLDDKEKRIKQAYRDGIDTLEEYKENKKLLADERQRIEEQLSALTDSEPERKEQLARDIRSIYDIIRDESLDKRTRANALRSVVNVMVYDKAEDSLSVEFYI

SEQ ID NO: 6594 - protein, 489 aa, Unknown
  Description of Unknown: Integrase B6595 sequence
  SM00857,G3DSA:1.10.10.2600,IPR036162,PS51737,G3DSA:3.40.50.1390, IPR006119,IPR038109,PF07508,IPR011109,SSF53041, PTHR30461,Coil,PS51736,cd00338,PF00239
MRQYCMYLRKSRADAEAEARGEGETLARHQVMLMEIAKKQKLSVVKVYKEIVSGDSIAARPEMQAMLADITECKYAGVLVVEIERLARGDTIDQGVVAQAFKQSDTKIITPTKTYDPQNEYDEEYFEFSLFMSRREYKTIKRRMQAGRLAAVKEGNYISTTPPYGYRKIQPEPKVHTLEIVPEEAEVIRLIYDIYLGGRGAKYIAEELNRMGIKPQKSEYWEAPSIKKILANPIYCGKLQWKTKSSGDTLYQGRHEPIISEEIFDKAQEKRKNNPAAQVQTNQELLNYYHGILYCKNCGHQMRRRLIRASGHEHMLCTHRECRGIVVSASFPEIDESLLTLLLYRVEKLKALRAHGNPMSKASISPDRIKPLVAELEKEKRRQAKLYDLLEQEVYDTATFLERSQVVAQRIKSLESAIAEEEARKEPQKLPPKEAIARLTYVINNFKTASPNEKNTMLHTVVEKIYYSKTQRMCCNNRNSDLTLDAVFL

SEQ ID NO: 6595 - protein, 489 aa, Unknown
  Description of Unknown: Integrase B6596 sequence
  PTHR30461:SF3,IPR036162,PS51737,IPR011109,PTHR30461, PS00397,PF00239,G3DSA:1.10.10.2600,IPR006119,SSF53041, cd00338,SM00857,IPR025827,IPR038109, PS51736,IPR006118,PF13408,G3DSA:3.40.50.1390,PF07508,Coil
MAKDILNMKSACAYIRVSTDKQEELSPDAQKRLLIDFAKKNNMSLLASNIYLDNGISGKKADKRPEFMKMIGMAKSKEHPFDVILVWKFSRFARNQEESIVYKSLLKKNHVEVVSVSEPLVDGPFGTLIERIIEWMDEYYSIRLSGEVLRGMTEKALRGGYQSSLPLGYRMNKDTGIPYISDDEAIIVKRIYKDYIAGHSYLEIARELNSLGYRTKRGSTYEGRTVEYILSNPFYYGAVRWNRQKHDDHTIKSVSDWIIAEGKHESLIDKETWDEVQHLIALRSRPYKARAAGHMKHWLGGIVKCSDCGASLMAGLNATRYQCGNYSKGKCSHSHYIKTVALEQAVYEAFERALNGSVELHYELKKGSNEPDTDDRSVILSQLSKLEDKEARIKQAYRDGIDTLEEYKENKQLLKDERAALEKQLEAFNNTYSTDSNAAMLKSISTVYDIIKDTSNNTLTRANAIRSVVDHMVYDKENDKLEVYFFLQK

SEQ ID NO: 6596 - protein, 489 aa, Unknown
  Description of Unknown: Integrase B6597 sequence
  cd00338,SM00857,G3DSA:1.10.10.2600,IPR036162,PF13408, IPR025827,G3DSA:3.40.50.1390,PS51737,IPR006119,IPR038109, PF07508,IPR011109,SSF53041,PTHR30461,PS51736, Coil,PF00239
MNAYCIYLRKSRADAEAEARGEGETLARHEHTLLDLAKRQNLTITCIYREIVSGDSIAARPQMQQMLQDITDGKYAGVLVMEIERLARGDTIDQGVVAQAFRESGTKILTPIKTYDPNNEFDEEYFEFSLFMSRREYKTIKRRMQAGRAASVKEGNYIGTNPPYGYRKVQPEPKVKTLEIVPEEAEAIRMMFEMYLSGDGARAIAARLNQLQILPRKAAMWEPVSVRKILHNPIYAGKIEWHTKKDGTILADGRHPAIISWEQYQQSIERRKQTAPQVPTGYTTQNYYHGILFCANCGHQMKRRPAANGTAHMLCRRNECRGKVVSSTVKKIDEAVLEAIRYRMQELMLCKDTIRQDETHKKENAKRQRAKIEKALEKLQHQKEKLHTLLETDVYTVEVFLERSKIIQQQIEALEAELGAIQHEAEAQGLSPEQSLLWLQYVLDNFLGATPEQKNQMLRKVIRRIEYRKTQRMCYRKQDSDLSLHIDFL

SEQ ID NO: 6597 - protein, 489 aa, Unknown
  Description of Unknown: Integrase B6598 sequence
  SM00857,G3DSA:1.10.10.2600,IPR036162,PF13408,IPR025827, G3DSA:3.40.50.1390,PS51737,IPR006119,IPR038109,PF07508, SSF53041,IPR011109,PF00239,PTHR30461,PS51736, Coil,cd00338
MLKTVIYARYSSDKQNEQSIEGQIHECEQFAKTHDMVIIKHYIDRALSGKTDDRPSFLQMIKDSSSGLFDAVLVYKTDRFARNRYDSAVYKAKLKKNGIKIFYAKENIPDGPEGIILESMLEGFAEYYSAELSQKVKRGIKENIRKGLSFGGACPFGYKIVNKKYVIDDEQAPYVKKIFEDYAKGRRAIDIFNELNILPNYAGKGRKWNRSSLNRMLTNKKYIGIYELEDVCVKDAIPPIIDEALFNKVQSRILFNRRHTTRAKVNYLLSGKLFCGLCEHSMTGKTGTSKTKVKYHYYVCSNRHCKQKKYRKELLEDIIIQYTVKDILNPKHFKMIAKKCLEIQQADNKINDILLILKKQLTATKTKINNLMNAIEAGIITTSTKDRLEQLEQEKYKLELEISTQQLNSNRLLSEKQIIYMLNVFYNKRVDVSFYNQIIDCFIYKIYIYSDKICIVYNLNNSDKDVTYSDINELYKSSHLNSCGSPYDL

SEQ ID NO: 6598 - protein, 489 aa, Unknown
  Description of Unknown: Integrase B6599 sequence
  PTHR30461:SF3,IPR036162,PS51737,IPR011109,PTHR30461, PS00397,PF00239,G3DSA:1.10.10.2600,IPR006119,SSF53041, cd00338,SM00857,IPR025827,IPR038109,PS51736, IPR006118,PF13408,G3DSA:3.40.50.1390,PF07508,Coil
MKKTLNEMKNACAYIRVSTDKQEELSPDAQKRLLLDYAKSNHIMILPEHIFIENGISGKKADKRPQFMQMIGLAKSKEHPFDVILVWKFSRFARNQEESIVYKSLLKKCGVEVVSVSEPLVDGPFGSLIERIIEWMDEYYSIRLAGEVMRGMKEKALRGGYQSAMPLGYRMNRETKIPEIYEPEAIIVRKIYDEYSANGKSYLEIARELNTLGYKTRRGANYEERTVKYILQNPFYTGMVRWNRQNHNEHTIKDESEWIISQGQHEAIISQEVYDLVQEQIVKRSRPYKAHSTGSIKHWLSGIVKCSSCGSSLNGSVLSAGGKVTSFQCGNYSRGSCMTSHFIKAEKLEQAVYAAFEQVIKTNEFSYEVRTPQNEADDSLLLNRQLEKLDDKEKRIKQAYRDGIDTLEEYKENKQLLADERQRIEEQLSALTDSEPERKEQLARNIRSIYDIIRDESLDKRTRANALRSVVNVMVYDKAEDTLSVEFYI

SEQ ID NO: 6599 - protein, 489 aa, Unknown
  Description of Unknown: Integrase B6600 sequence
  PTHR30461:SF3,IPR036162,PS51737,IPR011109,PTHR30461, PS00397,PF00239,G3DSA:1.10.10.2600,IPR006119,SSF53041, cd00338,SM00857,IPR025827,IPR038109,PS51736, IPR006118,PF13408,G3DSA:3.40.50.1390,PF07508,Coil
MKKTLNEMKNACAYIRVSTDKQEELSPDAQKRLLLDYAKNNHIMILPEHIFIENGISGKKADKRPQFMQMIGMAKSKEHPFDMILVWKFSRFARNQEESIVYKSLLKKCGVEVVSVSEPLVDGPFGSLIERIIEWMDEYYSIRLSGEVMRGMKEKALRGGYQSAMPLGYRMNRETKIPEIYEPEAIIVRKIFDEYSGNGKSYLEIARELNTLGYKTRRGANYEERTVKYILQNPFYTGMVRWNRQNHNEHTIKDESEWIISRGQHEAIISQETFDLVQEQIIKRSRPYKAHGTGSIKHWLSGMVKCSSCGSSLNGSVLSAGGRVTSFQCGNYSRGSCMTSHYIKAEKLEQAVYAAFEQVINTNEFSYEVRKPQNKADDSLLLNRQLEKLDDKEKRIKQAYRDGIDTLEEYKENKKLLADERQRIEEQLSALTDNEPERKEQLARDIRSIYDIIRDESLDKRTRANALRSVVNVMVYDKAEDSLSVEFYI

SEQ ID NO: 6600 - protein, 489 aa, Unknown
  Description of Unknown: Integrase B6601 sequence
  PTHR30461:SF3,cd00338,SM00857,G3DSA:1.10.10.2600,IPR036162, PF13408,PS51737,G3DSA:3.40.50.1390,IPR025827,IPR006119, IPR038109,PF07508,IPR011109,SSF53041,PTHR30461, Coil,PF00239
MTIIGEYCDRAISGKTDNRPNFQRLIKDSEKGQFEAVIMYTLDRFARNRYDSAIYKAKLKKSGVKVYYAKQPMPDTPEGIILESVLEGYAEYYSENLSRNIKRGLKENALQCLAVGGAGMPLGYTVGEDRKYKIDPVGAKIVQEIFQMYADGMSATQIINECNRRGYKTSRGNAFNKNSLRTMLKNDRYIGVYRFADVVVEDGVPPIISRELFEKVQTALKHNYSARARNKAKDDYLLTTKLFCGHCGSSMVGESGTSRSGKLHHYYKCIDRKRNHKCKKAVEKKDWIEELVVRFTVQNVLNDETIERIARKTMEIIEKESADTSYLNGLQNELKDIKKKIKNLMNAIEQGIITPTTKERMDELEAEKNDLEGKIAREEMKKPLLTKERIMHWFNSFKSGDVNDIEYRRRVIDTLVNSVYVYDDGDKGRRIVFTFNMSGQNTATLSCSDIACVAPPKEEASNSSFTRTSLRLCIGWGMPDGVPFPFPLP

SEQ ID NO: 6601 - protein, 489 aa, Unknown
  Description of Unknown: Integrase B6602 sequence
  PTHR30461:SF3,IPR036162,PS51737,IPR011109,PTHR30461, PS00397,PF00239,G3DSA:1.10.10.2600,IPR006119,SSF53041, cd00338,SM00857,IPR025827,IPR038109,PS51736, IPR006118,PF13408,G3DSA:3.40.50.1390,PF07508,Coil
MAKDILNMKSACAYIRVSTDKQEELSPDAQKRLLIDFAKKNNMSLLASNIYLDNGISGKKADKRPEFMKMIGMAKSKEHPFDVILVWKFSRFARNQEESIVYKSLLKKNHVEVVSVSEPLVDGPFGTLIERIIEWMDEYYSIRLSGEVLRGMTEKALRGGYQSSLPLGYRMNKDTGIPYISDDEAIIVKRIYKDYIAGHSYLEIARELNSLGYRTKRGSTYEGRTVEYILSNPFYYGAVRWNRQKHDDHTIKSVSDWIIAEGKHESLIDKDTWDEVQHLIALRSRPYKARAAGHMKHWLGGIVKCSDCGASLMAGLNATRYQCGNYSKGKCSHSHYIKTVALEQAVYEAFERALNGSVELHYELKKGSNEPDTDDRSVILSQLSKLEDKEARIKQAYRDGIDTLEEYKENKQLLKDERAALEKQLEAFNNTSSTDSNAAMLKSISTVYDIIKDTSKDTLTRANAIRSVVDHCVYDKENDKLEIYFFLQK

SEQ ID NO: 6602 - protein, 488 aa, Unknown
  Description of Unknown: Integrase B6603 sequence
  PTHR30461:SF3,IPR036162,PS51737,IPR011109,PTHR30461, PS00397,PF00239,G3DSA:1.10.10.2600,IPR006119,SSF53041, cd00338,SM00857,IPR025827,IPR038109,PS51736, IPR006118,PF13408,G3DSA:3.40.50.1390,PF07508,Coil
MATDIANMKVACAYIRVSTDKQEELSPDAQKRLLIDYAKKHNMSLLAENIYIDNGISGKKADKRPEFMKMISLAKSKEHPFDIILVWKFSRFARNQEESIVYKSLLKKNNVEVVSISEPLIDGPFGSLIERIIEWMDEYYSIRLSGEVLRGMTEKALRGGYQSSLPLGYKMNKDTGIPYIYEPEAIIVRKIFKDYIAGHSYLEIARELNALGYKTKRGAAFEGRTVEYILSNPFYYGAIRWNRQKHDDHTIKDISEWIIVTGKHPAIIDKETWDEVQHLMALRSRPYKARAAGHMKHWLGGIVKCSNCGASLMAGLNATRYQCGNYNKGKCSRSHYIKTAALEQAIYEAFERVLDGSMDLHYELKKSPNDGNTTDRDMILNQISKLCDKEARIKQAYRDGIDTIDEYKENKQIIDNERKALEAQLDSLKTSEADSSDEMLQNITSVLGIIKDTSKDTLTRANAIRSVVDHCVYDKENDKLEVYFFLQK

SEQ ID NO: 6603 - protein, 488 aa, Unknown
  Description of Unknown: Integrase B6604 sequence
  PTHR30461:SF3,IPR036162,PS51737,IPR011109,PTHR30461, PS00397,PF00239,G3DSA:1.10.10.2600,IPR006119,SSF53041, cd00338,SM00857,IPR025827,IPR038109,PS51736, IPR006118,PF13408,G3DSA:3.40.50.1390,PF07508,Coil
MARDILNMKSACAYIRVSTDKQEELSPDAQKRLLIDFAKKNNMSLLAENIYIDNGISGKKADKRPEFMKMIGMAKSKEHPFDVILVWKFSRFARNQEESIVYKSLLKKNRVDVVSVSEPLIDGPFGTLIERIIEWMDEYYSIRLSGEVLRGMTEKALRGGYQSSLPLGYRMNKETGIPYIYEEEAVIVRKIYNDYIAGHSYLEIARELNALGYKTKRGAAFEGRTVEYILSNPFYYGAVRWNRQNHDNHTIKDISEWIIVMGKHPAIINKETWDLVQHLMALRSKPYKARAAGHMKHWLGGIVKCSDCGASLMAGLNATRYQCGNYNKGKCLHSHFIKTAALEQAVYNAFERVFDGTAELHYELKKASNEANTDDRDILLSKLSKLDDKEARIKQAYRDGIDTIEEYKENKQLIKDERKALKKQLEAFSLASDDSNAAMLKSISTVYDIIKDTSNNTLTRANAIRSVVDHMVYDKENDKLEVYFFLQK

SEQ ID NO: 6604 - protein, 488 aa, Unknown
  Description of Unknown: Integrase B6605 sequence
  PTHR30461:SF3,IPR036162,PS51737,IPR011109,PTHR30461, PS00397,PF00239,G3DSA:1.10.10.2600,IPR006119,SSF53041, cd00338,SM00857,IPR025827,IPR038109,PS51736, IPR006118,PF13408,G3DSA:3.40.50.1390,PF07508,Coil
MATDIANMKVACAYIRVSTDKQEELSPDAQKRLLIDYAKKHNMSLLAENIYIDNGISGKKADKRPEFMKMISLAKSKEHPFDIILVWKFSRFARNQEESIVYKSLLKKNNVEVVSISEPLIDGPFGSLIERIIEWMDEYYSIRLSGEVLRGMTEKALRGGYQSSLPLGYRMNKDTGIPYIYEPEAIIVRKIYKEYVAGHSYLEIARELNALGYKTKRGAAYEGRTVEYILSNPFYYGAVRWNRQKHDDHTIKDVGDWIIAMGKHPAIIDKETWDEVQHLMALRSRPYKARAAGHMKHWLGGIVKCSDCGASLIAGLNATRYQCGNYNKGKCSHSHFIKTAALEEAVYEAFDRVMQNPDELHYELKKPSNEANANDKDMILNQISKLSDKEARIKQAYRDGIDTIDEYKENKQIIDNERKALEAQLYSLKTSEADSSDEMLQNITSVLGIIKDTSKDTLTRANAIRSVVDHCVYDKENDKLEVYFFLQK

SEQ ID NO: 6605 - protein, 488 aa, Unknown
  Description of Unknown: Integrase B6606 sequence
  PTHR30461:SF3,IPR036162,PS51737,IPR011109,PTHR30461, PS00397,PF00239,G3DSA:1.10.10.2600,IPR006119,SSF53041, cd00338,SM00857,IPR025827,IPR038109,PS51736, IPR006118,PF13408,G3DSA:3.40.50.1390,PF07508,Coil
MAANIANMKVACAYIRVSTDKQEELSPDAQKRLLIDYAKKHNMSLLAENIYIDNGISGKKADKRPEFMKMISLAKSKEHPFDIILVWKFSRFARNQEESIVYKSLLKKNNVEVVSISEPLIDGPFGSLIERIIEWMDEYYSIRLSGEVLRGMTEKALRGGYQSSLPLGYKMNKDTGIPYIYEDEAIIVKKIYNDYISGHSYLEIARELNALGYTTKRGAAFEGRTVEYILSNPFYYGAIRWNRQKHDDHTIKDISEWIIVMGKHPAIIDKETWDEVQHLMALRSRPYKARAAGHMKHWLGGIVKCSDCGASLMAGLNATRYQCGNYNKGKCSHSHYIKTAALEQAIYEAFERVLDGSMDLHYELKKSPNDGNTTDRDMILNQISKLGDKEARIKQAYRDGIDTIEEYRENKQLIENERKTLEAQLDSLKSSEADSSDEMLQHITSVLNIIKDTTKDTLTRANAIRSVVDHCVYDKENDKLEVYFFLQK

SEQ ID NO: 6606 - protein, 488 aa, Unknown
  Description of Unknown: Integrase B6607 sequence
  PTHR30461:SF3,IPR036162,PS51737,IPR011109,PTHR30461, PS00397,PF00239,G3DSA:1.10.10.2600,IPR006119,SSF53041, cd00338,SM00857,IPR025827,IPR038109,PS51736, IPR006118,PF13408,G3DSA:3.40.50.1390,PF07508,Coil
MAKNILNMKIAAGYIRVSTDKQEELSPDAQKRLLIDYAKKNNISLLAENIYIDNGISGKKADKRPEFMKMIGMAKSKEHPFDVILVWKFSRFARNQEESIVYKSLLKKNNVEVVSVSEPLIDGPFGSLIERIIEWMDEYYSIRLSGEVLRGMTEKALRGGYQSSLPLGYKMNKDTGIPYIYEDEAIIVKKIYNDYISGHSYLEIARELNALGYTTKRGAAFEGRTVEYILSNPFYYSAIRWNRQKHDDHTIKDISEWIIVMGKHPAIIDKETWDDVQHLMALRSRPYKSRAAGHMKHWLGGIVKCSDCGASLIAGLNATRYQCGNYNKGKCSHSHFIKTAALEEAVYEAFDRVIQNPNELRYELKKASNEANTNDRDMILNQISKLSDKEARIKQAYRDGIDTIDEYKENKQIIDNERKALEAQLDSLKASEADSSDEMLQHITSVLNIIKDTSKDTLTRANAIRSVVDHCVYDKENDKLEVYFFLQK

SEQ ID NO: 6607 - protein, 488 aa, Unknown
  Description of Unknown: Integrase B6608 sequence
  PTHR30461:SF3,IPR036162,PS51737,IPR011109,PTHR30461, PS00397,PF00239,G3DSA:1.10.10.2600,IPR006119,SSF53041, cd00338,SM00857,IPR025827,IPR038109,PS51736, IPR006118,PF13408,G3DSA:3.40.50.1390,PF07508,Coil
MAKDILNMKSACAYIRVSTDKQEELSPDAQKRLLIDFAKKNNMSLLAENIYIDNGISGKKADKRPEFMKMIGMAKSKEHPFDVILVWKFSRFARNQEESIVYKSLLKKNRVDVVSVSEPLIDGPFGTLIERIIEWMDEYYSIRLSGEVLRGMTEKALRGGYQSSLPLGYRMNKETGIPYIYEEEAVIVRKIYNDYIAGHSYLEIARELNAIGYKTKRGATFEGRTVEYILSNPFYYGAVRWNRQNHDNHTIKDISEWIIVMGKHPAIIDKETWDLVQHLMALRSKPYKARAAGHMKHWLGGIVKCSDCGASLMAGLNATRYQCGNYNKGKCLRSHFIKTAALEQAVYNAFERVFDGTTELHYELKKASNEANTNDRDILLSKLSKLDDKEARIKQAYRDGIDTIEEYKENKQLLNDERKALEKQLEAFSLASDDSNADMLKNISTVYDIIKDTSNDTLTRANAIRSVVDHMVYDKENDKLEVYFFLQK

SEQ ID NO: 6608 - protein, 488 aa, Unknown
  Description of Unknown: Integrase B6609 sequence
  PTHR30461:SF3,IPR036162,PS51737,IPR011109,PTHR30461, PS00397,PF00239,G3DSA:1.10.10.2600,IPR006119,SSF53041, cd00338,SM00857,IPR025827,IPR038109,PS51736, IPR006118,PF13408,G3DSA:3.40.50.1390,PF07508,Coil
MARDILNMKSACAYIRVSTDKQEELSPDAQKRLLIDFAKKNNMSLLAENIYIDNGISGKKADKRPEFMKMIGMAKSKEHPFDVILVWKFSRFARNQEESIVYKSLLKKNRVDVVSVSEPLIDGPFGTLIERIIEWMDEYYSIRLSGEVLRGMTEKALRGGYQSSLPLGYRMNKETGIPYIYEEEAVIVRKIYNDYIAGHSYLEIARKLNAIGYKTKRGATFEGRTVEYILSNPFYYGAVRWNRQNHDNHTIKDISEWIIVMGKHPAIIDKETWDLVQHLMALRSKPYKARAAGHMRHWLGGIVKCSDCGASLMAGLNATRYQCGNYNKGKCLHSHFIKTAALEQAVYNAFERVFDGTAELHYELKKASNEANTDDKDILLSKLSKLDDKEARIKQAYRDGIDTIEEYKENKQLLKDERKALEKQLEAFSLASDVSNAAMLKNISTVYDIIKDTSNDTLTRANAIRSVVDHMVYDKENDKLEVYFFLQK

SEQ ID NO: 6609 - protein, 488 aa, Unknown
  Description of Unknown: Integrase B6610 sequence
  PTHR30461:SF3,IPR036162,PS51737,IPR011109,PTHR30461, PS00397,PF00239,G3DSA:1.10.10.2600,IPR006119,SSF53041, cd00338,SM00857,IPR025827,IPR038109,PS51736, IPR006118,PF13408,G3DSA:3.40.50.1390,PF07508,Coil
MAKNILNMKIAAGYIRVSTDKQEELSPDAQKRLLIDYAKKHNISLLVENIYIDNGISGKKADKRPEFMKMIGMAKSKEHPFDVILVWKFSRFARNQEESIVYKSLLKKNNVEVVSVSEPLIDGPFGSLIERIIEWMDEYYSIRLSGEVLRGMTEKALRGGYQSSLPLGYKMNKDTGIPYIYESEAIIVRKIYKEYIDGHSYLEIARELNALGYKTKRGAAYEGRTVEYILSNPFYYGAVRWNRQKHDDHTIKDVGDWIIVMGKHPAIIEKETWGEVQHLMALRSRPYKARAAGHMKHWLGGIVKCSDCGASLMAGLNATRYQCGNYNKGKCSHSHYIKTAALEQAIYEAFERVLDGSMDLHYELKKSPNDGNTTNRDMILNQISKLGDKEARIKQAYRDGIDTIEEYKENKQLIENERKSLEAQLDSLKSSEADSSDEMLQHITSVLNIIKDTSKDTLTRANAIRSVVDHCVYDKENDKLEVYFFLQK

SEQ ID NO: 6610 - protein, 488 aa, Unknown
  Description of Unknown: Integrase B6611 sequence
  PTHR30461:SF3,IPR036162,PS51737,IPR011109,PTHR30461, PS00397,PF00239,G3DSA:1.10.10.2600,IPR006119,SSF53041, cd00338,SM00857,IPR025827,IPR038109,PS51736, IPR006118,PF13408,G3DSA:3.40.50.1390,PF07508,Coil
MATDIANMKVACAYIRVSTDKQEELSPDAQKRLLIDYAKKHNISLLAENIYIDNGISGKKADKRPEFMKMISLAKSKEHPFDIILVWKFSRFARNQEESIVYKSLLKKNNVEVVSISEPLIDGPFGSLIERIIEWMDEYYSIRLSGEVLRGMTEKALRGGYQSSLPLGYKMNKDTGIPYIYEPEAIIVRKIFKDYIAGHSYLEIARELNALGYKTKRGAAFEGRTVEYILSNPFYYGAIRWNRQKHDDHTIKDISEWIIVTGKHPAIIDKETWDEVQHLMALRSRPYKARAAGHMKHWLGGIVKCSNCGASLMAGLNATRYQCGNYNKGKCSHSHYIKTAALEQAIYEAFERVLDGSMDLHYELKKSPNDGNTTDRDMILNQISKLGDKEARIKQAYRDGIDTIDEYKENKQIIDNERKALEAQLDSLKTSEADSSDEMLQNITSVLGIIKDTSKDTLTRANAIRSVVDHCVYDKEYDKLEVYFFLQK

SEQ ID NO: 6611 - protein, 488 aa, Unknown
  Description of Unknown: Integrase B6612 sequence
  PTHR30461:SF3,IPR036162,PS51737,IPR011109,PTHR30461, PS00397,PF00239,G3DSA:1.10.10.2600,IPR006119,SSF53041, cd00338,SM00857,IPR025827,IPR038109,PS51736, IPR006118,PF13408,G3DSA:3.40.50.1390,PF07508,Coil
MAKNILNMKIAAGYIRVSTDKQEELSPDAQKRLLIDYAKKNNISLLAENIYIDNGISGKKADKRPEFMKMIGMAKSKEHPFDVILVWKFSRFARNQEESIVYKSLLKKNNVEVVSVSEPLIDGPFGSLIERIIEWMDEYYSIRLSGEVLRGMTEKALRGGYQSSLPLGYRMNKDTGIPYIYEPEAIIVRKIYKEYVAGHSYLEIARELNALGYKTKRGAAYEGRTVEYILSNPFYYGAVRWNRQKHDDHTIKDVGDWIIVMGKHPAIIDKETWDEVQHLMALRSRPYKARAAGHMKHWLGGIVKCSDCGASLIAGLNATRYQCGNYNKGKCSHSHFIKTAALEEAVYEAFDRVMQNPDELHYELKKPSNEANANDKDMILNQISKLSDKEARIKQAYRDGIDTIDEYKENKQIIDNERKNLEAQLYSLKTSEADSSDEMLQNITSVLGIIKDTSKDTLTRANAIRSVVDHCVYDKENDKLEVYFFLQK

SEQ ID NO: 6612 - protein, 488 aa, Unknown
  Description of Unknown: Integrase B6613 sequence
  PTHR30461:SF3,IPR036162,PS51737,IPR011109,PTHR30461, PS00397,PF00239,G3DSA:1.10.10.2600,IPR006119,SSF53041, cd00338,SM00857,IPR025827,IPR038109,PS51736, IPR006118,PF13408,G3DSA:3.40.50.1390,PF07508,Coil
MKKIAAAYIRVSTHMQEELSPDAQLRFIRTWADAHGYYVPDEFVFIDSGISGRKAKKRHDFLRMVGLAKTKPAAPFEAILLWKFNRFARNQEESIVYKSMLRKKCNVDVISTTQQTTKDIYGDLIERIIEWTDEFYSIQLGEDVFRGMTENALRGHFQSSPAFGYKVEQKGQGPVVVEDQASIVRMIYNLYTTSTMGFYEIARYLNRIGYKTARNKPFENRTIRYIIQNPIYKGYLRWNYQSNATKEIKDASEWIIVKSSQITPIVSEELWNQANDRLKQEYHPKGGKPVSKHRHWLSGLVKCSSCGASLSTSVQYRHDRTYINFQCYKYLKGKCMVSHGISEKKLVPLILNVLKEDMNKSYIECERIEKVVENQQDILDVQLKRLDAREVRIKEAYLNGVDSLAEYKSNKEQIQQERELLLQQSQNHDKEEKGSNELPNKIRGVYDILVSDQCSKDEKQAAIRSIVKKIVFDKENKTLDFHYYIKED

SEQ ID NO: 6613 - protein, 488 aa, Unknown
  Description of Unknown: Integrase B6614 sequence
  PTHR30461:SF3,IPR036162,PS51737,IPR011109,PTHR30461, PS00397,PF00239,G3DSA:1.10.10.2600,IPR006119,SSF53041, cd00338,SM00857,IPR025827,IPR038109,PS51736, IPR006118,PF13408,G3DSA:3.40.50.1390,PF07508,Coil
MATDIANMKVACAYIRVSTDKQEELSPDAQKRLLIDYAKKHNMSLLAENIYIDNGISGKKADKRPEFMKMISLAKSKEHPFDIILVWKFSRFARNQEESIVYKSLLKKNNVEVVSISEPLIDGPFGSLIERIIEWMDEYYSIRLSGEVLRGMTEKALRGGYQSSLPLGYRMNKDTGIPYIYEPEAIIVRKIYKEYVAGHSYLEIARELNALGYKTKRGAAYEGRTVEYILSNPFYYGAVRWNRQKHDDHTIKDVGDWIIVMGKHPAIIDKETWDEVQHLMALRSRPYKARAAGHMKHWLGGIVKCSDCGASLIAGLNATRYQCGNYNKGKCSHSHFIKTAALEEAVYEAFDRVMQNPDELHYELKKPSNEANANDKDMILNQISKLSDKEARIKQAYRDGIDTIDEYKENKQIIDNERKALEAQLYSLKTSEADSSDEMLQNITSVLGIIKDTSKDTLTRANAIRSVVDHCVYDKENDKLEVYFFLQK

SEQ ID NO: 6614 - protein, 488 aa, Unknown
  Description of Unknown: Integrase B6615 sequence
  PTHR30461:SF3,IPR036162,PS51737,IPR011109,PTHR30461, PS00397,PF00239,G3DSA:1.10.10.2600,IPR006119,SSF53041, cd00338,SM00857,IPR025827,IPR038109,PS51736, IPR006118,PF13408,G3DSA:3.40.50.1390,PF07508,Coil
MATDIANMRVACAYIRVSTDKQEELSPDAQKRLLIDYAKKHNMSLLAENIYIDNGISGKKADKRPEFMKMISLAKSKEHPFDIILVWKFSRFARNQEESIVYKSLLKKNNVEVVSISEPLIDGPFGSLIERIIEWMDEYYSIRLSGEVLRGMTEKALRGGYQSSLPLGYKMNKDTGIPYIYEPEAIVVRKIFKDYIAGHSYLEIARALNALGYKTKRGAAFEGRTVEYILSNPFYYGAIRWNRQKHDDHTIKDISEWIIVMGKHPAIIDKETWDEVQHLMALRSRPYKARAAGHMKHWLGGIVKCSDCGASLMAGLNATRYQCGNYNKGKCSHSHYIKTAALEQAIYEAFERVLDGSMDLHYELKKSPNDGNTTDRDMILNQISKLGDKEARIKQAYRDGIDTIEEYRENKQLIENERKTLEAQLDSLKSSEADSSDEMLQHITSVLNIIKDTTKDTLTRANAIRSVVDHCVYDKENDKLEVYFFLQK

SEQ ID NO: 6615 - protein, 488 aa, Unknown
  Description of Unknown: Integrase B6616 sequence
  PTHR30461:SF3,IPR036162,PS51737,IPR011109,PTHR30461, PS00397,PF00239,G3DSA:1.10.10.2600,IPR006119,SSF53041, cd00338,SM00857,IPR025827,IPR038109,PS51736, IPR006118,PF13408,G3DSA:3.40.50.1390,PF07508,Coil
MAKDILNMRSACAYIRVSTDKQEELSPDAQKRLLIDFAKKNNMSLLAENIYIDNGISGKKADKRPEFMKMIGMAKSKEHPFDVILVWKFSRFARNQEESIVYKSLLKKNRVDVVSVSEPLIDGPFGTLIERIIEWMDEYYSIRLSGEVLRGMTEKALRGGYQSSLPLGYRMNKETGIPYIYEDEAIIVRKIYNDYIAGHSYLEIARELNALGYKTKRGATFEGRTVEYILSNPFYYGAVRWNRQNHDNHTIKDISEWIIVMGKHPAIIDKETWDLVQYLMALRSKPYKARAAGHMKHWLGGIVKCSNCGASLMAGLNATRYQCGNYNKGKCLHSHFIKTAALEQAVYNAFERVFDGTAELHYELKKASNEANTDDRDILLSKLSKLDDKEARIKQAYRDGIDTIEEYKENKQLLNDERKALKKQLEAFNLASDDSNADMLKSISTVYDIIKDATNDTLTRANAIRSVVDHMVYDKENDKLEVYFFLQK

SEQ ID NO: 6616 - protein, 488 aa, Unknown
  Description of Unknown: Integrase B6617 sequence
  PTHR30461:SF3,IPR036162,PS51737,IPR011109,PTHR30461, PS00397,PF00239,G3DSA:1.10.10.2600,IPR006119,SSF53041, cd00338,SM00857,IPR025827,IPR038109,PS51736, IPR006118,PF13408,G3DSA:3.40.50.1390,PF07508,Coil
MATDIVNMKVACAYIRVSTDKQEELSPDAQKRILIDFAKKNNMSLLASNIYLDNGISGKKADKRPEFMKMIGMAKSKEHPFDVILVWKFSRFARNQEESIVYKSLLKKNHVEVVSVSEPLVDGPFGTLIERIIEWMDEYYSIRLSGEVLRGMTEKALRGGYQSSLPLGYRMNKDTGIPYIYEDEAIIVKKIYKDYIAGHSYLEIARELNALGYTTKRGAAFEGRTVEYILSNPFYYGAIRWNRQKHDDHTIKDISEWIIVMGKHPAIIDKETWDEVQHLMALRSRPYKARAAGHMKHWLGGIVKCSDCGASLMAGLNATRYQCGNYNKGKCSHSHYIKTAALEQAIYEAFERVLDGSMDLHYELKKSPNDGNTTDRDMILNQISKLGDKEARIKQAYRDGIDTIDEYKENKQIIDNERKALEAQLDSLKTSEADSSDEMLQHITSVLNIIKDTSKDTLTRANAIRSVVDHCVYDKENDKLEVYFFLQK

SEQ ID NO: 6617 - protein, 488 aa, Unknown
  Description of Unknown: Integrase B6618 sequence
  PTHR30461:SF3,SM00857,G3DSA:1.10.10.2600,IPR036162,PF13408, PS51737,IPR025827,G3DSA:3.40.50.1390,IPR006119,IPR038109, PF07508,IPR011109,SSF53041,PTHR30461,Coil, PS51736,cd00338,PF00239
MKKAVGYCRFSTDMQREESIMAQMRAIDEFAKRESIEIIKYYKDQGQSGTSDNRDDFQLMMKEVKNIDYVIVHKFDRFARNSFDHVINERKLNNKGIKLVSVLEPVGENPESILTKNLLIGMNEYFSLNLSREVKKGHKENALQCKFNGGTPPLGYKIVDGFYKIDEEEAKIVEKIFALRLQNYSYQKIADTLNGLGYKNKYGKEFNRNSFYEMLQNKRYKGTYIYGVNDGSGEVRNYRKRNSEWVEIEDAIPAIITKEVWEEVNKKYRKRSGAFKKDARDYILSGLVFCEQCGAPMLGCSRQSSTGKKYYYYRCNDRCGAKSIRADLLEEVVTSLIRDHLIHEKNIDVIVDYVVSNYEMENPYRELEKQKNKLIRQRDNIVNLMAETGSKALIDKLEQLDRQIDNIYIPPFKQVVLDRDVIKKRYLQFLHEPLTGSMIRLLIKKIKVNDHKTIINLVNYPNELLNGYSNGAGKTPQNLYPREIELIS

SEQ ID NO: 6618 - protein, 488 aa, Unknown
  Description of Unknown: Integrase B6619 sequence
  PTHR30461:SF3,IPR036162,PS51737,IPR011109,PTHR30461, PS00397,PF00239,G3DSA:1.10.10.2600,IPR006119,SSF53041, cd00338,SM00857,IPR025827,IPR038109,PS51736, IPR006118,PF13408,G3DSA:3.40.50.1390,PF07508,Coil
MAKNILNMKIAAGYIRVSTDKQEELSPDAQKRLLIDYAKKNNISLPAENIYIDNGISGKKADKRPEFMKMIGMAKSKEHPFDVILVWKFSRFARNQEESIVYKSLLKKNNVEVVSVSEPLIDGPFGSLIERIIEWMDEYYSIRLSGEVLRGMTEKALRGGYQSSLPLGYKMNKDTGIPYIYEDEAIIVKKIYNDYISGHSYLEIARELNALGYTTKRGAAFEGRTVEYILSNPFYYGAIRWNRQKHDDHTIKDISEWIIVMGKHPAIIDKETWDEVQHLMALRSRPYKSRAAGHMKHWLGGIVKCSDCGASLIAGLNATRYQCGNYNKGKCSHSHFIKTAALEEAVYEAFDRVMQNPDELHYELKKASNEVNTNDRDMILNQISKLSDKEARIKQAYRDGIDTIDEYKENKQIIDNERKALEAQLYSLKTSEADSSDEMLQNITSVLGIIKDTSKDTLTRANAIRSVVDHCVYDKENDKLEVYFFLQK

SEQ ID NO: 6619 - protein, 488 aa, Unknown
  Description of Unknown: Integrase B6620 sequence
  PTHR30461:SF3,IPR036162,PS51737,IPR011109,PTHR30461, PS00397,PF00239,G3DSA:1.10.10.2600,IPR006119,SSF53041, cd00338,SM00857,IPR025827,IPR038109,PS51736, IPR006118,PF13408,G3DSA:3.40.50.1390,PF07508,Coil
MAKDILNMKSACAYIRVSTDKQEELSPDAQKRLLIDFAKKNNMSLLAENIYIDNGISGKKADKRPEFMKMIGMAKSKEHPFDVILVWKFSRFARNQEESIVYKSLLKKNRVDVVSVSEPLIDGPFGTLIERIIEWMDEYYSIRLSGEVLRGMTEKALRGGYQSSLPLGYRMNKETGIPYIYEEEAVIVRKIYNDYIAGHSYLEIARELNAIGYKTKRGATFEGRTVEYILSNPFYYGAVRWNRQNHDNHTIKDISEWIIVMGKHPAIIDKETWDLVQHLMALRSKPYKARAAGHMRHWLGGIVKCSDCGASLMAGLNATRYQCGNYNKGKCLHSHFIKTAALEQAVYNAFERVFDGTTELHYELKKASNEANTNDRDILLSKLSKLDDKEARIKQAYRDGIDTIEEYKENKQLLNDERKALEKQLEAFSLASDDSNADMLKNISTVYDIIKDTSNDTLTRANAIRSVVDHMVYDKENDKLEVYFFLQK

SEQ ID NO: 6620 - protein, 488 aa, Unknown
  Description of Unknown: Integrase B6621 sequence
  PTHR30461:SF3,IPR036162,PS51737,IPR011109,PTHR30461, PS00397,PF00239,G3DSA:1.10.10.2600,IPR006119,SSF53041, cd00338,SM00857,IPR025827,IPR038109,PS51736, IPR006118,PF13408,G3DSA:3.40.50.1390,PF07508,Coil
MARDILNMKSACAYIRVSTDKQEELSPDAQKRLLIDFAKKNNMSLLAENIYIDNGISGKKAYKRPEFMKMIGLAKSKEHPFDVILVWKFSRFARNQEESIVYKSLLKKNHVDVMSVSEPLIDGPFGTLIERIIEWMDEYYSIRLSGEVLRGMTEKALRGGYQSSLPLGYRMNKDTGIPYIYEEEAVIVRKIYNDYIAGHSYLEIARELNALGYKTKRGAAFEGRTVEYILSNPFYYGAVRWNRQNHDNHTIKDISEWIIVMGKHPAIINKETWDLVQHLMALRSKPYKARAAGHMKHWLGGIVKCSDCGASLMAGLNATRYQCGNYNKGKCLHSHFIKTAALEQAVYNAFERVFDGTAELHYELKKASNEANTDDRDILLSKLSKLDDKEARIKQAYRDGIDTIEEYKENKQLLKNERKSLEKQLEAINLASDDSNADMLKNISTVYDIIKDTSNDTLTRANAIRSVVDHMVYDKENDKLEVYFFLQK

SEQ ID NO: 6621 - protein, 488 aa, Unknown
  Description of Unknown: Integrase B6622 sequence
  PTHR30461:SF3,IPR036162,PS51737,IPR011109,PTHR30461, PS00397,PF00239,G3DSA:1.10.10.2600,IPR006119,SSF53041, cd00338,SM00857,IPR025827,IPR038109,PS51736, IPR006118,PF13408,G3DSA:3.40.50.1390,PF07508,Coil
MATDIANMKVACAYIRVSTDKQEELSPDAQKRLLIDYAKKHNMSLLAENIYIDNGISGKKADKRPEFMKMISLAKSKEHPFDIILVWKFSRFARNQEESIVYKSLLKKNNVEVVSISEPLIDGPFGSLIERIIEWMDEYYSIRLSGEVLRGMTEKALRGGYQSSLPLGYKMNKDTGIPYIYEPEAIIVRKIFKDYIAGYSYLEIARELNALGYKTKRGAAFEGRTVEYILSNPFYYGAIRWNRQKHDDHTIKDISEWIIVMGKHPAIIDKETWDEVQHLMALRSRPYKARAAGHMKHWLGGIVKCSDCGASLMAGLNATRYQCGNYSKGKCSHSHYIKTAALEQAIYEAFERVLDGSMDLHYELKKSPNEGNTTDKDMILNQISKLSDKEARIKQAYRDGIDTIEEYKENKQLIENERKTLEAQLDSLKSSEADSSDEMLQHITSVLNIIKDTTKDTLTRANAIRSVVDHCVYDKENDKLEVYFFLQK

SEQ ID NO: 6622 - protein, 488 aa, Unknown
  Description of Unknown: Integrase B6623 sequence
  PTHR30461:SF3,IPR036162,PS51737,IPR011109,PTHR30461, PS00397,PF00239,G3DSA:1.10.10.2600,IPR006119,SSF53041, cd00338,SM00857,IPR025827,IPR038109,PS51736, IPR006118,PF13408,G3DSA:3.40.50.1390,PF07508,Coil
MKKIAAAYIRVSTHMQEELSPDAQLRFIRTWADAHGYYVPDEFVFIDSGISGRKAKKRHDFLRMVGLAKTKPAAPFEAILLWKFNRFARNQEESIVYKSMLRKKCNVDVISTTQQTTKDIYGDLIERIIEWTDEFYSIQLGEDVFRGMTENALRGHFQASPAFGYKVEQKGQGPVVVEDQASIVRMIYNLYTTSTMGFYEIARYLNEIGYKTARNKPFENRTIRYIIQNPIYKGYLRWNYQSNATKEIKDASEWIIVNSSQITPIVSEELWNQANDRLKREYHPKGGKPVSKHRHWLSGLVKCSSCGASLSTSVQHRHDRTYINFQCYKYLKGKCMVSHGISEKKLVPLILNVLKEDMNKSYIECERIEKVVENQQDILDVQLKRLNAREVRIKEAYLNGVDSLAEYKSNKEQIQQERELLLKQLQNHGEEEKGSNELPNKIRGVYDILVSDQCSKDEKQAAIRSIVKKIVFDKENKTLDFHYYIKED

SEQ ID NO: 6623 - protein, 488 aa, Unknown
  Description of Unknown: Integrase B6624 sequence
  PTHR30461:SF3,IPR036162,PS51737,IPR011109,PTHR30461, PS00397,PF00239,G3DSA:1.10.10.2600,IPR006119,SSF53041, cd00338,SM00857,IPR025827,IPR038109,PS51736, IPR006118,PF13408,G3DSA:3.40.50.1390,PF07508,Coil
MATDIANMKVACAYIRVSTDKQEELSPDAQKRLLIDYAKKHNMSLLAENIYIDNGISGKKADKRPEFMKMISLAKSKEHPFDIILVWKFSRFARNQEESIVYKSLLKKNNVEVVSISEPLIDGPFGSLIERIIEWMDEYYSIRLSGEVLRGMTEKALRGGYQSSLPLGYRMNKDTGIPYIYEPEAIIVRKIYKEYVAGHSYLEIARELNALGYKTKRGAAYEGRTVEYILSNPFYYGAVRWNRQKHDDHTIKDVGDWIIVMGKHPAIIDKETWDEVQHLMALRSRPYKARAAGHMKHWLGGIVKCSDCGASLIAGLNATRYQCGNYNKGKCSHSHFIKTAALEEAVYEAFDRVMQNPDELHYELKKPSNEANANDKDMILNQISKLSDKEARIKQAYRDGIDTIDEYKENKQIIDNERKNLEAQLYSLKTSEADSSDEMLQNITSVLGIIKDTSKDTLTRANAIRSVVDHCVYDKENDKLEVYFFLQK

SEQ ID NO: 6624 - protein, 488 aa, Unknown
  Description of Unknown: Integrase B6625 sequence
  PTHR30461:SF3,IPR036162,PS51737,IPR011109,PTHR30461, PS00397,PF00239,G3DSA:1.10.10.2600,IPR006119,SSF53041, cd00338,SM00857,IPR025827,IPR038109,PS51736, IPR006118,PF13408,G3DSA:3.40.50.1390,PF07508,Coil
MAKNILNMKIASGYIRVSTDKQEELSPDAQKRLLIDYAKKNNISLLAENIYIDNGISGKKADKRPEFMKMIGMAKSKEHPFDVILVWKFSRFARNQEESIVYKSLLKKNNVEVVSVSEPLIDGPFGSLIERIIEWMDEYYSIRLSGEVLRGMTEKALRGGYQSSLPLGYKMNKDTGIPYIYEDEAIIVKKIYNDYISGHSYLEIARELNALGYTTKRGAAFEGRTVEYILSNPFYYGAIRWNRQKHDDHTIKDISEWIIVMGKHPAIIDKETWDEVQHLMALRSRPYKSRAAGHMKHWLGGIVKCSDCGASLIAGLNATRYQCGNYNKGKCSHSHYIKTAALEQAIYEAFERVLDGSMDLHYELKKSPNDGNTTDRDMILNQISKLGDKEARIKQAYRDGIDTIEEYKENKQLIENERKSLEAQLDSLKSSEADSSDEMLQHITSVLNIIKDTSKDTLTRANAIRSVVDHCVYDKENDKLEVYFFLQK

SEQ ID NO: 6625 - protein, 488 aa, Unknown
  Description of Unknown: Integrase B6626 sequence
  PTHR30461:SF3,SM00857,G3DSA:1.10.10.2600,IPR036162,PF13408, PS51737,G3DSA:3.40.50.1390,IPR025827,IPR006119,IPR038109, PF07508,IPR011109,SSF53041,PTHR30461,Coil, PS51736,cd00338,PF00239
MPEALNAVIYARYSSDRQTEQSIEGQLRECYAFAKANDIAVIDTYIDRAISGKTDNRPAFQKMIEDSAKRQFQAVIVYRLDRFTRNRYDSAIYKARLKKNGVKVLSAMENLNGSPESIIMESLLEGMAEYYSVELSQKITRGMRENALKGKALGGQRVLGYKVNSDCYFEIDETTAPVVVDIFKLYSSGKTVKEICDILNARGVKTARGGAFNKNSLHTILTNKKYIGIYKTKYGEIVGGIPAIIDKELFEMVALRMEQNKKAPARAKAEINYLLSTKLFCGKCRSAMVGESGTSKTGKKYYYYACVKKKREKACDKSNVKKDWIEDLVIQRTVTDILKDDVIDKIADRLVELQKAEAAESGTMLYLENSLAEIQVSIKNIMTAIEKGIITESTKTRLTELEDEKRNVEIEIAKESIARRIISREQIIYWISSFKDGDITSEKYRQQLIDTFVHAVFVYDDKIVITYNYSGENNTATISDLDLSSPPF

SEQ ID NO: 6626 - protein, 488 aa, Unknown
  Description of Unknown: Integrase B6627 sequence
  PTHR30461:SF3,IPR036162,PS51737,IPR011109,PTHR30461, PS00397,PF00239,G3DSA:1.10.10.2600,IPR006119,SSF53041, cd00338,SM00857,IPR025827,IPR038109,PS51736, IPR006118,PF13408,G3DSA:3.40.50.1390,PF07508,Coil
MAKDILNMKSACAYIRVSTDKQEELSPDAQKRLLIDFAKKNNMSLLASNIYLDNGISGKKADKRPEFMKMIGMAKSKEHPFDVILVWKFSRFARNQEESIVYKSLLKKNRVDVVSVSEPLIDGPFGTLIERIIEWMDEYYSIRLSGEVLRGMTEKALRGGYQSSLPLGYRMNKETGIPYIYEEEAVIVRKIYNDYIAGHSYLEIARELNALGYKTKRGAAFEGRTVEYILSNPFYYGAVRWNRQNHDNHTIKDISEWIIVMGKHPAIINKETWDLVQHLMALRSKPYKARAAGHMKHWLGGIVKCSDCGASLMAGLNATRYQCGNYNKGKCLHSHFIKTAALEQAVYNAFERVFDGTAELHYELKKASNEANTDDRDILLSKLSKLDDKEARIKQAYRDGIDTIEEYKENKQLLKNERKALEKQLEAINLASDDSNADMLKNISTVYDIIKDTSNDTLTRANAIRSVVDHMVYDKENDKLEVYFFLQK

SEQ ID NO: 6627 - protein, 488 aa, Unknown
  Description of Unknown: Integrase B6628 sequence
  PTHR30461:SF3,IPR036162,PS51737,IPR011109,PTHR30461, PS00397,PF00239,G3DSA:1.10.10.2600,IPR006119,SSF53041, cd00338,SM00857,IPR025827,IPR038109,PS51736, IPR006118,PF13408,G3DSA:3.40.50.1390,PF07508,Coil
MQTASARIAALYIRVSTDKQEELSPDAQKRLLLDYAEKNNMIISEQYIFIESGISGKKADKRPQFQKMIGLAKQKDHPFHVILVWKYSRFARNQEESIVYKSLLKKNGVDVISISEPLVDGPFGSLIERIIEWMDEYYSIRLSGEVYRGMTEKALRGGYQASPPLGYRIEHHGSIPVIVSEEAEIVKTIFNKYVYEGLTSFQLAKYLNALNLKTKQGKKFERRSVEYIIQNPIYKGYIRWNRVHNDSRTVKDESEWIIEKGEQEPIISEELFEKAQERFNREYAPLSKSRPVTEYKHWLSGLIKCVHCGRTMTSSTTTRSKYRQFICNGYNKGKCPISNSVSENILIPYIMKSLEEIIASEQVEYEIIKHEYKSDTTLLEQQLNKILSKEKRVKNAYVNGIDTLEEYKRNKEMLLKEKKDVMKQINQLKNNIDKDHTSEMVQRIKEVYQIITNDKIDNITKNKAMKSIIEKIVYNKREGIIDFYYYYS

SEQ ID NO: 6628 - protein, 488 aa, Unknown
  Description of Unknown: Integrase B6629 sequence
  PTHR30461:SF3,IPR036162,PS51737,IPR011109,PTHR30461, PS00397,PF00239,G3DSA:1.10.10.2600,IPR006119,SSF53041, cd00338,SM00857,IPR025827,IPR038109,PS51736, IPR006118,PF13408,G3DSA:3.40.50.1390,PF07508,Coil
MATDIANMKVACAYIRVSTDKQEELSPDAQKRLLIDYAKKHNMSLLAENIYIDNGISGKKADKRPEFMKMISLAKSKEHPFDIILVWKFSRFARNQEESIVYKSLLKKNNVEVVSISEPLIDGPFGSLIERIIEWMDEYYSIRLSGEVLRGMTEKALRGGYQSSLPLGYKMNKDTGIPYIYEPEAIIVRKIFKDYIAGHSYLEIARELNALGYKTKRGAAFEGRTVEYILSNPFYYGAIRWNRQKHDDHTIKDISEWIIVTGKHPAIIDKETWDEVQHLMALRSRPYKARAAGHMKHWLGGIVKCSNCGASLMAGLNATRYQCGNYNKGKCSRSHYIKTAALEQAIYEAFERVLDGSMDLHYELKKSPNDGNTTDRDMILNQMSKLCDKEARIKQAYRDGIDTIDEYKENKQIIDNERKALEAQLDSLKTSEADSSDEMLQNITSVLGIIKDTSKDTLTRANAIRSVVDHCVYDKENDKLEVYFFLQK

SEQ ID NO: 6629 - protein, 488 aa, Unknown
  Description of Unknown: Integrase B6630 sequence
  PTHR30461:SF3,IPR036162,PS51737,IPR011109,PTHR30461, PS00397,PF00239,G3DSA:1.10.10.2600,IPR006119,SSF53041, cd00338,SM00857,IPR025827,IPR038109,PS51736, IPR006118,PF13408,G3DSA:3.40.50.1390,PF07508,Coil
MATDIANMKVACAYIRVSTDKQEELSPDAQKRLLIDYAKKHNMSLLAENIYIDNGISGKKADKRPEFMKMISLAKSKEHPFDIILVWKFSRFARNQEESIVYKSLLKKNNVEVVSISEPLIDGPFGSLIERIIEWMDEYYSIRLSGEVLRGMTEKALRGGYQSSLPLGYKMNKDTGIPYIYEPEAIIVRKIYKEYVAGHSYLEIARELNALGYKTKRGAAYEGRTVEYILSNPFYYGAVRWNRQKHDDHTIKDVGDWIIVMGKHPAIIDKETWDEVQHLMALRSRPYKARAAGHMKHWLGGIVKCSDCGASLMAGLNATRYQCGNYNKGKCSHSHYIKTAALEEAVYEAFDRVMQNPDELHYELKKASNEANTNDRDMILNQISKLSDKEARIKQAYRDGIDTIDEYKENKQIIDNERKALEAQLYSLKTSEADSSDEMLQNITSVLGIIKDTSKDTLTRANAIRSVVDHCVYDKENDKLEVYFFLQK

SEQ ID NO: 6630 - protein, 488 aa, Unknown
  Description of Unknown: Integrase B6631 sequence
  PTHR30461:SF3,IPR036162,PS51737,IPR011109,PTHR30461, PS00397,PF00239,G3DSA:1.10.10.2600,IPR006119,SSF53041, cd00338,SM00857,IPR025827,IPR038109,PS51736, IPR006118,PF13408,G3DSA:3.40.50.1390,PF07508,Coil
MATDIANMKVACAYIRVSTDKQEELSPDAQKRLLIDYAKKHNMSLLAENIYIDNGISGKKADKRPEFMKMISLAKSKEHPFDIILVWKFSRFARNQEESIVYKSLLKKNNVEVVSISEPLIDGPFGSLIERIIEWMDEYYSIRLSGEVLRGMTEKALRGGYQSSLPLGYKMNKDTGIPYIYEDEAIIVKKIYNDYISGHSYLEIARELNALGYTTKRGAAFEGRTVEYILSNPFYYGAIRWNRQKHDDHTIKDISEWIIVMGKHPAIIDKETWDEVQHLMALRSRPYKSRAAGHMKHWLGGIVKCSDCGASLIAGLNATRYQCGNYNKGKCSHSHFIKTAALEEAVYEAFDRVMQNPDELHYELKKASNEVNTNDRDMILNQISKLSDKEARIKQAYRDGIDTIDEYKENKQIIDNERKALEAQLYSLKTSEADSSDEMLQNITSVLGIIKDTSKDTLTRANAIRSVVDHCVYDKENDKLEVYFFLQK

SEQ ID NO: 6631 - protein, 488 aa, Unknown
  Description of Unknown: Integrase B6632 sequence
  PTHR30461:SF3,IPR036162,PS51737,IPR011109,PTHR30461, PS00397,PF00239,G3DSA:1.10.10.2600,IPR006119,SSF53041, cd00338,SM00857,IPR025827,IPR038109,PS51736, IPR006118,PF13408,G3DSA:3.40.50.1390,PF07508,Coil
MKKIAAAYIRVSTHMQEELSPDAQLRFIRTWADAHGYYVPDEFVFIDSGISGRKAKKRHDFLRMVGLAKTKPAAPFEAILLWKFNRFARNQEESIVYKSMLRKKCNVDVISTTQQTTKDIYGDLIERIIEWTDEFYSIQLGEDVFRGMTENALRGHFQASPAFGYKVEQKGQGPVVVEDQASIVRMIYNLYTTSTMGFYEIARYLNEIGYKTARNKPFENRTIRYIIQNPIYKGYLRWNYQSNATKEIKDASEWIIVKSSQITPIVSEELWNQANDRLKQEYHPKGGKPVSKHRHWLSGLVKCSSCGASLSTSVQYRHDRTYINFQCYKYLKGKCMVSHGISEKKLVPLILNVLKEDMNKSYIECERIEKVVENQQDILDVQLKRLDAREVRIKEAYLNGVDSLAEYKSNKEQIQQERELLLQQSQNHDKEEKGSNELPNKIRGVYDILVSDQCSKDEKQAAIRSIVKKIVFDKENKTLDFHYYIKED

SEQ ID NO: 6632 - protein, 488 aa, Unknown
  Description of Unknown: Integrase B6633 sequence
  PTHR30461:SF3,IPR036162,PS51737,IPR011109,PTHR30461, PS00397,PF00239,G3DSA:1.10.10.2600,IPR006119,SSF53041, cd00338,SM00857,IPR025827,IPR038109,PS51736, IPR006118,PF13408,G3DSA:3.40.50.1390,PF07508,Coil
MAKNILNMKIAAGYIRVSTDKQEELSPDAQKRLLIDYAKKNNISLLAENIYIDNGISGKKADKRPEFMKMIGMAKSKEHPFDVILVWKFSRFARNQEESIVYKSLLKKNNVEVVSVSEPLIDGPFGSLIERIIEWMDEYYSIRLSGEVLRGMTEKALRGGYQSSLPLGYKMNKDTGIPYICEPDAIIVRKIFKDYIDGRSYLEIARELNALGYKTKRGAAFEGRTVEYILSNPFYYGAIRWNRQKHDDHTIKDISEWIIVMGKHPAIIDKETWDEVQHLMALRSRPYKARAAGHMKHWLGGIVKCSDCGASLMAGLNATRYQCGNYNKGKCSHSHYIKTAALEQAIYEAFERVLDGSMDLHYKLKKSPNDGNTTDRDMILNQISKLGDKEARIKQAYRDGIDTIEEYKENKQLIENERKSLEAQLDSLKSSEVDSSDEMLQHITSVLNIIKDTSKDTLTRANAIRSVVDHCVYDKENDKLEVYFFLQK

SEQ ID NO: 6633 - protein, 488 aa, Unknown
  Description of Unknown: Integrase B6634 sequence
  PTHR30461:SF3,IPR036162,PS51737,IPR011109,PTHR30461, PS00397,PF00239,G3DSA:1.10.10.2600,IPR006119,SSF53041, cd00338,SM00857,IPR025827,IPR038109,PS51736, IPR006118,PF13408,G3DSA:3.40.50.1390,PF07508,Coil
MATDIANMKVACAYIRVSTDKQEELSPDAQKRLLIDYGKKHNMSLLAENIYIDNGISGKKADKRPEFMKMISLAKSKEHPFDIILVWKFSRFARNQEESIVYKSLLKKNNVEVVSISEPLIDGPFGSLIERIIEWMDEYYSIRLSGEVLRGMTEKALRGGYQSSLPLGYKMNKDTGIPYIYEPEAIIVRKIYKEYVAGHSYLEIARELNALGYKTKRGAAYEGRTVEYILSNPFYYGAVRWNRQKHDDHTIKDVGDWIIVMGKHPAIIDKETWDEVQHLMALRSRPYKARAAGHMKHWLGGIVKCSDCGASLIAGLNATRYQCGNYNKGKCSHSHFIKTAALEEAVYEAFDRVMQNPDELHYELKKPSNEANANDKDMILNQISKLSDKEARIKQAYRDGIDTIDEYKENKQIIDNERKNLEAQLYSLKTFEADSSDEMLQNITSVLGIIKDTSKDTLTRANAIRSVVDHCVYDKENDKLEVYFFLQK

SEQ ID NO: 6634 - protein, 488 aa, Unknown
  Description of Unknown: Integrase B6635 sequence
  PTHR30461:SF3,IPR036162,PS51737,IPR011109,PTHR30461, PS00397,PF00239,G3DSA:1.10.10.2600,IPR006119,SSF53041, cd00338,SM00857,IPR025827,IPR038109,PS51736, IPR006118,PF13408,G3DSA:3.40.50.1390,PF07508,Coil
MAKDILNMKSACAYIRVSTDKQEELSPDAQKRLLIDFAKKNNMSLLAENIYIDNGISGKKADKRPEFMKMIGMAKSKEHPFDVILVWKFSRFARNQEESIVYKSLLKKNRVDVVSVSEPLIDGPFGTLIERIIEWMDEYYSIRLSGEVLRGMTEKALRGGYQSSLPLGYRMNKETGIPYIYEEEAVIVRKIYNDYIAGHSYLEIARELNAIGYKTKRGATFEGRTVEYILSNPFYYGAVRWNRQNHDNHTIKDISEWIIVMGKHPAIIDKETWDLVQHLMALRSKPYKARAAGHMKHWLGGIVKCSDCGASLMAGLNATRYQCGNYNKGKCLHSHFIKTAALEQAVYNAFERVFDGTAELHYELKKASNEANTDDKDILLSKLSKLDDKEARIKQAYRDGIDTIEEYKENKQLLNDERKALEKQLEAFSLASDVSNAAMLKSISTVYDIIKDTSKDTLTRANAIRSVVDHCVYDKENDKLEIYFFLQK

SEQ ID NO: 6635 - protein, 488 aa, Unknown
  Description of Unknown: Integrase B6636 sequence
  PTHR30461:SF3,IPR036162,PS51737,IPR011109,PTHR30461, PS00397,PF00239,G3DSA:1.10.10.2600,IPR006119,SSF53041, cd00338,SM00857,IPR025827,IPR038109,PS51736, IPR006118,PF13408,G3DSA:3.40.50.1390,PF07508,Coil
MAKDILNMKSACAYIRVSTDKQEELSPDAQKRLLIDFAKKNNMSLLASNIYLDNGISGKKADKRPEFMKMIGMAKSKEHPFDVILVWKFSRFARNQEESIVYKSLLKKNHVEVVSVSEPLVDGPFGTLIERIIEWMDEYYSIRLSGEVLRGMTEKALRGGYQSSLPLGYRMNKDTGIPYIYEEEAVIVRKIYNDYIAGHSYLEIARELNALGYKTKRGAAFEGRTVEYILSNPFYYGAVRWNRQNHDNHTIKDISEWIIVMGKHPAIINKETWDLVQHLMALRSKPYKARAAGHMKHWLGGIVKCSDCGASLMAGLNATRYQCGNYNKGKCLHSHFIKTAALEQAVYNAFERVFDGTAELHYELKKASNEANTDDRDILLSKLSKLDDKEARIKQAYRDGIDTIEEYKENKQLLKNERKSLEKQLEAINLASDDSNADMLKNISTVYDIIKDTSNDTLTRANAIRSVVDHMVYDKENDKLEVYFFLQK

SEQ ID NO: 6636 - protein, 488 aa, Unknown
  Description of Unknown: Integrase B6637 sequence
  PTHR30461:SF3,cd00338,SM00857,G3DSA:1.10.10.2600,IPR036162, PS51737,G3DSA:3.40.50.1390,IPR006119,IPR038109,PF07508, SSF53041,IPR011109,PTHR30461,PS51736,Coil, PF00239
MGGRAAIYARFSSHNQRGESIEIQVEKSRAYCAENDLRVVATYCDFAQTGTNTDRAEFQRMMADAKRGLFDFVVIYKVTRIMRNRDEMAMARIMLRRCRVEILYAGEDISDGSAGVLQLGMLEVLAEYESALDGERIRDGIQKNAERCMANGCVRYGWDIVDGRYVVNEEEAAAIRLGVRMVLSGKSVADVVRAWEPYRTKRGGKWRFQTVRRILMRRENGGEYRYAGVVVPGGMPAIVPMDDEERVIRMLEDSHRPRAKTEAWDFPLTGKLYDGRDGGLMTGTSGTGKSGRPYHYYRCRSCGRTVRRDVVEKRVADAVREALGSADSRERIARMLADAEEERADEKPLSETIKGELAKIETAFSNIWTAIESGIAPPGGKERIDALKQRQALLKDELRTAEALEAARLDYDRALFWLEGMAAAEVDDAQLLRTFVARVVLGGPDDDDGLRVAFTFDDSAGLGDNPSLPGAIGPGGEVFDRMNASSTM

SEQ ID NO: 6637 - protein, 488 aa, Unknown
  Description of Unknown: Integrase B6638 sequence
  PTHR30461:SF3,IPR036162,PS51737,IPR011109,PTHR30461, PS00397,PF00239,G3DSA:1.10.10.2600,IPR006119,SSF53041, cd00338,SM00857,IPR025827,IPR038109,PS51736, IPR006118,PF13408,G3DSA:3.40.50.1390,PF07508,Coil
MAKDILNMKSACAYIRVSTDKQEELSPDAQKRLLIDFAKKNNMSLLAENIYIDNGISGKKADKRPEFMKMIGMAKSKEHPFDVILVWKFSRFARNQEESIVYKSLLKKNRVDVVSVSEPLIDGPFGTLIERIIEWMDEYYSIRLSGEVLRGMTEKALRGGYQSSLPLGYRMNKETGIPYIYEEEAVIVRKIYNDYIAGHSYLEIARELNAIGYKTKRGATFEGRTVEYILSNPFYYGAVRWNRQNHDTHTIKDISEWIIVMGKHPAIIDKETWDLVQHLMALRSKPYKARAAGHMRHWLGGIVKCSDCGASLMAGLNATRYQCGNYNKGKCLHSHFIKTAALEQAVYNAFERVFDGTAELHYELKKASNEANTDDKDILLSKLSKLDDKEARIKQAYRDGIDTIEEYKENKQLLNDERKALEKQLEAFNLASDDSNADMLKSISTVYDIIKDATNDTLTRANAIRSVVDHMVYDKENDKLEVYFFLQK

SEQ ID NO: 6638 - protein, 488 aa, Unknown
  Description of Unknown: Integrase B6639 sequence
  PTHR30461:SF3,IPR036162,PS51737,IPR011109,PTHR30461, PS00397,PF00239,G3DSA:1.10.10.2600,IPR006119,SSF53041, cd00338,SM00857,IPR025827,IPR038109,PS51736, IPR006118,PF13408,G3DSA:3.40.50.1390,PF07508,Coil
MATDIANMKVACAYIRVSTDKQEELSPDAQKRLLIDYAKKHNMSLLAENIYIDNGISGKKADKRPEFMKMISLAKSKEHHFDIILVWKFSRFARNQEESIVYKSLLKKNNVEVVSISEPLIDGPFGSLIERIIEWMDEYYSIRLSGEVLRGMTEKALRGGYQSSLPLGYKMNKDTGIPYIYEPEAIIVRKIYKEYVAGHSYLEIARELNALGYKTKRGAAYEGRTVEYILSNPFYYGAVRWNRQKHDDHTIKDVGDWIIVMGKHPAIIDKETWDEVQHLMALRSRPYKARAAGHMKHWLGGIVKCSDCGASLMAGLNATRYQCGNYNKGKCSHSHYIKTAALEEAVYEAFDRVMQNPDELHYELKKASNEANTNDRDMILNQISKLSDKEARIKQAYRDGIDTIDEYKENKQIIDNERKALEAQLYSLKTSEADSSDEMLQNITSVLGIIKDTSKDTLTRANAIRSVVDHCVYDKENDKLEVYFFLQK

SEQ ID NO: 6639 - protein, 488 aa, Unknown
  Description of Unknown: Integrase B6640 sequence
  PTHR30461:SF3,IPR036162,PS51737,IPR011109,PTHR30461, PS00397,PF00239,G3DSA:1.10.10.2600,IPR006119,SSF53041, cd00338,SM00857,IPR025827,IPR038109,PS51736, IPR006118,PF13408,G3DSA:3.40.50.1390,PF07508,Coil
MATDIANMKVACAYIRVSTDKQEELSPDAQKRLLIDYAKKHNMSLLAENIYIDNGISGKKADKRPEFMKMISLAKSKEHPFDIILVWKFSRFARNQEESIVYKSLLKKNNVEVVSISEPLIDGPFGSLIERIIEWMDEYYSIRLSGEVLRGMTEKALRGGYQSSLPLGYKMNKDTGIPYIYEPEAIIVRKIYKEYVAGHSYLEIARELNALGYKTKRGAAYEGRTVEYILSNPFYYGAVRWNRQKHDDHTIKDVGDWIIVMGKHPAIIDKETWDEVQHLMALRSRPYKARAAGHMKHWLGGIVKCSDCGASLMAGLNATRYQCGNYNKGKCSHSHYIKTAALEEAVYEAFDRVMQNPDELHYELKKASNEANTNDRDMILNQISKLSDKEARIKQAYRDGIDTIDEYKENKQIIDNERKALEAQLDSLKTSEADSSDEMLQNITSVLSIIKDTSKDTLTRANAIRSVVDHCVYDKENDRLEVYFFLQK

SEQ ID NO: 6640 - protein, 488 aa, Unknown
  Description of Unknown: Integrase B6641 sequence
  PTHR30461:SF3,IPR036162,PS51737,IPR011109,PTHR30461, PS00397,PF00239,G3DSA:1.10.10.2600,IPR006119,SSF53041, cd00338,SM00857,IPR025827,IPR038109,PS51736, IPR006118,PF13408,G3DSA:3.40.50.1390,PF07508,Coil
MATDIANMKVACAYIRVSTDKQEELSPDAQKRLLIDFAKKNNMSLLAENIYIDNGISGKKADKRPEFMKMIGMAKSKEHPFDVILVWKFSRFARNQEESIVYKSLLKKNNVEVVSISEPLIDGPFGSLIERIIEWMDEYYSIRLSGEVLRGMTEKALRGGYQSSLPLGYKMNKDTGVPYIYEPDAIIVRKIFKDYIDGRSYLEIARELNALGYKTKRGATFEGRTVEYILSNPFYYGAIRWNRQKHDDHTIKDISEWIIVMGKHPAIIDKETWDEVQHLMALRSRPYKARAAGHMKHWLGGIVKCSDCGASLMAGLNATRYQCGNYNKGKCSHSHYIKTAALEQAIYEAFERVLDGSMDLHYELKKSPNDGNTTDRDMILNQISKLGDKKARIKQAYRDGIDTIEEYRENKQLIENERKTLEAQLDSLKSSEADSSDEMLQHITSVLNIIKDTSKDTLTRANAIRSVVEHCVYDKENDKLEVYFFLQK

SEQ ID NO: 6641 - protein, 488 aa, Unknown
  Description of Unknown: Integrase B6642 sequence
  PTHR30461:SF3,IPR036162,PS51737,IPR011109,PTHR30461, PS00397,PF00239,G3DSA:1.10.10.2600,IPR006119,SSF53041, cd00338,SM00857,IPR025827,IPR038109,PS51736, IPR006118,PF13408,G3DSA:3.40.50.1390,PF07508,Coil
MKKIAAAYIRVSTHMQEELSPDAQLRCIRDWGNVHGYYIPDEYVFIDNGISGRKVKKRHDFLRMIGLAKTKPASPFEAILLWKFNRFARNQEESIVYKSMLRKKCNVDVISTTQQTTKDIYGDLIERIIEWTDEFYSIQLGEDVFRGMTENALRGHFQASPAFGYKVEQKGQGPVVVEDQASIVRMIYNLYTTSTMGFYEIARYLNEIGYKTARNKPFENRTIRYIIQNPIYKGYLRWNYQSNATKEIKDASEWIIVKSSQITPIVSEELWNQANDRLKQEYHPKGGKPVSKHRHWLSGLVKCSSCGASLSTSVQYRHDRTYINFQCYKYLKGKCMVSHGISEKKLVPLILNVLKEDMNKSYIECERIEKVVENQQDILDVQLKRLDAREVRIKEAYLNGVDSLAEYKSNKEQIQQERELLLQQSQNHDKEEKGSNELPNKIRGVYDILVSDQCSKDEKQAAIRSIVKKIVFDKENKTLDFHYYIKED

SEQ ID NO: 6642 - protein, 488 aa, Unknown
  Description of Unknown: Integrase B6643 sequence
  PTHR30461:SF3,IPR036162,PS51737,IPR011109,PTHR30461, PS00397,PF00239,G3DSA:1.10.10.2600,IPR006119,SSF53041, cd00338,SM00857,IPR025827,IPR038109,PS51736, IPR006118,PF13408,G3DSA:3.40.50.1390,PF07508,Coil
MATDIANMKVACAYIRVSTDKQEELSPDAQKRLLIDYAKKHNMSLLAENIYIDNGISGKKADKRPEFMKMISLAKSKEHPFDIILVWKFSRFARNQEESIVYKSLLKKNNVEVVSISEPLIDGPFGSLIERIIEWMDEYYSIRLSGEVLRGMTEKALRGGYQSSLPLGYRMNKDTGIPYIYEPEAIIVRKIYKEYVAGHSYLEIARELNALGYKTKRGAAYEGRTVEYILSNPFYYGAVRWNRQKHDDHTIKDVGDWIIVMGKHPAIIDKETWDEVQHLMALRSRPYKARAAGHMKHWLGGIVKCSDCGASLIAGLNATRYQCGNYNKGKCSHSHFIKTAALEEAVYEAFDRVMQNPNELHYELKKPSNEANANDKDMILNQISKLSDKEARIKQAYRDGIDTIDEYKENKQIIDNERKALEAQLYSLKTSEADSSDEMLQNITSVLGIIKDTSKDTLTRANAIRSVVDHCVYDKENDKLEVYFFLQK

SEQ ID NO: 6643 - protein, 488 aa, Unknown
  Description of Unknown: Integrase B6644 sequence
  PTHR30461:SF3,SM00857,G3DSA:1.10.10.2600,IPR036162,PF13408, PS51737,G3DSA:3.40.50.1390,IPR025827,IPR006119,IPR038109, PF07508,IPR011109,SSF53041,PTHR30461,Coil, PS51736,cd00338,PF00239
MPEALNAVIYARYSSDRQTEQSIEGQLRECYAFAKANDIAVIDTYIDRAISGKTDNRPAFQKMIEDSAKRQFQAVIVYRLDRFTRNRYDSAIYKARLKKNGVKVLSAMENLNGSPESIIMESLLEGMAEYYSVELSQKITRGMRENALKGKALGGQRVLGYKVNSDCYFEIDETTAPVVVDIFKLYSSGKTVKEICDILNARGVKTARGGAFNKNSLHTILTNKKYIGIYKTKYGEIVGGIPAIIDKELFEMVALRMEQNKKAPARAKAEINYLLSTKLFCGKCRSAMVGESGTSKTGKKYYYYACVKKKREKACDKSNVKKDWIEDLVIQRTVTDILKDDVIEKIADRLVELQKAEAAESGTMLYLQNSLAEIQVSIKNIMTAIEKGIITESTKTRLTELEDEKRNVEIEIAKESIARRIISREQIIYWISSFKDGDITSEKYRQQLIDTFVHAVFVYDDKIVITYNYSGENNTATISDLDLSSPPT

SEQ ID NO: 6644 - protein, 488 aa, Unknown
  Description of Unknown: Integrase B6645 sequence
  PTHR30461:SF3,IPR036162,PS51737,IPR011109,PTHR30461, PS00397,PF00239,G3DSA:1.10.10.2600,IPR006119,SSF53041, cd00338,SM00857,IPR025827,IPR038109,PS51736, IPR006118,PF13408,G3DSA:3.40.50.1390,PF07508,Coil
MAANIANMKVACAYIRVSTDKQEELSPDAQKRLLIDYAKKHNMSLLAENIYIDNGISGKKADKRPEFMKMISLAKSKEHPFDIILVWKFSRFARNQEESIVYKSLLKKNNVEVVSISEPLIDGPFGSLIERIIEWMDEYYSIRLSGEVLRGMTEKALRGGYQSSLPLGYKMNKDTGIPYIYEDEAIIVKKIYNDYISGHSYLEIARELNALGYTTKRGAAFEGRTVEYILSNPFYYGAIRWNRQKHDDHTIKDISEWIIVMGKHPAIIDKETWDEVQHLMALRSRPYKARAAGHMKHWLGGIVKCSDCGASLMAGLNATRYQCGNYNKGKCSHSHYIKTAALEQAIYEAFERVLDGSMDLHYELKKSPNDGNTTDRDMILNQISKLGDKEARIKQAYRDGIDTIEEYKENKQLIENERKSLEAQLDSLKSSEADSSDEMLQHITSVLNIIKDTSKDTLTRANAIRSVVDHCVYDKENDKLEVYFFLQK

SEQ ID NO: 6645 - protein, 488 aa, Unknown
  Description of Unknown: Integrase B6646 sequence
  PTHR30461:SF3,SM00857,G3DSA:1.10.10.2600,IPR036162,PF13408, PS51737,G3DSA:3.40.50.1390,IPR025827,IPR006119,IPR038109, PF07508,IPR011109,SSF53041,PTHR30461,Coil, PS51736,cd00338,PF00239
MPEALNAVIYARYSSDRQTEQSIEGQLRECYAFAKANDIAVIDTYIDRAISGKTDNRPAFQKMIEDSAKRQFQAVIVYRLDRFTRNRYDSAIYKARLKKNGVKVLSAMENLNGSPESIIMESLLEGMAEYYSVELSQKITRGMRENALKGKALGGQRVLGYKVNSDCYFEIDETTAPVVVDIFKLYSSGKTVKEICDILNARGVKTARGGAFNKNSLHTILTNKKYIGIYKTKYGEIVGGIPAIIDKELFEMVALRMEQNKKAPARAKAEINYLLSTKLFCGKCRSAMVGESGTSKTGKKYYYYACVKKKREKACDKSNVKKDWIEDLVIQRTVTDILKDDVIEKIADRLVELQKAEAAQSGTMLYLENSLAEIQVSIKNIMTAIEKGIITESTKTRLTELEDEKRNVEIEIAKESIARRIISREQIIYWISSFKDGDITSEKYRQQLIDTFVHAVFVYDDKIVITYNYSGENNTATISDLDLSSPPI

SEQ ID NO: 6646 - protein, 487 aa, Unknown
  Description of Unknown: Integrase B6647 sequence
  PTHR30461:SF3,IPR036162,PS51737,IPR011109,PTHR30461, PS00397,PF00239,G3DSA:1.10.10.2600,IPR006119,SSF53041, cd00338,SM00857,IPR025827,IPR038109,PS51736, IPR006118,PF13408,G3DSA:3.40.50.1390,PF07508,Coil
MKKIAAAYIRVSTHMQEELSPDAQLRCIRDWGNVHGYYIPDEYVFIDNGISGRKAKKRHDFLRMIGLAKTKPASPFEAILLWKFNRFARNQEESIVYKSMLRKKCNVDVISTTQQTTKDIYGDLIERIIEWTDEFYSIQLGEDVFRGMTENALRGNFQSSPAFGYKVEKGQGLVIVEDQANIVRMIFNLYANTMMGFYEIARHLNRLGYKTKKGGAFETRTIRYIIQNPIYKGYLRWNYANGTTRVVNDESEWIIVKSPLVPIIVSEELWDRANERLKNEYRPKNGKPVSKHRHWLSGLVKCSSCGASLSTSVQYRHDRTYINFQCYKYLKGKCLVSHGISEKKLVPLVLNVLKEDMSKSYIECERIEKVVENQQDILDVQLKRLATREARIKEAYLNGIDSLAEYKANKEEIQKEREFLLQQSQDHNKTEKESNELPNKIRGVYDILVSDQCSKDEKQAAIRSIVKKIVFDKENKTLDFHYYIKED

SEQ ID NO: 6647 - protein, 487 aa, Unknown
  Description of Unknown: Integrase B6648 sequence
  PTHR30461:SF3,SM00857,G3DSA:1.10.10.2600,IPR036162,PS51737, G3DSA:3.40.50.1390,IPR006119,IPR038109,PF07508,IPR011109, SSF53041,PF00239,PTHR30461,PS51736,Coil, cd00338
MPKTAVIYARFSCNKQREASIDDQLRICRQWCQRERYAIVAEYCDYAISGRTDDRPEFQRMVANAGESDIVLVYMMDRFSRGEYDAPIYKRELAQHGVKLVSALEQIPDSPEGIIYEKLLEGLAACESKKTAIRTRRGMEGNALKCKTNGVRVFGYASNEADEYVIDEDEAAFVREAFKRRIAKETTNSIARDFAARGVKTSQGNPCGYSMVERMVKNRKYTGRYEWGGVVKEGGMPAIIDEVTFMEAQGIRAAKERSAESWGDFALSGKAICAGCGRNLQGVSGRGRKNVKYEYYRCHDGCVKPVRREELEGEIVKALRALLQDREEALKIARMVAESSDGAEVAARRKQAAQSLSAAERGLKNILNAIEQGIIAPGAKERIAELEHQRDRAKLDLEAIRDDQIDPERLADFLQCGSALDDATLLKAFVYQASVSDEECIVTLNYDVENNEPARLDIQRVRTKCKWCPRADSNRRHADYDSAALTN

SEQ ID NO: 6648 - protein, 487 aa, Unknown
  Description of Unknown: Integrase B6649 sequence
  PTHR30461:SF3,IPR036162,PS51737,IPR011109,PTHR30461, PS00397,PF00239,G3DSA:1.10.10.2600,IPR006119,SSF53041, cd00338,SM00857,IPR025827,IPR038109,PS51736, IPR006118,PF13408,G3DSA:3.40.50.1390,PF07508,Coil
MKKIAAAYIRVSTHMQEELSPDAQLRCIRVWGDAHGYYVPDEYVFIDNGISGRKAKKRHDFLRMIGLAKTKPASPFEAILLWKFNRFARNQEESIVYKSMLRKKCNVDVISTTQQTTKDIYGDLIERIIEWTDEFYSIQLGEDVFRGMTENALRGNFQASPAFGYKVEKGLGLVIVEDQANIVRMIFNLYANTRMGFYEIARHLNRLGYKTKKGGAFEARAIRYIIQNPIYKGYLRWNYANGTTRVVNDESEWIIVKSPLVPIIVSEELWDRANERLKNEYRPKNGKPVTKHRHWLSGLVKCSSCGASLSTSVQYRHDRTYINFQCYKYLKGKCMVSHGISEKKLVPLVLNVLKEDMSKSYIECERIEKVVENQQDILDVQLKRLATRETRIKEAYLNGIDSLAEYKANKEEIQKEREFLLQQSQDHNKTENESNELPNKIRGVYDILVSDQCSKDEKQAAIRSIVKKIVFDKENKTLDFHYYIKED

SEQ ID NO: 6649 - protein, 487 aa, Unknown
  Description of Unknown: Integrase B6650 sequence
  PTHR30461:SF3,IPR036162,PS51737,IPR011109,PTHR30461, PS00397,PF00239,G3DSA:1.10.10.2600,IPR006119,SSF53041, cd00338,SM00857,IPR025827,IPR038109,PS51736, IPR006118,PF13408,G3DSA:3.40.50.1390,PF07508,Coil
MNDIKRGALYIRVSTDDQTEYSPDSQIKLCYKYAKEHNIEILKEHIYQEDGISGTNVEKRTSFKRMIAIAKKKPKPFDVILIYSFSRFARNREDAIMYKSLLRKKLGIDVVSITQPLSEGKESILMEALYEAMDEYYSVDLAEQSIRGKIEKASRGEHQGGTPYGYIYNKNTKTLYPDKEKAEIVKLIFKEWIKPEQSIRGLCRMLNDMNILTTRGCKWSDRSMYLILQNPAYIGYSRFTVGGMKRNYKHPNTITAKGKWEPIIDMETWNLAKQKMDDHDKKWFKYKKHYTKNEFWLRGIVKCSDCGKSLVRCNVKGKPVPFFQCTGFTKGRCQDSHYIRQDQLVPAILEQIKKDYTYKLNIKITEGKDTPQYDQISIIKKNIEKLKTKRERIKEAYINEIDTLEEYKENKKKLDNEEKQLKEQLKELNYKEKQEVRKEKTYELCKTAYEILSDEETSFDLKDDVAHRLFDHITYNKKENTLEIVYK

SEQ ID NO: 6650 - protein, 487 aa, Unknown
  Description of Unknown: Integrase B6651 sequence
  IPR036162,PS51737,IPR011109,PTHR30461,PS00397, PF00239,G3DSA:1.10.10.2600,IPR006119,SSF53041,cd00338, SM00857,IPR025827,IPR038109,PS51736,IPR006118, PF13408,G3DSA:3.40.50.1390,PF07508,Coil
MTLKNACAYIRVSTDKQEELSPDAQKRLIIDYCKKNGYTITNENIFIENGISGKKADKRPEFKRMIALAKSKEHPFDVILVWKFSRFARNQEESIVYKSMLKKANVDVVSVSEPVIDGPFGSLIERIIEWMDEYYSIRLSGEVIRGMTEKALRGGYNAQPPLGYRKNSDTGIPEIYEPEAVIVRNIFSYISQGLSLIDTARSINNMGFHTRRGGMFEQRTIRYIIENPFYYGHVRWNRQNPSEHTIKDKSEWIIAPGTHPVLINKESWDFANDQLIKISRPYKERGTSGIKHWLSGIVKCSSCGSSLVSNSLWKGHSTSFQCSGYNKCKCKVSHYIKTERLEAGIYEGFLKVLSSKNVTYEKVSEHSYEEKIDTAALLKNIEDKERRIKQAYRDGIDTLEEYKDNKAILQKEREKVMEIISKQKPVQHDEDNETMLSQIKNAYEIIKNEELDKLTRANAIRSVVSKAVYDNEKDTLDIYFRLIEKSL

SEQ ID NO: 6651 - protein, 487 aa, Unknown
  Description of Unknown: Integrase B6652 sequence
  PTHR30461:SF3,IPR036162,PS51737,IPR011109,PTHR30461, PS00397,PF00239,G3DSA:1.10.10.2600,IPR006119,SSF53041, cd00338,SM00857,IPR025827,IPR038109,PS51736, IPR006118,PF13408,G3DSA:3.40.50.1390,PF07508,Coil
MKKIAAAYIRVSTHMQEELSPDAQLRCIRDWGNVHGYYIPDEYVFIDNGISGRKAKKRHDFLRMIGLAKTKPASPFEAILLWKFNRFARNQEESIVYKSMLRKKCNVDVISTTQQTTKDIYGDLIERIIEWTDEFYSIQLGEDVFRGMTENALRGNFQASPAFGYKVEKGLGLVIVEDQANIVRMIFNLYANTMMGFYEIARHLNRLGYKTKKGGAFETRTIRYIIQNPIYKGYLRWNYANGTTRVVNDESEWIIVKSPLVPIIVSEELWDRANERLKNEYRPKNGKPVSKHRHWLSGLVKCSSCGASLSTSVQYRHDRTYINFQCYKYLKGKCLVSHGISEKKLVPLVLNVLKEDMSKSYIECERIEKVVENQQDILDVQLKRLATREARIKEAYLNGIDSLAEYKANKEEIQKEREFLLQQSQDHNKTEKESNELPNKIRGVYDILVSDQCSKDEKQAAIRSIVKKIVFDKENKTLDFHYYIKED

SEQ ID NO: 6652 - protein, 487 aa, Unknown
  Description of Unknown: Integrase B6653 sequence
  PTHR30461:SF3,IPR036162,PS51737,IPR011109,PTHR30461, PS00397,PF00239,G3DSA:1.10.10.2600,IPR006119,SSF53041, cd00338,SM00857,IPR025827,IPR038109,PS51736, IPR006118,PF13408,G3DSA:3.40.50.1390,PF07508,Coil
MTPISDFRIAACYIRVSTDDQVELSPASQLVEIRKWAASHGYIVPDEYVFTDEGISGRKVTGRDEFRRMIGVAKTKPKPFDAILLWKFSRFARNRDDAVMYKALLRKQLGIDVISISEPMAEGKMGIITEALIEAMDEYYSINLAEEVKRGMSEKHRRGELQSTPSYGYCVKDHVLTPIEPEATYVKEIFRRYINGEGIYPIARWMNECGQRTHRGGRFENRTIEYILRNPVYIGKLRWNPSGKSRRDYSNPNIILSDGKHEPLISQEIFHEVKKRMDAWKAAHKYKGKPAEVQKDWMAGLVRCADCGGSLIFAKPHYWKCNNYVRGACRTSQHITDETLKTAILQKLRQDVAGSPSIQYEVVRASDGGASELAALQASLDAAVRMLDRLRDAYLSGADTIEEYKAGKEAVQEKIARLKDQISEEEKKNASAAGPDVLKKSIRTALNTLESSSATMAEKYTAAHSIIDRIVWDKAKNLLQIYYRLIL

SEQ ID NO: 6653 - protein, 487 aa, Unknown
  Description of Unknown: Integrase B6654 sequence
  PTHR30461:SF3,IPR036162,PS51737,IPR011109,PTHR30461, PS00397,PF00239,G3DSA:1.10.10.2600,IPR006119,SSF53041, cd00338,SM00857,IPR025827,IPR038109,PS51736, IPR006118,PF13408,G3DSA:3.40.50.1390,PF07508,Coil
MKKIAAAYIRVSTHMQEELSPDAQLRCIRDWGNVHGYYIPDEYVFIDNGISGRKAKKRHDFLRMIGLAKTKPASPFEAILLWKFNRFARNQEESIVYKSMLRKKCNVDVISTTQQTTKDIYGDLIERIIEWTDEFYSIQLGEDVFRGMTENALRGNFQSSPAFGYKVEKGQGLVIVEDQANIVRMIFNLYANTMMGFYEIARHLNRLGYKTKKGGAFETRTIRYIIQNPIYKGYLRWNYANGTTRVVNDESEWIIVKSQLVPIIVSEELWDRANERLKNEYRPKNGKPVSKHRHWLSGLVKCSSCGASLSTSVQYRHDRTYINFQCYKYLKGKCLVSHGISEKKLVPLVLNVLKEDMSKSYIECERIEKVVENQQDILDVQLKRLATREARIKEAYLNGIDSLAEYKANKEEIQKEREFLLQQSQDHNKTEKESNELPNKIRGVYDILVSDQCSKDEKQAAIRSIVKKIVFDKENKTLDFHYYIKED

SEQ ID NO: 6654 - protein, 487 aa, Unknown
  Description of Unknown: Integrase B6655 sequence
  PTHR30461:SF3,IPR036162,PS51737,IPR011109,PTHR30461, PS00397,PF00239,G3DSA:1.10.10.2600,IPR006119,SSF53041, cd00338,SM00857,IPR025827,IPR038109,PS51736, IPR006118,PF13408,G3DSA:3.40.50.1390,PF07508,Coil
MKKIAAAYIRVSTHMQEELSPDAQLRCIRDWGNVHGYYIPDEYVLIDNGISGRKAKKRHDFLRMIGLAKTKPASPFEAILLWKFNRFARNQEESIVYKSMLRKKCNVDVISTTQQTTKDIYGDLIERIIEWTDEFYSIQLGEDVFRGMTENALRGNFQASPAFGYKVEKGLGLVIVEDQANIVRMIFNLYANTRMGFYEIARHLNRLGYKTKKGGAFEARAIRYIIQNPIYKGYLRWNYANGTTRVVNDESEWIIVKSPLVPIIVSEELWDRANERLKNEYRPKNGKPVSKHRHWLSGLVKCSSCGASLSTSVQYRHDRTYINFQCYKYLKGKCLVSHGISEKKLVPLVLNVLKEDMSKSYIECERIEKVVENQQDILDVQLKRLATREARIKEAYLNGIDSLAEYKANKEEIQKEREFLLQQSQDHNKTEKESNELPNKIRGVYDILVSDQCSKDEKQAAIRSIVKKIVFDKENKTLDFHYYIKED

SEQ ID NO: 6655 - protein, 487 aa, Unknown
  Description of Unknown: Integrase B6656 sequence
  PTHR30461:SF3,IPR036162,PS51737,IPR011109,PTHR30461, PS00397,PF00239,G3DSA:1.10.10.2600,IPR006119,SSF53041, cd00338,SM00857,IPR025827,IPR038109,PS51736, IPR006118,PF13408,G3DSA:3.40.50.1390,PF07508,Coil
MKKIAAAYIRVSTHMQEELSPDAQLRCIRDWGNVHGYYIPDEYVFIDNGISGRKAKKRHDFLRMIGLAKTKPASPFEAILLWKFNRFARNQEESIVYKSMLRKKCNVDVISTTQQTTKDIYGDLIERIIEWTDEFYSIQLGEDVFRGMTENALRGNFQASPAFGYKVEKGLGLVIVEDQANIVRMIFNLYANTRMGFYEIARHLNRLGYKTKKGGAFEARAIRYIIQNPIYKGYLRWNYANGTTRVVNDESEWIIVKSPLVPIIVSEELWDRANERLKNEYRPKNGKPVTKHRHWLSGLVKCSSCGASLSTSVQYRHDRTYINFQCYKYLKGKCIVSHGISEKKLVPLVLNVLKEDMSKSYIECERIEKVVENQQDILDVQLKRLATRETRIKEAYLNGIDSLAEYKANKEEIQKEREFLLQQSQDHNKTENESNELPNKIRGVYDILVSDQCSKDEKQAAIRSIVKKIVFDKENKTLDFHYYIKED

SEQ ID NO: 6656 - protein, 487 aa, Unknown
  Description of Unknown: Integrase B6657 sequence
  PTHR30461:SF3,IPR036162,PS51737,IPR011109,PTHR30461, PS00397,PF00239,G3DSA:1.10.10.2600,IPR006119,SSF53041, cd00338,SM00857,IPR025827,IPR038109,PS51736, IPR006118,PF13408,G3DSA:3.40.50.1390,PF07508,Coil
MKKIAAAYIRVSTHMQEELSPDAQLRCIRVWGDAHGYYVPDEYVFIDNGISGRKAKKRHDFLRMIGLAKTKPASPFEAILLWKFNRFARNQEESIVYKSMLRKKCNVDVISTTQQTTKDIYGDLIERIIEWTDEFYSIQLGEDVFRGMTENALRGNFQASPAFGYKVEKGLGLVIVEDQANIVRMIFNLYANTRMGFYEIARHLNRLGYKTKKGGAFEARAIRYIIQNPIYKGYLRWNYANGTTRVVNDESEWIIVKSPLVPIIVSEELWDRANERLKNEYRPKNGKPVTKHRHWLSGLVKCSSCGASLSTSVQYRHDRTYINFQCYKYLKGKCMVSHGISEKKLVPLVLNVLKEDMSKSYIECERIEKVVENQQDILDVQLKRLATRETRIKEAYLNGIDSLAEYKANKEEIQKEREFLLQQSQDHNKTEKESNELPNKIRGVYDILVSDQCSKDEKQAAIRSIVKKIVFDKENKTLDFHYYIKED

SEQ ID NO: 6657 - protein, 487 aa, Unknown
  Description of Unknown: Integrase B6658 sequence
  PTHR30461:SF3,IPR036162,PS51737,IPR011109,PTHR30461, PS00397,PF00239,G3DSA:1.10.10.2600,IPR006119,SSF53041, cd00338,SM00857,IPR025827,IPR038109,PS51736, IPR006118,PF13408,G3DSA:3.40.50.1390,PF07508,Coil
MKKIAAAYIRVSTHMQEELSPDAQLRCIRDWGNVHGYYIPDEYVFIDNGISGRKAKKRHDFLRMIGLAKTKPASPFVAILLWKFNRFARNQEESIVYKSMLRKKCNVDVISTTQQTTKDIYGDLIERIIEWTDEFYSIQLGEDVFRGMTENALRGNFQASPAFGYKVEKGLGLVIVEDQANIVRMIFNLYANTRMGFYEIARHLNRLGYKTKKGGAFEARAIRYIIQNPIYKGYLRWNYANGTTRVVNDESEWIIVKSPLVPIIVSEELWDRANERLKNEYRPKNGKPVSKHRHWLSGLVKCSSCGASLSTSVQYRHDRTYINFQCYKYLKGKCLVSHGISEKKLVPLVLNVLKEDMSKSYIECERIEKVVENQQDILDVQLKRLATREARIKEAYLNGIDSLAEYKANKEEIQKEREFLLQQSQDHNKTEKESNELPNKIRGVYDILVSDQCSKDEKQAAIRSIVKKIVFDKENKTLDFHYYIKED

SEQ ID NO: 6658 - protein, 487 aa, Unknown
  Description of Unknown: Integrase B6659 sequence
  PTHR30461:SF3,cd00338,SM00857,G3DSA:1.10.10.2600,IPR036162, PF13408,PS51737,G3DSA:3.40.50.1390,IPR025827,IPR006119, IPR038109,PF07508,IPR011109,SSF53041,PTHR30461, PS51736,Coil,PF00239
MKRAVFYGRYSSDRQTEQSIEGQRRVCEEFAAGENIQIVREYIDRATSGTSTQHREQFQQMISDSKTGGWEYVLVYKLDRFARNRYDSAVYKRELKRNGVTVLSATERITDSPEGVLIEGLLESMDEYFSRELSRKAKRGMRESILKGHCITRLPYGYKRTGKTCAIDEDAADVIRWIFREYSSGKTIQEIVDTLNIRGFRTMTGKRFKRPTVSVILRNDKYTGTHYVSDFEEPERYPQIISQTMWDSVQSRLRESANRYRKHDDGFVYALTGKINCGYCGYAVNGITSNHKYHYYRCVSGKYNKHICDGCSVRADVVETAVVDALQEYFTAERVEEMGTHLYDLYRKSAPTERDDKRRLAEVDMQITGAVNALIACPESEALQNRLRDLEEQKREIEQSHVKHQYLEKSHFVEFFRNIVSALEHIDVRTRLFSTLIESVSLYRDHVVIIINLMDDSTDPPTPISLEKYFSSSVANGSALLCWSNNA

SEQ ID NO: 6659 - protein, 487 aa, Unknown
  Description of Unknown: Integrase B6660 sequence
  IPR036162,PS51737,IPR011109,PTHR30461,PS00397, PF00239,G3DSA:1.10.10.2600,IPR006119,SSF53041,cd00338, SM00857,IPR025827,IPR038109,PS51736,IPR006118, PF13408,G3DSA:3.40.50.1390,PF07508,Coil
MTLKNACAYIRVSTDKQEELSPDAQKRLIIDYCKKNGYTITNENIFIENGISGKKADKRPEFKRMIAIAKSKEHPFDVILVWKFSRFARNQEESIVYKSMLKKANVDVVSVSEPVIDGPFGSLIERIIEWMDEYYSIRLSGEVIRGMTEKALKGGYNAQPPLGYRKNSDTSIPEIYEPEAVIVRNIFSFISQGLSLIDTARSINNMGFHTRRGGMFEQRTIRYIIENPFYYGYVRWNRQNPSEHTIKDKSEWIIAPGAHPVLINKESWDFANEQLIKISRPYKERGTSGIKHWLSGIVKCSSCGSSLVSNSLWKGHSTSFQCSGYNKCKCKVSHYIKTERLEAGIYEGFLKVLSSKNVTYEKVSEHSYEEKVDTAALLKNIEDKERRIKQAYRDGIDTLEEYKDNKAILQKEREKVMEIISRQQPAVQDENNETMLRQIKNAYEIIKNVALDKLTRANAIRSVVSKAVYDNEKDTLDIYFRLIEKSP

SEQ ID NO: 6660 - protein, 487 aa, Unknown
  Description of Unknown: Integrase B6661 sequence
  PTHR30461:SF3,IPR036162,PS51737,IPR011109,PTHR30461, PS00397,PF00239,G3DSA:1.10.10.2600,IPR006119,SSF53041, cd00338,SM00857,IPR025827,IPR038109,PS51736, IPR006118,PF13408,G3DSA:3.40.50.1390,PF07508,Coil
MKKIAAAYIRVSTHMQEELSPDAQLRCIRDWGNVHGYYIPDEYVFIDNGISGRKAKKRHDFLRMIGLAKTKPASPFEAILLWKFNRFARNQEESIVYKSMLRKKCNVDVISTTQQTTKDIYGDLIERIIEWTDEFYSIQLGEDVFRGMTENALRGNFQSSPAFGYKVEKGQGLVIVEDQANIVRMIFNLYANTMMGFYEIARHLNRLGYKTKKGGAFETRTIRYIIQNPIYKGYLRWNYANGTTRVVNDESEWIIVKSPLVPIIVSEELWDRANERLKNEYRPKNGKPVSKHRHWLSGLVKCSSCGASLSTSVQYRHDRTYINFQCYKYLKGKCLVSHGISEKKLVPFVLNVLKEDMSKSYIECERIEKVVENQQDILDVQLKRLATREARIKEAYLNGIDSLAEYKANKEEIQKEREFLLQQSQDHNKTEKESNELPNKIRGVYDILVSDQCSKDEKQAAIRSIVKKIVFDKENKTLDFHYYIKED

SEQ ID NO: 6661 - protein, 487 aa, Unknown
  Description of Unknown: Integrase B6662 sequence
  PTHR30461:SF3,IPR036162,PS51737,IPR011109,PTHR30461, PS00397,PF00239,G3DSA:1.10.10.2600,IPR006119,SSF53041, cd00338,SM00857,IPR025827,IPR038109,PS51736, IPR006118,PF13408,G3DSA:3.40.50.1390,PF07508,Coil
MKKIAAAYIRVSTHMQEELSPDAQLRCIRVWGDAHGYYVPDEYVFIDNGISGRKAKKRHDFLRMIGLAKTKPASPFEAILLWKFNRFARNQEESIVYKSMLRKKCNVDVISTTQQTTKDIYGDLIERIIEWTDEFYSIQLGEDVFRGMTENALRGNFQASPAFGYKVEKGLGLVIVEDQANIVRMIFNLYANTRMGFYEIARHLNRLGYKTKKGGAFEARAIRYIIQNPIYKGYLRWNYANGTTRVVNDESEWIIVKSPLVPIIVSEELWDRANERLKNEYRPKNGKPVTKHRHWLSGLVKCSSCGASLSTSVQYRHDRTYINFQCYKYLKGKCLVSHGISEKKLVPLVLNVLKEDMSKSYIECERIEKVVENQQDILDVQLKRLATRETRIKEAYLNGIDSLAEYKANKEEIQKEREFLLQQSQDHNKTENESNELPNKIRGVYDILVSDQCSKDEKQAAIRSIVKKIVFDKENKTLDFHYYIKED

SEQ ID NO: 6662 - protein, 487 aa, Unknown
  Description of Unknown: Integrase B6663 sequence
  PTHR30461:SF3,IPR036162,PS51737,IPR011109,PTHR30461, PS00397,PF00239,G3DSA:1.10.10.2600,IPR006119,SSF53041, cd00338,SM00857,IPR025827,IPR038109,PS51736, IPR006118,PF13408,G3DSA:3.40.50.1390,PF07508,Coil
MTTPTTLEIGAAYVRVSTDDQTELSPDAQIRVIMDAAKADGFIIPKEYIFIEKKGISGRKADNRPEFQRMIAFAKSQRPAPFKRLYLWKFSRFARNQEESTFYKGILRKKCGVEIKSVSEPIMEGMFGRLIETIIEWFDEYYSINLSGEVIRGMTEKALREGYQSTPCLGYRAVGEGKPFIVDEKSYAIVEYIFQTYHSGKDMTATARATNSKGYRTRRGNRFDRRGINRILTNRFYIGEVVWNGYTFQGTHEIRTSITSIFDDVQKRLEKEYRPQKRREVSSNAHWLSGMLKCSVCGSSLGYNRSNDQKKRPDFFQCWKYAKGFHEGSCCLSVRLAEKAVIESLEEVLATNELEYEYIRKTNDTVNAEEVAIQEALAHLEVKERRIREAYENEIDTLEEYKQNKLRLKSEREELMADAERLHRQAEQAPDVVPSKEDVMRQVAHVHEIISDSNIDYETKGNALRKIVKDIVFDRKKGHLYIHFYIS

SEQ ID NO: 6663 - protein, 487 aa, Unknown
  Description of Unknown: Integrase B6664 sequence
  PTHR30461:SF3,IPR036162,PS51737,IPR011109,PTHR30461, PS00397,PF00239,G3DSA:1.10.10.2600,IPR006119,SSF53041, cd00338,SM00857,IPR025827,IPR038109,PS51736, IPR006118,PF13408,G3DSA:3.40.50.1390,PF07508,Coil
MKKIAAAYIRVSTHMQEELSPDAQLRCIRDWGNVHGYYIPDEYVFIDNGISGRKAKKRHDFLRMIGLAKTKPASPFEAILLWKFNRFARNQEESIVYKSMLRKKCNVDVISTTQQTTKDIYGDLIERIIEWTDEFYSIQLGEDVFRGMTENALRGNFQASPAFGYKVEKGLGLVIVEDQANIVRMIFNLYANTRMGFYEIARHLNRLGYKTKKGGAFEARAIRYIIQNPIYKGYLRWNYANGTTRVVNDESEWIIVKSPLVPIIVSEELWDRANERLKNEYRPKNGKPVTKHRHWLSGLVKCSSCGASLSTSVQYRHDRTYINFQCYKYLKGKCMVSHGISEKKLVPLVLNVLKEDMSKSYIECERIEKVVENQQDILDVQLKRLATRETRIKEAYLNGIDSLAEYKANKEEIQKEREFLLQQSQGHNKTENESNELPNKIRGVYDILVSDQCSKDEKQAAIRSIVKKIVFDKENKTLDFHYYIKED

SEQ ID NO: 6664 - protein, 487 aa, Unknown
  Description of Unknown: Integrase B6665 sequence
  PTHR30461:SF3,IPR036162,PS51737,IPR011109,PTHR30461, PS00397,PF00239,G3DSA:1.10.10.2600,IPR006119,SSF53041, cd00338,SM00857,IPR025827,IPR038109,PS51736, IPR006118,PF13408,G3DSA:3.40.50.1390,PF07508,Coil
MAKNILNMKIAAGYIRVSTDKQEELSPDAQKRLLIDYAKKNNISLPAENIYIDNGISGKKADKRPEFMKMIGMAKSKEHPFDVILVWKFSRFARNQEESIVYKSLLKKNNVEVVSVSEPLIDGPFGSLIERIIEWMDEYYSIRLSGEVLRGMTEKALRGGYQSSLPLGYKMNKDTGIPYIYEDEAIIVKKIYNDYISGHSYLEIARELNALGYTTKRGAAFEGRTVEYILSNPFYYGAIRWNRQKHDDHTIKDISEWIIVMGKHPAIIDKETWDEVQHLMALRSRPYKSRAAGHMKHWLGGIVKCSDCGASLIAGLNATRYQCGNYNKGKCSHSHFIKTAALEEAVYEAFDRVMQNPDELHYELKKASNEVNTNDRDMILNQISKLSDKEARIKQAYRDGIDTIDEYKENKQIIDNERKALEAQLSLKTSEADSSDEMLQNITSVLGIIKDTSKDTLTRANAIRSVVDHCVYDKENDKLEVYFFLQK

SEQ ID NO: 6665 - protein, 487 aa, Unknown
  Description of Unknown: Integrase B6666 sequence
  PTHR30461:SF3,IPR036162,PS51737,IPR011109,PTHR30461, PS00397,PF00239,G3DSA:1.10.10.2600,IPR006119,SSF53041, cd00338,SM00857,IPR025827,IPR038109,PS51736, IPR006118,PF13408,G3DSA:3.40.50.1390,PF07508,Coil
MKKIAAAYIRVSTHMQEELSPDAQLRCIRDWGNVHGYYIPDEYVFIDNGISGRKAKKRHDFLRMIGLAKTKPASPFEAILLWKFNRFARNQEESIVYKSMLRKKCNVDVISTTQQTTKDIYGDLIERIIEWTDEFYSIQLGEDVFRGMTENALRGNFQASPAFGYKVEKGLGLVIVEDQANIVRMIFNLYANTRMGFYEIARHLNRLGYKTKKGGAFEARAIRYIIQNPIYKGYLRWNYANGTTRVVNDESEWIIVKSPLVPIIVSEELWDRANERLKNEYRPKNGKPVSKHRHWLSGLVKCSSCGASLSTSVQYRHDRTYINFQCYKYLKGKCLVSHGISEKKLVPLVLNVLKEDMSKSYIECERIEKVVENQQDILDVQLKRLATREARIKEAYLNGIDSLAEYKANKEEIQKEREFLLQQSQDHNKTEKESNELPNKIRGVYDILVSDQCSKDEKQAAIRSIVKKIVFDKENKTLDFHYYIKED

SEQ ID NO: 6666 - protein, 487 aa, Unknown
  Description of Unknown: Integrase B6667 sequence
  PTHR30461:SF3,IPR036162,PS51737,IPR011109,PTHR30461, PS00397,PF00239,G3DSA:1.10.10.2600,IPR006119,SSF53041, cd00338,SM00857,IPR025827,IPR038109,PS51736, IPR006118,PF13408,G3DSA:3.40.50.1390,PF07508,Coil
MKKIAAAYIRVSTHMQEELSPDAQLRCIRVWGDAHGYYVPDEYVFIDNGISGRKAKKRHDFLRMIGLAKTKPASPFEAILLWKFNRFARNQEESIVYKSMLRKKCNVDVISTTQQTTKDIYGDLIERIIEWTDEFYSIQLGEDVFRGMTENALRGNFQASPAFGYKVEKGLGLVIVEDQANIVRMIFNLYANTRMGFYEIARHLNRLGYKTKKGGAFEARAIRYIIQNPIYKGYLRWNYANGTTRVVNDESEWIIVKSPLVPIIVSEELWDRANERLKNEYRPKNGKPVTKHRHWLSGLVKCSSCGASLSTSVQYRHDRTYINFQCYKYLKGKCLVSHGISEKKLVPLVLNVLKEDMSKSYIECERIEKVVENQQDILDVQLKRLATREARIKEAYLNGIDSLAEYKANKEEIQKEREFLLQQSQDHNKTEKESNELPNKIRGVYDILVSDQCSKDEKQAAIRSIVKKIVFDKENKTLDFHYYIKED

SEQ ID NO: 6667 - protein, 487 aa, Unknown
  Description of Unknown: Integrase B6668 sequence
  PTHR30461:SF3,IPR036162,PS51737,IPR011109,PTHR30461, PS00397,PF00239,G3DSA:1.10.10.2600,IPR006119,SSF53041, cd00338,SM00857,IPR025827,IPR038109,PS51736, IPR006118,PF13408,G3DSA:3.40.50.1390,PF07508,Coil
MKKIAAAYIRVSTHMQEELSPDAQLRCIRDWGNVHGYYIPDEYVFIDNGISGRKAKKRHDFLRMIGLAKTKPASPFEAILLWKFNRFARNQEESIVYKSMLRKKCNVDVISTTQQTTKDIYGDLIERIIEWTDEFYSIQLGEDVFRGMTENALRGNFQSSPAFGYKVEKGQGLVIVEDQANIVRMIFNLYANTMMGFYEIARHLNRLGYKTKKGGAFETRTIRYIIQNPIYKGYLRWNYANGTTRVVNDESEWIIVKSPLVPIIVSEELWDLANERLKNEYRPKNGKPVSKHRHWLSGLVKCSSCGASLSTSVQYRHDRTYINFQCYKYLKGKCLVSHGISEKKLVPLVLNVLKEDMSKSYIECERIEKVVENQQDILDVQLKRLATREARIKEAYLNGIDSLAEYKANKEEIQKEREFLLQQSQDHNKTEKESNELPNKIRGVYDILVSDQCSKDEKQAAIRSIVKKIVFDKENKTLDFHYYIKED

SEQ ID NO: 6668 - protein, 487 aa, Unknown
  Description of Unknown: Integrase B6669 sequence
  PTHR30461:SF3,IPR036162,PS51737,IPR011109,PTHR30461, PS00397,PF00239,G3DSA:1.10.10.2600,IPR006119,SSF53041, cd00338,SM00857,IPR025827,IPR038109,PS51736, IPR006118,PF13408,G3DSA:3.40.50.1390,PF07508,Coil
MTTPTTLEIGAAYVRVSTDDQTELSPDAQIRVILDAAKADGFIIPKEYIFIEKKGISGRKADNRPEFQRMIAFAKSQRPAPFKRLYLWKFSRFARNQEESTFYKGILRKKCGVEIKSVSEPIMEGMFGRLIETIIEWFDEYYSINLSGEVIRGMTEKALREGYQSTPCLGYRAVGEGKPFIVDEKSYAIVEYIFQTYHSGKDMTATARATNSKGYRTRRGNRFDRRGINRILTNRFYIGEVVWNGYTFQGTHEIRTSITSIFDDVQKRLEKEYRPQKRREVSSNAHWLSGMLKCSVCGSSLGYNRSNDQKKRPDFFQCWKYAKGFHEGSCCLSVRLAEKAVIESLEEVLATNELEYEYIRKTNDTVNAEEVAIQEALAHLEVKERRIREAYENEIDTLEEYKQNKLRLKSEREELMADAERLHRQAEQAPDVVPSKEDVMRQVAHVHEIISDSNIDYETKGNALRKIVKDIVFDRKKGHLYIHFYVS

SEQ ID NO: 6669 - protein, 487 aa, Unknown
  Description of Unknown: Integrase B6670 sequence
  PTHR30461:SF3,IPR036162,PS51737,IPR011109,PTHR30461, PS00397,PF00239,G3DSA:1.10.10.2600,IPR006119,SSF53041, cd00338,SM00857,IPR025827,IPR038109,PS51736, IPR006118,PF13408,G3DSA:3.40.50.1390,PF07508,Coil
MKKIAAAYIRVSTHMQEELSPDAQLRCIRDWGNVHGYYIPDEYVFIDNGISGRKAKKRHDFLRMIGLAKTKPASPFEAILLWKFNRFARNQEESIVYKSMLRKKCNVDVISTTQQTTKDIYGDLIERIIEWTDEFYSIQLGEDVFRGMTENALRGNFQASPAFGYKVEKGLGLVIVEDQANIVRMIFNLYANTRMGFYEIARHLNRLGYKTKKGGAFEARAIRYIIQNPIYKGYLRWNYANGTTHVVNDESEWIIVKSPLVPIIVSEELWDRANERLKNEYRPKNGKPVTKHRHWLSGLVKCSSCGASLSTSVQYRHDRTYINFQCYKYLKGKCMVSHGISEKKLVPLVLNVLKEDMSKSYIECERIEKVVENQQDILDVQLKRLATRETRIKEAYLNGIDSLAEYKANKEEIQKEREFLLQQSQGHNKTENESNELPNKIRGVYDILVSDQCSKDEKQAAIRSIVKKIVFDKENKTLDFHYYIKED

SEQ ID NO: 6670 - protein, 487 aa, Unknown
  Description of Unknown: Integrase B6671 sequence
  PTHR30461:SF3,cd00338,SM00857,IPR006118,G3DSA:1.10.10.2600, IPR036162,PS51737,G3DSA:3.40.50.1390,IPR006119,IPR038109, PF07508,IPR011109,SSF53041,PTHR30461,PS00397, PS51736,Coil,PF00239
MSRKGDFYFKKTGDYMKIAAAYVRVSTEDQTELSPTSQIKQIREYAKNHGYIVPDEFVFADEGISGKNTQKRPAFNRMIGLAKTKPKPFECILLWKYSRFARNREDSIVYKSMLRKQLGIDVISISENLGDDKMSILIEALIEAMDEYYSINLAEEVKRGMTERVSRGEAVSVPAYGYDIEEGKYIINEAEAEVVRQIFSDFNNGVGTVTIARNLNAIGIKTKRGKLWENRTVKYILHNPVYIGKIRWNPEEITGLNYDHEKIMLVDGIHEPLLTKDLWDSVQEKLSLMKKTRKPRERSNPTPDYMLYGLMRCGSCGGTLTQSRDGLQCHKYAHGTCDTSHYISLSKANTAVIDLIQHTLENGIFTLTPKKQDVSAQQVAMIDKQIQNEKNKLLRVKEAFEYGVDTLEEYKENKNKILQKISELESSKPVQQTNIDKKKFAQKYLGVMDTLKDDTVSEADKNHILRQFVEKIVLHRPSNEIEIFYHY

SEQ ID NO: 6671 - protein, 487 aa, Unknown
  Description of Unknown: Integrase B6672 sequence
  PTHR30461:SF3,IPR036162,PS51737,IPR011109,PTHR30461, PS00397,PF00239,G3DSA:1.10.10.2600,IPR006119,SSF53041, cd00338,SM00857,IPR025827,IPR038109,PS51736, IPR006118,PF13408,G3DSA:3.40.50.1390,PF07508,Coil
MKKIAAAYIRVSTHMQEELSPDAQLRCIRDWGNVHGYYIPDEYVFIDNGISGRKAKKRHDFLRMIGLAKTKPASPFEAILLWKFNRFARNQEESIVYKSMLRKKCNVDVISTTQQTTKDIYGDLIERIIEWTDEFYSIQLGEDVFRGMTENALRGNFQASPAFGYKVEKGLGLVIVEDQANIVRMIFNLYANTRMGFYEIARHLNRLGYKTKKGGAFEARAIRYIIQNPIYKGYLRWNYANGTTHVVNDESEWIIVKSPLVPIIVSEELWDRANERLKNEYRPKNGKPVTKHRHWLSGLVKCSSCGASLSTSVQYRHDRTYINFQCYKYLKGKCIVSHGISEKKLVPLVLNVLKEDMSKSYIECERIEKVVENQQDILDVQLKRLATRETRIKEAYLNGIDSLAEYKANKEDIQKEREFLLQQSQNHSDEENKSSDLPGKIRGVYDILISDQCSKDEKQAAIRSIVKKIVFDKENKTLDFYYYIKED

SEQ ID NO: 6672 - protein, 487 aa, Unknown
  Description of Unknown: Integrase B6673 sequence
  PTHR30461:SF3,IPR036162,PS51737,IPR011109,PTHR30461, PS00397,PF00239,G3DSA:1.10.10.2600,IPR006119,SSF53041, cd00338,SM00857,IPR025827,IPR038109,PS51736, IPR006118,PF13408,G3DSA:3.40.50.1390,PF07508,Coil
MKKIAAAYIRVSTHMQEELSPDAQLRCIRDWGNVHGYYIPDEYVFIDNGISGRKAKKRHDFLRMIGLAKTKPASPFEAILLWKFNRFARNQEESIVYKSMLRKKCNVDVISTTQQTTKDIYGDLIERIIEWTDEFYSIQLGEDVFRGMTENALRGNFQASPAFGYKVEKGLGLVIVEDQANIVRMIFNLYANTRMGFYEIARHLNRLGYKTKKGGAFEARAIRYIIQNPIYKGYLRWNYANGTTRVVNDESEWIIVKSPLVPIIVSEELWDRANERLKNEYRPKNGKPVTKHRHWLSGLVKCSSCGASLSTSVQYRHDRTYINFQCYKYLKGKCLVSHGISEKKLVPLVLNVLKEDMSKSYIECERIEKVVENQQDILDVQLKRLATRETRIKEAYLNGIDSLAEYKANKEEIQKEREFLLQQSQDHNKTENESNELPNKIRGVYDILVSDQCSKDEKQAAIRSIVKKIVFDKENKTLDFHYYIKED

SEQ ID NO: 6673 - protein, 487 aa, Unknown
  Description of Unknown: Integrase B6674 sequence
  PTHR30461:SF3,IPR036162,PS51737,IPR011109,PTHR30461, PS00397,PF00239,G3DSA:1.10.10.2600,IPR006119,SSF53041, cd00338,SM00857,IPR025827,IPR038109,PS51736, IPR006118,PF13408,G3DSA:3.40.50.1390,PF07508,Coil
MNAALYIRVSTDDQLEFSPDAQKRAMIEYAKRNDMLVSDEHIYIDEGISGKRAKNRPAFQRMIATAKSKQRPFDVILVHKFDRFARSREDSVVYKSLLKRECNVKVVSITEQLEDDKFSVILEAMLEAMAEYYSLNLSDEVMKGMTEKARRGQLQYASPFGYNIKNGNVTIIEHEANIVKLIFDKFVNEKMTYVEICHYLNEHGLRNRKGNMFQTRFMKYVLENPIYCGMVRWNYSTQKGGTRRLKKESEWIITNGNHEAIVDKEIFNKAQKQISHIKSLYSTPNIDRNQYGHWLGGLLRCSTCGGTLTISNAKLKFGGYYVCNRNRKGSCPTANRVRIDIIQEEIINALKHDLYMLEKVPGTPISIESKKINDSEITLLEAQLEKVKRKYAIAKNAYLAEIDSLEEYKANKNAIQEEENNLLDKLNKISKPQKDNSKYIKKKIKESLNLIDDSETELKVKNEMLKSFIKEIVVNKEADTIDIHYFS

SEQ ID NO: 6674 - protein, 487 aa, Unknown
  Description of Unknown: Integrase B6675 sequence
  PTHR30461:SF3,IPR036162,PS51737,IPR011109,PTHR30461, PS00397,PF00239,G3DSA:1.10.10.2600,IPR006119,SSF53041, cd00338,SM00857,IPR025827,IPR038109,PS51736, IPR006118,PF13408,G3DSA:3.40.50.1390,PF07508,Coil
MKKIAAAYIRVSTHMQEELSPDAQLRCIRDWGNVHGYYIPDEYVFIDNGISGRKAKKRHDFLRMIGLAKTKPASPFEAILLWKFNRFARNQEESIVYKSMLRKKCNVDVISTTQQTTKDIYGDLIERIIEWTDEFYSIQLGEDVFRGMTENALRGNFQASPAFGYKVEKGLGLVIVEDQANIVRMIFNLYANTRMGFYEIARHLNRLGYKTKKGGAFEARAIRYIIQNPIYKGYLRWNYANGTTRVVNDESEWIIVKSPLVPIIVSEELWDRANERLKNEYRPKNGKPVTKHRHWLSGLVKCSSCGASLSTSVQCRHDRTYINFQCYKYLKGKCMVSHGISEKKLVPLVLNVLKEDMSKSYIECERIEKVVENQQDILDVQLKRLATRETRIKEAYLNGIDSLAEYKANKEEIQKEREFLLQQSQDHNKTENESNELPNKIRGVYDILVSDQCSKDEKQAAIRSIVKKIVFDKENKTLDFHYYIKED

SEQ ID NO: 6675 - protein, 487 aa, Unknown
  Description of Unknown: Integrase B6676 sequence
  PTHR30461:SF3,IPR036162,PS51737,IPR011109,PTHR30461, PS00397,PF00239,G3DSA:1.10.10.2600,IPR006119,SSF53041, cd00338,SM00857,IPR025827,IPR038109,PS51736, IPR006118,PF13408,G3DSA:3.40.50.1390,PF07508,Coil
MKKIAAAYIRVSTHMQEELSPDAQLRCIRDWGNVHGYYIPDEYVFIDNGISGRKAKKRHDFLRMIGLAKTKPASPFEAILLWKFNRFARNQEESIVYKSMLRKKCNVDVISTTQQTTKDIYGDLIERIIEWTDEFYSIQLGEDVFRGMTENALRGNFQASPAFGYKVEKGLGLVIVEDQANIVRMIFNLYANTRMGFYEIARHLNRLGYKTKKGGAFEARAIRYIIQNPIYKGYLRWNYANGTTHVVNDESEWIIVKSPLVPIIVSEELWDRANERLKNEYRPKNGKPVTKHRHWLSGLVKCSSCGASLSTSVQYRHDRTYINFQCYKYLKGKCMVSHGISEKKLVPLILNVLKEDMNKSYIECERIEKVVENQQDILDVQLKRLDAREVRIKEAYLNGVDSLAEYKSNKEQIQQERELLLQQSQNHDKEEKGSNELPNKIRGVYDILVSDQCSKDEKQTAIRSIVKKIVFDKENKTLDFYYYIKED

SEQ ID NO: 6676 - protein, 487 aa, Unknown
  Description of Unknown: Integrase B6677 sequence
  IPR036162,PS51737,IPR011109,PTHR30461,PS00397, PF00239,G3DSA:1.10.10.2600,IPR006119,SSF53041,cd00338, SM00857,IPR025827,IPR038109,PS51736,IPR006118, PF13408,G3DSA:3.40.50.1390,PF07508,Coil
MTLKNACAYIRVSTDKQEELSPDAQKRLIIDYCKKNGYTITNENIFIENGISGKKADKRPEFKRMIALAKSKEHPFDVILVWKFSRFARNQEESIVYKSMLKKANVDVVSVSEPVIDGPFGSLIERIIEWMDEYYSIRLSGEVIRGMTEKALRGGYNAQPPLGYRKNSDTGVPEIYEPEAVIVRNIFSFISQGLSLIDTARSINNMGFHTRRGGMFEQRTIRYIIENPFYYGYVRWNRQNPSEHTIKDKSEWIIAPGAHPVLINKESWDFANEQLIKISRPYKERGTSGIKHWLSGIVKCSSCGSSLVSNSLWKGHSTSFQCSGYNKCKCKVSHYIKTERLEAGIYEGFLKVLSSKNVTYEKVSEHSYEEKVDTAALLKNIEDKERRIKQAYRDGIDTLEEYKDNKAILQKEREKVMEIISKQKPVQHDEDNEIMLSQIKNAYEIIKNEDLDKLTRANAIRSVVSKAVYDNEKDTLDIYFRLIEKSL

SEQ ID NO: 6677 - protein, 487 aa, Unknown
  Description of Unknown: Integrase B6678 sequence
  PTHR30461:SF3,IPR036162,PS51737,IPR011109,PTHR30461, PS00397,PF00239,G3DSA:1.10.10.2600,IPR006119,SSF53041, cd00338,SM00857,IPR025827,IPR038109,PS51736, IPR006118,PF13408,G3DSA:3.40.50.1390,PF07508,Coil
MKKIAAAYIRVSTHMQEELSPDAQLRCIRDWGNVHGYYIPDEYVFIDNGISGRKAKKRHDFLRMIGLAKTKPASPFEAILLWKFNRFARNQEESIVYKSMLRKKCNVDVISTTQQTTKDIYGDLIERIIEWTDEFYSIQLGEDVFRGMTENALRGNFQSSPAFGYKVEKGQGLVIVEDQANIVRMIFNLYANTRMGFYEIARHLNRLGYKTKKGGAFEARAIRYIIQNPIYKGYLRWNYANGTTRVVNDESEWIIVKSPLVPIIVSEELWDRANERLKNEYRPKNGKPVTKHRHWLSGLVKCSSCGASLSTSVQYRHDRTYINFQCYKYLKGKCMVSHGISEKKLVPLVLNVLKEDMSKSYIECERIEKVVENQQDILDVQLKRLATRETRIKEAYLNGIDSLAEYKANKEEIQKEREFLLQQSQDHNKTENESNELPNKIRGVYDILVSDQCSKDEKQAAIRSIVKKIVFDKENKTLDFHYYIKED

SEQ ID NO: 6678 - protein, 487 aa, Unknown
  Description of Unknown: Integrase B6679 sequence
  PTHR30461:SF3,IPR036162,PS51737,IPR011109,PTHR30461, PS00397,PF00239,G3DSA:1.10.10.2600,IPR006119,SSF53041, cd00338,SM00857,IPR025827,IPR038109,PS51736, IPR006118,PF13408,G3DSA:3.40.50.1390,PF07508,Coil
MKKIAAAYIRVSTHMQEELSPDAQLRCIRAWGDAHNYYVPDEFVFIDKGISGRKAKKRHDFLRMIGLAKTKPAAPFEAILLWKFNRFARNQEESIVYKSMLRKKCNVDVISTTQQTTNDIYGDLIERIIEWTDEFYSIQLGEDVFRGMTENALRGNFQSSPAFGYKVEKGLGLVIVEDQANIVRMIFNLYVNTRMGFYEIARHLNRLGYKTKKGGAFEARAIRYIIQNPIYKGYLRWNYANGTTRVVNDESEWIIVKSPLVPIIVSEELWDRANERLKNEYRPRNGKPVSRHRHWLSGLVKCSSCGASLSTSVQYRRDRTYINFQCYKYLKGKCMVSHGISEKKLVPLILNALKEDMNKSYIECERIEKTTENQQDILNVQLKRLDTRESRSKEAYLNGIDSLAEYKANKEDIRKEREFLLQQSQDHSDQENKSSDLPGKIRGVYDILVSDQCSKDEKQAAIRSIVKKIVFDKENKTLDFYYYIKED

SEQ ID NO: 6679 - protein, 487 aa, Unknown
  Description of Unknown: Integrase B6680 sequence
  PTHR30461:SF3,IPR036162,PS51737,IPR011109,PTHR30461, PS00397,PF00239,G3DSA:1.10.10.2600,IPR006119,SSF53041, cd00338,SM00857,IPR025827,IPR038109,PS51736, IPR006118,PF13408,G3DSA:3.40.50.1390,PF07508,Coil
MKKIAAAYIRVSTHMQEELSPDAQLRCIRDWGNVHGYYIPDEYVFIDNGISGRKAKKRHDFLRMIGLAKTKPASPFEAILLWKFNRFARNQEESIVYKSMLRKKCNVDVISTTQQTTKDIYGDLIERIIEWTDEFYSIQLGEDVFRGMTENALRGNFQASPAFGYKVEKGLGLVIVEDQANIVRMIFNLYANTRMGFYEIARHLNRLGYKTKKGGAFEARAIRYIIQNPIYKGYLRWNYANGTTRVVNDESEWIIVKSPLVPIIVSEELWDRANERLKNEYRPKNGKPVTKHRHWLSGLVKCSSCGASLSTSVQYRHDRTYINFQCYKYLKGKCMVSHGISEKKLVPLVLNVLKEDMSKSYIECERIEKVVENQQDILDVQLKRLATRETRIKEAYLNGIDSLAEYKANKEEIQKEREFLLQQSQDHNKTENESNELPNKIRGVYDILVSDQCSKDEKQAAIRSIVKKIVFDKENKTLDFHYYIKED

SEQ ID NO: 6680 - protein, 487 aa, Unknown
  Description of Unknown: Integrase B6681 sequence
  PTHR30461:SF3,IPR036162,PS51737,IPR011109,PTHR30461, PS00397,PF00239,G3DSA:1.10.10.2600,IPR006119,SSF53041, cd00338,SM00857,IPR025827,IPR038109,PS51736, IPR006118,PF13408,G3DSA:3.40.50.1390,PF07508,Coil
MKKIAAAYIRVSTHMQEELSPDAQLRCIRDWGNVHGYYIPDEYVFIDNGISGRKAKKRHDFLRMIGLAKTKPASPFEAILLWKFNRFARNQEESIVYKSMLRKKCNVDVISTTQQTTKDIYGDLIERIIEWTDEFYSIQLGEDVFRGMTENALRGNFQSSPAFGYKVEKGQGLVIVEDQANTVRMIFNLYANTMMGFYEIARHLNRLGYKTKKGGAFETRTIRYIIQNPIYKGYLRWNYANGTTRVVNDESEWIIVKSPLVPIIVSEELWDRANERLKNEYRPKNGKPVSKHRHWLSGLVKCSSCGASLSTSVQYRHDRTYINFQCYKYLKGKCLVSHGISEKKLVPLVLNVLKEDMSKSYIECERIEKVVENQQDILDVQLKRLATREARIKEAYLNGIDSLAEYKANKEEIQKEREFLLQQSQDHNKTEKESNELPNKIRGVYDILVSDQCSKDEKQAAIRSIVKKIVFDKENKTLDFHYYIKED

SEQ ID NO: 6681 - protein, 487 aa, Unknown
  Description of Unknown: Integrase B6682 sequence
  PTHR30461:SF3,IPR036162,PS51737,IPR011109,PTHR30461, PS00397,PF00239,G3DSA:1.10.10.2600,IPR006119,SSF53041, cd00338,SM00857,IPR025827,IPR038109,PS51736, IPR006118,PF13408,G3DSA:3.40.50.1390,PF07508,Coil
MKKIAAAYIRVSTHMQEELSPDAQLRCIRAWGDAHNYYVPDEFVFIDKGISGRKAKKRHDFLRMIGLAKTKPAAPFEAILLWKFNRFARNQEESIVYKSMLRKKCNVDVISTTQQTTNDIYGDLIERIIEWTDEFYSIQLGEDVFRGMTENALRGNFQASPAFGYKVEKGLGLVIVEDQANIVRMIFNLYANTRMGFYEIARHLNRLGYKTKKGGAFEARAVRYIIQNPIYKGYLRWNYANGTTRVVNDESEWIIVKSPLVPVIVSEELWDRANERLKSEYRPKNGKPVSKHRHWLSGLVKCSSCGASLSTSVQYRRDRTYINFQCYKYLKGKCMVSHGISEKKLVPLILNVLKEDMNKSYIECERIEKVVENQQDILNVQLKRLDARESRSKEAYLNGIDSLAEYKANKEDIQKEREFLLQQSQNHSDEENKSSDLPGKIRGVYDILVSDQCSKDEKQAAIRSIVKKIVFDKENKTLDFYYYVKED

SEQ ID NO: 6682 - protein, 487 aa, Unknown
  Description of Unknown: Integrase B6683 sequence
  PTHR30461:SF3,IPR036162,PS51737,IPR011109,PTHR30461, PS00397,PF00239,G3DSA:1.10.10.2600,IPR006119,SSF53041, cd00338,SM00857,IPR025827,IPR038109,PS51736, IPR006118,PF13408,G3DSA:3.40.50.1390,PF07508,Coil
MKKIAAAYIRVSTHMQEELSPDAQLRCIRDWGNVHGYYIPDEYIFIDNGISGRKAKKRHDFLRMIGLAKTKPASPFEAILLWKFNRFARNQEESIVYKSMLRKKCNVDVISTTQQTTKDIYGDLIERIIEWTDEFYSIQLGEDVFRGMTENALRGNFQASPAFGYKVEKGLGLVIVEDQANIVRMIFNLYANTRMGFYEIARHLNRLGYKTKKGGAFEARAIRYIIQNPIYKGYLRWNYANGTTHVVNDESEWIIVKSPLVPIIVSEELWDRANERLKNEYRPKNGKPVTKHRHWLSGLVKCSSCGASLSTSVQYRHDRTYINFQCYKYLKGKCMVSHGISEKKLVPLILNVLKEDMNKSYIECERIEKVVENQQDILDVQLKRLDAREVRIKEAYLNGVDSLAEYKSNKEQIQQERELLLQQSQNHDKEEKGSNELPNKIRGVYDILVSDQCSKDEKQTAIRSIVKKIVFDKENKTLDFYYYIKED

SEQ ID NO: 6683 - protein, 487 aa, Unknown
  Description of Unknown: Integrase B6684 sequence
  PTHR30461:SF3,IPR036162,PS51737,IPR011109,PTHR30461, PS00397,PF00239,G3DSA:1.10.10.2600,IPR006119,SSF53041, cd00338,SM00857,IPR025827,IPR038109,PS51736, IPR006118,PF13408,G3DSA:3.40.50.1390,PF07508,Coil
MKKIAAAYIRVSTHMQEELSPDAQLRCIRDWGNVHGYYIPDEYVFIDNGISGRKAKKRHDFLRMIGLAKTKPASPFEAILLWKFNRFARNQEESIVYKSMLRKKCNVDVISTTQQTTKDIYGDLIERIIEWTDEFYSIQLGEDVFRGMTENALRGNFQASPAFGYKVEKGLGLVIVEDQANIVRMIFNLYANTRMGFYEIARHLNRLGYKTKKGGAFEARTIRYIIQNPIYKGYLRWNYANGTTRVVNDESEWIIVKSPLVPIIVSEELWDRANERLKNEYRPKNGKPVTKHRHWLSGLVKCSSCGASLSTSVQYRHDRTYINFQCYKYLKGKCIVSHGISEKKLVPLVLNVLKEDMSKSYIECERIEKVVENQQDILDVQLKRLATRETRIKEAYLNGIDSLAEYKANKEEIQKEREFLLQQSQDHNKTENESNELPNKIRGVYDILVSDQCSKDEKQAAIRSIVKKIVFDKENKTLDFHYYIKED

SEQ ID NO: 6684 - protein, 487 aa, Unknown
  Description of Unknown: Integrase B6685 sequence
  PTHR30461:SF3,IPR036162,PS51737,IPR011109,PTHR30461, PS00397,PF00239,G3DSA:1.10.10.2600,IPR006119,SSF53041, cd00338,SM00857,IPR025827,IPR038109,PS51736, IPR006118,PF13408,G3DSA:3.40.50.1390,PF07508,Coil
MTLKNACAYIRVSTDKQEELSPDAQKRLIIDYCKKNGYTITNENIFIENGISGKKADKRPEFKRMIALAKSKEHPFDVILVWKFSRFARNQEESIVYKSMLKKANVDVVSVSEPVIDGPFGSLIERIIEWMDEYYSIRLSGEVIRGMTEKALRGGYNAQPPLGYRKNSDTGVPEIYEPEAVIVRNIFSFISQGLSLIDTARSINNMGFHTRRGGMFEQRTIRYIIENPFYYGYVRWNRQNPSEHTIKDKSEWIIAPGAHPVLINKESWDFANEQLIKISRPYKERGTSGIKHWLSGIVKCSSCGSSLVSNSLWKGHSTSFQCSGYNKCKCKVSHYIKTERLEAGIYEGFLKVLSSKNVTYEKVSEHSYEEKVDTAALLKNIEDKERRIKQAYRDGIDTLEEYKDNKAILQKEREKVMEIISRQQPTVQDEDNETMLRQIKNAYEIIKNEDLDKLTRANAIRSVVSKAVYDNEKDTLDIYFRLIEKSL

SEQ ID NO: 6685 - protein, 487 aa, Unknown
  Description of Unknown: Integrase B6686 sequence
  PTHR30461:SF3,IPR036162,PS51737,IPR011109,PTHR30461, PS00397,PF00239,G3DSA:1.10.10.2600,IPR006119,SSF53041, cd00338,SM00857,IPR025827,IPR038109,PS51736, IPR006118,PF13408,G3DSA:3.40.50.1390,PF07508,Coil
MKKIAAAYIRVSTHMQEELSPDAQLRCIRVWGDAHGYYVPDEYVFIDNGISGRKAKKRHDFLRMIGLAKTKPASPFEAILLWKFNRFARNQEESIVYKSMLRKKCNVDVISTTQQTTKDIYGDLIERIIEWTDEFYSIQLGEDVFRGMTENALRGNFQASPAFGYKVEKGLGLVIVEDQANIVRMIFNLYANTRMGFYEIARHLNRLGYKTKKGGAFEARAIRYIIQNPIYKGYLRWNYANGTTRVVNDESEWIIVKSPLVPIIVSEELWDRANERLKNEYRPKNGKPVTKHRHWLSGLVKCSSCGASLSTSVQYRHDRTYINFQCYKYLKGKCMVSHGISEKKLVPLVLNVLKEDMSKSYIECERIEKVVENQQDILDVQLKRLATRETRIKEAYLNGIDSLAEYKANKEEIQKEREFLLQQSQGHNKTENESNELPNKIRGVYDILVSDQCSKDEKQAAIRSIVKKIVFDKENKTLDFHYYIKED

SEQ ID NO: 6686 - protein, 487 aa, Unknown
  Description of Unknown: Integrase B6687 sequence
  PTHR30461:SF3,SM00857,IPR006118,G3DSA:1.10.10.2600,IPR036162, PF13408,IPR025827,G3DSA:3.40.50.1390,Coil,IPR006119, IPR038109,PF07508,IPR011109,SSF53041,PTHR30461, PS00397,cd00338,PF00239
MKKETEYLQIGAAYIRVSTDDQTELSPDAQLRVIRASAKEDGFFIPDEFVFIEKRGVSGRRADNREEFQRMIATAKSQTPAPFRRLYLWKFSRFARNQEESTFYKGILRKKCSVDIKSVSEPIAEGMFGRLIETIIEWFDEYYSFNLSGEVLRGMTEKALREGYQSTPCLGYQAVGGGRPFIINESEYTVAEYIHQSYHSGADMRAIARSANDRGYRTKRGNLFDKRAIEGILKNKFYVGIVTWNGFTFQGPHECRTSITAIFEDNQIRMQREYKPLNRRETSSCLHWASGLLKCGYCGASLGYNKSKNTGRNPSFFQCWKYAKGIHGESCSITVSKAEKSILKSLDMAVNDPHIKYEYIRQSVPDSDASISKLESALSRLAVKESRIRDAYENGIDTLEEYRDNRGRIKKEREELNAQLRELKDGPARNVEDDRKALQSRIQNTIDLLKNPEVCYEVKGNALRGIVKKIVYDKEHGKLKCYYYISI

SEQ ID NO: 6687 - protein, 487 aa, Unknown
  Description of Unknown: Integrase B6688 sequence
  PTHR30461:SF3,IPR036162,PS51737,IPR011109,PTHR30461, PS00397,PF00239,G3DSA:1.10.10.2600,IPR006119,SSF53041, cd00338,SM00857,IPR025827,IPR038109,PS51736, IPR006118,PF13408,G3DSA:3.40.50.1390,PF07508,Coil
MKKIAAAYIRVSTHMQEELSPDAQLRCIRDWGNVHGYYIPDEYVFIDNGISGRKAKKRHDFLRMIGLAKTKPASPFEAILLWKFNRFARNQEESIVYKSMLRKKCNVDVISTTQQTTKDIYGDLIERIIEWTDEFYSIQLGEDVFRGMTENALRGNFQASPAFGYKVEKGQGLVIVEDQANIVRMIFNLYANTMMGFYEIARHLNRLGYKTKKGGAFETRTIRYIIQNPIYKGYLRWNYANGTTRVVNDESEWIIVKSQLVPIIVSEELWDRANERLKNEYRPKNGKPVSKHRHWLSGLVKCSSCGASLSTSVQYRHDRTYINFQCYKYLKGKCLVSHGISEKKLVPLVLNVLKEDMSKSYIECERIEKVVENQQDILDVQLKRLATREARIKEAYLNGIDSLAEYKANKEEIQKEREFLLQQSQDHNKTENESNELPNKIRGVYDILVSDQCSKDEKQAAIRSIVKKIVFDKENKTLDFHYYIKED

SEQ ID NO: 6688 - protein, 487 aa, Unknown
  Description of Unknown: Integrase B6689 sequence
  PTHR30461:SF3,IPR036162,PS51737,IPR011109,PTHR30461, PS00397,PF00239,G3DSA:1.10.10.2600,IPR006119,SSF53041, cd00338,SM00857,IPR025827,IPR038109,PS51736, IPR006118,PF13408,G3DSA:3.40.50.1390,PF07508,Coil
MKKIAAAYIRVSTHMQEELSPDAQLRCIRDWGNVHGYYIPDEYIFIDNGISGRKAKKRHDFLRMIGLAKTKPASPFEAILLWKFNRFARNQEESIVYKSMLRKKCNVDVISTTQQTTKDIYGDLIERIIEWTDEFYSIQLGEDVFRGMTENALRGNFQASPAFGYKVEKGLGLVIVEDQANIVRMIFNLYANTRMGFYEIARHLNRLGYKTKKGGAFEARAIRYIIQNPIYKGYLRWNYANGTTHVVNDESEWIIVKSPLVPIIVSEELWDRANERLKNEYRPKNGKPVTKHRHWLSGLVKCSSCGASLSTSVQYRHDRTYINFQCYKYLKGKCIVSHGISEKKLVPLVLNVLKEDMSKSYIECERIEKVVENQQDILDVQLKRLATRETRIKEAYLNGIDSLAEYKANKEDIQKEREFLLQQSQNHSDEENKSSDLPGKIRGVYDILISDQCSKDEKQAAIRSIVKKIVFDKENKTLDFYYYIKED

SEQ ID NO: 6689 - protein, 487 aa, Unknown
  Description of Unknown: Integrase B6690 sequence
  PTHR30461:SF3,SM00857,IPR006118,G3DSA:1.10.10.2600,IPR036162, PS51737,G3DSA:3.40.50.1390,IPR006119,IPR038109,PF07508, SSF53041,IPR011109,PF00239,PTHR30461,PS00397, PS51736,Coil,cd00338
MSRKGDFYFKKTGDYMKIAAAYVRVSTEDQTELSPTSQIKQIREYAKNHGYIVPDEFVFADEGISGKNTQKRPAFNRMIGLAKTKPKPFECILLWKYSRFARNREDSIVYKSMLRKQLGIDVISISENLGDDKMSILIEALIEAMDEYYSINLAEEVKRGMTERVSRGEAVSVPAYGYDIEEGKYIINEAEAEVVRQIFSDFNSGVGTVTIARNLNAIGIKTKRGKLWENRTVKYILHNPVYIGKIRWNPEEITGLNYDHEKIMLVDGIHEPLLTKDLWDSVQEKLSLMKKTRKPRERSNPTPDYMLYGLMRCGSCGGTLTQSRDGLQCHKYAHGTCDTSHYISLSKANTAVIDLIQHTLENGIFTLTPKKQDVSTQQIAMIDKQIQSEKNKLIRVKEAFEYGVDTLEEYKENKNKILQKISELESSKPVQQTNIDKKKFAQKYLGVIDTLKDDTVSEADKNHILRQFVEKIVLHRPSNEIEIFYHY

SEQ ID NO: 6690 - protein, 487 aa, Unknown
  Description of Unknown: Integrase B6691 sequence
  PTHR30461:SF3,IPR036162,PS51737,IPR011109,PTHR30461, PS00397,PF00239,G3DSA:1.10.10.2600,IPR006119,SSF53041, cd00338,SM00857,IPR025827,IPR038109,PS51736, IPR006118,PF13408,G3DSA:3.40.50.1390,PF07508,Coil
MKKIAAAYIRVSTHMQEELSPDAQLRCIRDWGNVHGYYIPDEYVFIDNGISGRKAKKRHDFLRMIGLAKTKPASPFEAILLWKFNRFARNQEESIVYKSMLRKKCNVDVISTTQQTTKDIYGDLIERIIEWTDEFYSIQLGEDVFRGMTENALRGNFQSSPAFGYKVEKGQGLVIVEDQANIVRMIFNLYANTMMGFYEIARHLNRLGYKTKKGGAFETRTIRYIIQNPIYKGYLRWNYANGTTRVVNDESEWIIVKSPLVPIIVSEELWDRANERLKNEYRPKNGKPVSKHRHWLSGLVKCSSCGASLSTSVQYRHDRTYINFQCYKYLKGKCLVSHGISEKKLVPLVLNVLKEDMSKSYIECERIEKVVENQQDILDVQLKRLATREARIKEAYLNGIDSLAEYKANKEEIQKEREFLLQQSQDHNKTENESNELPNKIRGVYDILVSDQCSKDEKQAAIRSIVKKIVFDKENKTLDFHYYIKED

SEQ ID NO: 6691 - protein, 487 aa, Unknown
  Description of Unknown: Integrase B6692 sequence
  IPR036162,PS51737,IPR011109,PTHR30461,PS00397, PF00239,G3DSA:1.10.10.2600,IPR006119,SSF53041,cd00338, SM00857,IPR025827,IPR038109,PS51736,IPR006118, PF13408,G3DSA:3.40.50.1390,PF07508,Coil
MNAALRTAAAYIRVSTDDQIELSPESQMVELRKYAKQNNIVILNDHIYMEDKGISGRTAKRRPAFNDMIAHAKSEEHPFDCILVWKFSRFARNQEESIVYKSLLRKSNVDVISISEGIPDGFIGQLVERIFEWYDEYYLINLSGEVRRSMTLNAQEGAYQSRPPFGYDYVGKKITPTINTEQAKMVRTVFRSFLAGGTYSQIAIYLNNMGVHTQRGNPWEPRTIKYMLQNPFYCGKIRWGYYDRKNQTYNKGDDVIISQGKHEPIISQEDFDTVQERIARISRGFKKRDPYACKHWLSGVLLCSCCGASLTASMHNKYPYWQCWKHAKALCPADQSITVSRLEQQVIKGLHDIVEAAHLDYKVLDVADSDTQALLAELQHRLDRLAQKEKRIRDAYLNEIDTIDEYRDAKALVQKERDSLNAQIQALSAPIKKERNDDLMRDHIRSALSIIEDPESTFVDKGNAIREIVTKITYDKKSQTLDFSLFL

SEQ ID NO: 6692 - protein, 487 aa, Unknown
  Description of Unknown: Integrase B6693 sequence
  PTHR30461:SF3,SM00857,G3DSA:1.10.10.2600,IPR036162,PS51737, G3DSA:3.40.50.1390,IPR006119,IPR038109,PF07508,IPR011109, SSF53041,PF00239,PTHR30461,PS51736,Coil, cd00338
MPEYLQIKKRSGFKKMIQDALNGEVDLIITKEVARFARNTVDTLSYTRKLKSAGVGVIFTIDNIDTRDADGELRLTIMASIAQEESRKTSERVKWGQKRQMEKGVVFGRDLLGYTVQNGQLHINEEEVPIVQAIFHKYTNEGKGTWTIANELLVEGMRPKRIALWSNVVILRVLRNEKYVGDLCQKKTYTPDYLTHSKKYNRGEEEMVYLKEHHEPIIDRDLWNRTQEELKRRSPSEEQKSKHSNRYWCSGKIHCAECGCRYVSRTKKLMSGDVYKAWRCYAAANHGTKKQDADGNEIGCNNSSINDRSLKTCMNYCITLVQGERDSLKKEILKEISQLQKTTAKKLDSKKIKKKIDNLEMKKRKAIDLMLDGLISKEDLQSQTEWYNEELEKLNIQLSDALQKDKSDSRQVNHMEKYIKALDEIMELDGDSEDVYKEVLDHMEIHKGNIVDVWLKSIPIGIRLKVKATGKGEYFKTEILETSFIEK

SEQ ID NO: 6693 - protein, 487 aa, Unknown
  Description of Unknown: Integrase B6694 sequence
  cd03768,PTHR30461:SF3,SM00857,G3DSA:1.10.10.2600,IPR036162, PF13408,IPR025827,G3DSA:3.40.50.1390,PS51737,IPR006119, IPR038109,PF07508,IPR011109,SSF53041,PTHR30461, PS51736,Coil,PF00239
MKTDAVYARQSVEKKDSLSIAGQIDLCRRTAGGGELRIYKDAGYSGKNTERPAFQQLMKDIRADRIGTLYVYRLDRFSRSVADFGQLWEVLQEHHVEFVSVNENFDTKTPMGRAMLHIIMVFAQLERETTAERVRDNYYRRAALGAWPGGPAPYGFDNGRACGKDGREVPSLIPNDKAAVVQRIFQEYAAEGMSLGLLARKLTAEGIPAPKRATWDNVTLSRLLHNPAYAMADEQVRLHYLGQGVEVTSPPEAFDGVHGVLLVGKREANARKYTRTENHRASVLNSVGIVPSPLFLAVQAKLAHNRQVGNSGKGKHTWLSGLLKCAKCGYSLSVVVDKPYRYLVCSGRYNVNRCDAAIHVKLAELETVVQTEMEKLLAQCPREPVVPKPEDSYTRRLLELDRRAERLMDAFAESEDLPASYLQKALGKIEKERETLRQAQRREAGRVPLPEKLVFGELSFEEKKAVVAQFIRRIEVAEDSAEIIWAV

SEQ ID NO: 6694 - protein, 487 aa, Unknown
  Description of Unknown: Integrase B6695 sequence
  PTHR30461:SF3,IPR036162,PS51737,IPR011109,PTHR30461, PS00397,PF00239,G3DSA:1.10.10.2600,IPR006119,SSF53041, cd00338,SM00857,IPR025827,IPR038109,PS51736, IPR006118,PF13408,G3DSA:3.40.50.1390,PF07508,Coil
MTPKDYRIAAAYIRVSTDDQVELSPASQLVEIRKWASANGYIVPDEFVFVDEAKTGRKVTGRDDFRRLIGTAKQKPKPFDAILLWKFSRFARNRDDAVLYKSILRKQLHIEVISIKEPIAEGKLGIIMEAMIEAMDEYYSINLAEDVKRGMEEKHRRGELQSTPSFGYSAQDGVLVPKEPEASYVREMFSRFLSGQGFYSIARWLNDLGVKTHRGSAFENRTVEYILRNPVYIGKLRWNPAGRSRRNYNDPNILVVDGKHQPLVDTDTWNSVQDRISQVKAIHKYHGRPLGSNKDWISGVVRCATCGGTLIFAKPNYWKCNNYVRGRCKTSQHISGDALKESILARLQADAISSDALTYDVVRAGSKAADELSLLQQHKISLQKRLERLREAYLAGAESLEEYAAAKAATLQQIQDTDHRIADTENKSADSATPQLVRSAIRSAVETLTSSSSTLEQKCEALHSICDRIDWDKSQNTLTIHYRFIIP

SEQ ID NO: 6695 - protein, 487 aa, Unknown
  Description of Unknown: Integrase B6696 sequence
  PTHR30461:SF3,IPR036162,PS51737,IPR011109,PTHR30461, PS00397,PF00239,G3DSA:1.10.10.2600,IPR006119,SSF53041, cd00338,SM00857,IPR025827,IPR038109,PS51736, IPR006118,PF13408,G3DSA:3.40.50.1390,PF07508,Coil
MKNVKVGIYIRVSTQEQADEGYSIGEQEDRLKKYADLHNWIVYKVYSDPGVSGAKLDRPALKQLIKDVEKNKISKVLVYKLDRLSRRQKDTLYLIEDVFNANNVDFISMTEQLDTASPLGRAMIGILATFAQLEREQIKERMQIGMDARSKEGLYHGGGYDPVGYDYIDGKLVVNEYEALQVKKIYELYLDGWGITTIVNYLKKHGYTEKYGAWSDSAVRSVLFTDIYTGVITWKGNTYEGQHEALIDKETFEKVKAIKEARAKENSERYNPHPFKRTTLLGGLIWCGNCGARYFAKQNTVKRYKSTDPNKKPLKYYTCYSRGKTNSKLIKDPTCKNPTYNTEKLDKIILDEVRKLAVDEDYLNSILNDTEKNDPKEEIQIFQNRIDNIDQQIKKLIDLYQVSNIDFKLINEKIEKLSEEKYSIENEIDDLSELESKIDINDVKKLLITIPDILDNGDFEQIKSIVHSLIESIVIYEDAIKITWKFQ

SEQ ID NO: 6696 - protein, 486 aa, Unknown
  Description of Unknown: Integrase B6697 sequence
  PTHR30461:SF3,IPR036162,PS51737,IPR011109,PTHR30461, PS00397,PF00239,G3DSA:1.10.10.2600,IPR006119,SSF53041, cd00338,SM00857,IPR025827,IPR038109,PS51736, IPR006118,PF13408,G3DSA:3.40.50.1390,PF07508,Coil
MKTAIYIRVSTQEQAKEGYSIPHQKEKLFKYCQAMNWQVVEIYADEGISGSTIEKRPAAIKMLQDAKKRLFENILILRVDRLCRNTKDLLEIVETLKKYDVSLNAVDQQIDYKTSIGKMTLTILGTFAEFEHSTIHERTMEGRKQKAKQGIKSLGRRVPFGYNYINGCFVANSDAKIVKLIFEKVADGYGFNQTATFLRNNNIPTIDKLDWNRLHIKRIINNKIYMGHCVLKLNMTEVIDTIATNVEPIIDEKLFIQAQKTISYRTKGVFSKYAYDDFIFSDVLYCSCCGWKMSPKKTKRTDPKINEAKLEDRIYRYYKCIYNMSHPTKQTCLNTKILNADKFEKHFLLYMDYFIIELKKPLKLQKKITSSPTNKDFLEKQIKELTQKKSKLLDKYLAGIIDDSSYIAKNDELIEEIKSLENKLNFKEELLDKENKEINVDFLNGLKFVFSDLWSIMSNHEKRNFITQTFEKIEVNQGKIVKIILR

SEQ ID NO: 6697 - protein, 486 aa, Unknown
  Description of Unknown: Integrase B6698 sequence
  PTHR30461:SF3,IPR036162,PS51737,IPR011109,PTHR30461, PS00397,PF00239,G3DSA:1.10.10.2600,IPR006119,SSF53041, cd00338,SM00857,IPR025827,IPR038109,PS51736, IPR006118,PF13408,G3DSA:3.40.50.1390,PF07508,Coil
MKKIAAAYIRVSTHMQEELSPDAQLRCIKAWGDAHDYYVPDEFVFIDSGISGRKAKKRHDFLRMIGLAKMKPSPFEAILLWKFNRFARNQEESIFYKSMLRKKCKVDVISTTQQTTKDIYGDLIERIIEWTDEFFSIQLGEDVKRGMTENALRGNFQASPAFGYKVEKGLGLVIVEDQANIVRMIFNLYANTRMGFYEIARHLNRLGYKTKKGGAFEARAIRYIIQNPIYKGYLRWNYANGTTHAVNDESEWIIVKSPLVPIIVSEELWDRANERLKNEYRPKNGKPVSKHRHWLSGLVKCSSCGASLSTSVQYRRDRTYINFQCYKYLKGKCMVSHGISEKKLVPLILNVLEEDMDKSYIECERIEKTTENQQDILNVQLKRLDTRESRSKEAYLNGIDSLAEYKANKEDIQKEREFLLQQSQNHSDEENKSSDLPGKIRGVYDILVSDQCSKDEKQAAIRSIVKKIVFDKENKTLDFYYYVKED

SEQ ID NO: 6698 - protein, 486 aa, Unknown
  Description of Unknown: Integrase B6699 sequence
  IPR036162,PS51737,IPR011109,PTHR30461,PS00397, PF00239,G3DSA:1.10.10.2600,IPR006119,SSF53041,cd00338, SM00857,IPR025827,IPR038109,PS51736,IPR006118, PF13408,G3DSA:3.40.50.1390,PF07508,Coil
MTTIDLRIAAAYIRVSTDDQVELSPASQLVEIRKWASRNGYIVPDEFVFMDEGISGRGVKKRDEFRRMIGVAKTKPKPFDAILLWKFSRFARNRDDAVMYKSILRKQLGIDVISISEPVAEGGMGLITEALIEAMDEYYSINLAQEVKRGMEEKHRRGEVQSNPPYGYGIKDHVFVPKPPEDGFVKELFRRYLAGEGCFPLARWMNECGQRTHRGGRFENRTIEYILRNPVYIGKLRWNPAGRTRRDFANENVVLVDGKHEPLIDEETFNAVQRRIDEQKLLYPKYSRQSGTQKHWVSGLVHCAACGASLVVNTPEYMVCNNYIRGSCRVRQAVRRDALEAALISRLREDAARGSSLTFDVVRSSDGSASSLSAVEAARDSAVRMLDRLRDAYLTGADTVEEYKASKAAVQQRIADLDAQIAAMQKEDRAAADPKLLRSALRSVVKTLQSPDATVAEKNAAVRSVADNITWSKAANTLTIHYRLVL

SEQ ID NO: 6699 - protein, 486 aa, Unknown
  Description of Unknown: Integrase B6700 sequence
  PTHR30461:SF3,cd00338,SM00857,G3DSA:1.10.10.2600,IPR036162, PS51737,G3DSA:3.40.50.1390,IPR006119,IPR038109,PF07508, IPR011109,SSF53041,PTHR30461,PS51736,Coil, PF00239
MPKRAVIYARFSCNRQREASIEDQLRVCREWCAREGYEVAAEYCDRAVSGRTDDRPEFQRMIANAGESEIVLVYMMDRFSRGEYDAPIYKRELATHGVKLVSALEQIPDSPEGIIYEKLLEGLAACESRKTAIRTKRGMEGNALKCKTNGVRIFGYRRNGDDEYEVDEAQAAWVREAFALRLERMSMNAIAREFARRGLRTRKGNPCGQAMVQQMLRDRRYTGRYEWGGIVREGGMPAIVDEVTFMEVQGIKCRKQRSSENWGDFALAGAALCAECGRNLQGVSGRGRNNVKYEYYSCPGSCVRNIRREELEGSIASALRELLGDRGEALQIANMVAERADTAEVRARRRQAEDSLRAAERGLRNILNAIEQGVIAPGVNERIAELEEQQARARYDLEAITDERIDPERFADFLQCGTALDDATLLKAFVWQAVVSEDEILVTLNYDKKGEPARLDIQRVRAKLEWCPMLDSNQRPSAPEADALIP

SEQ ID NO: 6700 - protein, 486 aa, Unknown
  Description of Unknown: Integrase B6701 sequence
  SM00857,G3DSA:1.10.10.2600,IPR036162,PS51737,G3DSA:3.40.50.1390, IPR006119,IPR038109,PF07508,IPR011109,SSF53041, PTHR30461,Coil,mobidb-lite,cd00338,PF00239
MASAVIYARYSSSGQREESIEDQVRVCTEEAHRNGDRIVRVYADRATSGTTTNHRAAFAEMVADSARGWFEKVYVYKTDRFARNRYDSAIYKTKLKRNGVRVVSATERIEDGPDGILLEAVLEGMAEYYSANLAENVKRGLHGNALKCKHNGVMVYGFDRGEDGYYHVNEEQARVVRTMFEMYDAGSGFPEIEDALKPWRTSYGKPFTMKTISKMLRNEKYAGVYKYGGQRVEGGMPSIVPPELFERVQRRLALRTRKRRGTVEYLLSGKLFDIDGNRYQSSSGHGKSGRKYTYYRCPATGHIVPQEKLEHAVAEEVQAFLSSDHVAGIIADLVMEEQEVALSDDLDAMDALRKRLADNEREQARMVDLAAKTGATDAVAAKLDELVAERQAVADELAELEKGTPVFDRDHVEFWVHEVVGKKDPLEVIALFVKRVVLDREGERFHVEFIIDGGDDGGNETNPRPDAPDGGSCKSQLAEEEGFEPS

SEQ ID NO: 6701 - protein, 486 aa, Unknown
  Description of Unknown: Integrase B6702 sequence
  PTHR30461:SF3,IPR036162,PS51737,IPR011109,PTHR30461, PS00397,PF00239,G3DSA:1.10.10.2600,IPR006119,SSF53041, cd00338,SM00857,IPR025827,IPR038109, PS51736,IPR006118,PF13408,G3DSA:3.40.50.1390,PF07508,Coil
MPATPLEIGAAYVRVSTDDQTELSPDAQIRVIMDAAKADGFIIPKEYIFIEKKGISGRKAGNRPEFQRMIAIAKSQKPAPFKRLYLWKFSRFARNQEESTFYKGILRKKCDVEIKSVSEPIMEGMFGRLIETIIEWFDEYYSINLSGEVLRGMTEKALREGYQATPCLGYRAVGEGKPFAVEEKSYAIVEYIFQTYHSGKDMTATARAANARGYRTRRGNLFDRRGINRILANRFYIGEVIWNGYSFQGTHEVRSSVTSLFEDVQKRIEKEYRPQKRREVSNNVHWLSGLLKCSICGGSLGFNRSNDQKKRPDFFQCWKYAKGMHPGSCCLAVHLAEKAVIESLEEVLETNELEYEYIQKTDDAVNAEEIAIQEALARLEVKERRIREAYENEIDTLEEYKQNKLRLKAEREELMADAERLRRQAEQSPAAVPSKEDIMRQIAHVHEILADPNISYEIKGNALRKIVKEIVFDRGKGHLHIHFYIS

SEQ ID NO: 6702 - protein, 486 aa, Unknown
  Description of Unknown: Integrase B6703 sequence
  PTHR30461:SF3,IPR036162,PS51737,IPR011109,PTHR30461, PS00397,PF00239,G3DSA:1.10.10.2600,IPR006119,SSF53041, cd00338,SM00857,IPR025827,IPR038109,PS51736, IPR006118,PF13408,G3DSA:3.40.50.1390,PF07508,Coil
MKKIKVGIYIRVSTQEQAEAGYSIHEQEERLKKYAEINNWIVYKVYSDPGYSGAKLDRPALTEMIKDIEKGKIQKVLVYKLDRLSRRQRDTLYLIEDIFNVHKVDFVSMTEQIDTGSPLGRAMIGILATFAQLEREQIRERMQVGLDARAKEGLFHGGGYAPIGYDYIDGELIVNDYEALQVRKIYDLYLDGLPINAILNFMKKHGYTKKYADWSDSAIRSVLFSKIYTGVIEWKGQVYPGKHKPLISLEDFEKVQKLRKQRALATPKNNRNPFKRTTLLGGLIWCGNCGARYYAKQNTVKRGKTTDPNKKALQYYTCYSRAKSNKRMIKDPTCKNPSFNTQKLDAIILGEIRKLAIDKDYFNNIIEGSDIQDPEANITALKDRIKKIDQQINKLIDLYQLGNIDFNIINEKIEKLSKEKQTIEDEIDNFNDVTPNMNINEAKRIIASLPEILDNGDREQIKSVVHSLIESILIYDDAIEINWKFQ

SEQ ID NO: 6703 - protein, 486 aa, Unknown
  Description of Unknown: Integrase B6704 sequence
  PTHR30461:SF3,IPR036162,PS51737,IPR011109,PTHR30461, PS00397,PF00239,G3DSA:1.10.10.2600,IPR006119,SSF53041, cd00338,SM00857,IPR025827,IPR038109,PS51736, IPR006118,PF13408,G3DSA:3.40.50.1390,PF07508,Coil
MKTAIYIRVSTQEQAKEGYSIPHQKEKLFKYCQAMNWQVVEIYADEGISGSTIEKRPAAIKMLQDAKKKLFENILILRVDRLCRNTKDLLEIVETLKKYDVSLNAVDQQIDYKTSIGKMTLTILGTFAEFEHSTIHERTMEGRKQKAKQGIKSLGRRVPFGYNYINGCFVANSDAKIVKLIFEKVADGYGFNQTATFLRNNNIPTIDKLDWNRLHIKRIINNKIYMGHCVLKLNMTEVVDTIATNVEPIIDEKLFIQAQKTISYRTKGVFSKYAYDDFIFSDVLYCSCCGWKMSPKKTKRTDPKINEAKLEDRIYRYYKCIYNMSHPTKQTCLNTKILNAEKFEKHFLLYMDYFIIELKKPLKLQKKITSSPTNKDFLEKQIKELTQKKSKLLDKYLAGIIDDSSYIAKNDELIEEIKSLENKLNFKEELLDKENKEINVDFLNGLKFVFSDLWSIMSNHEKRNFITQTFEKIEVNQGKIVKIILR

SEQ ID NO: 6704 - protein, 486 aa, Unknown
  Description of Unknown: Integrase B6705 sequence
  PTHR30461:SF3,IPR036162,PS51737,IPR011109,PTHR30461, PS00397,PF00239,G3DSA:1.10.10.2600,IPR006119,SSF53041, cd00338,SM00857,IPR025827,IPR038109,PS51736, IPR006118,PF13408,G3DSA:3.40.50.1390,PF07508,Coil
MKKIAAAYIRVSTHMQEELSPDAQLRCIKAWGDAHDYYVPDEFVFIDKGISGRKAKKRHDFLRMIGLAKTKPAAPFEAILLWKFNRFARNQEESIVYKSMLRKKCNVDVISTTQQTTNDIYGDLIERIIEWTDEFYSIQLGEDVFRGMTENALRGNFQASPAFGYKVEKGLGLVIVEDQANIVRMIFNLYANTRMGFYEIARHLNRLGYKTKKGGAFEARAVRYIIQNPIYKGYLRWNYANAAHVINDESEWIIVKSPLVPVIVSEELWDRANERLKNEYRPKNGKPVSKHRHWLSGLVKCSSCGASLSTSVQHRHDRTYINFQCYKYLKGKCMVSHGISEKKLVPLILNALKEDMNKSYIECERIEKTTENQQDILNVQLKRLDTRESRSKEAYLNGIDSLAEYKANKEDIQKEREFLLQQSQNHSDEENKSSDLPGKIRGVYDILISDQCSKDEKQAAIRSVVKKIVFDKENKTLDFYYYIKED

SEQ ID NO: 6705 - protein, 486 aa, Unknown
  Description of Unknown: Integrase B6706 sequence
  PTHR30461:SF3,IPR036162,PS51737,IPR011109,PTHR30461, PS00397,PF00239,G3DSA:1.10.10.2600,IPR006119,SSF53041, cd00338,SM00857,IPR025827,IPR038109,PS51736, IPR006118,PF13408,G3DSA:3.40.50.1390,PF07508,Coil
MKKIAAAYVRVSTHMQEELSPDAQIRLIKEWANGHGYDLPEEFVFIDKGISGRKVKKRPAFLRMISMAKSKPSPFDAILVWKFSRFARNQEESIVYKAMLRNKHKIDVISISEPISDDVYGGLIERIIEWMDEFYSIRLAEDVKRGMTENALRGNFQASPAFGYKVDQKGQAPVVVEDQANIVRMIFNLYVTSGKSFYDISRHLNRLGYKTKKGGNFEARTIKYIIQNPIYKGFLRWNYADGTTHVINDESEWIVKKAPQIPVIVSEELWNQANDRLKHEYRPKNGKPVSQKRHWLSGVVKCSSCGASLATSVHTDKRYNRVYRNFQCYKFTKGKCLVSHAISEKKLVPLVLDVLKEDMNKAYIEYEHISTEPDNKQDILKVQLNRLELREKRIKEAYLNGVDTLEEYKDNKEQIKTERDMLLRQADESSEDQEKVDMPRKIRGVYDILRSDEYSKEEKHAAITSIVKKIVFDRENKTLDFYYYTK

SEQ ID NO: 6706 - protein, 486 aa, Unknown
  Description of Unknown: Integrase B6707 sequence
  PTHR30461:SF3,IPR036162,IPR011109,PTHR30461,PS00397, PF00239,G3DSA:1.10.10.2600,IPR006119,SSF53041,cd00338, SM00857,IPR025827,IPR038109,PS51736,IPR006118, PF13408,G3DSA:3.40.50.1390,PF07508,Coil
MPATPLEIGAAYVRVSTDDQTELSPDAQIRVIMDAAKADGFIIPKEYIFIEKKGISGRKADNRPEFQRMIAIAKSQKPAPFKRLYLWKFSRFARNQEESTFYKGILRKKCDVEIKSVSEPIMEGMFGRLIETIIEWFDEYYSINLSGEVLRGMTEKALREGYQATPCLGYRAVGEGKPFAVEEKSYAIVEYIFQTYHSGKDMTATARAANARGYRTRRGNLFDRRGINRILANRFYIGEVIWNGYSFQGTHEVRSSVTSLFDDVQKRIEKQYRPQKRREVSNNVHWLSGLLKCSICGGSLGYNRSNDQKKRPDFFQCWKYAKGMHPGSCCLAVHLAEKAVIESLEEVLETNELEYEYIQKTDDAVNAEEIAIQEALARLEVKERRIREAYENEIDTLEEYKQNKLRLKAEREELMADAERLRRQAEQSPAKVPSKEDIMRQIAHVHEILADPNISYEIKGNALRKIVKEIVFDRGKGHLHIHFYIS

SEQ ID NO: 6707 - protein, 486 aa, Unknown
  Description of Unknown: Integrase B6708 sequence
  PTHR30461:SF3,IPR036162,IPR011109,PTHR30461,PS00397, PF00239,G3DSA:1.10.10.2600,IPR006119,SSF53041,cd00338, SM00857,IPR025827,IPR038109,PS51736,IPR006118, PF13408,G3DSA:3.40.50.1390,PF07508,Coil
MPATPLEIGAAYVRVSTDDQTELSPDAQIRVIMDAAKADGFIIPKEYIFIEKKGISGRKADNRPEFQRMIAIAKSQKPAPFKRLYLWKFSRFARNQEESTFYKGILRKKCDVEIKSVSEPIMEGMFGRLIETIIEWFDEYYSINLSGEVLRGMTEKALREGYQATPCLGYRAVGEGKPFAVEEKSYAIVEYIFQTYHSGKDMTATARAANARGYRTRRGNLFDRRGINRILANRFYIGEVIWNGYSFQGTHEVRSSVTSLFDDVQKRIEKEYRPQKRREVSNNVHWLSGLLKCSICGGSLGFNRSNDQKKRPDFFQCWKYAKGMHPGSCCLAVHLAEKAVIESLEEVLETNELEYEYIQKTDDAVNAEEIVIQEALARLEVKERRIREAYENEIDTLEEYKQNKLRLKAEREELMADAERLRRQAEQSPAKVPSKEDIMRQIAHVHEILADPNISYEIKGNALRKIVKEIVFDRGKGHLHIHFYIS

SEQ ID NO: 6708 - protein, 486 aa, Unknown
  Description of Unknown: Integrase B6709 sequence
  PTHR30461:SF3,IPR036162,PS51737,IPR011109,PTHR30461, PS00397,PF00239,G3DSA:1.10.10.2600,IPR006119,SSF53041, cd00338,SM00857,IPR025827,IPR038109,PS51736, IPR006118,PF13408,G3DSA:3.40.50.1390,PF07508,Coil
MKTAIYIRVSTQEQAKEGYSIPHQKEKLFKYCQAMNWQVVEIYADEGISGSTIEKRPAAIKMLQDAKKRLFENILILRVDRLCRNTKDLLEIVETLKKYDVSLNAVDQQIDYKTSIGKMTLTILGTFAEFEHSTIHERTMEGRKQKAKQGIKSLGRRVPFGYNYINGCFVANSDAKIVKLIFEKVADGYGFNQTATFLRNNNIPTIDKLDWNRLHIKRIINNKIYMGHCVLKLNMTEVVDTIATNVEPIIDEKLFIQAQKTISYRTKGVFSKYAYDDFIFSDVLYCSCCGWKMSPKKTKRTDPKINEAKLEDRIYRYYKCIYNMSHPTKQTCLNTKILNAEKFEKHFLLYMDYFIIELKKPLKLQKKITSSPTNKDFLEKQIKELTQKKSKLLDKYLAGIIDDSSYIAKNDELIEEIKSLENKLNFKEELLDKENKEINVDFLNGLKFVFSDLWSIMSNHEKRNFITQTFEKIEVNQGKIVKIILR

SEQ ID NO: 6709 - protein, 486 aa, Unknown
  Description of Unknown: Integrase B6710 sequence
  cd00338,SM00857,G3DSA:1.10.10.2600,IPR036162,PS51737, G3DSA:3.40.50.1390,IPR006119,IPR038109,PF07508,IPR011109, SSF53041,PTHR30461,PS51736,Coil,PF00239
MIIKKVALYLRKSRKDEGNESREETLARHERMLRDYCKTHNLEIVKIYREVVSAENLEDRPQARQMLDDVADGLFDGVVVIELERLSRGNQIDQVEVSETFKSANTLIYTLQKVYDLSREDEIDEEFFEFGLFMSRREYKTIKRRLMRGRKQAQKEGYYIGAGLPYGFGKVRGDKGFVLVPNAETPIVQMIFNKFVYEDYSLADLRHYLNKNGIKPQKINEWNSVVLKNLLKNKCYLGYINYNSRSRRTQECYVGKHDAVIDDETFQKAQDKLAISSHKLKRGSELKNPLASLVKCSACGATMQKVNEYFRCLKPNCPTVLSYFDVVEKRIIDELKAELKNFNYFLENYGDEIEKQNKRKEHELALLRKEVAKKDSMINKACEMLELGVYSKDKYLSRVNIIEADKTALQGQISSLEASFSDEQAKAQKAIPILEKCLDAYWDLNAQEKNDLLKSFIEKIEYSKTKRNNRWNSNIDDMQLKIYLKI

SEQ ID NO: 6710 - protein, 486 aa, Unknown
  Description of Unknown: Integrase B6711 sequence
  PTHR30461:SF3,SM00857,IPR006118,G3DSA:1.10.10.2600,IPR036162, PS51737,G3DSA:3.40.50.1390,IPR006119,IPR038109,PF07508, IPR011109,SSF53041,PF00239,PTHR30461, PS00397,PS51736,Coil,cd00338
MIIAAAYVRVSTDEQTDYSPSAQLADIKEYARNNGYRIPEEFIFMDEGISGKRADKRPAFQAMIRQARKKSNHIQYIIVHKFDRFARNKEDSVLYKALLKKDGVKVISVKEPIPQDDKFAVIYESMLEAMAEYYSLNLAEEVNKTMIKKAQAGEWQATAPFGYKNENKSLAIVPEEAKMVRYIFEQYIAGTSMFALSRQMNQIGYRTHRGNVFENRTIQYILNNPVYKGYSRWTPGRMHNRDYSDPASIVSKGNWEPIVSEDVWEAAASRFHAEKKTHYKHKRPDTEGIHWLSSMVKCSSCGRSLIVGTKYKNGAVQFQCGGYNHGQCHDSHAVSSNRLIPAILSELEKIAAHPDTEGCRYTVRRELPASDELDVYVPLLAKAQQRLKKAKDAYLNDIDTLEEYRSNKMNIEKEIAELKEHIAEIEERQNMPFDQAAFSTKIASVIEILRDDSRQMEDKRKAFKSICDKIIFHKHDSSLELFLIDQ

SEQ ID NO: 6711 - protein, 486 aa, Unknown
  Description of Unknown: Integrase B6712 sequence
  PTHR30461:SF3,IPR036162,PS51737,IPR011109,PTHR30461, PS00397,PF00239,G3DSA:1.10.10.2600,IPR006119,SSF53041, cd00338,SM00857,IPR025827,IPR038109,PS51736, IPR006118,PF13408,G3DSA:3.40.50.1390,PF07508,Coil
MKKIAAAYIRVSTHMQEELSPDAQLRFIRTWADAQGYYVPDEFVFIDSGISGRKAKKRHDFLRMIGLAKMKPSPFEAILLWKFNRFARNQEESIFYKSMLRKKCKVDVISTTQQTTKDIYGDLIERIIEWTDEFFSIQLGEDVKRGMTENALRGNFQASPAFGYKVEKGLGLVVVEDQANIVRMIFNLYANTRMGFYEIARHLNRLGYKTKKGGAFEARAIRYIIQNPIYKGYLRWNYANGTTRVVNDESEWIIVKSPLVPVIVSEELWDRANERLKNEYRPKNGKPVSKHRHWLSGLVKCSSCGASLSTSVQYRRDRTYINFQCYKYLKGKCMVSHGISEKKLVPLILNVLKEDMNKSYIECERIEKVVENQQDILDVQLKRLDAREVRIKEAYLNGVDSLAEYKSNKEQIQQERELLLKQLQNHGEEEKGSNELPNKIRGVYDILVSDQCSKDEKQAAIRSIVKKIVFDKENKTLDFHYYIKED

SEQ ID NO: 6712 - protein, 486 aa, Unknown
  Description of Unknown: Integrase B6713 sequence
  PTHR30461:SF3,cd00338,SM00857,IPR006118,G3DSA:1.10.10.2600, IPR036162,PS51737,G3DSA:3.40.50.1390,IPR006119,IPR038109, PF07508,IPR011109,SSF53041,PTHR30461,PS00397, PS51736,Coil,PF00239
MIIAAAYVRVSTDEQTDYSPSAQLADIREYARQNGYHIPDEFVFMDEGISGKRADKRPAFQSMIRQARKKSNHIQYIIVHKFDRFARNKEDSVLYKALLKKDGVKVISVKEPIPQDDKFAVIYESMLEAMAEYYSLNLAEEVNKTMIKKAQAGEWQATAPFGYKNENKSLSVVPEEAKMIRYIFEQYIAGTSMFALSRQMNQMGYRTHRGNVFENRTIQYIINNPVYKGYSRWTPGRMHLRDYSDPASIISKGNWEPIVSEEIWEAAVTRFKAEKRTYYKHKRPETEGIHWLSSMVKCSACGRSLIVGTKYKNGAVQFQCGGYNHGQCHDSHAISSNRLIPALLSELEKIAAHPNTEGCRYTIRREFPASHELDVYVPLLAKAQQRLKKAKDAYLNDIDTLEEYRSNKTSIEKEIAELKEHIAEIEEQQKMPFDQAAFSTKIASVIEILRDESRSMEDRRKAFKSVCEKVIYNKHTNSLELFLIDG

SEQ ID NO: 6713 - protein, 486 aa, Unknown
  Description of Unknown: Integrase B6714 sequence
  PTHR30461:SF3,IPR036162,IPR011109,PTHR30461,PS00397, PF00239,G3DSA:1.10.10.2600,IPR006119,SSF53041,cd00338, SM00857,IPR025827,IPR038109,PS51736,IPR006118, PF13408,G3DSA:3.40.50.1390,PF07508,Coil
MPATPLEIGAAYVRVSTDDQTELSPDAQIRVIMDAAKADGFIIPKEYIFIEKKGISGRKADNRPEFQRMIAIAKSQKPAPFKRLYLWKFSRFARNQEESTFYKGILRKKCDVEIKSVSEPIMEGMFGRLIETIIEWFDEYYSINLSGEVLRGMTEKALREGYQATPCLGYRAVGEGKPFAVEEKSYAIVEYIFQTYHSGKDMTATARAANARGYRTRRGNLFDRRGINRILANRFYIGEVIWNGYSFRGTHEVRSSVTSLFDDVQKRIEKEYRPQKRREVSNNVHWLSGLLKCSICGGSLGYNRSNDQKKRPDFFQCWKYAKGMHPGSCCLAVHLAEKAVIESLEEVLETNELEYEYIQQTDDAVNAEEIAIQEALARLEVKERRIREAYENEIDTLEEYKQNKLRLRAEREELMADAERLRRQAEQSPAKVPSKEDIMRQIAHVHEILADPNISYEIKGNALRKIVKEIVFDRGKGHLHIHFYIS

SEQ ID NO: 6714 - protein, 486 aa, Unknown
  Description of Unknown: Integrase B6715 sequence
  PTHR30461:SF3,SM00857,IPR006118,G3DSA:1.10.10.2600,IPR036162, PS51737,G3DSA:3.40.50.1390,IPR006119,IPR038109,PF07508, IPR011109,SSF53041,PF00239,PTHR30461,PS00397, PS51736,Coil,cd00338
MIVAAAYVRVSTDEQTDYSPAAQLADIKEYATHNGYHIPEEFIFMDEGISGKRADKRPAFQAMIRQARKKSNHIQYIIVHKFDRFARNKEDSVLYKALLKKDGVKVISVKEPIPQDDKFAVIYESMLEAMAEYYSLNLAEEVNKTMIKKAQAGEWQATAPFGYKNENKSLTIVPEEAKMIRYIFEQYIAGTSMFALSRQMNQMGYRTHRGNVFEHRTIQYILNNPVYKGYLRWTPGKKINRNFNDSASIVAKGDWEPIVSKEIWDAAAARFKSEKRTYYKHKRPETEGIHWLSGMVKCSSCGRSLVVGAKYKSGAVQFQCGGYCHGQCHDSHAISSNRLIPAILSELEKIAAHPDTEGCRYTIRRELPASDELDVYMPLLTKAQQRLKKAKDAYLNDIDTLEEYRSNKMNIEKEIAELKERIAEIEEQQNVPFDQAAFSTKIASVIEILRDDSRQMEDKRKAFKSICDKIIFHKHDSSLELFLIDQ

SEQ ID NO: 6715 - protein, 486 aa, Unknown
  Description of Unknown: Integrase B6716 sequence
  PTHR30461:SF3,SM00857,IPR006118,G3DSA:1.10.10.2600,IPR036162, PS51737,G3DSA:3.40.50.1390,IPR006119,IPR038109,PF07508, IPR011109,SSF53041,PF00239,PTHR30461,PS00397, PS51736,Coil,cd00338
MIIAAAYVRVSTDEQTDYSPAAQLADIKEYATQNGYHIPEEFIFMDEGISGKRADKRPAFQAMIRQARKKSNHIQYIIVHKFDRFARNKEDSVLYKALLKKDGVKVISVKEPIPQDDKFAVIYESMLEAMAEYYSLNLAEEVNKTMIKKAQAGKWQATAPFGYKNENKSLTIVPEEAKMIRYIFEQYIAGTSMFALSRQMNQMGYRTHRGNVFEHRTIQYILNNPVYKGYLRWTPGKKINRNFNDSASIVAKGDWEPIVSKEIWDAAAARFKSEKRTYYKHKRPETEGIHWLSGMVKCSSCGRSLVVGAKYKSGAVQFQCGGYCHGQCHDSHAISSNRLIPAILSELEKIAAHPDTEGCRYTIRRELPASDELDVYMPLLTKAQQRLKKAKDAYLNDIDTLEEYRSNKMNIEKEIAELKERIAEIEEQQNVPFDQAAFSTKIASVIEILRDDSRQMEDKRKAFKSICDKIIFHKHDSSLELFLIDQ

SEQ ID NO: 6716 - protein, 486 aa, Unknown
  Description of Unknown: Integrase B6717 sequence
  PTHR30461:SF3,IPR036162,PS51737,IPR011109,PTHR30461, PS00397,PF00239,G3DSA:1.10.10.2600,IPR006119,SSF53041, cd00338,SM00857,IPR025827,IPR038109,PS51736, IPR006118,PF13408,G3DSA:3.40.50.1390,PF07508,Coil
MPATPLEIGAAYVRVSTDDQTELSPDAQIRVIMDAAKADGFIIPKEYIFIEKKGISGRKADNRPEFQRMIAIAKSQKPAPFKRLYLWKFSRFARNQEESTFYKGILRKKCDVEIKSVSEPIMEGMFGRLIETIIEWFDEYYSINLSGEVLRGMTEKALREGYQATPCLGYRAVGEGKPFVVEEKSYAIVEYIFQTYHSGKDMTATARAANARGYRTRRGNLFDRRGINRILANRFYIGEVIWNGYSFQGTHEVRSSVTSLFDDVQKRIEKEYRPQKRREVSNNVHWLSGLLKCSICGGSLGYNRSNDQKKRPDFFQCWKYAKGMHPGSCCLAVHLAEKAVIESLEEVLETNELEYEYIQKTDDAVNAEEVAIQEALARLEVKERRIREAYENEIDTLEEYKQNKLRLKAEREELMADAERLRRQAEQSPAKVPSKEDIMRQIAHVHEILADPNISYEIKGNALRKIVKEIVFDRSQGHLHIHFYIS

SEQ ID NO: 6717 - protein, 486 aa, Unknown
  Description of Unknown: Integrase B6718 sequence
  PTHR30461:SF3,SM00857,IPR006118,G3DSA:1.10.10.2600,IPR036162, PS51737,G3DSA:3.40.50.1390,IPR006119,IPR038109,PF07508, IPR011109,SSF53041,PF00239,PTHR30461,PS00397, PS51736,Coil,cd00338
MKTALYIRVSTQEQAKEGYSIPHQKERLFRYCEAMNWEITEIYADEGISGSTIEKRPAATQMLQDAKHKKFENILILRVDRLCRNTKDLLEIVEILKKYDVSLNAVDQQIDYKTSIGKMTLTILGTFAEFEHSTIHERTMEGRKQKATQGIKSLGRRVPFGYDYINGNFVANSDAQIVKLIFEKVADGYGYNQVATFLRKNNVPTIDKLDWNRLHIKRIINNKIYMGHCVLKLKMVEVVDTVATNVESIVNEDLFKQAQKTISYRTNGKTTKYAYDDFIFADVLYCACCGWKMSPKKVKRAEPKVNEIKLEDRYYRYYKCIYNMCHPNKQTCKNTKVLNAEKFEKHFLIYMDYYVIELKKPIKNNKKISTSSMNKETIEIQIKELTQKKAKLLDRYLEGIIDDDSYFAKNNELIEQIKILETKLSFNEELLKIEKKEINLDYLNGLKFIITDLWSIMTNHEKRNFITKTFEKIEVNQGKIVKIILR

SEQ ID NO: 6718 - protein, 486 aa, Unknown
  Description of Unknown: Integrase B6719 sequence
  PTHR30461:SF3,cd00338,SM00857,IPR006118,G3DSA:1.10.10.2600, IPR036162,PS51737,G3DSA:3.40.50.1390,IPR006119,IPR038109, PF07508,IPR011109,SSF53041,PTHR30461,PS00397, PS51736,Coil,PF00239
MIIAAAYVRVSTDEQTDYSPAAQLADIKEYATHNGYHIPEEFIFMDEGISGKRADKRPAFQAMIRQARKKSNHIQYIIVHKFDRFARNKEDSVLYKALLKKDGVKVVSVKEPIPHDDKFAVIYESMLEAMAEYYSLNLAEEVNKTMIKKAQAGEWQATAPFGYKNENKSLTIVPEEAKMVLYIFEQYIAGTSMFALSRQMNQMGYRTHRGNVFEHRTIQYILNNPVYKGYLRWTPGKKINRNFNDSASIVAKGDWEPIVSKEIWDAAAARFKSEKRTYYKHKRPETEGIHWLSGMVKCSSCGRSLVVGAKYKSGAVQFQCGGYCHGQCHDSHAVSSNRLIPAILSEFEKIAAHPDTEGCRYTIRRELPASDELDVYVPLLAKAQQRLKKAKDAYLNDIDTLEEYRSNKMNIEKEIAELKEHIAEIEERQNMPFDQAAFSTKIASVIEILRDDSRQMEDKRKAFKSICDKIIFHKHDSSLELFLIDQ

SEQ ID NO: 6719 - protein, 486 aa, Unknown
  Description of Unknown: Integrase B6720 sequence
  PTHR30461:SF3,IPR036162,IPR011109,PTHR30461,PS00397, PF00239,G3DSA:1.10.10.2600,IPR006119,SSF53041,cd00338, SM00857,IPR025827,IPR038109,PS51736,IPR006118, PF13408,G3DSA:3.40.50.1390,PF07508,Coil
MPATPLEIGAAYVRVSTDDQTELSPDAQIRVIMDAAKADGFIIPKEYIFIEKKGISGRKADNRPEFQRMIAIAKSQKPAPFKRLYLWKFSRFARNQEESTFYKGILRKKCDVEIKSVSEPIMEGMFGRLIETIIEWFDEYYSINLSGEVLRGMTEKALREGYQATPCLGYRAVGEGKPFAVEEKSYAIVEYIFQTYHSGKDMTATARAANARGYRTRRGNLFDRRGINRILANRFYIGEVIWNGYSFQGTHEVRSSVTSLFDDVQKRIEKEYRPQKRREVSNNVHWLSGLLKCSICGGSLGFNRSNDQKKRPDFFQCWKYAKGMHPGSCCLAVHLAEKAVIESLEEVLETNELEYEYIQKTDDAVNAEEVAIQEALARLEVKERRIREAYENEIDTLEEYKQNKLRLKAEREELMADAERLRRQAEQSPAKVPSKEDIMRQIAHVHEILADPNISYEIKGNALRKIVKEIVFDRGKGHLHIHFYIS

SEQ ID NO: 6720 - protein, 486 aa, Unknown
  Description of Unknown: Integrase B6721 sequence
  PTHR30461:SF3,SM00857,G3DSA:1.10.10.2600,IPR036162,PF13408, PS51737,G3DSA:3.40.50.1390,IPR025827,IPR006119,IPR038109, PF07508,IPR011109,SSF53041,PF00239,PTHR30461, PS51736,Coil,cd00338
MKAAAYARYSTDKQTENSIAYQMNAITKYCLDHDIDLISAFSDEAESGTNTDREGFQNLVRAAQNKEFEAVVIYDISRGSRDVADWFQFRKTMRALGVQVISTNQQLGDITNPNDFLIELINVGLGQHMVLDTRKKSMAGMLERAKKGLYCGGNCPLGYKIENGRYVIEEKEAEVVRQIFNRYAQGESYNQIIDGLNGAVGKFGRPIGKNSLHSILANERYTGVYIWNERNVRIMRKWAGGKKNPNPVIIEGIIPQIIDKTTWERVKKRMETRKNGTNKAKREYLLTGLIECAECGATYVGHCNVAHRKDGSVRENRYYECGNKYRTRTCHSKNLNADELELFVVTQIQDTLRNWDPSEVARKYIKEIQGATADCTEEKRELVDVEHQINNGVKAVLSGMRIPELDKEIDRLRQRKLDLENIIAEKSQQTNHSYSADEIEAALSDLIKNFDPKEAVKQLVQKIYANADGSCTVHIGVHKIGAGDRT

SEQ ID NO: 6721 - protein, 486 aa, Unknown
  Description of Unknown: Integrase B6722 sequence
  PTHR30461:SF3,cd00338,SM00857,IPR006118,G3DSA:1.10.10.2600, IPR036162,PS51737,G3DSA:3.40.50.1390,IPR006119,IPR038109, PF07508,IPR011109,SSF53041,PTHR30461,PS00397, PS51736,Coil,PF00239
MIIAAAYVRVSTDEQTDYSPAAQLADIKEYATHNGYHIPEEFIFMDEGISGKRADKRPAFQAMIRQARKKSNHIQYIIVHKFDRFARNKEDSVLYKALLKKDGVKVISVKEPIPQDDKFAVIYESMLEAMAEYYSLNLAEEVNKTMIKKAQAGEWQATAPFGYKNENKSLTIVPEEAKMIRYIFEQYIAGTSMFALSRQMNQMGYRTHRGNVFEHRTIQYILNNPVYKGYLRWTPGKKINRNFNDSASIVAKGDWEPIVSKEIWDAAAARFKSEKRTYYKHKRPETEGIHWLSGMVKCSSCGRSLVVGAKYKSGAAQFQCGGYCHGQCHDSHAVSSNRLIPAILSELEKIAAHPDTEGCRYTIRRELPASDELDVYVPLLAKAQQRLKKAKDAYLNDIDTLEEYRSNKMNIEKEIAELKEHIAEIEERQNMPFDQAAFSTKIASVIEILRDDSRQMEDKRKAFKSVCDKIIFHKHDSSLELFLIDQ

SEQ ID NO: 6722 - protein, 486 aa, Unknown
  Description of Unknown: Integrase B6723 sequence
  PTHR30461:SF3,IPR036162,PS51737,IPR011109,PTHR30461, PS00397,PF00239,G3DSA:1.10.10.2600,IPR006119,SSF53041, cd00338,SM00857,IPR025827,IPR038109,PS51736, IPR006118,PF13408,G3DSA:3.40.50.1390,PF07508,Coil
MRRVVIYVRVSTQEQATEGYSIGEQLERLRLYCQAHGWILVEEYVDPGYSGANLDRPAISKLISDIGSGTFDTVLVYKLDRLSRSQKDTMHLIEDVFMANNIDFISMSENFDTSTPLGRAMIGILSVFAQLERDQIKERMGMGKEARAKEGKWQGGSTVPVGYEYDVSTGELIVNEYEAMQVREVFNLVLSGMPYKTIANKLTAKGYTYNAISGHVGIWDANRIKYVLTNKLYIGYIRYKDTWFPGTHEPIIDTETFEKAQLLFKERSASNVMHIKKRQGQISYLGGLLYCKKCGARYARNSGRKWKNNEPPLYYSCYSRSHKVPKMIKDPNCKNKTWRMAELDNIVFAEIKKLALEPEYITTIKEREKTKQDTSNKADILRKEIRKIEEQVSRFLDLYGLGAFTIEQVTAKVQPLNQRKQDIEQELTELVTDETILSEDETREIVRNFEEVLERSDFNEIRMTIDSLVRYIELNDDTVYIHWKFT

SEQ ID NO: 6723 - protein, 486 aa, Unknown
  Description of Unknown: Integrase B6724 sequence
  PTHR30461:SF3,IPR036162,PS51737,IPR011109,PTHR30461, PS00397,PF00239,G3DSA:1.10.10.2600,IPR006119,SSF53041, cd00338,SM00857,IPR025827,IPR038109,PS51736, IPR006118,PF13408,G3DSA:3.40.50.1390,PF07508,Coil
MKKIAAAYVRVSTHMQEELSPDAQIRLIKEWASGHGYDLPEEFVFVDKGISGRKVKKRPAFLRMISMAKSKPSPFDAILVWKFSRFARNQEESIVYKAMLRNKHKIDVISISEPISDDVYGGLIERIIEWMDEFYSIRLAEDVKRGMTENALRGNFQASPAFGYKVEQKGQAPVVVEDQANIVRMIFNLYVTSGKSFYDISRHLNRLGYKTKKGGNFEARTIKYIIQNPIYKGFLRWNYADGTTHVINDESEWIVKKAPQIPVIVSEELWNQANDRLKHEYRPKNGKPVSQKRHWLSGVVKCSSCGASLATSVHTDKRYNRVYRNFQCYKFTKGKCLVSHAISEKKLVPLVLDVLKEDMNKAYIEYEHISTEQDNKQDILKVQLKRLESREKRIKEAYLNGVDSLEEYKENKEQINAERDMLLHQADESSEEQEKVDMPGKIRGVYDILRSDEYTKEEKHAAITSIVKKIVFDRENKTLDFYYYTK

SEQ ID NO: 6724 - protein, 486 aa, Unknown
  Description of Unknown: Integrase B6725 sequence
  PTHR30461:SF3,cd00338,SM00857,G3DSA:1.10.10.2600,IPR036162, PF13408,PS51737,G3DSA:3.40.50.1390,IPR025827,IPR006119, IPR038109,PF07508,IPR011109,SSF53041,PTHR30461, Coil,PF00239
MKNGFTIINEYCDRAISGKTDNRPSFQRLIKDSEKGQFEAVIMYTLDRFARNRYDSAIYKAKLKKNGVRVFYAKQPMPDTPEGIILESVLEGYAEYYSENLSRNIKRGMKENALQCIATGGAGLALGYTVGEDRKYQIDPVGAKIVQEIFQMYADGMSATQIINYCNEKGYKTSRGNAFNKNSLRTLLKNEKYIGTYKFMDVVVPNGMPAIVDKALFEKVQAMLSHNAKARARTKAHEDYLLTTKLFCGHCGSAMVGESGTSKSGKVHHYYKCIDRKRKHQCNKKVEKKDWIEELVVRFTVQHVLTDENIEKIATRAMEVFEKESADTTYLTGLQDQLKEVKKKIKNLMTAIEQGIITSTTKERLEELESEKNHIEGQIAKEEMKKPLLTKERIMFWLLSFKSGDVNDLEYQRRVVDTLVNSVYVYDDGDKGRRIVFTFNISGQNTATISCSDIACSAPPNSANPNTLFIVKHCFGFVLILEDVDA

SEQ ID NO: 6725 - protein, 486 aa, Unknown
  Description of Unknown: Integrase B6726 sequence
  PTHR30461:SF3,IPR036162,PS51737,IPR011109,PTHR30461, PS00397,PF00239,G3DSA:1.10.10.2600,IPR006119,SSF53041, cd00338,SM00857,IPR025827,IPR038109,PS51736, IPR006118,PF13408,G3DSA:3.40.50.1390,PF07508,Coil
MKKIAAAYIRVSTHMQEELSPDAQIRLIKEWANGHGYDLPEEFIFIDKGISGRKVRKRPSFLRMISMAKSKPSPFDAILVWKFSRFARNQEESIVYKAMLRNKHKIDVISISEPISDDVYGGLIERIIEWMDEFYSIRLAEDVKRGMTENALRGNFQSSPAFGYKVEKGQGLVIVEDQANIVRMIFNLYANSGMGFYDIARHLNRLGCTTKKGGAFETRTIKYIIQNPIYKGYLRWNYANGTTHVVNDETEWIIVKSPLVPVIVPEELWDRANERLKNEYHPKNGKPVSKHRHWLSGLVKCSSCGASLSTSVQYRRDRTYINFQCYKYLKGKCMVSHGISEKKLVPLILNVLKEDMNKSYIECERIEKVVENQQDILDVQLKRLDAREVRIKEAYLNGVDSLAEYKSNKEQIQQERELLLQQSQNHDKEEKGSNELPNKIRGVYDILVSDQCSKDEKQTAIRSIVKKIVFDKENKTLDFHYYIKED

SEQ ID NO: 6726 - protein, 486 aa, Unknown
  Description of Unknown: Integrase B6727 sequence
  PTHR30461:SF3,IPR036162,PS51737,IPR011109,PTHR30461, PS00397,PF00239,G3DSA:1.10.10.2600,IPR006119,SSF53041, cd00338,SM00857,IPR025827,IPR038109,IPR006118, PF13408,G3DSA:3.40.50.1390,PF07508,Coil
MKKIAAAYIRVSTHMQEELSPDAQLRCIRAWGDAQGYYVPDEFVFIDSGISGRKAKKRHDFLRMIGLAKMKPSPFEAILLWKFNRFARNQEESIFYKSMLRKKCKVDVISTTQQTTKDIYGDLIERIIEWTDEFFSIQLGEDVKRGMTENALRGNFQASPAFGYKVEKGLGLVIVEDQANIVRTIFNLYANSRMGFYEIARHLNRLGYKTKKGGAFEARAIRYIIQNPIYKGYLRWNYANGTTHAVNDESEWIIVKSPLVPVIVPEELWDRANERLKNEYHPKNGKPVSKHRHWLSGLVKCSSCGASLSTSVQYRRDRTYINFQCYKYLKGKCMVSHGISEKKLVPLILNVLKEDMNKSYIECERIEKVVENQQDILDVQLKRLDAREVRIKEAYLNGVDSLAEYKSNKEQIQQERELLLQQSQNHDKEEKGSNELPNKIRGVYDILVSDQCSKDEKQTAIRSIVKKIVFDKENKTLDFHYYIKED

SEQ ID NO: 6727 - protein, 486 aa, Unknown
  Description of Unknown: Integrase B6728 sequence
  PTHR30461:SF3,IPR036162,PS51737,IPR011109,PTHR30461, PS00397,PF00239,G3DSA:1.10.10.2600,IPR006119,SSF53041, cd00338,SM00857,IPR025827,IPR038109,PS51736, IPR006118,PF13408,G3DSA:3.40.50.1390,PF07508,Coil
MKKIAAAYVRVSTHMQEELSPDAQIRLIKEWANGHGYDLPEEFVFIDKGISGRKVKKRPAFLRMISMAKSKPSPFDAILVWKFSRFARNQEESIVYKAMLRNKHKIDVISISEPISDDVYGGLIERIIEWMDEFYSIRLAEDVKRGMTENALRGNFQASPAFGYKIEQKGQAPVVVEDQANIVRMIFNLYVTSGKSFYDISRHLNRLGYKTKKGGNFEARTVKYIIQNPIYKGFLRWNYADGTTHVINDESEWIVKKAPQIPVIVSEELWNQANDRLEHEYRPKNGKPVSQKRHWLSGVVKCSACGASLATSVHTDKRYNRVYRNFQCYKFTKGKCLVSHAISEKKLVPLVLDVLKEDMNKAYIEYEHISTEPDNKQDILKVQLNRLELREKRIKEAYLNGVDTLEEYKDNKEQIKTERDMLLRQADESSEDQEKFDMPGKIRGVYDILRSDEYSKEEKHAAITSIVKKIVFDRENKTLDFYYYTK

SEQ ID NO: 6728 - protein, 486 aa, Unknown
  Description of Unknown: Integrase B6729 sequence
  PTHR30461:SF3,IPR036162,IPR011109,PTHR30461,PS00397, PF00239,G3DSA:1.10.10.2600,IPR006119,SSF53041,cd00338, SM00857,IPR025827,IPR038109,PS51736,IPR006118, PF13408,G3DSA:3.40.50.1390,PF07508,Coil
MPATPLEIGAAYVRVSTDDQTELSPDAQIRVIMDAAKADGFIIPKEYIFIEKKGISGRKAGNRPEFQRMIAIAKSQKPAPFKRLYLWKFSRFARNQEESTFYKGILRKKCDVEIKSVSEPIMEGMFGRLIETIIEWFDEYYSINLSGEVLRGMTEKALREGYQTTPCLGYRAVGEGKPFAVEEKSYAIVEYIFQTYHSGKDMTATARAANARGYRTRRGNLFDRRGINRILANRFYIGEVIWNGYSFQGTHEVRSSVTSLFDDIQKRIEKEYRPQKRREVSNNVHWLSGLLKCSICGGSLGYNRSNDQKKRPDFFQCWKYAKGMHPGSCCLAVHLAEKAVIESLEEVLETNELEYEYIQKTDDAVNAEEIVIQEALARLEVKERRIREAYENEIDTLEEYKQNKLRLKAEREELMADAERLRRQAEQSPAKVPSKEDIMRQIAHVHEILADPNISYEIKGNALRKIVKEIVFDRGKGHLHIHFYIS

SEQ ID NO: 6729 - protein, 486 aa, Unknown
  Description of Unknown: Integrase B6730 sequence
  PTHR30461:SF3,cd00338,SM00857,IPR006118,G3DSA:1.10.10.2600, IPR036162,PS51737,G3DSA:3.40.50.1390,IPR006119,IPR038109, PF07508,SSF53041,IPR011109,PTHR30461,PS00397, PS51736,Coil,PF00239
MKTAIYIRVSTQEQAKEGYSIPHQKEKLFKYCQAMNWEIIEIYADEGISGSTIEKRPAATQMLQDAKQKKFENILILRVDRLCRNTKDLLEIVEILKKYDVSLNAVDQQIDYKTSIGKMTLTILGTFAEFEHSTIHERTMEGRKQKASQGIKSLGRRVPFGYDYINGNFVANSDAQIVKLIFEKVADGYGYNQVATFLRKNNVPTIDKLDWNRLHIKRIINNKIYMGHCVLKLKMVEVVDTVATNVESIVNEDLFKQAQKTISYRTNGKTTKYAYDDFVFADVLYCSCCSWKMSPKKVKRAEPKVNEIKLEDRYYRYYKCIYNMCHPNKQTCENTKVLNAEKFEKHFLIYMDYYVIELKKPIKNNKKISTSSMNKETIEIQIKELTQKKAKLLDRYLEGIIDDDSYFAKNNELIEQIKILETKLSFNEELLKIEKKEINLDYLNGLKFIITDLWSIMTNHEKRNFITKTFEKIEVSNGKIVKVSLR

SEQ ID NO: 6730 - protein, 486 aa, Unknown
  Description of Unknown: Integrase B6731 sequence
  PTHR30461:SF3,IPR036162,PS51737,IPR011109,PTHR30461, PS00397,PF00239,G3DSA:1.10.10.2600,IPR006119,SSF53041, cd00338,SM00857,IPR025827,IPR038109,PS51736, IPR006118,PF13408,G3DSA:3.40.50.1390,PF07508,Coil
MKKIAAAYVRVSTHMQEELSPDAQIRLIKEWANGHGYDLPEEFVFIDKGISGRKVKKRPAFLRMISMAKSKPSPFDAILVWKFSRFARNQEESIVYKAMLRNKHKIDVISISEPISDDVYGGLIERIIEWMDEFYSIRLAEDVKRGMTENALRGNFQASPAFGYKVEQKGQAPVVVEDQANIVRMIFNLYVTSGKSFYDISRHLNRLGYKTKKGGNFEARTIKYIIQNPIYKGFLRWNYADGTTHVINDESEWIVKKAPQIPVIVSEELWNQANDRLKHEYRPKNGKPVSQKRHWLSGVVKCSSCGASLATSVHTDKRYNRVYRNFQCYKFTKGKCLVSHAISEKKLVPLVLDVLKEDMNKAYIEYEHISTEQDNKQDILKVQLKRLESREKRIKEAYLNGVDSLEEYKENKEQINAERDMLLHQADESSEEQGKIDMPGKIRGVYDILRSDEYTKEEKHAAITSIVKKIVFDRENKTLDFYYYTK

SEQ ID NO: 6731 - protein, 486 aa, Unknown
  Description of Unknown: Integrase B6732 sequence
  PTHR30461:SF3,IPR036162,PS51737,IPR011109,PTHR30461, PS00397,PF00239,G3DSA:1.10.10.2600,IPR006119,SSF53041, cd00338,SM00857,IPR025827,IPR038109,PS51736, IPR006118,PF13408,G3DSA:3.40.50.1390,PF07508,Coil
MRRVVIYVRVSTQEQATEGYSIGEQLERLRLYCQAHGWILVEEYIDPGYSGANLDRPAISKLISDIGSGTFDTVLVYKLDRLSRSQKDTMHLIEDVFMANNIDFISMSENFDTSTPLGRAMIGILSVFAQLERDQIKERMGMGKEARAKEGKWQGGSTVPVGYEYDVSTGELIINEYEAMQVREVFNLVLSGMPYKTIANKLTAKGYTYNAISGHVGIWDAKRIKYVLTNKLYIGYIRYKDTWFPGTHEPIIDTETFEKAQLLFKERSASNVVCIKKRQGQTSYLGGLLYCKKCGARYARNSGKKWKNNEPPLYYSCYSRSHKVPKMIKDPNCKNKTWRMTDLDNIVLDEIKKLSLEPEYINTIKERETSKQATSNKADILKKEIRKIEEQVSRFLDLYGLGAFTIEQVTAKVQPLNQRKQDIEQELTELVTDETILSEDETREIVRNFDKVLERSDFNEIRMTIDSLVRYIELNDDTVYIHWKFT

SEQ ID NO: 6732 - protein, 486 aa, Unknown
  Description of Unknown: Integrase B6733 sequence
  IPR036162,PS51737,IPR011109,PTHR30461,PS00397, PF00239,G3DSA:1.10.10.2600,IPR006119,SSF53041,cd00338, SM00857,IPR025827,IPR038109,PS51736,IPR006118, PF13408,G3DSA:3.40.50.1390,PF07508,Coil
MTTIDLRIAAAYIRVSTDDQVELSPASQLVEIRKWASRNGYIVPDEFVFMDEGISGRGVKKRDEFRRMIGVAKTKPKPFDAILLWKFSRFARNRDDAVMYKSILRKQLGIDVISISEPVAEGGMGLITEALIEAMDEYYSINLAQEVKRGMEEKHRRGEVQSNPPYGYGIKDHVFVPKPPEDGFVKELFRRYLAGEGCFPLARWMNECGQRTHRGGRFENRTIEYILRNPVYIGKLRWNPAGRTRRDFSNENVVLVDGKHELLIDEETFNAVQRRIDEQKLLYPRYARASGTQKHWISGLVRCAACGGGLIVNTPDYMACNNYVRGSCRVRQTVRRDALEAALISRLREDAARGSSLTFDVVRSSDGSASSLSAVEAARDFAVRMLDRLRDAYLTGADTVEEYKASKAAVQKRIADLDAQIAAMQKEDQAAADPKLLRSALRAVVKTLESPDTTVAEKNAAVRSVADNITWNKAANTLTIHYRLVL

SEQ ID NO: 6733 - protein, 486 aa, Unknown
  Description of Unknown: Integrase B6734 sequence
  PTHR30461:SF3,cd00338,SM00857,G3DSA:1.10.10.2600,IPR036162, PF13408,IPR025827,G3DSA:3.40.50.1390,PS51737,IPR006119, IPR038109,PF07508,IPR011109,SSF53041,PTHR30461, Coil,PF00239
MKNGFTIINEYCDRAISGKTDNRPSFQRLIKDSEKGQFEAVIMYTLDRFARNRYDSAIYKAKLKKNGVRVFYAKQPMPDTPEGIILESVLEGYAEYYSENLSRNIKRGMKENALQCIATGGAGLALGYTVGEDRKYQIDPVGAKIVQEIFQMYADGMSATQIINYCNEKGYKTSRGNAFNKNSLRTLLKNEKYIGTYKFMDVVVPNGMPAIVDKALFEKVQAMLSHNAKARARTKAHEDYLLTTKLFCGHCGSAMVGESGTSKSGKAHHYYKCIDRKRKHQCIKKVEKKDWIEELVVRFTVQHVLTDENIEKIATRAMEVFEKESADTTYLTGLQDQLKEVKKKIKNLMTAIEQGIITSTTKERLEELESEKNHIEGQIAKEEMKKPLLTKERIMFWLLSFKSGDVNDLEYQRRVVDTLVNSVYVYDDGDKGRRIVFTFNISGQNTATISCSDIACSAPPNSANPNTLFIVKHCFGFVLILEDVDV

SEQ ID NO: 6734 - protein, 485 aa, Unknown
  Description of Unknown: Integrase B6735 sequence
  PTHR30461:SF3,SM00857,G3DSA:1.10.10.2600,IPR036162,PF13408, PS51737,IPR025827,G3DSA:3.40.50.1390,IPR006119,IPR038109, PF07508,SSF53041,IPR011109,PF00239,PTHR30461, PS51736,Coil,cd00338
MGETYGVVNRNAMRVALYPRVSTLEQAKDGYSINEQTERMIKYCEAKGWVVHKIYTDAGYSGADTDRPGLQSLIKDAESNKVNAVLVYKLDRLSRSQKDTLTLIEDVFLPNNVDFISMTENLDTSTPFGRAMIGILSVFAQLEREQIKERMEVGKIGRAKEGKWCGSRYVPIGYRVENDELVVHEYEAMQIREMFRLFNMRISQRRVAEMLQSKGYRTTYDGNWNRHNIRPLLENKHYIGMVSYKGEWYEGIHKPIIDKETFEKTQAILAERDEDANSRISRINAPLAGMIRCGHCGNKFFFRRAKTKNSAKLYCNCYKRSCRAGKWKDIPKEERCKNKIWKAEELEKEVFDEVRKLALHPGSFDVSSTESDENAMKIKVISKRVEEIDSQLDKLIDLYTLGTLDINVIKSRTDALLAEKEKLEVNMRSLENKEKMSKEEAVEIASSLCDVIDSGDIDEIKALVQELIKEIVVDEEDLHVYWKFA

SEQ ID NO: 6735 - protein, 485 aa, Unknown
  Description of Unknown: Integrase B6736 sequence
  PTHR30461:SF3,IPR036162,PS51737,IPR011109,PTHR30461, PS00397,PF00239,G3DSA:1.10.10.2600,IPR006119,SSF53041, cd00338,SM00857,IPR025827,IPR038109,PS51736, IPR006118,PF13408,G3DSA:3.40.50.1390,PF07508,Coil
MIQRGACYLRVSTNDQLEFSPDAQLRAIKTYAKNNNIIIDDDYIFIDEGISGRKASKRPAFQQMIKIAKSKPKKFDVILVHKFDRFARSREDSVVYKSLLRKECDIKVISITESIEDDKFSVILEAMLEAMAEYYSLNLADEVKKGMTEKAIRGQYQSSPPFGYKMENKKLVIIEDEAQVVRMIFDKFLNYDPSFLRLAKMVNALGYKTHRGGLFENRTIEYILNNPVYCGMARWTPTGKIRRNYSSSDSIVTKSEHTPIISEEVFNQCKEKLAKMKEINRRYYKGTNPQNLHWLNGLVRCKECGKTLVRSQKDYYQCSGYVKGACSTSQLIRIDKIESTILEQIKKDFDSKLKLNVKINSKSFSDNEAQIIYNQLEKLKEKESRIKEAYINGIDSIEEYKANKKDLQKQKEYLNNKLTESKNGLSIKSNDTIMKEQLRSYYEILSNPNVEVQRKYEISHLLIDRIEFSKTASTLDLLYKLYQME

SEQ ID NO: 6736 - protein, 485 aa, Unknown
  Description of Unknown: Integrase B6737 sequence
  SM00857,IPR006118,G3DSA:1.10.10.2600,IPR036162,PS51737, G3DSA:3.40.50.1390,Coil,IPR006119,IPR038109,PF07508, IPR011109,SSF53041,PS00397,PS51736,cd00338, PF00239
MKIAAAYVRVSTEEQTELSPDSQVKLIREYAKKNGYIVPKEFIFHDDGISGRSTAKRQGFNQMIGTAKLKPKPFDAILLWKFSRFARNREDSIVYKSMLRKLGIDVISISENVGDDKMSVLIEAMIEAMDEYYSINLAEEVKRGMTEKFGRGLKVSGPPLGYDMKNGEFVVNEQGAEVVRHIFDMYVNQDMGYLNIARELNAEGIRTLHGNDFETRTIAYIIQNPVYIGMQRWTPGGGGSKGHYRSAIADKVVITQAHHPAIIDKEIFEKAQQKAAKARRPYERSGSTKHEYMLRGLLKCSSCGSNLTMASVKSGTLQCYQYAHGRCKESHAITIGKIDKAVIEDIQGLVDGTATDYKLVDQSPTKPKKDTSKFETQLERERMKLERVKAAYADGIDTLEEYKRNKSEVLASIAELESKLRQAQPPKPQHTADRLPDLKVRAQEVLKVITSPNATPVEKNNALRTIVDKVVFDRKTSSIEMYYLC

SEQ ID NO: 6737 - protein, 485 aa, Unknown
  Description of Unknown: Integrase B6738 sequence
  PTHR30461:SF3,SM00857,IPR006118,G3DSA:1.10.10.2600,IPR036162, PS51737,G3DSA:3.40.50.1390,Coil,IPR006119,IPR038109, PF07508,SSF53041,IPR011109,PTHR30461,PS00397, PS51736,cd00338,PF00239
MKIAAAYVRVSTEEQTELSPDSQVKLIREYAKKNGYIVPKEFIFHDDGISGRSTAKRQGFNQMIGTAKLKPKPFDAILLWKFSRFARNREDSIVYKSMLRKLGIDVISISENVGDDKMSVLIEAMIEAMDEYYSINLAEEVKRGMTEKFGRGLKVSGPPLGYDMKNGEFVVNEQGAEIVRRIFDMYVNQDMGYLNIARELNAEGIRTLHGNDFETRTIAYVIKNPVYIGMQRWTPGGGGSKGHYRSAIADKVVITQAHHPAIIDKEIFEKAQQKAAKTRRPYERSGSTKHEYMLRGLLKCSSCGSNLTMASVKSSTLQCYQYAHGRCKESHAITIGKIDKAVTEDIQGLVDGTATDYKLVDQSPVKPKKDTSKFETQLERERMKLERVKAAYADGIDTLEEYKRNKSEVLASIAELESKLRQAQPSKPQPTADRLPDLKVRAQEVLNVITSPTATPKEKNNALRTIVDKVVFDRKTSSIEMYYLC

SEQ ID NO: 6738 - protein, 485 aa, Unknown
  Description of Unknown: Integrase B6739 sequence
  PTHR30461:SF3,SM00857,IPR006118,G3DSA:1.10.10.2600,IPR036162, PS51737,G3DSA:3.40.50.1390,Coil,IPR006119,IPR038109, PF07508,IPR011109,SSF53041,PTHR30461,PS00397, PS51736,cd00338,PF00239
MKIAAAYVRVSTEEQTELSPDSQVKLIREYAKKNGYIVPKEFIFHDDGISGRSTAKRQGFNQMIGTAKLKPKPFDAILLWKFSRFARNREDSIVYKSMLRKLGIDVISISENVGDDKMSVLIEAMIEAMDEYYSINLAEEVKRGMTEKFGRGLKVSGPPLGYDMKNGEFVVNEQGAEIVRRIFDLYVNQDMGYLNIARELNAEGIRTLHGNDFETRTIAYIIKNPVYIGMQRWTPGGGGSKGHYRSAVADKVVITQAHHPAIIDKEIFEKAQQKAAKARRPYERSGSTKHEYMLRGLLKCSSCGSNLTMGSVKSGTLQCYQYAHGRCKESHAITIGKIDKAVIEDIQGLVDGTATDYKLVDQSPAKPKKDTSKFETQLERERMKLERVKAAYADGIDTLEEYKRNKSEVLASIAELESKLRQAQPPKPQPTADRLPDLKVRAQEVLKVITSPNATPLEKNNALRTIVDKVVFDRKTSSIEMYYLC

SEQ ID NO: 6739 - protein, 485 aa, Unknown
  Description of Unknown: Integrase B6740 sequence
  PTHR30461:SF3,SM00857,IPR006118,G3DSA:1.10.10.2600,IPR036162, PS51737,G3DSA:3.40.50.1390,Coil,IPR006119,IPR038109, PF07508,SSF53041,IPR011109,PTHR30461,PS00397, PS51736,cd00338,PF00239
MKIAAAYVRVSTEEQTELSPDSQVKLIREYAKKNGYIVPKEFIFHDDGISGRSTAKRQGFNQMIGTAKLKPKPFDAILLWKFSRFARNREDSIVYKSMLRKLGIDVISISENVGDDKMSVLIEAMIEAMDEYYSINLAEEVKRGMTEKFGRGLKVSGPPLGYDMKNGEFVVNEQGAEIVRRIFDMYVNQDMGYLNIARELNAEGIRTLHGNDFETRTIAYIIKNPVYIGMQRWTPGGGGSKGHYRSAVAENVVVTQAHHPAIIDKKIFEKAQQKAAKARRPYERSGSTKHEYMLRGLLKCSSCGSNLTMGSVKSGTLQCYQYAHGRCKESHAITIGKIDKAVIEDIQGLVDGTATDYKLVDQSPAKPKKDTSKYETQLERERMKLERVKAAYADGIDTLEEYKHNKSEVLASIAELESKLRQAQPPKPQHTADRLPDLKVRAQEVLKVITSPNATPMEKNNALRSIVDKVVFVRKTSSIEMYYLC

SEQ ID NO: 6740 - protein, 485 aa, Unknown
  Description of Unknown: Integrase B6741 sequence
  PTHR30461:SF3,SM00857,IPR006118,G3DSA:1.10.10.2600,IPR036162, PS51737,G3DSA:3.40.50.1390,Coil,IPR006119,IPR038109, PF07508,SSF53041,IPR011109,PTHR30461,PS00397, PS51736,cd00338,PF00239
MKIAAAYVRVSTEEQTELSPDSQVKLIREYAKKNGYIVPKEFIFHDDGISGRSTAKRQGFNQMIGTAKLKPKPFDAILLWKFSRFARNREDSIVYKSMLRKLGIDVISISENVGDDKMSVLIEAMIEAMDEYYSINLAEEVKRGMTEKFGRGLKVSGPPRGYDMKNGEFVVNEQGAEIVRRIFDMYVNQDMGYLNIARELNAEGIRTLHGNDFETRTIAYIIKNPVYIGMQRWTPGGGGSKGHYRSAVAENVVVTQAHHPAIIDKEIFEKAQQKAAKARRPYERSGSTKHEYMLRGLLKCSSCGSNLTMASVKSGTLQCYQYAHGRCKESHAITIGKIDKAVIEDIQGLVDGTATDYKLVDQSPVKPKKDTSKFETQLERERMKLERVKAAYADGIDTLEEYKRNKSEVLASITELESKLRQAQPSKPQSTADRLPDLKVRAQEVLKVITSPNATPIEKNNALRTIVDKVVFDRKTSSIEMYYLC

SEQ ID NO: 6741 - protein, 485 aa, Unknown
  Description of Unknown: Integrase B6742 sequence
  PTHR30461:SF3,SM00857,IPR006118,G3DSA:1.10.10.2600,IPR036162, PS51737,G3DSA:3.40.50.1390,Coil,IPR006119,IPR038109, PF07508,SSF53041,IPR011109,PTHR30461,PS00397, PS51736,cd00338,PF00239
MKIAAAYVRVSTEEQTELSPDSQVKLIREYAKKNGYIVPKEFIFHDDGISGRSTAKRQGFNQMIGTAKLKPKPFDAILLWKFSRFARNREDSIVYKSMLRKLGIDVISISENVGDDKMSVLIEAMIEAMDEYYSINLAEEVKRGMTEKFGRGLKVSGPPLGYDMKNGEFVVNEQGAEIVHRIFDMYVNQDMGYLNIARELNAEGIRTLHGNDFETRTIAYIIKNPVYIGMQRWTPGGGGSKGHYRSAVAENVVVTQAHHPAIIDKELFEKAQQKAAKARRPYERSGSTKHEYMLRGLLKCSSCGSNLTMGSVKSGTLQCYQYAHGRCKESHAITIGKIDKAVIEDIQGLVDGTATDYKLVDQSPVKPKKDTSKYETQLERERMKLERVKAAYADGIDTLEEYKHNKSEVLASIAELESKLRQAQPPKPQHTADRLPDLKVRAQEVLKVITSPNATPMEKNNALRSIVDKVVFVRKTSSIEMYYLC

SEQ ID NO: 6742 - protein, 485 aa, Unknown
  Description of Unknown: Integrase B6743 sequence
  PTHR30461:SF3,SM00857,IPR006118,G3DSA:1.10.10.2600,IPR036162, PS51737,G3DSA:3.40.50.1390,Coil,IPR006119,IPR038109, PF07508,SSF53041,IPR011109,PTHR30461,PS00397, PS51736,cd00338,PF00239
MKIAAAYVRVSTEEQTELSPDSQVKLIREYAKKNGYIVPKEFIFHDDGISGRSTAKRQGFNQMIGTAKLKPKPFDAILLWKFSRFARNREDSIVYKSMLRKLGIDVISISENVGDDKMSVLIEAMIEAMDEYYSINLAEEVKRGMTEKFGRGLKVSGPPLGYDMKNGEFVVNEQGAEIVHRIFDMYVNQDMGYLNIARELNAEGIRTLHGNDFETRTIAYIIKNPVYIGMQRWTPGGGGSKGHYRSAAAENVVVTQAHHPAIIDKEIFEKAQQKAAKARRPYERSGFTKHEYMLRGLLKCSSCGSNLTMGSVKSGTLQCYQYAHGRCKESHAITIGKIDKAVIEDIQGLVDGTATDYKLVDQSPAKPKKDTSKFETQLERERMKLERVKAAYADGIDTLEEYKRNKSKVLASIAELESKLRQAQPPRAQPTADRLPDLKVRAQEVLKVITSPNATPVEKNNALRTIVDKVVFDRKTSSIEMYYLC

SEQ ID NO: 6743 - protein, 485 aa, Unknown
  Description of Unknown: Integrase B6744 sequence
  PTHR30461:SF3,SM00857,IPR006118,G3DSA:1.10.10.2600,IPR036162, PS51737,G3DSA:3.40.50.1390,Coil,IPR006119,IPR038109, PF07508,SSF53041,IPR011109,PTHR30461,PS00397, PS51736,cd00338,PF00239
MKIAAAYVRVSTEEQTELSPDSQVKLIREYAKKNGYIVPKEFIFHDDGISGRSTAKRQGFNQMIGTAKLKPKPFDAILLWKFSRFARNREDSIVYKSMLRKLGIDVISISENVGDDKMSVLIEAMIEAMDEYYSINLAEEVKRGMTEKFGRGLKVSGPPLGYDMKNGEFVVNEQGAEIVRRIFDMYVNQDMGYLNIARELNAEGIRTLHGNDFETRTIAYIIKNPVYIGMQRWTPGGGGSKGHYRSAVAENVVVTQAHHPAIIDKEIFEKAQQKAVKTRRPYERSGSTKHEYMLRGLLKCSSCGSNLTMASVKSGTLQCYQYAHGRCKESHAITIGKIDKAVIEDIQGLVDGTATDYKLVDQSHVKPKKDTSKFETQLERERMKLERVKAAYADGIDTLEEYKHNKSEVLASIAELESKLRQAQPPKPQHTADRLPDLKVRAQEVLKVITSPNATPMEKNNALRTIVDKVVFDRKTSSIEMYYLC

SEQ ID NO: 6744 - protein, 485 aa, Unknown
  Description of Unknown: Integrase B6745 sequence
  PTHR30461:SF3,cd00338,SM00857,IPR006118,G3DSA:1.10.10.2600, IPR036162,PS51737,G3DSA:3.40.50.1390,IPR006119,IPR038109, PF07508,IPR011109,SSF53041,PTHR30461,PS00397, PS51736,Coil,PF00239
MKLAACYIRVSTDDQLEYSPDSQLEKIKEYCARNGYILNQDNIFVEEEGVSGRKASRRQEFQHMIAKAKSKPKPFDVIIVWKFSRFARNREDSIVYKSMLKKIGIDVISVTENVGDDKMSVITEAIIEAMDEYYSLNLAEEVRRGMTERIKHGNHNSVAPFGYRIVDKQLVIFPEQAEIIREVYSRYLNGWGQKQIAAWLNTLGITTNRGGKIENRTVNYWLRNPVYHGYVRWNPAERASTKRYIDTPDTIIVKGHHEPIIDEETWEAVQKRCDEVRMRFSKHRRENIPKEYALSGVIKCSSCGASLSTTCGQKYLQCAKYAHGLCSTSHHVSYEMLWLMLLSTIEGDLTSGNFQLERISRPVVESDAAALRAQIERTEMKLRRIREAFEAGIDTLEEYKSGKARITAELESLRERAAEVNPTDREVTPEEKRAFAEKHLRTLVKLRDPEVGELEKNHLLKEFVKKATYRKADNSLSVIYMMVVL

SEQ ID NO: 6745 - protein, 485 aa, Unknown
  Description of Unknown: Integrase B6746 sequence
  PTHR30461:SF3,IPR036162,PS51737,IPR011109,PTHR30461, PS00397,PF00239,G3DSA:1.10.10.2600,IPR006119,SSF53041, cd00338,SM00857,IPR025827,IPR038109,PS51736, IPR006118,PF13408,G3DSA:3.40.50.1390,PF07508,Coil
MKKIAAAYIRVSTHMQEELSPDAQIRLIKEWANGHGYDLPEEFIFIDKGISGRKVRKRPSFLRMISMAKSKPSPFDAILVWKFSRFARNQEESIVYKAMLRNKHKIDVISISEPISDDVYGGLIERIIEWMDEFYSIRLAEDVKRGMTENALRGNFQSSPAFGYKVEKGQGLVIVEDQANIVRMIFNLYANSGMGFYDIARHLNRLGYTTKRGGAFETRTIKYIIQNPIYKGYLRWNYANGTTHVINDESEWIIVKSPLVPIIVSEELWDRANERFKNEYRPRGGKPLSQKRHWLSGLVKCSTCGASLSTSVQKDKRYGRTYIYFQCYRYRKGKCLVSHYISEKQLVPLVLNVLKEDMNKSYIEYEYVNDQSENMQDVLNVQLNRLDAREKRIKEAYLAGVDSLDEYKKNKADIEKERELLYQQSNDQEEYKKNIDMPGKIRGVYDILNSDEYSKDEKYNAITSIVKKIVFDRENKTLDFYYYTR

SEQ ID NO: 6746 - protein, 485 aa, Unknown
  Description of Unknown: Integrase B6747 sequence
  PTHR30461:SF3,SM00857,IPR006118,G3DSA:1.10.10.2600,IPR036162, PS51737,G3DSA:3.40.50.1390,Coil,IPR006119,IPR038109, PF07508,IPR011109,SSF53041,PTHR30461,PS00397, PS51736,cd00338,PF00239
MKIAAAYVRVSTEEQTELSPDSQVKLIREYAKKNGYIVPKEFIFHDDGISGRSTAKRQGFNQMIGTAKLKPKPFDAILLWKFSRFARNREDSIVYKSMLRKLGIDVISISENVGDDKMSVLIEAMIEAMDEYYSINLAEEVKRGMTEKFGRGLKVSGPPLGYDMKNGEFVVNEQGAEIVRRIFDMYVNQDMGYLNIARELNAEGIRTLHGNDFETRTIAYIIKNPVYIGMQRWTPGGGGSKGHYRSVAAENVVVTQAHHPAIIDKKIFEKAQQKAAKTRRPYERSGSTKHEYMLRGLLKCSSCGSNLTMGSVKSGTLQCYQYAHGRCKESHAITIGKIDKAVIEDIQGLVDGTATDYKLVDQSPVKPKKDTSKFETQLERERMKLERVKAAYADGIDTLEEYKRNKSEVLASIAELESKLRQAQPPKPQPTADRLPDLKVRAQEVLKVITSPNATPVEKNNALRSIVDKVVFDRKTSSIEMYYLC

SEQ ID NO: 6747 - protein, 485 aa, Unknown
  Description of Unknown: Integrase B6748 sequence
  PTHR30461:SF3,SM00857,IPR006118,G3DSA:1.10.10.2600,IPR036162, PS51737,G3DSA:3.40.50.1390,Coil,IPR006119,IPR038109, PF07508,SSF53041,IPR011109,PTHR30461,PS00397, PS51736,cd00338,PF00239
MKIAAAYVRVSTEEQTELSPDSQVKLIREYAKKNGYIVPKEFIFHDDGISGRSTAKRQGFNQMIGTAKLKPKPFDAILLWKFSRFARNREDSIVYKSMLRKLGIDVISISENVGDDKMSVLIEAMIEAMDEYYSINLAEEVKRGMTEKFGRGLKVSGPPLGYDMKNGEFVVNEQGAEIVRRIFDMYVNQDMGYLNIARELNAEGIRTLHGNDFETRTIAYIIRNPVYIGMQRWTPGGGGSKGHYRSAVAENVVVTQAHHPAIIDKEIFEKAQQKAAKTRRPYERSGSTKHEYMLRGLLKCSSCGSNLTMGSVKSGTLQCYQYAHGRCKESHAITIGKIDKAVIEDIQGLVDGIATDYKLVDQSPVKPKKDTSKFETQLERERMKLERVKAAYADGIDTLEEYKRNKSEVLASIAELESKLRQAKPPKPQPTADRLPDLKVRAQEVLKVITSPNATPMEKNNALRTIVDKVVFDRKTSSIEMYYLC

SEQ ID NO: 6748 - protein, 485 aa, Unknown
  Description of Unknown: Integrase B6749 sequence
  PTHR30461:SF3,IPR036162,PS51737,IPR011109,PTHR30461, PS00397,PF00239,G3DSA:1.10.10.2600,IPR006119,SSF53041, cd00338,SM00857,IPR025827,IPR038109,PS51736, IPR006118,PF13408,G3DSA:3.40.50.1390,PF07508,Coil
MKKIAAAYIRVSTHMQEELSPDAQIRLIKEWANGHGYDLPEEFIFIDKGISGRKVRKRPSFLRMISMAKSKPSPFDAILVWKFSRFARNQEESIVYKAMLRNKHKIDVISISEPISDDVYGGLIERIIEWMDEFYSIRLAEDVKRGMTENALRGNFQSSPAFGYKVEKGQGLVIVEYQANIVRMIFNLYANSGMGFYDIARHLNRLGYTTKKGGAFETRTIKYIIQNPIYKGYLRWNYANGTTHVVNDESEWIIVKSPLVPIIVSEELWNQANERFKNEYRPRGGKPLSQKRHWLSGLVKCSTCGASLSTSVQKDKRYGRTYIYFQCYRYRKGKCLVSHYISEKQLVPLVLNVLKEDMNKSYIEYEYVNDQSENMQDVLNVQLNRLDAREKRIKEAYLAGVDSLDEYKKNKADIEKERELLYQQSNNQEEYKKNIDMPGKIRGVYDILNSDEYSKDEKYNAITSIVKKIVFDRENKTLDFYYYTR

SEQ ID NO: 6749 - protein, 485 aa, Unknown
  Description of Unknown: Integrase B6750 sequence
  PTHR30461:SF3,IPR036162,PS51737,IPR011109,PTHR30461, PS00397,PF00239,G3DSA:1.10.10.2600,IPR006119,SSF53041, cd00338,SM00857,IPR025827,IPR038109,PS51736, IPR006118,PF13408,G3DSA:3.40.50.1390,PF07508,Coil
MKKIAAAYIRVSTHMQEELSPDAQIRLIKEWANGHGYDLPEEFIFIDKGISGRKVRKRPSFLRMISMAKSKPSPFDAILVWKFSRFARNQEESIVYKAMLRNKHKIDVISISEPISDDVYGGLIERIIEWMDEFYSIRLAEDVKRGMTENALRGNFQSSPAFGYKVEKGQGLVIVEDQANIVRMIFNLYANSGMGFYDIARHLNRLGYTTKKGGAFETRTIKYIIQNPIYKGYLRWNYANGTTHVVNDESEWIIVKSPLVPIIVSEELWNQANERFKNEYRPRGGKPLSQKRHWLSGLVKCSTCGASLSTSVQKDKRYGRTYIYFQCYRYRKGKCLVSHYISEKQLVPLVLNVLKEDMNKSYIEYEYVNDQSENMQDVLNVQLNRLDAREKRIKEAYLAGVDSLDEYKKNKADIEKERELLYQQSNNQEEYKKNIDMPGKIRGVYDILNSDEYSKDEKYNAITSIVKKIVFDRENKTLDFYYYTR

SEQ ID NO: 6750 - protein, 485 aa, Unknown
  Description of Unknown: Integrase B6751 sequence
  IPR036162,PS51737,IPR011109,PTHR30461,PS00397, PF00239,G3DSA:1.10.10.2600,IPR006119,SSF53041,cd00338, SM00857,IPR025827,IPR038109,PS51736,IPR006118, PF13408,G3DSA:3.40.50.1390,PF07508,Coil
MTDLKIAAAYIRVSTDDQVELSPASQLVEIRKWGVANGYLVPDEFVFVDEAKSGRKVTGRDEFRRLIATAKTKPKPFDAILLWKFSRFARNRDDAVYYKSILRKQLKIEVISIKEPIEDGKMGVIMESMIEAMDEYYSINLAEDVKRGMEEKHRRGELQATPSFGYTVLDNVLVPVPEEAVYVQEIFSRFVSGEGFYSIARWLNSMGVKTHRGSTFENRTVEYILRNPVYIGKLRWNPAGRSRRDYADPNIIVTDGKHEPLVSEETFQQAQTRIAQLKATMPYKARPLGSNKDWISGLVRCASCGSTLIFAKPHYWKCNNYVRGRCRASQHISSDLLKKAILDRLHMDAAASAPLSYEVLRVNGRDGDTTAALRTQRASLERRLERLREAFLAGVDTVEEYRQLKEDAQAQIQRIDQELSAAAAENRRAGDASIMRSAISDALAVIENEDASLEQRCNAARSIIDRITWDKAQNLLTIHYRLMLE

SEQ ID NO: 6751 - protein, 485 aa, Unknown
  Description of Unknown: Integrase B6752 sequence
  PTHR30461:SF3,SM00857,IPR006118,G3DSA:1.10.10.2600,IPR036162, PS51737,G3DSA:3.40.50.1390,Coil,IPR006119,IPR038109, PF07508,IPR011109,SSF53041,PTHR30461,PS00397, PS51736,cd00338,PF00239
MKIAAAYVRVSTEEQTELSPDSQVKLIREYAKKNGYIVPKEFIFHDDGISGRSTAKRQGFNQMIGTAKLKPKPFDAILLWKFSRFARNREDSIVYKSMLRKLGIDVISISENVGDDKMSVLIEAMIEAMDEYYSINLAEEVKRGMTEKFGRGLKVSGPPLGYDMKNGEFVVNEQGAEIVRRIFDMYINQDMGYLNIARELNAEGIRTLHGNDFETRTIAYIIRNPVYIGMQRWTPGGGGSKGHYRSAVAEKVVVTQAQHPAIIDKEIFEKAQQKAAKARRPYERSGSTKHEYMLRGLLKCSSCGSNLTMGSVKSGTLQCYQYAHGRCKESHAITIGKIDKAVTEDIQGLVDGTATDYKLVDQSPVKPKKDTSKFETQLERERMKLERVKAAYADGIDTLEEYKRNKSEVLASIAELESKLRQAQPPKPQPTADRLPDLKVRAQEVLKVITSPNATPVEKNNALRSIVDKVVFDRKTSSIEMYYLC

SEQ ID NO: 6752 - protein, 485 aa, Unknown
  Description of Unknown: Integrase B6753 sequence
  PTHR30461:SF3,SM00857,IPR006118,G3DSA:1.10.10.2600,IPR036162, PS51737,G3DSA:3.40.50.1390,Coil,IPR006119,IPR038109, PF07508,IPR011109,SSF53041,PTHR30461,PS00397, PS51736,cd00338,PF00239
MKIAAAYVRVSTEEQTELSPDSQVKLIREYAKKNGFIVPKEFIFHDDGISGRSTAKRQGFNQMIGTAKLKPKPFDAILLWKFSRFARNREDSIVYKSMLRKLGIDVISISENVGDDKMSVLIEAMIEAMDEYYSINLAEEVKRGMTEKFGRGLKVSGPPLGYDMKNGEFVVNEQGAEIVRRIFDMYVNQDMGYLNIARELNAEGIRTLHGNDFETRTIAYIIKNPVYIGMQRWTPGGGGSKGHYRSAVAENVVVTQAHHPAIIDKEIFEKAQQKAAKTRRPYERSGSTKHEYMLRGLLKCSSCGSNLTMGSVKNGTLQCYQYAHGRCKESHAITIGKIDKAVIEDIQGLVDGTATDYKLVDQSPVKPKKDTSKFETQLERERMKLERVKAAYADGIDTLEEYKRNKSEVLASIAELESKLRQAQPPKPQHTADRLPDLKVRAQEVLKVITSPNATPVEKNNALRTIVDKVVFDRKTSSIEMYYLC

SEQ ID NO: 6753 - protein, 485 aa, Unknown
  Description of Unknown: Integrase B6754 sequence
  cd03768,PTHR30461:SF3,SM00857,G3DSA:1.10.10.2600,IPR036162, PF13408,PS51737,IPR025827,G3DSA:3.40.50.1390,IPR006119, IPR038109,PF07508,IPR011109,SSF53041,PTHR30461, PS51736,Coil,PF00239
MSKKVAIYTRVSTTNQAEEGYSIDEQIDKLKMYCEAMDWKVSEIYTDAGFSGSKLTRPAMEKMITDIGLKKFDTVIVYKLDRLSRSVRDTLYLVKDVFTKNEIDFISLSESIDTSSAMGSLFLTILSAINEFERENIKERMTMGKIGRAKSGKSMMWAKTAFGYSHNQETGILEINPLEASIVEQIFNEYLKGTSITKLRDKLNEDGHIAKELPWSYRTIRQTLDNPVYCGYIKYKNNTFEGLHKPIISHETYLSVQKELEARQQQTYEKNNNPRPFQAKYLLSGIARCGYCGAPLRIVLGHRRKDGSRTMKYQCVNRFPRKTKGVTTYNDNKKCDSGAYDMQWIEDIVLKTLNGFQKSDKKLRKILNIKEESKVDTSGFQKQLKSINNKIQKNSDLYLNDFITMDDLKKRTEMLQGEKKLIQARINEVDKPSTSEVFDLVKSELGEIPISKISYEDKKKIVNNLISKVDVTADNIDIIFKFQLA

SEQ ID NO: 6754 - protein, 485 aa, Unknown
  Description of Unknown: Integrase B6755 sequence
  IPR036162,PS51737,IPR011109,PTHR30461,PS00397, PF00239,G3DSA:1.10.10.2600,IPR006119,SSF53041,cd00338, SM00857,IPR025827,IPR038109,PS51736,IPR006118, PF13408,G3DSA:3.40.50.1390,PF07508,Coil
MTDFKTAAAYIRVSTDDQVELSPASQLVEIRKWAAANDYLVPDEFVFVDEAKTGRKVTGRDEFRRLIATAKTKPKPFDAILLWKFSRFARNRDDAVYYKSILRKQLKIDVISIKEPIDEGKMGVIMESMIEAMDEYYSINLAEDVKRGMEEKHRRGELQSPPAFGYTVVDNVLTPVPEEAALVREMFRRYNAGEGCYSLARWLNAAGVRTHRGSPFENRTVEYILRNPVYIGKLRWNPTGRSHRNFDDPGIIVMDGKHEPLISEELFHRTQRRIAQSKAAMPYHGRPLGSNKDWISGLVRCAACGGTMVFAKPHWWKCNNYVRGRCTTSQHINGDLLKDAILRRLQADSSTAADLHYEVLRITDKVGDPVAALRAQRVSTERRLERLREAFLSGIDTMEEYRQAKEETQAQLQRIDEAICEAERENHRRGNPKLMRNAIRLALATITNENATLEQRCAAARSIIEHIDWDKAQNQLTIHYRLLLD

SEQ ID NO: 6755 - protein, 485 aa, Unknown
  Description of Unknown: Integrase B6756 sequence
  PTHR30461:SF3,IPR036162,PS51737,IPR011109,PTHR30461, PS00397,PF00239,G3DSA:1.10.10.2600,IPR006119,SSF53041, cd00338,SM00857,IPR025827,IPR038109,PS51736, IPR006118,PF13408,G3DSA:3.40.50.1390,PF07508,Coil
MGYVTKKAAQRFEEKKAAIYVRVSTQYQVDRASLPVQREELINYAKYALGISDYVIFEDAGYSAKNTDRPDYQQMMARMRTGEFSHLLVWKIDRISRNLLDFSVMYAELKELGVVFVSKNEQFDTSSAMGEAMLKIILIFAELERKTTSERVSAVFVSRANDGIWNGGKVPYGYSYDKEGKTFSIAEDEAKIVRLIYSLYESEKSIVRVARIMNERGLKSRAGSDWSPTTVHTILSSPFYSGTYRYNYRNESNRKRFREKGKDEWVLVENHHPAIVSPERQAAVGVILESKRYNKNATYQRKNVHVFAGLLTCGCCGSTMAATTDKVRADGWRPSMYICSRRRKSEDCTNKYVSDVSLGPFVLNFFANLIKASNSFGRTTSIETLEKKLLRGEALSRVDHIERPGLEELYNHLRSGFDEKRFESPTIAATESSADLSERDLLLSEKRRLERALNRLKTIYFTEMTRWQAKTSTSSVSASQKPSAR

SEQ ID NO: 6756 - protein, 485 aa, Unknown
  Description of Unknown: Integrase B6757 sequence
  PTHR30461:SF3,IPR036162,PS51737,IPR011109,PTHR30461, PS00397,PF00239,G3DSA:1.10.10.2600,IPR006119,SSF53041, cd00338,SM00857,IPR025827,IPR038109,PS51736, IPR006118,PF13408,G3DSA:3.40.50.1390,PF07508,Coil
MIKRGACYIRVSTNDQLEFSPDAQLKAIKKYAKDNDIIIDDDYVFIDEGISGRKASKRPAFQQMIKIAKSKPKKFDVILVHKFDRFARSREDSVVYKSLLRKECDIKVISITESIEDDKFSVILEAMLEAMAEYYSLNLADEVKKGMTEKAIRGQYQSSPPFGYKMENKKLVIIEDEAQVVRMIFDKFLNYDPSFLRLAKMVNALGYKTHRGGLFENRTIEYILNNPVYCGMARWTPTGKIRRNYSSSDSIVTKSEHTPIISEEVFNQCKEKLAKMKEINRRYYKGTNPQNLHWLNGLVRCKECGKTLVRSQKDYYQCSGYVKGACSTSQLIRIDKIESTILEQIKKDFDSKLKLNVKINSKSFSDNEAQIIYNQLEKLKEKESRIKEAYINGIDSIEEYKANKKDLQEQKEYLNNKLIESKNGLSIKSSDAIMKEQLRSYYEILSNPNVEVQRKYEISHLLIDRIEFSKTASTLDLQYKLYQME

SEQ ID NO: 6757 - protein, 485 aa, Unknown
  Description of Unknown: Integrase B6758 sequence
  PTHR30461:SF3,IPR036162,PS51737,IPR011109,PTHR30461, PS00397,PF00239,G3DSA:1.10.10.2600,IPR006119,SSF53041, cd00338,SM00857,IPR025827,IPR038109,PS51736, IPR006118,PF13408,G3DSA:3.40.50.1390,PF07508,Coil
MTDLKIAAAYIRVSTDDQVELSPASQLVEIRKWGAANGYLVPDEFVFVDEAKSGRKVTGRDEFRRLIATAKTKPKPFDAILLWKFSRFARNRDDAVYYKSILRKQLKIEVISIKEPIEDGKMGVIMESMIEAMDEYYSINLAEDVKRGMEEKHRRGELQATPSFGYTVLDNVLVPVPEEAVYVQEIFSRFVSGEGFYSIARWLNSMGVKTHRGSTFANRTVEYILRNPVYIGKLRWNPAGRSRRDYADPNIIVTDGKHEPLVSEETFQQAQTRIAQLKAAMPYKARPLGSNKDWISGLVRCASCGSTLIFAKPHYWKCNNYVRGRCRASQHISSDLLKKAILDRLHMDAAASAPLSYEVLRVNGRDGDTTAALRTQRASLERRLERLREAFLAGVDTVEEYRQLKEDAQAQIQRIDQELSAAAAENRRAGDVSIMRSAISDALAVIENEDASLEQRCNAARSIIDRITWDKAQNLLTIHYRLMLE

SEQ ID NO: 6758 - protein, 485 aa, Unknown
  Description of Unknown: Integrase B6759 sequence
  PTHR30461:SF3,IPR036162,PS51737,IPR011109,PTHR30461, PS00397,PF00239,G3DSA:1.10.10.2600,IPR006119,SSF53041, cd00338,SM00857,IPR025827,IPR038109,PS51736, IPR006118,PF13408,G3DSA:3.40.50.1390,PF07508,Coil
MTDLKIAAAYIRVSTDDQVELSPASQLVEIRKWGAANGYLVPDEFVFVDEAKSGRKVTGRDEFRRLIATAKTKPKPFDAILLWKFSRFARNRDDAVYYKSILRKQLKIEVISIKEPIEDGKMGVIMESMIEAMDEYYSINLAEDVKRGMEEKHRRGELQATPSFGYTVLDNVLVPVPEEAVYVQEIFSRFVSGEGFYSIARWLNSMGVKTHRGSTFANRTVEYILRNPVYIGKLRWNPAGRSRRDYADPNIIVTDGKHEPLVSEETFQQAQTRIAQLKAAMPYKARPLGSNKDWISGLVRCASCGSTLIFAKPHYWKCNNYVRGRCRSSQHISSDVLKEAILDRLHMDAAASAPLSYEVLRVNGRDGDTTAALRTQRASLERRLERLREAFLAGVDTVEEYRQLKEDAQAQIQRIDQELSAAAAENRRAGDVSIMRSAISDALAVIENEDASLEQRCNAARSIIDRITWDKAQNLLTIHYRLMLE

SEQ ID NO: 6759 - protein, 485 aa, Unknown
  Description of Unknown: Integrase B6760 sequence
  PTHR30461:SF3,SM00857,IPR006118,G3DSA:1.10.10.2600,IPR036162, PS51737,G3DSA:3.40.50.1390,PS00397,IPR006119,IPR038109, PF07508,IPR011109,SSF53041,PTHR30461,Coil, PS51736,cd00338,PF00239
MKIAAAYVRVSTEEQTELSPDSQVKLIREYAKKNGYIVPKEFIFHDDGISGRSTAKRQGFNQMIGTAKLKPKPFDAILLWKFSRFARNREDSIVYKSMLRKLGIDVISISENVGDDKMSVLIEAMIEAMDEYYSINLAEEVKRGMTEKFGRGLKVSGPPLGYDMKNGEFVVNEQGAEIVRRIFDMYVNQDMGYLNIARELNAEGIHTLHGNDFETRTIAYIIKNPVYIGMQRWTPGGGGSKGHYRSAASENVVVTQAQHPAIIDKEIFEKAQQKAAKARRPYERSGSTKHEYMLRGLLKCSSCGSNLTMGSVKSGTLQCYQYAHGRCKESHAITIGKIDKAVTEDIQGLVDGTATDYKLVDQSPVKPKKDTSKFETQLERERMKLERVKAAYADGIDTLEEYKRNKSEVLANIAELESKLRQAQPSKPQHTADRLPDLKVRAQEVLKVITSPNATPVEKNNALRTIVDKVVFDRKTSSIEMYYLC

SEQ ID NO: 6760 - protein, 485 aa, Unknown
  Description of Unknown: Integrase B6761 sequence
  PTHR30461:SF3,SM00857,IPR006118,G3DSA:1.10.10.2600,IPR036162, PS51737,PS00397,G3DSA:3.40.50.1390,IPR006119,IPR038109, PF07508,SSF53041,IPR011109,PTHR30461,Coil, PS51736,cd00338,PF00239
MKIAAAYVRVSTEEQTELSPDSQVKLIREYAKKNGYIVPKEFIFHDDGISGRSTAKRQGFNQMIGTAKLKPKPFDAILLWKFSRFARNREDSIVYKSMLRKLGIDVISISENVGDDKMSVLIEAMIEAMDEYYSINLAEEVKRGMTEKFGRGLKVSGPPLGYDMKNGEFVVNEQGAEIVRRIFDMYVNQDMGYLNIARELNAEGIRTLHGNDFETRTIAYIIKNPVYIGMQRWTPGGGGSKGHYRSAVAEKVVITQAHHPAIIDKELFEKAQQKAAKAHRPYERSGSTKHEYMLRGLLKCSSCGSNLTMASVKSGTLQCYQYAHGRCKESHAITIGKIDKAVIEDIQGLVDGTATDYKLVDQSPVKPKKDTSKFETQLERERMKLERVKAAYADGIDTLEEYKRNKSEVLASIAELESKLRQAQPPKPQRTADRLPDLKVRAQEVLKVITSPNATPVEKNNALRSIVDKVVFDRKTSSIEMYYLC

SEQ ID NO: 6761 - protein, 485 aa, Unknown
  Description of Unknown: Integrase B6762 sequence
  PTHR30461:SF3,SM00857,G3DSA:1.10.10.2600,IPR036162,PF13408, IPR025827,PS51737,G3DSA:3.40.50.1390,IPR006119,IPR038109, PF07508,SSF53041,IPR011109,PTHR30461,PS51736, cd00338,PF00239
MIPAVGYCRFSSENQADGFSIEAQKNAISGFASRMGYDILRFYVDEAKSGTTTEGRTAFLDMLSDSKKHEFQAVIVHKLDRFARSRIDSAVSKKVLKDNGVRLISVLEQLDDSPESIILESVLEGMNEYYSKNLSRETKKGMKVAGAKGRILGTIPYGYIADKDNKFQIVNKEAENVRFIYDCFNKGMTFKALREELKKNNIQTRAGNWFNDSNLRQMLTNPTYMGDYHFGTAVYSGVVPPIVSRDLFDSVQVIIQKHKRVVPKDKGTAYLLTGLIFHSCGEAMVGYKSIKKGKAYYYYRCRKKEPKGYVYKQAIEDAVLVAIQDFFTDEKVISAYVKECNKALKEIKKSSDVGALRKRANELKTQSSKLLDLYLNGTINQELYMEKKERIDIESRLVESQITTCVQAFDLSPDIIRCAFADYADKIKNSLDNPKDTQAVLSTLIKSIKLYEDRFEITFKFGDRQVAYNFSNAPRPTLSRLFSNF

SEQ ID NO: 6762 - protein, 485 aa, Unknown
  Description of Unknown: Integrase B6763 sequence
  IPR036162,PS51737,IPR011109,PTHR30461,PS00397, PF00239,G3DSA:1.10.10.2600,IPR006119,SSF53041,SM00857, IPR025827,IPR038109,PS51736,cd03768,IPR006118, PF13408,G3DSA:3.40.50.1390,PF07508,Coil
MVVLAYIRVSTDEQAEKGNSLTEQKERIEAYCKAMGWEEPIFFIEDGYSAKSTNRPELTIMLEKVKEYQNGRVITTKLDRLSRKLFDILSLNNYFVKHKFHYVSATEGFDTSTPAGMLVLQMLGMVAEFERERNSERVRENMLSIARNNTKKIITRPCFGYDIVDGKMAMNLDEALCIRRAAMKLLTGTPSRSVIGEWNAQGITTKEGNEWQDKTFRELFQRETLVGDFVYNKTTRQGDKVIKNDPSLWIREKNTHEAILDRDTFTKLQELFQGRKSVGKHMSNETYLLSGLVYCSHCGSKMNGKMNRSFSKRLNRENIHYQYLCDGYLKKGKCFHHYVQRDAIEELVISRIKEVAQAAPGTLKLVISKPQVKQVDKESIENKLAKLDKKMQKQIDAYNDDLITAEDLKAATLRVTKERDALKKILESSEEEQASRQQEELKRKARSATKAILSGDRITVKQSIRQLIERIEIKDGSQVSIVWLA

SEQ ID NO: 6763 - protein, 485 aa, Unknown
  Description of Unknown: Integrase B6764 sequence
  PTHR30461:SF3,IPR036162,PS51737,IPR011109,PTHR30461, PS00397,PF00239,G3DSA:1.10.10.2600,IPR006119,SSF53041, cd00338,SM00857,IPR025827,IPR038109,PS51736, IPR006118,PF13408,G3DSA:3.40.50.1390,PF07508,Coil
MKKIAAAYIRVSTHMQEELSPDAQIRLIKEWANGHGYDLPEEFIFIDKGISGRKVRKRPSFLRMISMAKSKPSPFDAILVWKFSRFARNQEESIVYKAMLRNKHKIDVISISEPISDDVYGGLIERIIEWMDEFYSIRLAEDVKRGMTENALRGNFQSSPAFGYKVEKGQGLVIVEDQANIVRMIFNLYANSGMGFYDIARHLNRLGYTTKKGGAFETRTIKYIIQNPIYKGYLRWNYANGTTHVVNDENEWIIVKSPLVPIIVSEELWNQANERFKNEYRPRGGKPLSQKRHWLSGLVKCSTCGASLSTSVQKDKRYGRTYIYFQCYRYRKGKCLVSHYISEKQLVPLVLNVLKEDMNKSYIEYEYVNDQSENMQDVLNVQLNRLDAREKRIKEAYLAGVDSLDEYKKNKADIEKERELLYQQSNDQEEYKKNIDMPGKIRGVYDILNSDEYSKDEKYNAITSIVKKIVFDRENKTLDFYYYTR

SEQ ID NO: 6764 - protein, 485 aa, Unknown
  Description of Unknown: Integrase B6765 sequence
  IPR036162,PS51737,IPR011109,PTHR30461,PS00397, PF00239,G3DSA:1.10.10.2600,IPR006119,SSF53041,cd00338, SM00857,IPR025827,IPR038109,PS51736,IPR006118, PF13408,G3DSA:3.40.50.1390,PF07508,Coil
MTDLKIAAAYIRVSTDDQVELSPASQLVEIRKWGAANGYLVPDEFVFVDEAKSGRKVTGRDEFRRLIATAKTKPKPFDAILLWKFSRFARNRDDAVYYKSILRKQLKIEVISIKEPIEDGKMGVIMESMIEAMDEYYSINLAEDVKRGMEEKHRRGELQATPSFGYTVLDNVLVPVPEEAVYVQEIFSRFVSGEGFYSIARWLNSMGVKTHRGSTFENRTVEYILRNPVYIGKLRWNPAGRSRRDYADPNIIVTDGKHEPLVSEETFQQAQTRIAQLKAAMPYKARPLGSNKDWISGLVRCASCGSTLIFAKPHYWKCNNYVRGRCRASQHISSDLLKKAILDRLHMDAAASAPLSYEVLRVNGRDGDTTAALRTQRASLERRLERLREAFLAGVDTVEEYRQLKEDAQAQIQRIDQELSAAAAENRRAGDVSIMRSAISDALAVIENEDASLEQRCNAARSIIDRITWDKAQNLLTIHYRLMLE

SEQ ID NO: 6765 - protein, 485 aa, Unknown
  Description of Unknown: Integrase B6766 sequence
  PTHR30461:SF3,IPR036162,PS51737,IPR011109,PTHR30461, PS00397,PF00239,G3DSA:1.10.10.2600,IPR006119,SSF53041, cd00338,SM00857,IPR025827,IPR038109,IPR006118, PF13408,G3DSA:3.40.50.1390,PF07508,Coil
MTLLSTLEIGAAYIRVSSDEQTELSPDAQVRVIKDAAKADGYYIPDEFIFMEERGISGRKAENRPAFQRMIAVAKSENPAPFKRLYLWKFSRFARNQEESTFYKGILRKKCGVEIKSVSEPIAEGMFGRLIETIIEWFDEYYSINLSGEVLRGMTEKALRNGYQTAPSMGYAAVGHGNPFVIDPERMKIVEQIHTLYHNGMDMTGIARELNRLGYLTQRGTAFERRTIYRILTNRFYIGTVTWNNISFHGTHELSPIVTAVFEDNQTRIKRESQTIRHRDVSSCKHWLSGLLRCGVCGSTLSYSRSNSPQKRSDAFQCWKYIKGMHPGSNSISVRKIEQAVIQSLQEVLVTGEISYEYIPPQDDETIDRKELLREAIEKVTVKERRIHDAYENGIDTLEEYKENKKRLLMERTELTEELEKLCSISPADEEAGKEELLKRIQTVCETLSNPDIDYETKGVAIRQVIKYIVYNRADSTLQFYYYLS

SEQ ID NO: 6766 - protein, 485 aa, Unknown
  Description of Unknown: Integrase B6767 sequence
  PTHR30461:SF3,IPR036162,PS51737,IPR011109,PTHR30461, PS00397,PF00239,G3DSA:1.10.10.2600,IPR006119,SSF53041, cd00338,SM00857,IPR025827,IPR038109,PS51736, IPR006118,PF13408,G3DSA:3.40.50.1390,PF07508,Coil
MKLAACYIRVSTDDQLEYSPDSQLEKIKEYCARNGYILNQDNIFVEEEGVSGRKASRRQEFQHMIARAKSKPKPFDAIIVWKFSRFARNREDSIVYKSMLKKIGIDVISVTENVGDDKMSVITEAIIEAMDEYYSLNLAEEVRRGMTERIKHGNHNSVAPFGYKIVDKELVVFPEQAEIIREVYSRYLNGWGQKQLATWLNTIGVTTNRGGKIENRTVNYWLRNPVYHGYVRWNPAERASTKRYINTPDTMIVKGHHEPIIDEETWEAVQKRCDEVRLKFSKHRRENIPKDYALSGIIKCSCCGASMSTAHKQKYLQCTKYAHGLCSTSHHVSYEMIWLMLLSTIECDLKSGNFQLERVSRPVVADDAEALNAQIERTEMKLRRIREAFEAGIDTLEEYKSGKARISAELEELRERAAQVSPTEVEITPEEKRAFAEKHLKTLAKLRNTEVGELEKNHLLKEFVKEATYRKADNSLSVIYMVVVL

SEQ ID NO: 6767 - protein, 485 aa, Unknown
  Description of Unknown: Integrase B6768 sequence
  PTHR30461:SF3,IPR036162,PS51737,IPR011109,PTHR30461, PS00397,PF00239,G3DSA:1.10.10.2600,IPR006119,SSF53041, cd00338,SM00857,IPR025827,IPR038109,PS51736, IPR006118,PF13408,G3DSA:3.40.50.1390,PF07508,Coil
MTLKNACAYIRVSTDKQEELSPDAQKRLIIDYCKKNGYTITNENIFFENGISGKKADKRPEFKRMIALAKSKEHPFDVILVWKFSRFARNQEESIVYKSMLKKANVDVVSVSEPVIDGPFGSLIERIIEWMDEYYSIRLSGEVIRGMTEKALRGGYNAQPPLGYRKNSDTSIPEIYEPEAVIVRNIFSFISQGLSLIDTARSINNMGFHTRRGGMFEQRTIRYIIENPFYYGYVRWNRQNPSEHTIKDKSEWIIAPGAHPVLINKESWDFANEQLIKISRPYKERGTSGIKHWLSGIVKCSSCGSSLVSNSLWKGHSTSFQCSGYNKCKCKVSHYIKTERLEAGIYEGFLKVLSSKNVTYEKVSEHSYEKKVDTAALLKNIEDKERRIKQTYRDGIDTLEEYKDNKAILQKEREKVMEIISKQKPVQHDENNEIMLSQIKNAYEIIKNEELDKLTRANAIRSVVSKAVYDNEKDTLDIYFRLIEK

SEQ ID NO: 6768 - protein, 485 aa, Unknown
  Description of Unknown: Integrase B6769 sequence
  PTHR30461:SF3,IPR036162,PS51737,IPR011109,PTHR30461, PS00397,PF00239,G3DSA:1.10.10.2600,IPR006119,SSF53041, cd00338,SM00857,IPR025827,IPR038109,PS51736, IPR006118,PF13408,G3DSA:3.40.50.1390,PF07508,Coil
MIKRGACYIRVSTNDQLEFSPDAQLKAIKKYAKDNDIIIDDDYVFIDEGISGRKASKRPAFQQMIKIAKSKPKKFDVILVHKFDRFARSREDSVVYKSLLRKECDIKVISITESIEDDKFSVILEAMLEAMAEYYSLNLADEVKKGMTEKAIRGQYQSSPPFGYKMENKKLVIIEDEAQVVRMIFDKFLNYDPSFLRLAKMVNALGYKTHRGGLFENRTIEYILNNPVYCGMARWTPTGKIRRNYSSSDSIVTKSEHTPIISEEVFNQCKEKLAKMKEINRKYYKGTNPQNLHWLNGLVRCKECGKTLVRSQKDYYQCSGYVKGACSTSQLIRIDKIESTILEQIKKDFDSKLKLNVKINSKSFSDNEVQIIYNQLEKLKEKESRIKEAYINGIDSIEEYKANKKDLQEQKEYLNNKLIESKNGLSTKSSDAIMKEQLRSYYEILSNPNIEVQRKYEISHLLIDRIEFSKTASTLDLQYKLYQME

SEQ ID NO: 6769 - protein, 485 aa, Unknown
  Description of Unknown: Integrase B6770 sequence
  PTHR30461:SF3,SM00857,G3DSA:1.10.10.2600,IPR036162,PF13408, PS51737,IPR025827,G3DSA:3.40.50.1390,IPR006119,IPR038109, PF07508,SSF53041,IPR011109,PTHR30461,Coil, PS51736,cd00338,PF00239
MVDEYIDRAISGKTDNRPSFQRLIKDSEKGHFDAVIMYTLDRFARNRYDSAIYKAKLKRNGVKIFYAKQPMPDTPEGIILESVLEGYAEYYSENLARSIKRGMKENALHGIAMGSPVLGYKIGNDRQYEIDPVGAKAVRTIFTMYAEGKSKTQIVNWLNEHGFKTSRGNAFNKNSLSRILRNDKYIGVYRYDDVVLEDAVPPIIDKTLFDKVQATFRHNYTARAKAKAIEDYLLTTKVFCGHCGEPMVGESGTSKTGKVHHYYKCVNRKRKHNCEKKVEKKEWLERTVVEFTVQQVLTDENIEKISTRAMELIEKELQDTSVLIGLQERLKETNKRIKNLMSAIEQGIITPTTKERLEELEEERRDLEGQIAREEMKKPLLTKERIMYWLESFKRGDIEDVEYQRRIIDTLVNSVYVYDDGDKGRKLVLTFNISGNNTLTISSSDIERTAPPEEEASNSSFTRMSLRLCIGWGTPDGVPFPFSLL

SEQ ID NO: 6770 - protein, 485 aa, Unknown
  Description of Unknown: Integrase B6771 sequence
  PTHR30461:SF3,SM00857,IPR006118,G3DSA:1.10.10.2600,IPR036162, PS51737,G3DSA:3.40.50.1390,Coil,IPR006119,IPR038109, PF07508,IPR011109,SSF53041,PTHR30461,PS00397, PS51736,cd00338,PF00239
MKIAAAYVRVSTEEQTELSPDSQVKLIREYAKKNGFIVPKEFIFHDDGISGRSTAKRQGFNQMIGTAKIKPKPFDAILLWKFSRFARNREDSIVYKSMLRKLGIDVISISENVGDDKMSVLIEAMIEAMDEYYSINLAEEVKRGMTEKFGRGLKVSGPPLGYDMKNGEFVVKEQGAEIVRRIFDMYVNQDMGYLNIARELNAEGIRTLHGNDFETRTIAYIIRNPVYIGMQRWTPGGGGSKGHYRSAVADKVVITQAHHPAIIDKEIFEKAQQKAAKTRRPYERSGSTKHEYMLRGLLKCSSCGSNLTMASVKSGTLQCYQYAHGRCKESHAITIGKIDKAVIEDIQGLVDGTATDYKLVDQSPAKPKKDTSKFETQLERERMKLERVKAAYADGIDTLEEYKRNKSEVLASIAELESKLRQAQPPKPQHTADRLPDLKVRAQEVLKVITSPNATPMEKNNALRSIVDKVIFDRKTSSIEMYYLC

SEQ ID NO: 6771 - protein, 485 aa, Unknown
  Description of Unknown: Integrase B6772 sequence
  PTHR30461:SF3,SM00857,IPR006118,G3DSA:1.10.10.2600,IPR036162, PS51737,G3DSA:3.40.50.1390,Coil,IPR006119,IPR038109, PF07508,SSF53041,IPR011109,PTHR30461,PS00397, PS51736,cd00338,PF00239
MKIAAAYVRVSTEEQTELSPDSQVKLIREYAKKNGYIVPKEFIFHDDGISGRSTAKRQGFNQMIGTAKLKPKPFDAILLWKFSRFARNREDSIVYKSMLRKLGIDVISISENVGDDKMSVLIEAMIEAMDEYYSINLAEEVKRGMTEKFGRGLKVSGPPLGYDMKNGEFVVNEQGAEVVRHIFDMYVNQDMGYLNIARELNAEGIRTLHGNDFETRTIAYIIQNPVYIGMQRWTPGGGGSKGHYRSAIADKVVITQAHHPAIIDKEIFEKAQQKAAKARRPYERSGSTKHEYMLRGLLKCSSCGSNLTMGSVKSGTLQCYQYAHGRCKESHAITIGKIDKAVIEDIQGLVDGTATDYKLVDQSPAKPKKDTSKYETQLERERMKLERVKAAYADGIDTLEEYKRNKSEVLASIAELESKLCQAQPLKPQLTADRLPDLKVRAQEVLKVITSPNATPVEKNNALRTIVDKVVFDRKTSSIEMYYLC

SEQ ID NO: 6772 - protein, 485 aa, Unknown
  Description of Unknown: Integrase B6773 sequence
  PTHR30461:SF3,SM00857,IPR006118,G3DSA:1.10.10.2600,IPR036162, PS51737,G3DSA:3.40.50.1390,Coil,IPR006119,IPR038109, PF07508,IPR011109,SSF53041,PTHR30461,PS00397, PS51736,cd00338,PF00239
MKIAAAYVRVSTEEQTELSPDSQVKLIREYAKKNGYIVPKEFIFHDDGISGRSTAKRQGFNQMIGTAKLKPKPFDAILLWKFSRFARNREDSIVYKSMLRKLGIDVISISENVGDDKMSVLIEAMIEAMDEYYSINLAEEVKRGMTEKFGRGLKVSGPPLGYDMKNGEFVVNEQGAEIIRRIFDMYVNQDMGYLNIARELNAEGIRTLHGNDFETRTIAYIIKNPVYIGMQRWTPGGGGSKGHYRSAIADKVVITQAHHPAIIDKEIFEKAQQKAAKTHRPYERSGSTKHEYMLRGLLKCSSCGSNLTMASVKSGTLQCYQYAHGRCKESHAITIGKIDKAVIEDIQGLVDGTATDYKLVDQSPVKPKKDTSKFETQLERERMKLERVKAAYADGIDTLEEYKRNKSEVLASIAELESKLRQAQPPKPQPTADRLPDLKVRAQEVLKVITSPNATPMEKNNALRSIVDKVVFDRKTSSIEMYYLC

SEQ ID NO: 6773 - protein, 485 aa, Unknown
  Description of Unknown: Integrase B6774 sequence
  PTHR30461:SF3,SM00857,G3DSA:1.10.10.2600,IPR036162,PF13408, PS51737,G3DSA:3.40.50.1390,IPR025827,IPR006119,IPR038109, PF07508,SSF53041,IPR011109,PF00239,PTHR30461, PS51736,Coil,cd00338
MGETYGVVNRNAMRVALYPRVSTLEQAKDGYSINEQTERMIKYCEAKGWVVHKIYTDAGYSGADTDRPGLQSLIKDAESNKVNAVLVYKLDRLSRSQKDTLTLIEDVFLPNNVDFISMTENLDTSTPFGRAMIGILSVFAQLEREQIKERMEVGKIGRAKEGKWCGSRYVPIGYRVENDELVVHEYEAMQIREMFRLFNMRISQRRVAEMLQSKGYRTTYDGNWNRHNIRPLLENKHYIGMVSYKGEWYEGIHKPIIDKETFEKTQAILAERDEDANSRISRINAPLAGMIRCGHCGNKFFFRRAKTKNSAKLYCNCYKRSCRAGKWKDIPKEERCKNKIWKAEELEKEVFDEVRKLALHPESFDIGSTESDENAMKIKVISKRIEEIDSQLDKLIDLYTLGTLDINVIKSRTDALLAEKEKLEVNMRSLENKEKMSKEEAVEIASSLCDVIDSGDIDEIKALVQELIKEIVVDEEDLHVYWKFA

SEQ ID NO: 6774 - protein, 485 aa, Unknown
  Description of Unknown: Integrase B6775 sequence
  IPR036162,PS51737,IPR011109,PTHR30461,PS00397, PF00239,G3DSA:1.10.10.2600,IPR006119,SSF53041,cd00338, SM00857,IPR025827,IPR038109,PS51736,IPR006118, PF13408,G3DSA:3.40.50.1390,PF07508,Coil
MTDFKTAAAYIRVSTDDQVELSPASQLVEIRKWAAANNYLVPDEFVFVDEAKTGRKVTGRDEFRRLIATAKTKPKPFDAILLWKFSRFARNRDDAVYYKSILRKQLKIDVISIKEPIDEGKMGVIMESMIEAMDEYYSINLAEDVKRGMEEKHRRGELQSPPAFGYTVVENVLTPVPEEAALVREMFRRYNAGEGCYSLARWLNAAGVRTHRGSPFENRTVEYILRNPVYIGKLRWNPTGRSHRNFDDPGIIVMDGKHEPLIGEELFHRTQRRIAQSKAAMPYHGRPLGSNKDWISGLVRCAACGGTMVFAKPHWWKCNNYVRGRCTTSQHINGDLLKDAILRRLQADSSTAADLHYEVLRITDKVGDPVAALRAQRVSTERRLERLREAFLSGIDTMEEYRQAKEETQAQLQRIDEAIYEAERENHRRGDPKLMRNAIRLALATITNENATLEQRCAAARSIIEHIDWDKAQNQLTIHYRLLLD

SEQ ID NO: 6775 - protein, 484 aa, Unknown
  Description of Unknown: Integrase B6776 sequence
  PTHR30461:SF3,IPR036162,PS51737,IPR011109,PTHR30461, PS00397,PF00239,G3DSA:1.10.10.2600,IPR006119,SSF53041, cd00338,SM00857,IPR025827,IPR038109,PS51736, IPR006118,PF13408,G3DSA:3.40.50.1390,PF07508,Coil
MKTGALYVRVSTDDQVEYSPDAQIRLGLEYAKKNNIIIPKQFIFQDDGISGRKATNRPAFQELIAMAKSDEHPIDVILVWKFSRFARNQEEAIVYKNLLKKADVDVVSVSEPIPDGFIGELVQRIFEWMDEYYSINLSGEVMRGMTERASRGGYNAAPPLGYKMQDGIPVIVPEQAEIVKKIFTWYVDDKMSFFDIAVKLNTLGYRTKRNGKFQNRTVAYIIRNEFYNGKIIWNRLEHATRNVKDKSEWIVTDGGHDTFISNELFTAAQDRDKATKRPGKKVRPASTYKHWLSGLLVCSACGGRIVRAGKSKSGNTYFQCTAYNHASCNESHLTNENALKPAILEALQKVLDSGTVEYVVHSTNQEEKSESELIENKLNRIGMKKERIKEAYRDGIDTLEEYKANKEILQREREQLTAMLEQYSKKPEDENESILLNKIRSAYDIIKSDNSTDRQKHDALTSVVEKIVYDKKGGVLLMFFYING

SEQ ID NO: 6776 - protein, 484 aa, Unknown
  Description of Unknown: Integrase B6777 sequence
  PTHR30461:SF3,IPR036162,PS51737,IPR011109,PTHR30461, PS00397,PF00239,G3DSA:1.10.10.2600,IPR006119,SSF53041, cd00338,SM00857,IPR025827,IPR038109,PS51736, IPR006118,PF13408,G3DSA:3.40.50.1390,PF07508,Coil
MKTGALYVRVSTDDQVEYSPDAQIRLGLEYAKKNNIIIPKQFIFQDDGISGRKATNRPAFQELIAMAKSDEHPIDVILVWKFSRFARNQEEAIVYKNLLKKADVDVVSVSEPIPDGFIGELVQRIFEWMDEYYSINLSGEVMRGMTERASRGGYNAAPPLGYKMQDGIPVIVPEQAEIVKKIFTWYVDDKMSFFDIAVKLNTLGYRTKRNGKFQNRTVAYIIRNEFYNGKIIWNRLEHATRNVKDKSEWIVTDGGHDTFISNELFTAAQDRDKATKRPGKKVRPASTYKHWLSGLLVCSACGGRIVRAGKSKSGNTYFQCTAYNHASCNESHLTNENALKPAILEALQKVLDSGTVEYVVHSTNQEEKSESELIENKLSRISMKEERIKEAYRDGIDTLEEYKANKEILQREREQLTAMLEQYSKKPEDENESILLNKIRSAYDIIKSDNSTDRQKHDALTSVVDKIVYDKKGGALLMYFYIND

SEQ ID NO: 6777 - protein, 484 aa, Unknown
  Description of Unknown: Integrase B6778 sequence
  PTHR30461:SF3,IPR036162,PS51737,IPR011109,PTHR30461, PS00397,PF00239,G3DSA:1.10.10.2600,IPR006119,SSF53041, SM00857,IPR025827,IPR038109,PS51736,cd03768, IPR006118,PF13408,G3DSA:3.40.50.1390,PF07508,Coil
MKKEKVIPIDSLDLVDLYIRVSTTEQALEGYSVAEQEHRLRQYCAAMGHRIHKVHIDAGFSGASLDRPGIKETIKDVQKHLVRRVIVWKLDRLSRSQKDTLIMLEDVFLENGCDFISMMESFDTSTSFGRAIVGILAAFAQLERENIKERTMMGRQARLAKGHYNGSRPPLGYSFIPGSNDLQVDPYQAAIVREIFKLFLSGISINAIARKMEEKYPTVRTWNNTMIRRTLKNPVYIGKVNDNGILRDGIHEPLISEIDFQMANAILVHNSKIKKQSCRSRSLLTGLLYCGDCGARMHPRQIARGYPLRRYVCYSVSRTSKSMIKSDHCTNRLHPYTQEELEQIIIDEIKKLAADEDYISEVIRNSSAEVPADDTELFQERIEELNRQTDKLLNLYQIGAIELDQIQERLAALKQERESLTAALKELQTKTDINMDHLKIMSYASAFQIALESGDPEYTNSIIRLLIDKIVVLNEDIEIHWTFC

SEQ ID NO: 6778 - protein, 484 aa, Unknown
  Description of Unknown: Integrase B6779 sequence
  PTHR30461:SF3,IPR036162,PS51737,IPR011109,PTHR30461, PS00397,PF00239,G3DSA:1.10.10.2600,IPR006119,SSF53041, SM00857,IPR025827,IPR038109,PS51736,cd03768, IPR006118,PF13408,G3DSA:3.40.50.1390,PF07508,Coil
MKKEKVIPIDSLDLVDLYIRVSTTEQALEGYSVAEQEHRLRQYCAAMGHRIHKVHIDAGFSGASLDRPGIKETIKDVQKHLIRRVIVWKLDRLSRSQKDTLIMLEDVFLENGCDFISMMESFDTSTSFGRAIVGILAAFAQLERENIKERTMMGRQARLAKGHYNGSRPPLGYSFIPGSNDLQVDPYQAAIVREIFKLFLSGISINAIARKMEEKYPTVRTWNNTMIRRTLKNPVYIGKVNDNGILRDGIHEPLISEIDFQMANAILVHNSKIKKQSCRSRSLLTGLLYCGDCGARMHPRRIARGYPLRRYVCYSVSRTSKSMIKSDHCTNRLHPYTQEELEQIIIDEIKKLAADEDYISEVIRNSSAEAPVDDTELFQERIEELNRQTDKLLNLYQIGAIELDQIQERLAGLKQERESLTAALKESQTKTDINMDHLKIMSYASAFQVALESGDPEYTNSIIRLLIDKIVVLNEDIEIHWTFC

SEQ ID NO: 6779 - protein, 484 aa, Unknown
  Description of Unknown: Integrase B6780 sequence
  PTHR30461:SF3,IPR036162,PS51737,IPR011109,PTHR30461, PS00397,PF00239,G3DSA:1.10.10.2600,IPR006119,SSF53041, SM00857,IPR025827,IPR038109,PS51736,cd03768, IPR006118,PF13408,G3DSA:3.40.50.1390,PF07508,Coil
MQKEKVIPIDSLDLVDLYIRVSTTEQALEGYSVAEQEHRLRQYCAAMGHRIHKVHIDAGFSGASLDRPGIKETIKDVQKHLVRRVVVWKLDRLSRSQKDTLIMLEDVFLENGCDFISMMESFDTSTSFGRAIVGILAAFAQLERENIKERTMMGRQARLAKGHYNGSRPPLGYSFIPGSNDLQVDPYQAAIVREIFKLFLSGISINAIARKMEEKYPTVRTWNNTIIRRTLKNPVYIGKVKDKDVLRDGIHEPLISEIDFQMANAILVHNSKIKKQSCRSRSLLTGLLYCGDCGARMHPRRIARGYPLRRYVCYSVSRTSKSMIKSDHCTNRLHPYTQEELEQIIIDEIKKLAADEDYISEVIRSSSAEAPADDTELFQERIEELNRQTDKLLNLYQIGAIELDQIQERLAGLKQERESLTAALKESQTKTDINMDHLKIMSYASAFQIALESGDPEYTNSIIRLLIDKIVVLNEDIEIHWTFC

SEQ ID NO: 6780 - protein, 484 aa, Unknown
  Description of Unknown: Integrase B6781 sequence
  PTHR30461:SF3,cd00338,G3DSA:1.10.10.2600,IPR036162,PF13408, PS51737,IPR025827,G3DSA:3.40.50.1390,IPR006119,IPR038109, PF07508,IPR011109,SSF53041,PTHR30461,Coil, PF00239
MINDAKNNPEFKAVLVHKTDRFSRNLSDSIQYKKILEEYGVQVIFVNERFEDNPESHLLYHIMGSVNQFYNENLAREVMKGLKENAYQCKFTGGRPPLGYDVDKDLKLVINEKEAEAVRLIFEMSAEGYGYGETIDKLNILGYKTKKGLPFVKNSLYEILRNEKYKGTYIFNRSCSANALNKRNNHRRKPEEEIIRIENGCPAIVSSGLWHRANAVKKATRSSFTNAKNTYLLTGLIHCGECGGKFHGNIRYNKNNTNLVYRCSAKKNKRKCESKEIRCEYLDSFVIDKFVEFFFNDDNIKVITKKLNEQYSKSCISDLEYNEAKSTLKILEKSRNNLVEAIAKTGINDIMSDKIKEYEEQIKKTSEFIHKYEKQKIDRVITEDEVREQINHLKDYFYNPKNIIRTKFVLSQYIDRIDISNENVQVHFKVSMSPSGNTDGDYFCVHTETIKRKYLFDYVCEKVDFEQWNIEKLNKSESEHRKGA

SEQ ID NO: 6781 - protein, 484 aa, Unknown
  Description of Unknown: Integrase B6782 sequence
  PTHR30461:SF3,IPR036162,PS51737,IPR011109,PTHR30461, PS00397,PF00239,G3DSA:1.10.10.2600,IPR006119,SSF53041, SM00857,IPR025827,IPR038109,PS51736,cd03768, IPR006118,PF13408,G3DSA:3.40.50.1390,PF07508,Coil
MKKEKVIPIDSLDLVDLYIRVSTTEQALEGYSVAEQEHRLRQYCAAMGHRIHKVHIDAGFSGASLDRPGIKETIKDVQKHLVRRVIVWKLDRLSRSQKDTLIMLEDVFLENGCDFISMMESFDTSTSFGRAIVGILAAFAQLERENIKERTMMGRQARLAKGHYNGSRPPLGYSFIPGSNDLQVDPYQAAIVREIFKLFLSGISINAIARKMEEKYPTVRTWNNTMIRRTLKNPVYIGKVNDNGILRDGIHEPLISEIDFQMANAILVHNSKIKKQSCRSRSLLTGLLYCGDCGARMHPRRIARGYPLRRYVCYSVSRTSKSMIKSDHCTNRLHPYTQEELEQIIIDEIKKLAADEDYISEVIRNSSAEAPVDDTELFQERIEELNRQTDKLLNLYQIGAIELDQIQERLAALKQERESLTAAMKESQIKTDINMDHLKIMSYASAFQVALESGDPEYTNSIIRLLIDKIVVLNEDIEIHWTFC

SEQ ID NO: 6782 - protein, 484 aa, Unknown
  Description of Unknown: Integrase B6783 sequence
  PTHR30461:SF3,IPR036162,PS51737,IPR011109,PTHR30461, PS00397,PF00239,G3DSA:1.10.10.2600,IPR006119,SSF53041, SM00857,IPR025827,IPR038109,PS51736,cd03768, IPR006118,PF13408,G3DSA:3.40.50.1390,PF07508,Coil
MKKEKVIPIDSLDLVDLYIRVSTTEQALEGYSVAEQEHRLRQYCAAMGHRIHKVHIDAGFSGASLDRPGIKETIKDVQKHLVRRVIVWKLDRLSRSQKDTLIMLEDVFLENGCDFISMMESFDTSTSFGRAIVGILAAFAQLERENIKERTMMGRQARLAKGHYNGSRPPLGYSFIPGSNDLQVDPYQAAIVREIFKLFLSGISINAIARKMEEKYPTVRTWNNTMIRRTLKNPVYIGKVNDNGILRDGIHEPLISEIDFQMANAILVHNSKIKKQSCRSRSLLTGLLYCGDCGARMHPRRIARGYPLRRYVCYSVSRTSKSMIKSDHCTNRLHPYTQEELEQIIIDEIKKLAADEDYISEVIRNSSAEAPVDDTELFQERIEELNRQTDKLLNLYQIGAIELDQIQERLAALKQERESLTAAMKESQTKTDINMDHLKIMSYASAFQVALESGDPEYTNSIIRLLIDKIVVLNEDIEIHWTFC

SEQ ID NO: 6783 - protein, 484 aa, Unknown
  Description of Unknown: Integrase B6784 sequence
  PTHR30461:SF3,SM00857,G3DSA:1.10.10.2600,IPR036162,PF13408, IPR025827,G3DSA:3.40.50.1390,PS51737,IPR006119,IPR038109, PF07508,IPR011109,SSF53041,PTHR30461,Coil, PS51736,cd00338,PF00239
MNAVIYARYSCDRQTEQSIEGQLRECKAFAASEGINIIGEYIDRAISGTTANRPEFQRMIADSRYKTFQAVIVYKLDRFARNRYDSAMYKSKLKANGVKVLSAKEHITDSPEGIILEGLLEAMNEYYSAELSQKIKRGMRENAIKGKTTGGNVALGYRIGADKQMEIDPAGASLVRRIFTGYDSGMTFTEICDDLNHAGYTTSRGKQFRIDTISRILANQRYTGTFQCAGEDAHCPPIIEPELFRSVQERLTESRHKHRHTQSPHEYVLTGKAICGTCGRRLTGRDGTSKTDKRYYYYCCPNKCCGWLPAAELEHAVLDAIAQYTTPEACEQIANATYALYQQSTHENADLTAAQRRLQETEKKLENAVNAVLNGITSAALQATMQQLEQQKAALETEVRLLQTDAPELKLEHFQYFAHRLLEVQAEGTEKILQLLVNQVIVYKEQITVLVNLTDKTKTPPLEQVTAALRESSCSIACAKERLF

SEQ ID NO: 6784 - protein, 484 aa, Unknown
  Description of Unknown: Integrase B6785 sequence
  PTHR30461:SF3,IPR036162,PS51737,IPR011109,PTHR30461, PS00397,PF00239,G3DSA:1.10.10.2600,IPR006119,SSF53041, SM00857,IPR025827,IPR038109,PS51736,cd03768, IPR006118,PF13408,G3DSA:3.40.50.1390,PF07508,Coil
MKKEKVIPIDSLDLVDLYIRVSTTEQALEGYSVAEQEHRLRQYCAAMGHRIHKVHIDAGFSGASLDRPGIKETIKDVQKHLVRRVIVWKLDRLSRSQKDTLIMLEDVFLENGCDFISMMESFDTSTSFGRAIVGILAAFAQLERENIKERTMMGRQARLAKGHYNGSRPPLGYSFIPGSNDLQVDPYQAAIVREIFKLFLSGISINAIARKMEEKYPTVRTWNNTMIRRTLKNPVYIGKVNDNGILRDGIHEPLISEIDFQMANAILVHNSKIKKQSCRSRSLLTGLLYCGDCGARMHPRRIARGYPLRRYVCYSVSRTSKSMIKSDHCTNRLHPYTQEELEQIIIDEIKKLAADEDYISEVIRNSSAEAPADDTELFQERIEELNRQTDKLLNLYQIGAIELDQIQERLAALKQERESLTAALKELQTKTDINMDHLKIMSYASAFQIALESGDPEYTNSIIRLLIDKIVVLNEDIEIHWTFC

SEQ ID NO: 6785 - protein, 484 aa, Unknown
  Description of Unknown: Integrase B6786 sequence
  PTHR30461:SF3,IPR036162,PS51737,IPR011109,PTHR30461, PS00397,PF00239,G3DSA:1.10.10.2600,IPR006119,SSF53041, cd00338,SM00857,IPR025827,IPR038109,PS51736, IPR006118,PF13408,G3DSA:3.40.50.1390,PF07508,Coil
MKTGALYVRVSTDDQVEYSPDAQIRLGLEYAKKNNIIIPKQFIFQDDGISGRKATNRPAFQELIAMAKSDEHPIDVILVWKFSRFARNQEEAIVYKNLLKKADVDVVSVSEPIPDGFIGELVQRIFEWMDEYYSINLSGEVMRGMTERASRGGYNAAPPLGYKMQDGIPVIVPEQAEIVKKIFTWYVDDKMSFFDIAVKLNTLGYRTKRNGKFQNRTVAYIIRNEFYNGKIIWNRLEHATRNVKDKSEWIVTDGGHDTFISNELFTAAQDRDKATKRPGKKVRPASTYKHWLSGLLVCSACGGRIVRAGKSKSGNTYFQCTAYNHASCNESHLTNENALKPAILEALQKVLDSGTVEYVVHSTNQEEKSESELIENKLNRIGMKEERIKEAYRDGIDTLEEYKANKEILQREREQLTAMLEQYSKKPEDENESILLNKIRSAYDIIKSDNSTDRQKHDALTSVVDKIVYDKKGGALLMFFYING

SEQ ID NO: 6786 - protein, 484 aa, Unknown
  Description of Unknown: Integrase B6787 sequence
  PTHR30461:SF3,IPR036162,PS51737,IPR011109,PTHR30461, PS00397,PF00239,G3DSA:1.10.10.2600,IPR006119,SSF53041, cd00338,SM00857,IPR025827,IPR038109,PS51736, IPR006118,PF13408,G3DSA:3.40.50.1390,PF07508,Coil
MKTGALYVRVSTDDQVEYSPDAQIRLGLEYAKKNNIIIPKQFIFQDDGISGRKANNRPAFQELIAMAKSDEHPIDVILVWKFSRFARNQEEAIVYKNLLKKADVDVVSVSEPIPDGFIGELVQRIFEWMDEYYSINLSGEVMRGMTERASRGGYNAAPPLGYKMQDGIPVIVPEQAEIVKKIFTWYVDDKMSFFDIAVKLNTLGYRTKRNGKFQNRTVAYIIRNEFYNGKIIWNRLEHATRNVKDKSEWIVTDGGHDTFISNELFTAAQDRDKVTKRPGKKVRPASTYKHWLSGLLVCSACGGRLVRAGKSKSGNTYFQCTAYNHASCNESHLTNENALKPAILEALQKVLDSGTVEYVVHSTNQEEKSESELIENKLNRIGMKEERIKEAYRDGIDTLEEYKANKEILQREREQLTAMLEQYSKKPEDENESILLNKIRSAYDIIKSDNSTDRQKHDALTSVVDKIVYDKKGGALLMYFYIND

SEQ ID NO: 6787 - protein, 484 aa, Unknown
  Description of Unknown: Integrase B6788 sequence
  SM00857,G3DSA:1.10.10.2600,IPR036162,PS51737,G3DSA:3.40.50.1390, IPR006119,IPR038109,PF07508,IPR011109,SSF53041, PTHR30461,Coil,PS51736,cd00338,PF00239
MKSSSVALYLRKSREEETETREATLARHERMLTDYCRNNGLKIVKTFKEVVSGESLDSRPQARAMLAEVADGHFDGVAVIELERLSRGNQIDQVEILETFKKSNTKIYTLNKVYDLAGDNEFDEEFFEFGLFMSRREYKIIKRRLIRGKKQAQKEGYYIGSSLPYGFGKVRGDKGYILTPNDETPIVQLIFQKFVYDDFSLADLRHYLDNNGIKPHRATAWSSAVLKKILKNKCYIGYINYNSRSTRTQECYKGKHDAVIDDETFERAQAKLAQSSHKLKKGTELKNPLASLVKCSECGSTLQRCNEYMRCLTPNCPTVLSYFDDVEKRLIDEITTELKGFKYYIANYGEEIERQRITRDKELAILQKEIDKRNGMLNKACEMLEIGVYSNERYIERVNILESEIKAITGQMTALSAISTDESEKAKKAIPILEKCLSAYWSLSAQDKNDMLKCIIDRVEYSKLQRSNRWHKVDSLELKIFLKL

SEQ ID NO: 6788 - protein, 484 aa, Unknown
  Description of Unknown: Integrase B6789 sequence
  IPR036162,PS51737,IPR011109,PTHR30461, PS00397,PF00239,G3DSA:1.10.10.2600,IPR006119, SSF53041,cd00338,SM00857,IPR025827,IPR038109,PS51736 ,IPR006118,PF13408,G3DSA:3.40.50.1390,PF07508,Coil
MDNTMRYGALYIRVSTDKQEELSPDAQKRLLLDYAKAHNIFISPEYIFVENGISGRKADKRPEFQKMISIAKTDEPPFSVILVWKFSRFARNQEESIVYKSMLKKQHGVDVVSITEPLIDGPFGGLIERIIEWMDEYYSINLSQEVKRGMTEKAMRGGYQATPSLGYASPAPGQPFVVVPSEAEIVKYVFDQYANHHKDPTSIARKLNEKKLLTKRGNRFEKRNINIILRNRFYIGKVVWNGIERDGVHETFINKELFQAANDRLDATYRPKNRRELGGCVHWLSGLVKCSICGASLAYNRSSKYPYFCCWKYAKGMHEGANTINEHQLEDGVLEYFEQLLDGADFSFSYRAPKSMSDLPDEKAVFEKELEKIDQRKIRIREAYEAGIDSLEEYRENRRRLEEEAARIIDLIRESEVKKVDSDPGRHKAEMLEKIRTVYDIVKSDSIDYETKGNFMRSIVEKIVWDRKSNTLTFYLYCSDSREG

SEQ ID NO: 6789 - protein, 484 aa, Unknown
  Description of Unknown: Integrase B6790 sequence
  IPR036162,PS51737,IPR011109,PTHR30461,PS00397, PF00239,G3DSA:1.10.10.2600,IPR006119,SSF53041,cd00338, SM00857,IPR025827,IPR038109,PS51736,IPR006118, PF13408,G3DSA:3.40.50.1390,PF07508,Coil
MAQNLRIGAAYIRVSTDDQAELSPDAQLRVILEDAKKDGFIIPPEYIFEEKKGISGRKAGNRPEFQKMIAVAKSQSPAPFERLYLWKFSRFARNQEESTFYKGVLRKKCGVEIKSVSEPIADGMFGRLIESIIEWFDEYYSYNLSGEVLRGMTEKALRNGYQVVPSLGYKAVGDGKPFVIDEEKYPIVEYIFQAYVSGLDMTGIARKCNERGWTSKRGTPFERRTVSRILHNKFYAGTVEWNGYSFQGTHEVRPSVTDCFESAQERLNQEYRPANRRDVSSCKHWLSGLLHCSICGASLSFNRAGRVKKRGDTFVCWKYAKGVHKGPASISANKAEAAVMASLHSVIESGTVEFEHIRKQPSEGTDEISILDAALARVAVKESRIRDAYESGIDTLEEYKDNKLRIANERQELLAEIERLKGIAASTPDNVPSEEEVLARIKDVYSLLSDPDVSYDVKGSAVRSIISDIVVDQAQKEIHFHYYA

SEQ ID NO: 6790 - protein, 484 aa, Unknown
  Description of Unknown: Integrase B6791 sequence
  IPR036162,PS51737,IPR011109,PTHR30461,PS00397, PF00239,G3DSA:1.10.10.2600,IPR006119,SSF53041,cd00338, SM00857,IPR025827,IPR038109,PS51736,IPR006118, PF13408,G3DSA:3.40.50.1390,PF07508,Coil
MAQNLRIGAAYIRVSTDDQAELSPDAQLRVILDEAKKDGFIIPPEYIFEEKKGISGRKAGNRPQFQKMIAVAKSQNPAPFERLYLWKFSRFARNQEESTFYKGILRKKCGVEIKSISEPIADGMFGRLIETIIEWFDEYYSYNLSGEVLRGMTEKALRNGYQMVPSLGYKAVGDGKPFVIDEDRYPIVEYIFQAYDSGMDMTGIARKCNERGWTGRRGTSFDRRAISRILHNKFYIGTVTWNGYSFQGTHETRPSVTDHFSAVQERMEREYHPQNRRETSSCKHWLSGLLHCSICGASLSLNRAGKRKSRGDTFVCWKYTKGMHNGPASISSRKAESAVLASLHSVIEAGTVEFEHIRKQPSEGTDEISILDAALARVAVKESRIRDAYESGIDTLEEYKDNKLRIANERQELLAEIERLKGIAASTPDDVPSEEEVLNRIKDVYGLLSDPDVSYDVKGAAVRSIISDIVVDQAQKEIHFHYYA

SEQ ID NO: 6791 - protein, 484 aa, Unknown
  Description of Unknown: Integrase B6792 sequence
  PTHR30461:SF3,IPR036162,PS51737,IPR011109,PTHR30461, PS00397,PF00239,G3DSA:1.10.10.2600,IPR006119,SSF53041, cd00338,SM00857,IPR025827,IPR038109,PS51736, IPR006118,PF13408,G3DSA:3.40.50.1390,PF07508,Coil
MKTGALYVRVSTDDQVEYSPDAQIRLGLEYAKKNNIIIPKQFIFQDDGISGRKATNRPAFQELIAMAKSDEHPIDVILVWKFSRFARNQEEAIVYKNLLKKADVDVVSVSEPIPDGFIGELVQRIFEWMDEYYSINLSGEVMRGMTERASRGGYNAAPPLGYKMQDGIPVIVPEQAEIVKKIFTWYVDDKMSFFDIAVKLNTLGYRTKRNGKFQNRTVAYIIRNEFYNGKIIWNRLEHATRNVKDKSEWIVTDGGHDTFISNELFTAAQDRDKVTKRPGKKVRPASTYKHWLSGLLVCSACGGRLVRAGKSKSGNTYFQCTAYNHASCNESHLTNENALKPAILEALQKVLDSGTVEYVVHSTNQEEKSESELIENKLNRIGMKEERIKEAYRDGIDTLEEYKANKEILQREREQLTAMLEQYSKKPEDENESILLNKIRSAYDIIKSDNSTDRQKHDALTSVVDKIVYDKKGGALLMYFYIND

SEQ ID NO: 6792 - protein, 484 aa, Unknown
  Description of Unknown: Integrase B6793 sequence
  cd00338,SM00857,IPR006118,G3DSA:1.10.10.2600,IPR036162, PF13408,PS51737,IPR025827,G3DSA:3.40.50.1390,IPR006119, IPR038109,PF07508,SSF53041,IPR011109,PTHR30461, PS00397,Coil,PF00239
MAQNLRIGAAYIRVSTDDQAELSPDAQLRVIMDEAKKDGFLIPSEYIFEEKRGISGRKADNRPEFQRMISIAKSQVPAPFERLYLWKFSRFARNQEESTFYKGILRKKCGVEIKSISEPIADGMFGRLIETIIEWFDEYYSYNLSGEVLRGMTEKALRNGYQAVPSLGYKAVGGGKPFVIDEERYPMVEYIFQAYHDGLDMTKIARNCNDRGWKTRRNSPFERRTILRILQNKFYVGIVEWNGYSFTGTHETRPSVTDYFEEAQERIKREYRPANRREISTCKHWLSGLLRCSVCGASLSFTRSENLKKRGDTFMCWKYAKGLHKGSTSISAKKAEAALMDSLKTIIGSRTLKFEHIKKENSETSNELSILDSALSRVAQKESRIRDAYEAGVDTLEEYKENKRRLENEQQDLLAEINRLKELTAASQDDVPSAEEVLNRVEEVYALLSDPNVSYEIKGTAVRSILSEIVVDRQNREIHFHYYA

SEQ ID NO: 6793 - protein, 484 aa, Unknown
  Description of Unknown: Integrase B6794 sequence
  PTHR30461:SF3,IPR036162,PS51737,IPR011109,PTHR30461, PS00397,PF00239,G3DSA:1.10.10.2600,IPR006119,SSF53041, SM00857,IPR025827,IPR038109,PS51736,cd03768, IPR006118,PF13408,G3DSA:3.40.50.1390,PF07508,Coil
MKNKRKEILPGLSDMVDLYIRVSTTEQAMEGYSVAEQEKRLRQYSEAMGYRIYRVHIDAGYSGASLDRPAIREVIRDVKAGMVGKVIVWKLDRLSRSQKDVLIMLEDVFLANGCDFISMMESFDTTTAFGRAIVGILAAFSQLERENIKERTTMGKQARLAQGHYNGCRPPLGYEFLPGCNDLRVVPYEAAIVREIFSLFLSGTTAHAIAGKMAQKYPTLRTWEYNTVRRILQNYTYAGKVQDVDVVRDGIHESIISEADFSTAQTILQRNKEQRKQGRVSFGLLTGLIYCGDCGARMQIRRVSKTPNTRRKYICYSVSRVAKNMIRSDHCTNRKHPYSQEDLEGIVINEIKKLSFDSKYLDSLLHAEPETKTDTSDLYLDRLAEIEKQTDKLLNLYQIGVVEFPQIEERLSDLRKERDALKASMESQTPAAPPMESSQILDYIESFQEALDSGDKESVRNIIQLLIDKIVVLNENVEIHWTFC

SEQ ID NO: 6794 - protein, 484 aa, Unknown
  Description of Unknown: Integrase B6795 sequence
  PTHR30461:SF3,IPR036162,PS51737,IPR011109,PTHR30461, PS00397,PF00239,G3DSA:1.10.10.2600,IPR006119,SSF53041, cd00338,SM00857,IPR025827,IPR038109,PS51736, IPR006118,PF13408,G3DSA:3.40.50.1390,PF07508,Coil
MKTGALYVRVSTDDQVEYSPDAQIRLGLEYAKKNNIIIPKQFIFQDDGISGRKATNRPAFQELIAMAKSDEHPIDVILVWKFSRFARNQEEAIVYKNLLKKADVDVVSVSEPIPDGFIGELVQRIFEWMDEYYSINLSGEVMRGMTERASRGGYNAAPPLGYKMQDGIPVIVPEQAEIVKKIFTWYVDDKMSFFDIAVKLNTLGYRTKRNGKFQNRTVAYIIRNEFYNGKIIWNKLEHSTRNVKDKSEWIITDGEHKTFISDELFRAAQERDQATIRPGRKSRPASTYKHWLSGILVCSACGGRLVRAGKSKSGNTYFQCTAYNHASCNESHLTNENALKPAILEALQKVLDSGTVEYVVHSTNQEEKSESELIENKLNRIGMKEERIKEAYRDGIDTLEEYKANKEILQREREQLTAMLEQYSKKPEDENESILLNKIRSAYDIIKSDNSTDRQKHDALTSVVDKIVYDKKGGALLMYFYIND

SEQ ID NO: 6795 - protein, 484 aa, Unknown
  Description of Unknown: Integrase B6796 sequence
  cd03768,PTHR30461:SF3,SM00857,G3DSA:1.10.10.2600,IPR036162, PS51737,G3DSA:3.40.50.1390,IPR006119,IPR038109,PF07508, IPR011109,SSF53041,PTHR30461,PS51736,Coil, PF00239
MRVAIYSRKSKLTDKGESIENQIKIIKSYFHNNKDVEFEVFEEEGFSGKNTKRPAFTRMMKKVDLNYFDIVAVYRLDRIARNVIDFAKIYEKFESKDVKFLSVTEQFDTSTPMGRMMMYIIATFAEIERDNLISRVIDNKKELAKLGQWSGGTPPVGYKAIKKICNGKKVPYLELDKDMMHIPKLAFKWCLEGYSLEGISKKFLIDLHYKLARQNISRLLSNPVYVCNDEIIRDYYKSMNINVYNEIDGKSLIRNIFQDETIIASSKHEPIISSENFIKVQILLKDKAIDPKPRISSKTFLAQRVKCGYCNTSYRIDVAHSKDIVRKQCKCGRNIEVKNMEQLVLEYLQSVVDGDIKIKEYDNTDLITSKKTLEKNIEKNKAILNGLLEKVALAETSIAEIMLKKASSIQSEIRELEIFIKDIEFKIEESYKNNNIKTVRNLWINFNNCTSIAEKQRIFKMMVDSILWYPEPGSRKNGVIKIKF

SEQ ID NO: 6796 - protein, 484 aa, Unknown
  Description of Unknown: Integrase B6797 sequence
  IPR036162,PS51737,IPR011109,PTHR30461,PS00397, PF00239,G3DSA:1.10.10.2600,IPR006119,SSF53041,cd00338, SM00857,IPR025827,IPR038109,PS51736,IPR006118, PF13408,G3DSA:3.40.50.1390,PF07508,Coil
MSNNTPSSLPDLRTGALYIRVSTHEQDDLSPDAQTRLGLDYAKSNNIIVPKDYIFVESVSGRKAKNRHEFQRMIGLAKSPEHPIDAIIVWKFSRFARNQEESIVYKSMLKKDNVDVISISEPLVDGPFGSLIERIIEWMDEYYSIRLSGEVLRGMNEKALRNGYQLSPPLGYSAVGGGNPYIINEDEYKMVSYIFEQYDVYDKDWTAIARSMNQKGWKTKRGSAFDIRSVERVLKNPFYYGLVVWNDTSFMGTHEVRLTKEQYDKRIEKMQKRYRPIKRRNPSTCLHWLSGVLKCGHCGAGLVYNSANRCPNFQCWRYAKGLHKGSHCISEKRVVAAVYEYFEQILDGNPFTYTYRAPIQPETDDARKSLLDELEKLKIKEQRIKLAYENEIDTLEEYKENKLRLKAAREKIESELEEIAAEEAQNKPTGPTKEEALAKVKTVYDIISNPDVDYTTKGNVLRSLVESITYYKEDEKLEFVFYIS

SEQ ID NO: 6797 - protein, 484 aa, Unknown
  Description of Unknown: Integrase B6798 sequence
  IPR036162,PS51737,IPR011109,PTHR30461,PS00397, PF00239,G3DSA:1.10.10.2600,IPR006119,SSF53041,cd00338, SM00857,IPR025827,IPR038109,PS51736,IPR006118, PF13408,G3DSA:3.40.50.1390,PF07508,Coil
MAQNLRIGAAYIRVSTDDQAELSPDAQLRVILDEAKKDGFIIPPEYIFEEKKGISGRKAGNRPEFQKMIAVAKSQSPAPFERLYLWKFSRFARNQEESTFYKGVLRKKCGVEIKSVSEPIADGMFGRLIESIIEWFDEYYSYNLSGEVLRGMTEKALRNGYQMVPSLGYKAVGDGKPFVIDEEKYPIVEYIFQAYVSGLDMTGIARKCNERGWTSKRGTPFERRTVSRILHNKFYAGTVEWNGYSFQGTHEVRPSVTDCFESAQERLNQEYRPANRRDVSSCKHWLSGLLHCSICGASLSFNRAGRVKKRGDTFVCWKYAKGVHKGPASISANKAEAAVMASLHSVIESGTVEFEHIRKQPSEGTDEISILDAALARVAVKESRIRDAYESGIDTLEEYKDNKLRIANERQELLAEIERLKGIAASAPNDVPSEEEVLNRIKDVYSLLSDPDVSYDVKGAAVRSIISDIVVDQTQKEIHFHYYA

SEQ ID NO: 6798 - protein, 484 aa, Unknown
  Description of Unknown: Integrase B6799 sequence
  PTHR30461:SF3,IPR036162,PS51737,IPR011109,PTHR30461, PS00397,PF00239,G3DSA:1.10.10.2600,IPR006119,SSF53041, cd00338,SM00857,IPR025827,IPR038109,PS51736, IPR006118,PF13408,G3DSA:3.40.50.1390,PF07508,Coil
MKTGALYVRVSTDDQVEYSPDAQIRLGLEYAKKNNIIIPKQFIFQDDGISGRKATNRPAFQELIAMAKSDEHPIDVILVWKFSRFARNQEEAIVYKNLLKKADVDVVSVSEPIPDGFIGELVQRIFEWMDEYYSINLSGEVMRGMTERASRGGYNAAPPLGYKMQDGIPVIVPDQAEIVKKIFTWYVDDKMSFFDIAVKLNTLGYRTKRNGKFQNRTVAYIIRNEFYNGKIIWNRLEHATRNVKDKSEWIVTDGGHDTFISNELFTAAQDRDKATKRPGKKVRPASTYKHWLSGLLVCSACGGRIVRAGKSKSGNTYFQCTAYNHASCNESHLTNENALKPAILEALQKVLDSGTVEYVVHSTNQEEKSESELIENKLNRIGMKEERIKEAYRDGIDTLEEYKANKEILQREREQLTAMLEQYSKKPEDENESILLNKIRSAYDIIKSDNSTDRQKHDALTSVVDKIVYDKKGGALLMYFYIND

SEQ ID NO: 6799 - protein, 484 aa, Unknown
  Description of Unknown: Integrase B6800 sequence
  PTHR30461:SF3,IPR036162,PS51737,IPR011109,PTHR30461, PS00397,PF00239,G3DSA:1.10.10.2600,IPR006119,SSF53041, cd00338,SM00857,IPR025827,IPR038109,PS51736, IPR006118,PF13408,G3DSA:3.40.50.1390,PF07508,Coil
MKTGALYVRVSTDDQVEYSPDAQIRLGLEYAKKNNIIIPKQFIFQDDGISGRKATNRPAFQELIAMAKSDEHPIDVILVWKFSRFARNQEEAIVYKNLLKKADVDVVSVSEPIPDGFIGELVQRIFEWMDEYYSINLSGEVMRGMTERASRGGYNSDPPLGYAMQNGIPVIVPEQAAIVEKIFSWYVNDKMAFFDIAKRLNALGYKTKRGGKFQNRTVAYIIRNEFYNGKIIWNKLEHSTRNVKDKSEWIIADGEHDTFISDELFRAAQERDQATIRPGRKSRPASTYKHWLSGILVCSACGGRLVRCGQSKSGNTYFQCTAYNHASCNESHLTNENALKPAILKALQDVLDSGTVEYVVHSTNQEEKSESELIENKLNRIGMKEERIKEAYRDGIDTLEEYKANKEILQREREQLTAMLEQYSKKPADENESILLNKIRSAYDIIKSDNSTDRQKHDALTSVVEKIVYDKKGGVLLMFFYING

SEQ ID NO: 6800 - protein, 484 aa, Unknown
  Description of Unknown: Integrase B6801 sequence
  PTHR30461:SF3,IPR036162,PS51737,IPR011109,PTHR30461, PS00397,PF00239,G3DSA:1.10.10.2600,IPR006119,SSF53041, cd00338,SM00857,IPR025827,IPR038109,PS51736, IPR006118,PF13408,G3DSA:3.40.50.1390,PF07508,Coil
MKTGALYVRVSTDDQVEYSPDAQIRLGLEYAKKNNIIIPKQFIFQDDGISGRKATNRPAFQELIAMAKSDEHPIDVILVWKFSRFARNQEEAIVYKNLLKKADVDVVSVSEPIPDGFIGELVQRIFEWMDEYYSINLSGEVMRGMTERASRGGYNAAPPLGYKMQDGIPVIVPEQAEIVKKIFTWYVDDKMSFFDIAVKLNTLGYRTKRNGKFQNRTVAYIIRNEFYNGKIIWNRLEHATRNVKDKSEWIVTDGGHDTFISNELFTAAQDRDKATKRPGKKVRPASTYKHWLSGLLVCSACGGRIVRAGKSKSGNTYFQCTAYNHASCNESHLTNENALKPAILEALQKVLDSGTVEYVVHSTNQEEKSESELIENKLNRIGMKEERIKEAYRDGIDTLEEYKANKEILQREREQLTAMLEQYSKKPEDENESILLNKIRSAYDIIKSDNSTDRQKHDALTSVVEKIVYDKKGGALLMFFYIND

SEQ ID NO: 6801 - protein, 484 aa, Unknown
  Description of Unknown: Integrase B6802 sequence
  PTHR30461:SF3,IPR036162,PS51737,IPR011109,PTHR30461, PS00397,PF00239,G3DSA:1.10.10.2600,IPR006119,SSF53041, cd00338,SM00857,IPR025827,IPR038109,PS51736, IPR006118,PF13408,G3DSA:3.40.50.1390,PF07508,Coil
MKTGALYVRVSTDDQVEYSPDAQIRLGLEYAKKNNIIIPKQFIFQDDGISGRKATNRPAFQELIAMAKSDEHPIDVILVWKFSRFARNQEEAIVYKNLLKKADVDVVSVSEPIPDGFIGELVQRIFEWMDEYYSINLSGEVMRGMTERASRGGYNAAPPLGYKMQDGIPVIVPEQAEIVKKIFTWYVDDKMSFFDIAVKLNTLGYRTKRNGKFQNRTVAYIIRNEFYNGKIIWNRLEHATRNVKDKSEWIVTDGGHDTFISNELFTAAQDRDKATKRPGKKVRPASTYKHWLSGLLVCSACGGRIVRAGKSKSGNTYFQCTAYNHASCNESHLTNENALKPAILEALQKVLDSGTVEYVVHSTNQEEKSESELIENKLNRIGMKEERIKEAYRDGIDTLEEYKANKEILQREREQLTAMLEQYSKKPEDENESILLNKIRSAYDIIKSDNSTDRQKHDALTSVVDKIVYDKKGGALLMYFYIND

SEQ ID NO: 6802 - protein, 484 aa, Unknown
  Description of Unknown: Integrase B6803 sequence
  IPR036162,PS51737,IPR011109,PTHR30461,PS00397, PF00239,G3DSA:1.10.10.2600,IPR006119,SSF53041,cd00338, SM00857,IPR025827,IPR038109,PS51736,IPR006118, PF13408,G3DSA:3.40.50.1390,PF07508,Coil
MAQNLRIGAAYIRVSTDDQAELSPDAQLRVILDEAKKDGFIIPPEYIFEEKKGISGRKAGNRPEFQKMIAVAKSQSPAPFERLYLWKFSRFARNQEESTFYKGVLRKKCGVEIKSVSEPIADGMFGRLIESIIEWFDEYYSYNLSGEVLRGMTEKALRNGYQMVPSLGYKAVGDGKPFVIDEEKYPIVEYIFQAYVSGLDMTGIARKCNERGWTSKRGTPFERRTVSRILHNKFYAGTVEWNGYSFQGTHEVRPSVTDCFESAQERLNQEYRPANRRDVSSCKHWLSGLLHCSICGASLSFNRAGRVKKRGDTFVCWKYAKGVHKGPASISANKAEAAVMASLHSVIESGTVEFEHIRKQPSEGTDEISILDAALARVAVKESRIRDAYESGIDTLEEYKDNKLRIANERQELLAEIERLKGIAASAPDDVPSEEEVLNRIKDVYSLLSDPDVSYDVKGAAVRSIISDIVVDQTQKEIHFHYYA

SEQ ID NO: 6803 - protein, 484 aa, Unknown
  Description of Unknown: Integrase B6804 sequence
  IPR036162,PS51737,IPR011109,PTHR30461,PS00397, PF00239,G3DSA:1.10.10.2600,IPR006119,SSF53041,cd00338, SM00857,IPR025827,IPR038109,PS51736,IPR006118, PF13408,G3DSA:3.40.50.1390,PF07508,Coil
MAQNLRIGAAYIRVSTDDQAELSPDAQLRVILDEAKKDGFIIPPEYIFEEKKGISGRKAGNRPQFQKMIAVAKSQNPAPFERLYLWKFSRFARNQEESTFYKGILRKKCGVEIKSISEPIADGMFGRLIETIIEWFDEYYSYNLSGEVLRGMTEKALRNGYQMVPSLGYKAVGDGKPFVIDEDRYPIVEYIFQAYDSGMDMTGIARKCNERGWTGRRGTSFDRRAISRILHNKFYIGTVTWNGYSFQGTHETRPSVTDHFSAVQERMEREYHPQNRRETSSCKHWLSGLLHCSICGASLSLNRAGKRKSRGDTFVCWKYTKGMHNGPASISSRKAESAVLASLHSVIEAGTVEFEHIRKQPSDGTDEISILDAALARVAVKESRIREAYESGIDTLEEYRDNKLRIANERQELLAEIERLKGLAASTPDDVPSEEEVLNRIKDVYSLLSDPDVSYDVKGAAVRSIISDIVVDQTKKEIHFHYYA

SEQ ID NO: 6804 - protein, 484 aa, Unknown
  Description of Unknown: Integrase B6805 sequence
  PTHR30461:SF3,IPR036162,PS51737,IPR011109,PTHR30461, PS00397,PF00239,G3DSA:1.10.10.2600,IPR006119,SSF53041, cd00338,SM00857,IPR025827,IPR038109,PS51736, IPR006118,PF13408,G3DSA:3.40.50.1390,PF07508,Coil
MKTGALYVRVSTDDQVEYSPDAQIRLGLEYAKKNNIIIPKQFIFQDDGISGRKATNRPAFQELIAMAKSDEHPIDVILVWKFSRFARNQEEAIVYKNLLKKADVDVVSVSEPIPDGFIGELVQRIFEWMDEYYSINLSGEVMRGMTERASRGGYNAAPPLGYKMQDGIPVIVPEQAEIVKKIFTWYVDDKMSFFDIAVKLNTLGYRTKRNGKFQNRTVAYIIRNEFYNGKIIWNRLEHATRNVKDKSEWIVTDGGHDTFISNELFTAAQERDQATIRPGRKSRPASTYKHWLSGILVCSACGGRLVRCGQSKSGNTYFQCTAYNHASCNESHLTNENALKPAILKALQDVLDSGTVEYVVHSTNQEEKSESELIQNKLNRIGMKEERIKEAYRDGIDTLEEYKANKEILQREREELTAMLEQYSKEPADENESILLNKIRSAYDIIKSDNSTDRQKHDALTSVVEKIVYDKKGGVLLMFFYING

SEQ ID NO: 6805 - protein, 484 aa, Unknown
  Description of Unknown: Integrase B6806 sequence
  PTHR30461:SF3,IPR036162,PS51737,IPR011109,PTHR30461, PS00397,PF00239,G3DSA:1.10.10.2600,IPR006119,SSF53041, SM00857,IPR025827,IPR038109,PS51736,cd03768, IPR006118,PF13408,G3DSA:3.40.50.1390,PF07508,Coil
MKKEKVIPIDSLDLVDLYIRVSTTEQALEGYSVAEQEHRLRQYCAAMGHRIHKVHIDAGFSGASLDRPGIKETIKDVQKHLVRRVIVWKLDRLSRSQKDTLIMLEDVFLENGCDFISMMESFDTSTSFGRAIVGILAAFAQLERENIKERTMMGRQARLAKGHYNGSRPPLGYSFIPGSNDLQVDPYQAAIVREIFKLFLSGISINAIARKMEEKYPTVRTWNNTMIRRTLKNPVYIGKVNDNGILRDGIHEPLISEIDFQMANAILVHNSKIKKQSCRSRSLLTGLLYCGDCGARMHPRRIARGYPLRRYVCYSVSRTSKSMIKSDHCTNRLHPYTQEELEQIIIDEIKKLAADEDYISEVIRNSSAEVPADDTELFQERIEELNRQTDKLLNLYQIGAIELDQIQERLAALKQERESLTAALKELQTKTDINMDHLKIMSYASAFQIALESGDPEYTNSIIRLLIDKIVVLNEDIEIHWTFC

SEQ ID NO: 6806 - protein, 484 aa, Unknown
  Description of Unknown: Integrase B6807 sequence
  cd00338,SM00857,IPR006118,G3DSA:1.10.10.2600,IPR036162, PF13408,PS51737,IPR025827,G3DSA:3.40.50.1390,IPR006119, IPR038109,PF07508,SSF53041,IPR011109,PTHR30461, PS00397,Coil,PF00239
MAQNLRIGAAYIRVSTDDQAELSPDAQLRVILDEAKKDGFIIPPEYIFEEKKGISGRKAGNRPEFQRMIAVAKSQSPAPFERLYLWKFSRFARNQEESTFYKGVLRKKCGVEIKSVSEPIADGMFGRLIESIIEWFDEYYSYNLSGEVLRGMTEKALRNGYQVVPSLGYKAVGDGKPFVIDEEKYPIVEYIFQAYVSGLDMTGIARKCNERGWTSKRGTPFERRTVSRILHNKFYAGTVEWNGYSFQGTHEVRPSVTDCFESAQERLNQEYRPANRRDVSSCKHWLSGLLHCSICGASLSFNRAGRVKKRGDTFVCWKYAKGVHKGPASISANKAEAAVMASLHSVIESGTVEFEHIRKQPSEGTDEISILDAALARVAVKESRIRDAYESGIDTLEEYKDNKLRLANERQELLAEIERLKGIAASTPDDVPSEEEVLNRIKDVYSLLSDPDVSYDVKGAAVRSIISDIVVDQTKKEIHFHYYA

SEQ ID NO: 6807 - protein, 484 aa, Unknown
  Description of Unknown: Integrase B6808 sequence
  PTHR30461:SF3,IPR036162,PS51737,IPR011109,PTHR30461, PS00397,PF00239,G3DSA:1.10.10.2600,IPR006119,SSF53041, cd00338,SM00857,IPR025827,IPR038109,PS51736, IPR006118,PF13408,G3DSA:3.40.50.1390,PF07508,Coil
MKTGALYVRVSTDDQVEYSPDAQIRLGLEYAKKNNIIIPKQFIFQDDGISGRKATNRPAFQELIAMAKSDEHPIDVILVWKFSRFARNQEEAIVYKNLLKKADVDVVSVSEPIPDGFIGELVQRIFEWMDEYYSINLSGEVMRGMTERASRGGYNAAPPLGYKMQDGIPVIVPEQAEIVKKIFTWYVDDKMSFFDIAVKLNTLGYRTKRNGKFQNRTVAYIIRNEFYNGKIIWNRLEHATRNAKDKSEWIVTDGGHDTFISNELFTAAQDRDKATIRPGRKSRPASTYKHWLSGILVCSACGGRLVRCGQSKSGNTYFQCTAYNHASCNESHLTNENALKPAILEALQKVLDSGTVEYVVHSTNQEEKSESELIENKLNRIGMKEERIKEAYRDGIDTLEEYKANKEILQMEREQLTAMLEQYSKKPEDENESILLNKIRSAYDIIKSDNSTDRQKHDALTSVVDKIVYDKKGGALLMYFYIND

SEQ ID NO: 6808 - protein, 484 aa, Unknown
  Description of Unknown: Integrase B6809 sequence
  PTHR30461:SF3,IPR036162,PS51737,IPR011109,PTHR30461, PS00397,PF00239,G3DSA:1.10.10.2600,IPR006119,SSF53041, cd00338,SM00857,IPR025827,IPR038109,PS51736, IPR006118,PF13408,G3DSA:3.40.50.1390,PF07508,Coil
MKTGALYVRVSTDDQVEYSPDAQIRLGLEYAKKNNIIIPKQFIFQDDGISGRKATNRPAFQELIAMAKSDEHPIDVILVWKFSRFARNQEEAIVYKNLLKKADVDVVSVSEPIPDGFIGELVQRIFEWMDEYYSINLSGEVMRGMTERASRGGYNAAPPLGYKMQDGIPVIVPEQAEIVKKIFTWYVDDKMSFFDIAVKLNTLGYRTKRNGKFQNRTVAYIIRNEFYNGKIIWNRLEHATRNVKDKSEWIVTDGGHDTFISNELFTAAQDRDKVTKRPGKKVRPASTYKHWLSGLLVCSACGGRLVRCGQSKSGNTYFQCTAYNHASCNESHLTNENALKPAILEALQKVLDSGTVEYVVHSTNQEEKSESELIENKLSRISMKEERIKEAYRDGIDTLEEYKANKEILQREREQLTAMLEQYSKKPEDENESFLLNKIRSAYDIIKSDNSTDRQKHDALTSVVDKIVYDKKCGALLMYFYIND

SEQ ID NO: 6809 - protein, 484 aa, Unknown
  Description of Unknown: Integrase B6810 sequence
  PTHR30461:SF3,SM00857,G3DSA:1.10.10.2600,IPR036162,PF13408, PS51737,G3DSA:3.40.50.1390,IPR025827,IPR006119,IPR038109, PF07508,IPR011109,SSF53041,PTHR30461,Coil, PS51736,cd00338,PF00239
MNAVIYARYSCDRQTEQSIEGQLRECKAFAASEGIHIIGEYIDRAISGTTANRPEFQRMIADSRYKTFQAVIVYKLDRFARNRYDSAMYKSKLKANGVRVLSAKEHITDSPEGIILEGLLEAMNEYYSAELSQKIKRGMRENAIKGKTTGGNVALGYRIGADKQMEIDPAGAALVRRIFTSYDNGRTFTEICDDLNHAGYTTSRGKQFRIDTISRILANQRYTGTFQCAGEDAHCPPIIEPELFRSVQERLTESRHKHRHTQSPHEYVLTGKAICGTCGRRLTGRAGTSKTDKRYYYYCCPNKCCGWLPAAELEHAVLDAIAQYTTPEACEQIANATYALYQQSTHENADLTAAQRRLQETEKKLENAVNAVLNGITSAALQATMQQLEQQKAALETEVRLLQTDAPELKLEHFQYFAHRLLEVQAEGTEKILQLLVNQVIVYKEQITVLVNLTDKTKTPPLEQVTAALRESSCSVACGGGDEN

SEQ ID NO: 6810 - protein, 484 aa, Unknown
  Description of Unknown: Integrase B6811 sequence
  IPR036162,PS51737,IPR011109,PTHR30461,PS00397, PF00239,G3DSA:1.10.10.2600,IPR006119,SSF53041,cd00338, SM00857,IPR025827,IPR038109,PS51736,IPR006118, PF13408,G3DSA:3.40.50.1390,PF07508,Coil
MSNNTPSSLPDLRTGALYIRVSTHEQDDLSPDAQTRLGLDYAKSNNIIVPKDYIFVESVSGRKAKNRHEFQRMIGLAKSPEHPIDVIIVWKFSRFARNQEESIVYKSMLKKDNVDVISISEPLVDGPFGSLIERIIEWMDEYYSIRLSGEVLRGMNEKALRNGYQLSPPLGYSAVGGGNPYIINEDEYKMVSYIFEQYDVYDKDWTAIARSMNQKGWKTKRGSAFDIRSVERVLKNPFYYGLVVWNDTSFMGTHEVRLTKEQYDKRIEKMQKRYRPIKRRNPSTCLHWLSGVLKCGHCGAGLVYNSANRCPNFQCWRYAKGLHMGSHCISEKRVVAAVYEYFEQILDGNPFTYTYRAPIRPETDDAKKSLLDELEKLKIKEQRIKFAYENEVDTLEEYKENKLRLKAAREKIESELEEIAAEEAQNEPTGPTKEEALAKVKTVYDIISNPDVDYTTKGNVLRSLVESITYYKEDEKLEFVFYIS

SEQ ID NO: 6811 - protein, 484 aa, Unknown
  Description of Unknown: Integrase B6812 sequence
  PTHR30461:SF3,IPR036162,PS51737,IPR011109,PTHR30461, PS00397,PF00239,G3DSA:1.10.10.2600,IPR006119,SSF53041, cd00338,SM00857,IPR025827,IPR038109,PS51736, IPR006118,PF13408,G3DSA:3.40.50.1390,PF07508,Coil
MKTGALYVRVSTDDQVEYSPDAQIRLGLEYAKKNNIIIPKQFIFQDDGISGRKATNRPAFQELIAMAKSDEHPIDVILVWKFSRFARNQEEAIVYKNLLKKADVDVVSVSEPIPDGFIGELVQRIFEWMDEYYSINLSGEVMRGMTERASRGGYNAAPPLGYKMQDGIPVIVPEQAEIVKKIFTWYVDDKMSFFDIAVKLNTLGYRTKRNGKFQNRTVAYIIRNEFYNGKIIWNRLEHATRNVKDKSEWIVTDGGHDTFISNELFTAAQDRDKATKRPGKKVRPASTYKHWLSGLLVCSACGGRIVRAGKSKSGNTYFQCTAYNHASCNESHLTNENALKPAILEALQKVLDSGTVEYVVHSTNQEEKSESELIENKLNRIGMKEERIKEAYRDGIDTLEEYKANKEILQREREQLTAMLEQYSKKPEDENESILLNKIRSAYDIIKSDNSTDRQKHDALTSVVDKIVYDKKGGALLMYFYING

SEQ ID NO: 6812 - protein, 484 aa, Unknown
  Description of Unknown: Integrase B6813 sequence
  PTHR30461:SF3,IPR036162,PS51737,IPR011109,PTHR30461, PS00397,PF00239,G3DSA:1.10.10.2600,IPR006119,SSF53041, cd00338,SM00857,IPR025827,IPR038109,PS51736, IPR006118,PF13408,G3DSA:3.40.50.1390,PF07508,Coil
MANTDLTVAAAYIRVSTEDQTDLSPESQLEKVKEYAAKNNMLLPSEFIFHDDGISGRAANKRPGFQRMIAAAKDPVHPFSVIIVWKYSRFARNQEESIFYKSILRSKCNVDVISVSEPLIAGPFGSLIERIIEWMDEFYSVRLSEEVKRSMTVNAKNGVLQSTASFGYKVENGVLVPVPEEAELIKEIFHRFLSGEGFYPIAQDLNSRGIKTHRGSRFENRTVEYIIRNPVYIGKLRWNPAGRTRRDFHNENIICAKGAHEPLIDEETWEAAQLRVEQLKSQWAYHGRPSSDRKHWLCGIVRCASCGATLIWSQPHFLKCNNYARGSCKTSQHIAVELIEESFIQQLRHDFSFSSEISYQIIDVPKPQDTRAGQLRRNRDRMLSRLARSRDAYMNGIDSLEDYAAIKASIQKEIDQIDAELSTLESASGASTEVSMKDSIKRTLETLESDAPISKKYDAVKRIIDTCTFDKQNMLLSIVYRYEI

SEQ ID NO: 6813 - protein, 484 aa, Unknown
  Description of Unknown: Integrase B6814 sequence
  IPR036162,PS51737,IPR011109,PTHR30461,PS00397, PF00239,G3DSA:1.10.10.2600,IPR006119,SSF53041,cd00338, SM00857,IPR025827,IPR038109,PS51736,IPR006118, PF13408,G3DSA:3.40.50.1390,PF07508,Coil
MSQTLRIGAAYIRVSTDDQAELSPDAQLRVILEDAKKDGFIIPPEYIFEEKKGISGRKAGNRPEFQKMIAVAKSQSPAPFERLYLWKFSRFARNQEESTFYKGVLRKKCGVEIKSVSEPIADGMFGRLIESIIEWFDEYYSYNLSGEVLRGMTEKALRNGYQVVPSLGYKAVGDGKPFVIDEEKYPIVEYIFQAYVSGLDMTGIARKCNERGWTSKRGTPFERRTVSRILHNKFYAGTVEWNGYSFQGTHEVRPSVTDCFESAQERLNQEYRPANRRDVSSCKHWLSGLLHCSICGASLSFNRAGRVKKRGDTFVCWKYAKGVHKGPASISANKAEAAVMASLHSVIESGTVEFEHIRKQPSEGTDEISILDAALARVAVKESRIRDAYESGIDTLEEYKDNKLRLANERQELLAEIERLKGIAASTPDDVPSDEEVLNRIKDVYGLLSDPDVSYDVKGVAVRSIISDIVVDQTQKEIHFHYYA

SEQ ID NO: 6814 - protein, 484 aa, Unknown
  Description of Unknown: Integrase B6815 sequence
  PTHR30461:SF3,IPR036162,PS51737,IPR011109,PTHR30461, PS00397,PF00239,G3DSA:1.10.10.2600,IPR006119,SSF53041, cd00338,SM00857,IPR025827,IPR038109,PS51736, IPR006118,PF13408,G3DSA:3.40.50.1390,PF07508,Coil
MKTGALYVRVSTDDQVEYSPDAQIRLGLEYAKKNNIIIPKQFIFQDDGISGRKATNRPAFQELIAMAKSDEHPIDVILVWKFSRFARNQEEAIVYKNLLKKADVDVVSVSEPIPDGFIGELVQRIFEWMDEYYSINLSGEVMRGMTERASRGGYNAAPPLGYKMQDGIPVIVPEQAEIVKKIFIWYVDDKMSFFDIAVKLNTLGYRTKRNGKFQNRTVAYIIRNEFYNGKIIWNRLEHTTRNVKDKSEWIVTDGGHDTFISNELFTAAQDRDKVTKRPGKKVRPASTYKHWLSGLLVCSACGGRLVRAGKSKSGNTYFQCTAYNHASCNESHLTNENALKPAILEALQKVLDSGTVEYVVHSTNQEEKSESELIENKLNRIGMKEERIKEAYRDGIDTLEEYKANKEILQREREQLTAMLEQYSKKHEDENESILLNKIRSAYDIIKSDNSTDRQKHDALTSVVDKIVYDKKGGALLMYFYIND

SEQ ID NO: 6815 - protein, 484 aa, Unknown
  Description of Unknown: Integrase B6816 sequence
  PTHR30461:SF3,IPR036162,PS51737,IPR011109,PTHR30461, PS00397,PF00239,G3DSA:1.10.10.2600,IPR006119,SSF53041, cd00338,SM00857,IPR025827,IPR038109,PS51736, IPR006118,PF13408,G3DSA:3.40.50.1390,PF07508,Coil
MKTGALYVRVSTDDQVEYSPDAQIRLGLEYAKKNNIIIPKQFIFQDDGISGRKATNRPAFQELIAMAKSDEHPIDVILVWKFSRFARNQEEAIVYKNLLKKADVDVVSVSEPIPDGFIGELVQRIFEWMDEYYSINLSGEVMRGMTERASRGGYNAAPPLGYKMQDGIPVIVPEQAEIVKKIFTWYVDDKMSFFDIAVKLNTLGYRTKRNGKFQNRTVAYIIRNEFYNGKIIWNRLEHATRNVKDKSEWIVTDGGHDTFISNELFTAAQDRDKATKRPGKKVRPASTYKHWLSGLLVCSACGGRIVRAGKSKSGNTYFQCTAYNHASCNESHLTNENALKPAILEALQKVLDSGTVEYVVHSTNQEEKSESELIENKLNRIGMKEERIKEAYRDGIDTLEEYKANKEILQREREELTAMLEQYSKEPADENESILLNKIHSAYDIIKSDNSTDRQKHDALTSVVDKIVYDKKGGALLMYFYING

SEQ ID NO: 6816 - protein, 484 aa, Unknown
  Description of Unknown: Integrase B6817 sequence
  PTHR30461:SF3,IPR036162,PS51737,IPR011109,PTHR30461, PS00397,PF00239,G3DSA:1.10.10.2600,IPR006119,SSF53041, cd00338,SM00857,IPR025827,IPR038109,PS51736, IPR006118,PF13408,G3DSA:3.40.50.1390,PF07508,Coil
MKTGALYVRVSTDDQVEYSPDAQIRLGLEYAKKNNIIIPKQFIFQDDGISGRKATNRPAFQELIAMAKSDEHPIDVILVWKFSRFARNQEEAIVYKNLLKKADVDVVSVSEPIPDGFIGELVQRIFEWMDEYYSINLSGEVMRGMTERASRGGYNAAPPLGYKMQDGIPVIVPEQAEIVKKIFTWYVDDKMSFFDIAVKLNTLGYRTKRNGKFQNRTVAYIIRNEFYNGKIIWNRLEHATRNVKDKSEWIVTDGGHDTFISNELFTAAQDRYKATKIPGKKVRPASTYKHWLSGLLVCSACGGRIVRAGKSKSGNTYFQCTAYNHASCNESHLTNENALKPAILEALQKVLDSGTVEYVVHSTNQEEKSESELIENKLNRIGMKEERIKEAYRDGIDTLEEYKANKEILQREREQLTAMLEQYSKKPEDENESILLNKIRSAYDIIKSDNSTDRQKHDALTSVVDKIVYDKKGGALLMYFYIND

SEQ ID NO: 6817 - protein, 484 aa, Unknown
  Description of Unknown: Integrase B6818 sequence
  PTHR30461:SF3,IPR036162,PS51737,IPR011109,PTHR30461, PS00397,PF00239,G3DSA:1.10.10.2600,IPR006119,SSF53041, cd00338,SM00857,IPR025827,IPR038109,PS51736, IPR006118,PF13408,G3DSA:3.40.50.1390,PF07508,Coil
MKTGALYVRVSTDDQVEYSPDAQIRLGLEYAKKNNIIIPKQFIFQDDGISGRKANNRPAFQELIAMAKSDEHPIDIILVWKFSRFARNQEEAIVYKNLLKKADVDVVSVSEPIPDGFIGELVQRIFEWMDEYYSINLSGEVMRGMTERASRGGYNAAPPLGYKMQDGIPVIVPEQAEIVKKIFTWYVDDKMSFFDIAVKLNALGYRTKRNGKFQNRTVAYIIRNEFYNGKIIWNRLEHATRNVKDKSEWIVTDGGHDTFISNELFTAAQERDKATNRPGKKVRPASTYKHWLSGLLVCSACGGRLVRAGKSKSGNTYFQCTAYNHASCNESHLTNENALKPAILEALQKVLDSGTVEYVVHSTNQEEKSESELIENKLNRIGMKEERIKEAYRDGIDTLEEYKANKEILQREREQLTAMLEQYSKKPEDENESILLNKIRSAYDIIKSDNSTDRQKHDALTSVVDKIVYDKKGGALLMYFYIND

SEQ ID NO: 6818 - protein, 484 aa, Unknown
  Description of Unknown: Integrase B6819 sequence
  PTHR30461:SF3,IPR036162,PS51737,IPR011109,PTHR30461, PS00397,PF00239,G3DSA:1.10.10.2600,IPR006119,SSF53041, cd00338,SM00857,IPR025827,IPR038109,PS51736, IPR006118,PF13408,G3DSA:3.40.50.1390,PF07508,Coil
MKTGALYVRVSTDDQVEYSPDAQIRLGLEYAKKNNIIIPKQFIFQDDGISGRKANNRPAFQELIAMAKSDEHPIDIILVWKFSRFARNQEEAIVYKNLLKKADVDVVSVSEPIPDGFIGELVQRIFEWMDEYYSINLSGEVMRGMTERASRGGYNAAPPLGYKMQDGIPVIVPEQAEIVKKIFTWYVDDKMSFFDIAVKLNTLGYRTKRNGKFQNRTVAYIIRNEFYNGKIIWNRLEHATRNVKDKSEWIVTDGGHDTFISNELFTAAQDRDKATKRPGKKVRPASTYKHWLSGLLVCSACGGRIVRAGKSKSGNTYFQCTAYNHASCNESHLTNENALKPAILEALQKVLDSGTVEYVVHSTNQEEKSESELIENKLNRIGMKEERIKEAYRDGIDTLEEYKANKEILQREREQLTAMLEQYSKKPEDENESILLNKIRSAYDIIKSDNSTDRQKHDALTSVVDKIVYDKKGGALLMYFYIND

SEQ ID NO: 6819 - protein, 484 aa, Unknown
  Description of Unknown: Integrase B6820 sequence
  PTHR30461:SF3,IPR036162,PS51737,IPR011109,PTHR30461, PS00397,PF00239,G3DSA:1.10.10.2600,IPR006119,SSF53041, cd00338,SM00857,IPR025827,IPR038109,PS51736, IPR006118,PF13408,G3DSA:3.40.50.1390,PF07508,Coil
MKTGALYVRVSTDDQVEYSPDAQIRLGLEYAKKNNIIIPKQFIFQDDGISGRKATNRPAFQELIAMAKSDEHPIDVILVWKFSRFARNQEEAIVYKNLLKKADVDVVSVSEPIPDGFIGELVQRIFEWMDEYYSINLSGEVMRGMTERASRGGYNAAPPLGYKMQDGIPVIVPEQAEIVKKIFTWYVDDKMSFFDIAVKLNTLGYRTKRNGKFQNRTVAYIIRNEFYNGKIIWNRLEHATRNVKDKSEWIVTDGGHDTFISNELFTAAQDRDKATKRPGKKVRPASTYKHWLSGLLVCSACGGRLVRAGKSKSGNTYFQCTAYNHASCNESHLTNENALKPAILEALQDVLDSGTVEYVVHSTNQEEKSESELIENKLNRIGMKEERIKEAYRDGIDTLEEYKANKEILQREREQLTAMLEQYSKKPEDENESILLNKIRSAYDIIKSDNSTDRQKHDALTSVVEKIVYDKKGGVLLMFFYING

SEQ ID NO: 6820 - protein, 484 aa, Unknown
  Description of Unknown: Integrase B6821 sequence
  PTHR30461:SF3,IPR036162,PS51737,IPR011109,PTHR30461, PS00397,PF00239,G3DSA:1.10.10.2600,IPR006119,SSF53041, SM00857,IPR025827,IPR038109,PS51736,cd03768, IPR006118,PF13408,G3DSA:3.40.50.1390,PF07508,Coil
MCTKNVGIYIRVSTQEQANEGYSIDAQRDRLTAYCRSRAWNIYNIYIDGGFSGSNMSRPALSQLLDDIKAKRINCVLVYKLDRLSRSQKDTLYIIEDVFLKNGIDFVSLNENFDTSSPFGRAMIGILSVFAQLEREQIKERSMMGRVERAKNGLWHGGGHEPFGYNYIDGQLIINDYESAIVKDIFELFNDKIPIYQIQQIISNKYGKDFHESVIRSTLSMVLYTGKISYGGETYDGQHDAIISTDTFKRAQDLLEIRKKKYHNRPFKSKTLLGGLLYCAHCGARYLAKGNYSGRGANRSYRPYYTCYSRAKSNKKYIIDPNCKNPSYAVPVLDGIILNEIRKLFTCHDYFESILQSSTPPPAPNNDLEIELLSKQIISIQGQISRLLDLYQLDGIAIDDIHDRINSLQEEKVKLQETITKLSTPILPETNKKLSPSDVLSLKDSFESIVSSDDMSAKQNLVHTLIQKILVNEEENSFEIIWNF

SEQ ID NO: 6821 - protein, 484 aa, Unknown
  Description of Unknown: Integrase B6822 sequence
  IPR036162,PS51737,IPR011109,PTHR30461,PS00397, PF00239,G3DSA:1.10.10.2600,IPR006119,SSF53041,cd00338, SM00857,IPR025827,IPR038109,PS51736,IPR006118, PF13408,G3DSA:3.40.50.1390,PF07508,Coil
MAQNLRIGAAYIRVSTDDQAELSPDAQLRVILDEAKKDGFIIPPEYIFEEKKGISGRKAGNRPEFQKMIAVAKSQNPAPFERLYLWKFSRFARNQEESTFYKGVLRKKCGVEIKSVSEPIADGMFGRLIESIIEWFDEYYSYNLSGEVLRGMTEKALRNGYQVVPSLGYKAVGDGKPFVIDEEKYPIVEYIFQAYVSGLDMTGIARKCNERGWTSKRGTPFERRTVSRILHNKFYAGTVEWNGYSFQGTHEVRSSVTDCFESAQERLNQEYRPANRRDVSSCKHWLSGLLHCSICGASLSFNRAGRVKKRGDTFVCWKYAKGIHKGPASISVRKAEAALMASLHSVIESGTVEFEHIRKQPSEGTDELSILDAALSRVAVKESRIRDAYESGIDTLEEYKDNKLRIANERQELLAEIERLKELAASTPDDVPSEEEVLNRIKDVYSLLSDPDVSYDVKGAAVRSIISDIVVDQAQKEIHFHYYA

SEQ ID NO: 6822 - protein, 484 aa, Unknown
  Description of Unknown: Integrase B6823 sequence
  PTHR30461:SF3,IPR036162,PS51737,IPR011109,PTHR30461, PS00397,PF00239,G3DSA:1.10.10.2600,IPR006119,SSF53041, SM00857,IPR025827,IPR038109,PS51736,cd03768, IPR006118,PF13408,G3DSA:3.40.50.1390,PF07508,Coil
MLSTNVGIYIRVSTQEQANEGYSIDAQRDRLTAYCRSRAWNIYNIYIDGGFSGSNMSRPALSQLLDDIKDKRVNCVLVYKLDRLSRSQKDTLYIIEDVFLKNGIDFVSLNENFDTSSPFGRAMIGILSVFAQLEREQIKERSMMGRIERAKNGLWHGGGHEPFGYNYIDGQLIINDYESAIVKDIFELFNNKIPIYQIQQIISNKYGKDFHESVIRSTLSMVLYTGKISYGGETYDGQHDAIISTDTFKCAQDLLEIRKKKYHNRPFKSKTLLGGLLYCAHCGARYLAKGNYSGRGANRSYRPYYTCYSRAKSNKKYIIDPNCKNPSYAVPVLDDIILNEIRKLFTCHDYFESIVQSSTPQPVPNNDLEIELLSKQIISIQGQISRLLDLYQLDGIGIDDIHDRINSLQEEKVKLQETITKLSTPRLPETEKKLSPNDVLSLKDSFESIILSNDVSAKQNLVHTLIQKIIVNEEDNSFEIIWNF

SEQ ID NO: 6823 - protein, 484 aa, Unknown
  Description of Unknown: Integrase B6824 sequence
  SM00857,IPR006118,G3DSA:1.10.10.2600,IPR036162,PF13408, PS51737,IPR025827,G3DSA:3.40.50.1390,Coil,IPR006119, IPR038109,PF07508,IPR011109,SSF53041,PTHR30461, PS00397,cd00338,PF00239
MAQNLRIGAAYIRVSTDDQAELSPDAQLRVIMDEAKKDGFLIPAEYIFEEKRGISGRKADNRPEFQRMISIAKSQVPAPFERLYLWKFSRFARNQEESTFYKGILRKKCGVEIKSISEPIADGMFGRLIETIIEWFDEYYSYNLSGEVLRGMTEKALRNGYQAVPSLGYKAVGGGKPFVIDEERYPMVEYIFQAYHDGLDMTKIARNCNDRGWKTRRNSPFERRTILRILQNKFYVGIVEWNGYSFTGTHETRPSVTDYFEEAQERIKREYRPANRREISTCKHWLSGLLRCSVCGASLSFTRSENLKKRGDTFMCWKYAKGLHKGSTSISAKKAEAALMDSLKTIIGSRTLKFEHIKKENSETSNELSILDSALSRVAQKESRIRDAYEAGVDTLEEYKENKRRLENERQDLLAEINRLKELAAASQDDAPSTEEVLNRVEDVYALLSDPNVSYEIKGTAVRSILSEIVVDRQNREIHFHYYA

SEQ ID NO: 6824 - protein, 484 aa, Unknown
  Description of Unknown: Integrase B6825 sequence
  PTHR30461:SF3,IPR036162,PS51737,IPR011109,PTHR30461, PS00397,PF00239,G3DSA:1.10.10.2600,IPR006119,SSF53041, cd00338,SM00857,IPR025827,IPR038109,PS51736, IPR006118,PF13408,G3DSA:3.40.50.1390,PF07508,Coil
MKTGALYVRVSTDDQVEYSPDAQIRLGLEYAKKNNIIIPKQFIFQDDGISGRKANNRPAFQELIAMAKSDEHPIDIILVWKFSRFARNQEEAIVYKNLLKKADVEVVSVSEPIPEGFIGELVQRIFEWMDEYYSINLSGEVMRGMTERASRGGYNSDPPLGYAMQNGIPVIVPEQAAIVEKIFSWYVNDKMSFFDIAKRLNALGYKTKRGGKFQNRTVAYIIRNEFYNGKIVWNKLERSTRKFKDKSEWIITDGEHKTFISDELFRAAQERDQATIRPGRKSRPASTYKHWLSGILVCSACGGRLVRCGQSKSGNTYFQCTAYNHASCNESHLTNENALKPAILKALQDVLDSGTVEYVVHSTNQEEKSESELIQNKLNRIGMKEERIKEAYRDGIDTLEEYKANKEILQREREELTAMLEQYSKEPADENESILLNKIRSAYDIIKSDNSTDRQKHDALTSVVEKIVYDKKGGVLLMFFYING

SEQ ID NO: 6825 - protein, 484 aa, Unknown
  Description of Unknown: Integrase B6826 sequence
  PTHR30461:SF3,SM00857,G3DSA:1.10.10.2600,IPR036162,PF13408, IPR025827,PS51737,G3DSA:3.40.50.1390,IPR006119,IPR038109, PF07508,IPR011109,SSF53041,PF00239,PTHR30461, PS51736,Coil,cd00338
MINAVGYTRFSTDRQTENSTKFQMEAISRYAKANDINLLRYYSDEGFSGTNTERPAFQDMCAAADMKLFDAVLIYDITRASRDVVDWMEFRKIMRSLDIQVISVTQHLGDALDPESYLVELINAGIGQHHVLQTRQKSIAGTTAKAKEGVFLGGFAPLGYRIESGKYIIEETEAKYIRMIFDMYAAGKSYNEIIDALGGLKGRRGAVIGKTQLKSILQNERYIGTYTWNKKQYKVMNKWAGGKPNPNIVKIEGIIPPLVDMDTWERVRVRMADKKRNATNKAKREYLLSGLITCDCCGGQFVGHTSTNTRGYQTVYYTCGTKYRNHTCNSKNINAFRLEEFVINQLKNYIRQMDFEQEADAIMEQLSKASPSVSAEKKELKEIIKKINNGVTAILNGLVMPELQDEIDRLRVRKSELEDIISNAEAHTGKIDKNSLIAYMKKAAEELENNPAAAIKELVKIYAHADGSCTVNIGVHLSHCGDRI

SEQ ID NO: 6826 - protein, 484 aa, Unknown
  Description of Unknown: Integrase B6827 sequence
  PTHR30461:SF3,IPR036162,PS51737,IPR011109,PTHR30461, PS00397,PF00239,G3DSA:1.10.10.2600,IPR006119,SSF53041, cd00338,SM00857,IPR025827,IPR038109,PS51736, IPR006118,PF13408,G3DSA:3.40.50.1390,PF07508,Coil
MKTGALYVRVSTDDQVEYSPDAQIRLGLEYAKKNNIIIPKQFIFQDDGISGRKATNRPAFQELIAMAKSDEHPIDVILVWKFSRFARNQEEAIVYKNLLKKADVDVVSVSEPIPDGFIGELVQRIFEWMDEYYSINLSGEVMRGMTERASRGGYNAAPPLGYKMQDGIPIIVPEQAEIVKKIFTWYVDDKMSFFDIAVKLNTLGYRTKRNGKFQNRTVAYIIRNEFYNGKIIWNRLEHATRNVKDKSEWIVTDGGHDTFISNELFTAAQDRDKATKRPGKKVRPASTYKHWLSGLLVCSACGGRIVRAGKSKSGNTYFQCTAYNHASCNESHLTNENALKPAILEALQKVLDSGTVEYVVHSTNQEEKSESELIENKLNRIGMKEERIKEAYRDGIDTLEEYKVNKEILQREREQLTAMLEQYSKKPEDENESILLNKIRSAYDIIKSDNSTDRQKHDALTSVVDKIVYDKKGGALLMYFYIND

SEQ ID NO: 6827 - protein, 484 aa, Unknown
  Description of Unknown: Integrase B6828 sequence
  PTHR30461:SF3,IPR036162,PS51737,IPR011109,PTHR30461, PS00397,PF00239,G3DSA:1.10.10.2600,IPR006119,SSF53041, SM00857,IPR025827,IPR038109,PS51736,cd03768, IPR006118,PF13408,G3DSA:3.40.50.1390,PF07508,Coil
MQKEKVIPIDSLDLVDLYIRVSTTEQALEGYSVAEQEHRLRQYCAAMGHRIHKVHIDAGFSGASLDRPGIKETIKDVQKHLVRRVIVWKLDRLSRSQKDTLIMLEDVFLENGCDFISMMESFDTSTSFGRAIVGILAAFAQLERENIKERTMMGRQARLAKGHYNGSRPPLGYSFIPGSNDLQVDPYQAAIVREIFKLFLSGISINAIARKMEEKYPTVRTWNNTMIRRTLKNPVYIGKVNDNGILRDGIHEPLISEIDFQMANAILVHNSKIKKQSCRSRSLLTGLLYCGDCGARMHPRRIAKGYPLRRYVCYSVSRTSKSMIKSDHCTNRLHPYTQEELEQIIIDEIKKLAADEDYISEVIRNSSAEAPVDDTELFQERIEELNRQTDKLLNLYQIGAIELDQIQERLAALKQERESLTAALKESRTKTDINMDHLKIMSYASAFQVALESGDPEYTNSIIRLLIDKIVVLNEDIEIHWTFC

SEQ ID NO: 6828 - protein, 484 aa, Unknown
  Description of Unknown: Integrase B6829 sequence
  cd00338,SM00857,G3DSA:1.10.10.2600,IPR036162,PS51737, G3DSA:3.40.50.1390,IPR006119,IPR038109,PF07508,IPR011109, SSF53041,PTHR30461,PS51736,Coil,PF00239
MKSSSVALYLRKSREEETETREATLARHERMLLDYCAHNGLTVAETYREVVSGESLDARPEARAMLEAVAEGKFGGVAVIELERLSRGNQIDQVEIMETFKKSGTKIYTLNKVYDLAGENEFDEEFFEFGLFMSRREYKIIKRRLIRGKKQAQKEGYYIGSSLPYGFGKVRGDKGYILTPNEETPIVQLIFQKFVYEDYSLADLRHYLDANGIKPHRAASWGSVVLKKILKNRCYIGYINYNSRSSLTQECYKGKHDAIIDIETFERAQEKLALSSHKMKKGVELKNPLASLVKCSKCGSTMQRHGDYFRCLTPKCPTVLSYFDDVETRLMDEITAELKGFKYYIANYGEEIERQRVTREKEIAILQKEIDKRNAMLNKACEMLEIGVYSREKYLERAQILETEKRAAEGQISALRAISTDESEKAKRAIPILENCLAAYWSLSAQDKNDMLKCIIDRVEYSKTQRNNRWHKSGDLSLKIFLKI

SEQ ID NO: 6829 - protein, 484 aa, Unknown
  Description of Unknown: Integrase B6830 sequence
  cd00338,SM00857,IPR006118,G3DSA:1.10.10.2600, IPR036162,PF13408,PS51737,G3DSA:3.40.50.1390, IPR025827,IPR006119,IPR038109,PF07508, SSF53041,IPR011109,PTHR30461,PS00397,Coil,PF00239
MAQNLRIGAAYIRVSTDDQAELSPDAQLRVILDEAKKDGFIIPPEYIFEEKKGISGRKAVNRPEFQRMIAVAKSQSPAPFERLYLWKFSRFARNQEESTFYKGVLRKKCGVEIKSVSEPIADGMFGRLIESIIEWFDEYYSYNLSGEVLRGMTEKALRNGYQVVPSLGYKAVGDGKPFVIDEEKYPIVEYIFQAYVSGLDMTGIARKCNEQGWTSKRGTPFERRTVSRILHNKFYAGTVEWNGYSFQGTHEVRPSVTDCFESAQERLNQEYRPANRRDVSSCKHWLSGLLHCSICGASLSFNRAGRVKKRGDTFVCWKYAKGIHKGPASISVRKAESALMASLHSVIESGTVEFEHIRKQPSEGTDEISILDAALSRVAVKESRIREAYESGIDTLEEYKDNKLRIANERQELLAEIDRLKGLIASAPDDVPSEEEVLNRIKDVYSLLSDPDVSYDVKGAAVRSIISDIVVDQAQKEIHFHYYA

SEQ ID NO: 6830 - protein, 484 aa, Unknown
  Description of Unknown: Integrase B6831 sequence
  IPR036162,PS51737,IPR011109,PTHR30461,PS00397, PF00239,G3DSA:1.10.10.2600,IPR006119,SSF53041,cd00338, SM00857,IPR025827,IPR038109,PS51736,IPR006118, PF13408,G3DSA:3.40.50.1390,PF07508,Coil
MAQNLRIGAAYIRVSTDDQAELSPDAQLRVILDEAKKDGFIIPPEYIFEEKKGISGRKAGNRPEFQKMIAVAKSQSPAPFERLYLWKFSRFARNQEESTFYKGVLRKKCGVEIKSVSEPIADGMFGRLIESIIEWFDEYYSYNLSGEVLRGMTEKALRNGYQMVPSLGYKAVGDGKPFVIDEEKYPIVEYIFQAYVRGLDMTGIARKCNERGWTSKRGTPFERRTVSRILHNKFYAGTVEWNGYSFQGTHEVRPSVTDCFESAQERLNQEYRPANRRDVSSCKHWLSGLLHCSICGASLSFNRAGRVKKRGDTFVCWKYAKGVHKGPASISANKAEAAVMASLHSVIESGTVEFEHIRKQPSEGTDEISILDAALARVAVKESRIREAYESGIDTLEEYKDNKLRIANERQELLAEIERLKGIAASAPDDVPSEEEVLNRIKDVYGLLSDPDVSYDVKGAAVRSIISDIVVDQTQKEIHFHYYA

SEQ ID NO: 6831 - protein, 484 aa, Unknown
  Description of Unknown: Integrase B6832 sequence
  PTHR30461:SF3,IPR036162,PS51737,IPR011109,PTHR30461, PS00397,PF00239,G3DSA:1.10.10.2600,IPR006119,SSF53041, cd00338,SM00857,IPR025827,IPR038109,PS51736, IPR006118,PF13408,G3DSA:3.40.50.1390,PF07508,Coil
MKTGALYVRVSTDDQVEYSPDAQIRLGLEYAKKNNIIIPKQFIFQDDGISGRKANNRPAFQELIAMAKSDEHPIDVILVWKFSRFARNQEEAIVYKNLLKKADVDVVSVSEPIPDGFIGELVQRIFEWMDEYYSINLSGEVMRGMTERASRGGYNSDPPLGYAMQNGIPVIVPEQAAIVEKIFSWYVNDKMSFFDIAKRLNALGYKTKRGGKFQNRTVAYIIRNEFYNGKIIWNRLEHATRNVKDKSEWIVTDGGHDTFISNELFTAAQDRDKVTKRPGKKVRPASTYKHWLSGLLVCSACGGRLVRAGKSKSGNTYFQCTAYNHASCNESHLTNENALKPAILKALQDVLDSGTVEYVVHSTNQEEKSESELIQNKLNRIGMKEERIKEAYRDGIDTLEEYKANKEILQREREELTAMLEQYSKEPADENESILLNKIRSAYDIIKSDNSTDRQKHDALTSVVEKIVYDKKGGALLMYFYIND

SEQ ID NO: 6832 - protein, 484 aa, Unknown
  Description of Unknown: Integrase B6833 sequence
  PTHR30461:SF3,IPR036162,PS51737,IPR011109,PTHR30461, PS00397,PF00239,G3DSA:1.10.10.2600,IPR006119,SSF53041, cd00338,SM00857,IPR025827,IPR038109,PS51736, IPR006118,PF13408,G3DSA:3.40.50.1390,PF07508,Coil
MKTGALYVRVSTDDQVEYSPDAQIRLGLEYAKKNNIIIPKQFIFQDDGISGRKATNRPAFQELIAMAKSDEHPIDVILVWKFSRFARNQEEAIVYKNLLKKADVDVVSVSEPIPDGFIGELVQRIFEWMDEYYSINLSGEVMRGMTERASRGGYNAAPPLGYKMQNGIPVIVPEQAEIVKKIFTWYVDDKMSFFDIAVKLNTLGYRTKRNGKFQNRTVAYIIRNEFYNGKIIWNRLEHATRNVKDKSEWIVTDGGHDTFISNELFTAAQDRDKATKRPGKKVRPASTYKHWLSGLLVCSACGGRIVRAGKSKSGNTYFQCTAYNHASCNESHLTNENALKPAILEALQKVLDSGTVEYVVHSTNQEEKSESELIENKLSRISMKEERIKEAYRDGIDTLEEYKANKEILQREREQLTAMLEQYSKKPEDENESILLNKIRSAYDIIKSDNSTDRQKHDALTSVVDKIVYDKKGGALLMYFYIND

SEQ ID NO: 6833 - protein, 484 aa, Unknown
  Description of Unknown: Integrase B6834 sequence
  PTHR30461:SF3,IPR036162,PS51737,IPR011109,PTHR30461, PS00397,PF00239,G3DSA:1.10.10.2600,IPR006119,SSF53041, cd00338,SM00857,IPR025827,IPR038109,PS51736, IPR006118,PF13408,G3DSA:3.40.50.1390,PF07508,Coil
MKTGALYVRVSTDDQVEYSPDAQIRLGLEYAKKNNIIIPKQFIFQDDGISGRKATNRPAFQELIAMAKSDEHPIDVILVWKFSRFARNQEEAIVYKNLLKKADVDVVSVSEPIPDGFIGELVQRIFEWMDEYYSINLSGEVMRGMTERASRGGYNSDPPLGYAMQNGIPVIVPEQAAIVEKIFSWYVNDKMSFFDIAKRLNALGYKTKRGGKFQNRTVAYIIRNEFYNGKIVWNKLERSTRKFKDKSEWIITDGEHKTFISDELFRAAQERDQATIRPGRKSRPASTYKHWLSGILVCSACGGRLVRCGQSKSGNTYFQCTAYNHASCNESHLTNENALKPAILKALQDVLDSGTVEYVVHSTNQEEKSESELIQNKLNRIGMKEERIKEAYRDGIDTLEEYKANKEILQREREELTAMLEQYSKEPADENESILLNKIRSAYDIIKSDNSTDRQKHDALTSVVEKIVYDKKGGVLLMFFYING

SEQ ID NO: 6834 - protein, 484 aa, Unknown
  Description of Unknown: Integrase B6835 sequence
  PTHR30461:SF3,IPR036162,PS51737,IPR011109,PTHR30461, PS00397,PF00239,G3DSA:1.10.10.2600,IPR006119,SSF53041, cd00338,SM00857,IPR025827,IPR038109,PS51736, IPR006118,PF13408,G3DSA:3.40.50.1390,PF07508,Coil
MKTGALYVRVSTDDQVEYSPDAQIRLGLEYAKKNNIIIPKQFIFQDDGISGRKATNRPAFQELIAMAKSDEHPIDVILVWKFSRFARNQEEAIVYKNLLKKADVDVVSVSEPIPDGFIGELVQRIFEWMDEYYSINLSGEVMRGMTERASRGGYNAAPPLGYKMQDGIPVIVPEQAEIVKKIFTWYVDDKMSFFDIAVKLNTLGYRTKRNGKFQNRTVAYIIRNEFYNGKIIWNKLEHSTRNVKDKSEWIIADGEHDTFISDELFRAAQERDQATIRPGRKSRPASTYKHWLSGILVCSACGGRLVRCGQSKSGNTYFQCTAYNHASCNESHLTNENALKPAILKALQDVLDSGTVEYVVHSTNQEEKSESELIQSKLNRIGMKEERIKEAYRDGIDTLEEYKANKEILQREREQLTAMLEQYSKKPEDENESILLNKIRSAYDIIKSDNSTDRQKHDALTSVVDKIVYDKKGGALLMFFYIND

SEQ ID NO: 6835 - protein, 484 aa, Unknown
  Description of Unknown: Integrase B6836 sequence
  cd00338,SM00857,IPR006118,G3DSA:1.10.10.2600,IPR036162, PF13408,IPR025827,G3DSA:3.40.50.1390,PS51737,IPR006119, IPR038109,PF07508,SSF53041,IPR011109,PTHR30461, PS00397,Coil,PF00239
MAQNLRIGAAYIRVSTDDQAELSPDAQLRVIMDEAKKDGFLIPSEYIFEEKRGISGRKADNRPEFQRMISIAKSQVPAPFERLYLWKFSRFARNQEESTFYKGILRKKCGVEIKSISEPIADGMFGRLIETIIEWFDEYYSYNLSGEVLRGMTEKALRNGYQAVPSLGYKAVGGGKPFVIDEERYPTVEYIFQAYHNGLDMTKIARNCNDRGWKTRRNSPFERRTILRILQNKFYVGIVEWNGYSFTGTHETRPSVTDYFEEAQERIKREYHPANRREISTCKHWLSGLLRCSVCGASLSFTRSENLKKRGDTFMCWKYAKGLHKGSTSISAKKAEAALMDSLKTIIGSRTLKFEHIKKENSETSNELSILDSALSRVAQKESRIRDAYEAGVDTLEEYKENKRRLENERQDLIAEINRLKELTAASQDDAPSAEEVLNRVEDVYALLSDPNVSYEIKGTAVRSILSEIVVDRQNREIHFHYYA

SEQ ID NO: 6836 - protein, 483 aa, Unknown
  Description of Unknown: Integrase B6837 sequence
  IPR036162,PS51737,IPR011109,PTHR30461,PS00397, PF00239,G3DSA:1.10.10.2600,IPR006119,SSF53041,cd00338, SM00857,IPR025827,IPR038109,PS51736,IPR006118, PF13408,G3DSA:3.40.50.1390,PF07508,Coil
MNKTLKSVCAYIRVSTDDQVELSPDSQRQKIKEYCQKNGYILSDVFEDLGISGKSADKRPGFRQMIAMCKAKEHPFDAIIVWKFSRFARNQEESIVYKSMLRKIGVEVISISEPISEGIGGKLTEAILEIMDEYYSINLSQEVMRGMTEGARRGKIMSVAPFGYTAKNHQYYPDENANTVRAIFDMFVNQGYGLMSIAYRLNQQGVKTRRGSTWENRSIKYIIQNPVYIGKIRWNYATHNGKPGTVSINDEADWIIVDGTHEPIIDDDTFKKAQEKIAQFKKQTTRRVAQKHWLSGVLVCCKCGAGMAYHREDEKKHTAPYFVCPNRTRGRCPGQSTKAEWIERDFFNGLVESIESDNYHRTERESVVIDVSFEIKRQLSENDKKLERVKEAYRNGIDTLDEYKANKQLIENERLLLLSRLDKCSSKPRELTKDELLLRARSTIAILQSDECDVQQKADALRAMVDKVVYSKESGIMDFYFLN

SEQ ID NO: 6837 - protein, 483 aa, Unknown
  Description of Unknown: Integrase B6838 sequence
  cd03768,PTHR30461:SF3,SM00857,G3DSA:1.10.10.2600,IPR036162, PS51737,G3DSA:3.40.50.1390,IPR006119,IPR038109,PF07508, IPR011109,SSF53041,PTHR30461,PS51736,Coil, PF00239
MRIDAIYARQSIEKRDSISIESQIEMCKRAADPDVAIYRDSGYSGKNTQRPAFTQLMADVRAGKIKRVFCYRLDRISRSVLDFSLLWQTFDANHVDFVSVTESFDTNSPMGRAMIMIIITFAQLERETIVSRYTTNRYARSNAGIWAGGRAPYGFEIQKVDWNGKRQSVLKPIPEKLQIVQDLFTKYTSGTASLYSLSKELNLNSTERWDAITVRRILKNPVYACADVDIYSFYYNNAEIINDVHDFDGSHAAYLTVKGGKSSAGHRTLSLAYHQGVVPSSVFIAAQNMLSQNKQLKNGHRSSFTWLSGLLKCHKCGGRINVFQNKGLTYFQCYKRFHQAGSCDAKIHGNSLRYESYVEDAIQNRIDTIVKNNSTEDVPNQQLNDMKIQLLENERQINNLVEALKIGGAVAMRSIQNELQALEAEHERITNEITAMQPVHQVPNGLAVIDFAKLDYDSKRDVARMMIDKILVGDDSPIQIIWK

SEQ ID NO: 6838 - protein, 483 aa, Unknown
  Description of Unknown: Integrase B6839 sequence
  IPR036162,PS51737,IPR011109,PTHR30461,PS00397, PF00239,G3DSA:1.10.10.2600,IPR006119,SSF53041,cd00338, SM00857,IPR025827,IPR038109,PS51736,IPR006118, PF13408,G3DSA:3.40.50.1390,PF07508,Coil
MSHTFKSVCAYIRVSTDDQVELSPDSQRQKIKEYCQKNGYILSDVFDDLGISGKSADKRPGFRQMIAMCKAKEHPFDAIIVWKFSRFARNQEESIVYKSMLRKIGVEVISISEPISEGIGGKLTEAILEIMDEYYSINLSQEVMRGMTEGARRGKIMSVAPFGYSAKNHQYYPDDNANTVRAIFDMFVNQGYGLMSIAYNLNRQGIKTRRGSKWENRTIKYILQNPVYIGKIRWNYATHNGKPGTVSINDEADWIIVDGTHEPIIDDETFKKAQEKIAQFRRQTTRRVAQKHWLSGVLVCSKCGAGMAYHRENKKTHTAPYFLCQNRTRGKCSGQSTKAEWIERDFFNGFTESIEGENFHMTTRENVVIDASSEIKRQLSENDKKLERVKEAYRNGIDTLDEYKANKKLIESERLLLLSRLDKCSDKPHQMTKEELLIKAHSTIAILKSDDFDVQQKADSLRDIVDKVIYSKESNTMDFYFFN

SEQ ID NO: 6839 - protein, 483 aa, Unknown
  Description of Unknown: Integrase B6840 sequence
  PTHR30461:SF3,SM00857,G3DSA:1.10.10.2600,IPR036162,PF13408, PS51737,G3DSA:3.40.50.1390,IPR025827,IPR006119,IPR038109, PF07508,SSF53041,IPR011109,PTHR30461,Coil, PS51736,cd00338,PF00239
MNAVIYARYSCDRQTEQSIEGQLRECKAFAASEGINIIGEYIDRAISGTTANRPEFQRMIADSRYKTFQAVIVYKLDCFARNRYDSAMYKSKLKANGVRVLSAKEHITDSPEGIILEGLLEAMNEYYSAELSQKIKRGMRENAIKGKTTGGNVALGYRIGADKQMEIEPAGASLVRRIFTSYDNGRTFTEICDDLNHAGYTTSRGKQFRIDTISRILANQRYTGTFQCAGEDAHCPPIIEPELFRSVQERLTESRHKHRHTQSPHEYVLTGKAICGTCGRRLTGRAGTSKTDKRYYYYCCPNKCCGWLPAAELERAVLDAIAQYTTPEACEQIANATYALYQRSTHENADLTAAQRRLQETEKKLENAVNAVLNGITSAALQATMQQLEQQKAALETEVRLLQTDAPELKLEHFQYFAHRLLEVQAEGTEKILQLLVNQVIVYKDRITVLVNLTDKTKTPPLEQVTAALRESSCSVACGGGDA

SEQ ID NO: 6840 - protein, 483 aa, Unknown
  Description of Unknown: Integrase B6841 sequence
  PTHR30461:SF3,IPR036162,PS51737,IPR011109,PTHR30461, PS00397,PF00239,G3DSA:1.10.10.2600,IPR006119,SSF53041, SM00857,IPR025827,IPR038109,PS51736,cd03768, IPR006118,PF13408,G3DSA:3.40.50.1390,PF07508,Coil
MKQKIAAPPADPVVDLVDLYIRVSTTEQALEGYSVAEQESRLRRYSEAMGFRIHKVHIDAGFSGASLDRPAIKEVIRDIQSHLVSKVIVWKLDRLSRSQKDMLVMLEDVFLANDCDFISMMESFDTSTAFGRAIVGILAAFAQLERENIKERTTMGRRARLAKGHYNGSRPPLGYRFLEGSNDLKVEPYEANMVHEIFSSFLAGQSINAIAATMQRKYPTTRTWNNTMIRRTLKNPVYMGKVKDVDVIRDGIHEPLISESEFVMANAVLSHNREIKKQSCRSNSLLTGLLYCGDCGARMQPRQIARGYPLRRYVCYSVSRTNKSMIRSDHCTNRLHPYTLEELDDIIIGEIKKLAADEDYLRAIIREDAGPILDESELLKDRLSEIDKQTDKLLNLFQIGVVDLSQIEQRLADLKQEREALKERLERTAPVVQMDIQKIQSYADAFQEALDSGDAECQSSIIRLLIDKIVVLNEDIEIHWTFC

SEQ ID NO: 6841 - protein, 483 aa, Unknown
  Description of Unknown: Integrase B6842 sequence
  IPR036162,PS51737,IPR011109,PTHR30461,PS00397, PF00239,G3DSA:1.10.10.2600,IPR006119,SSF53041,cd00338, SM00857,IPR025827,IPR038109,PS51736,IPR006118, PF13408,G3DSA:3.40.50.1390,PF07508,Coil
MKTGALYIRVSTDDQTEYSPDAQIRLGLDYAKKNGIVIPKKFIYQDDGISGRKAKNRPAFQELIATAKSEEHPFDVILVWKFSRFARNQEEAIVYKNLLKKAGVDVVSVSEPIPDGFIGELVQRIFEWMDEYYSINLSGEVMRGMTERASRGGYNSDPPIGYKMQDGVPVINPDTAPIVEKIFDWYVNKQMSFWEIANALNLLGYKTKRGGKFQNRTVAYIIRNEFYNGKIIWNKMDHATRRIKDKSEWVITEGTHETFISEELFNAAQERDKSTYHAKGKRPTSTYKHWLSGILVCSACGQRLVRCSTSKKGNTYFQCTGYNHAACTVSHATNEFALKPAIFEALDKVIATGEVTYEIHSSNNDDNNEKKLIEDKLSRLVMKEERIKEAYRDGIDTLEEYKANKEILANERTNLNAMLEQCSAATPDDIQNKLIEKIRSAKEIIECETSTDVQKHDALASVVEKIVYNKKEDSISMFFYIND

SEQ ID NO: 6842 - protein, 483 aa, Unknown
  Description of Unknown: Integrase B6843 sequence
  PTHR30461:SF3,SM00857,IPR006118,IPR036162,PF13408, PS51737,G3DSA:3.40.50.1390,Coil,IPR025827,IPR006119, IPR011109,SSF53041,PTHR30461,PS00397,PS51736, cd00338,PF00239
METLSGYIDGKETINMRIERVAAYIRVSTQEQKLHGISLEAQIEKLTEYAEAHNMKIVKWYKDEGISGRKLIKKRPALQEMIQDAEKGQFERIIFIKLDRFFRSVAEYHECMKRLATGGVIWTATEEKYDLSTPSGEAFVNMKLTMAQFEADQAGERIRMVNEYKIKSGQPLFGAQCLPFCYTVSQPEDGERHKYIAKHDEDIMRDAIAHVMQNHSVRAALIYINNKYNRVFGYNVLIKALKNEMICGEYKGNPNYCEPYITREEFNLLQTYIKRNPRTSPDEHSYLFTGLVRCPDCGCRLNGAVVYNGQQKKSGKKKYKYFGYRCQKHNASKLCSFNKIVFENRLETEMLSAVERILKQKMLNVIEIRNGIERVSKHDTAALQQELDRLNYSWQKGRIKSVEEYDRRYDELIAKIEEAHEEQAELSSEPNYEKIQRILSEDWKEIYSKLDAEHKRSFWRSFIEGIQVEWTNDTKRVIDITFL

SEQ ID NO: 6843 - protein, 483 aa, Unknown
  Description of Unknown: Integrase B6844 sequence
  IPR036162,PS51737,IPR011109,PTHR30461,PS00397, PF00239,G3DSA:1.10.10.2600,IPR006119,SSF53041,cd00338, SM00857,IPR025827,IPR038109,PS51736,IPR006118, PF13408,G3DSA:3.40.50.1390,PF07508,Coil
MDEMRYGALYIRVSTDKQEELSPDAQKRLLLDYAKAHNIFISPEYIFVENGISGRKADKRPEFQKMISIAKADEPPFSLILVWKFSRFARNQEESIVYKSMLKKQHGIDVVSITEPLIDGPFGGLIERIIEWMDEYYSINLSQEVKRGMTEKAMRGGYQATPSLGYASPAPGQPFVVVPSEAEIVKYVFDQYANHHKDPTSIARKLNEKKLLTKRGNRFEKRNINIILRNRFYIGKVVWNGIERDGVHETFINKELFQAANDRLDATYRPKNRRELGGCVHWLSGLVKCSICGASLAYNRSSKYPYFCCWKYAKGMHEGANTINEHQLEDGVFEYFEQLLDGADFSFSYRAPKSMSDLPDEKAVFEKELEKIDQRKIRIREAYEAGIDSLEEYRENRRRLEEEAARITDLIRESEVKKVDSDPGRHKAEMLEKIRTVYDIIKSDSIDYETKGNFMRSIVEKIVWDRKSNTLTFYLYCSDSREG

SEQ ID NO: 6844 - protein, 483 aa, Unknown
  Description of Unknown: Integrase B6845 sequence
  PTHR30461:SF3,cd00338,SM00857,G3DSA:1.10.10.2600,IPR036162, PF13408,IPR025827,G3DSA:3.40.50.1390,PS51737,IPR006119, IPR038109,PF07508,IPR011109,SSF53041,PTHR30461, PS51736,Coil,PF00239
MRMAAYCRVSTEKEEQLSSLENQREFFEQYADKEGDTLVKIYADEGISGKSMNKREAFAQLLEDSKTGAFDYVAVKDISRFARNTSDFLYGIRTLRSNGVDVRFLSNNQTVIGESEFVLTVFAALAQEESSNLSKRVIFGKRQNAKKGRVPNVVYGYNKIDTYTLEINEQESYIVQLMFKWYIEGEGTRRIAIKLNEMAIPTKKQAKWIPKTIRRILQNPIYIGKIINNKSVTKDFLSGTREAIPPEEWYIHERPELRIISDDDFELVQHKIKERQEQYKNNNPGNRFSNRHLFSNLIKCGECGKSFTAKVYQWKNRYVRYRCCVHNNNGNAHCTNSVTVDEQELLNEVKAYLLTAIEDKKAFADKLMKQYQAQTTNVDVSKLTDTRQSLEKRRSKFKEMFAADIITMDELKKEMSAIDEGMRSVDAELKIYDEIQKKATHIDDIHKDIEQILMQNEYTNDDMRRIIEKIVVYPDKSVEIFMK

SEQ ID NO: 6845 - protein, 483 aa, Unknown
  Description of Unknown: Integrase B6846 sequence
  PTHR30461:SF3,IPR036162,PS51737,IPR011109,PTHR30461, PS00397,PF00239,G3DSA:1.10.10.2600,IPR006119,SSF53041, cd00338,SM00857,IPR025827,IPR038109,PS51736, IPR006118,PF13408,G3DSA:3.40.50.1390,PF07508,Coil
MTFGAAYIRVSTDHQDEYSPDAQRRCILDYAKKNDIVINKEHIFADIGISGTKADKREAFQKMIALAKSKEHPIDTILVWKFSRFARNQEESILYKSLLSRSNVSVISVSEPINEGPFGKLIERILEWMDEYYSIRLSGEVKRGMMQKALSGGYNSKIPYGYKMDENKIPVIVPEQAKVVQMIFDQYVNQHESISNITLMLNETGYRTARGNKFERRVIHYILQNPFYIGQIRWNYAPRARGKKKDGDIIIRDGKHKPLISVEMFEQAQELIKTAYETYHGTVRRVPSAAAKHWLSGVLKCSTCGSSLSFCKGQIPHFKCWKYNKGTCSTSNYLNAKKAEQYVLEGLKNLLLADKIDYEKIPANTLEANTKLLQDELRDLDKKMERIKMAYIDGIDSLDEYKSNKKIIDRKRREIEKQLVPKKAMKDKQQLKHTILDSIKIVIDTLESDCEPAKKSEAIRSICHKIEYNKENDTLYFDLYMVE

SEQ ID NO: 6846 - protein, 483 aa, Unknown
  Description of Unknown: Integrase B6847 sequence
  PTHR30461:SF3,IPR036162,PS51737,IPR011109,PTHR30461, PS00397,PF00239,G3DSA:1.10.10.2600,IPR006119,SSF53041, cd00338,SM00857,IPR025827,IPR038109,PS51736, IPR006118,PF13408,G3DSA:3.40.50.1390,PF07508,Coil
MEQKKIGAAYIRVSTDDQLDYSPESQIKLIQDYAKKNNIVVPEEFIFRDDGISGRSAKKRPGFLRMIAAAKEKPRPFEVILVWKFSRFARNQEESVVYKSLLKKENGIDVVSISEPLIEGPFGGLIERIIEWFDAFYSVNLGTEVRRGMTERVRQGGAVSTAPIGYTYKDRKLVVEPQEAEVVRMIYRDFLSGSAVMAITKKLNSLGIKTKRGGAWENRTVRYVLTNPVYIGRVRWSPEGTNDYHKTDGWNDKTMLVAGAHEAILSEADFYAAQEAVETYVRRYKGNADRAQRESAGMMLQGLVKCSTCGGTLSRTGNGGMNCVRYTHGKCTESHYITVGKLEEIVLTGIELQLNNLQAEIIRREMPGAEDQAAVLRQQLKREETILQKCKAAYLAGADTLEEYKENKAACKERIKRIQELLAEQEKEKPVDVQAFAERTRPVLSQLRDAAVPPEKKNQLLRSFVDRIIFDNKTKTVTIVYYE

SEQ ID NO: 6847 - protein, 483 aa, Unknown
  Description of Unknown: Integrase B6848 sequence
  SM00857,IPR006118,G3DSA:1.10.10.2600,IPR036162,PF13408, IPR025827,PS51737,G3DSA:3.40.50.1390,PS00397,IPR006119, IPR038109,PF07508,SSF53041,IPR011109,PTHR30461, Coil,cd00338,PF00239
MTNLDIGAAYIRVSTDEQTELSPDAQLRVILEQAKKDGVTIPPEFIFIEKKGISGRRAENRPEFQRMIAIAKNQNESPFKRLYLWKFSRFARNQEESTFYKGILRKKCHVEIISVSEPIMEGMFGRLIETIIEWFDEYYSINLSGEVLRGMKEKALRNGYQLRPCLGYAAVGDGKPYQINESEYAVVEQIFHFYHSGLDMTGTARKLNALGYRTKSGNLFDRRAVYRILTNRFYIGEVSWNGIAFQGEHPIRESVSSIFDSVQERLQAEYRPRGRRESSANAHWLSGLLRCHICKATLGFNRTNNSKRRPDFFQCWKYGKGIHPESCSIAARRAEAAVLESLKQVISSGQVDYEYIRPQEPGVKTEETLIQESLDRLRMKEQRVREAYESGIDTLAEYRSNKLRLQAERRELTESMERLKKQAESPLQRPDQKEVVNRIKNVYDLLIDENTDYSTKANALRSVVKYIEYDRKNDRMDVHYYIS

SEQ ID NO: 6848 - protein, 483 aa, Unknown
  Description of Unknown: Integrase B6849 sequence
  PTHR30461:SF3,SM00857,G3DSA:1.10.10.2600,IPR036162,PF13408, PS51737,IPR025827,G3DSA:3.40.50.1390,IPR006119,IPR038109, PF07508,IPR011109,SSF53041,PF00239,PTHR30461, PS51736,Coil,cd00338
MRMAAYCRVSTEKEEQLSSLENQREFFEQYADKEDDTLVKIYADEGISGKSMNKREAFTQLLEDSKTGAFDYVAVKDISRFARNTSDFLYGIRTLRSNGVDVRFLSNNQTVIGESEFVLTVFAALAQEESSNLSKRVIFGKRQNAKKGRVPNVVYGYNKIDTYTLEINEQESYIVQLMFKWYIEGEGTRRIAIKLNEMAIPTKKQAKWVPKTIRRILQNPIYIGKIINNKSVTKDFLSGTREAIPPEEWYIHERPELRIISDDDFELVQQKIKERQEQYKNDNPGNRFSNRHLFSNLIKCGECGKSFTAKVYQWKNRYVRYRCCVHNNNGNAHCTNSVTVDEQELLNEVKAYLLTAIEDKKAFADKLMKQYQAQTTNVDVSKLTDTRQSLEKRRSKFKEMFAADIITMDELKKEMSAIDEGMRSIDEELKAYDEIQKKATHIDDIHKDIEQILMQNEYTNDDMRRIIEKIVVYPDKSVEIFMK

SEQ ID NO: 6849 - protein, 483 aa, Unknown
  Description of Unknown: Integrase B6850 sequence
  PTHR30461:SF3,SM00857,G3DSA:1.10.10.2600,IPR036162,PF13408, IPR025827,G3DSA:3.40.50.1390,PS51737,IPR006119,IPR038109, PF07508,IPR011109,SSF53041,PF00239,PTHR30461, PS51736,Coil,cd00338
MRMAAYCRVSTEKEEQLSSLENQREFFEQYADKEGDTLVKIYADEGISGKSMNKREAFTQLLEDSQTGAFDYVAVKDISRFARNTSDFLYGIRTLRSNGVDVRFLSNNQTVIGESEFVLTVFAALAQEESSNLSKRVIFGKRQNAKKGRVPNVVYGYNKIDTYTLEINEQESYIVQLMFKWYIEGEGTRRIAIKLNEMAIPTKKQAKWVPKTIRRILQNPIYIGKIINNKSVTKDFLSGTRESIPPEEWYIHERPELRIISDDDFELVHHKIKERQEQYKNDNPGNRFSNRHLFSNLIKCGECGKSFTAKVYQWKNRYVRYRCCVHNNNGNAHCTNSVTVDEQELLNEVKAYLLTAIEDKKAFADKLMKQYQAQTTNVDVSKLTDTRQSLEKRRSKFKEMFAADIITMDELKQEMSAIDEGMRSIDEELKAYDEIQKKATHIDDIHKDIEQILMQNEYTNDDMRRIIEKIVVYPDKSVEIFMK

SEQ ID NO: 6850 - protein, 483 aa, Unknown
  Description of Unknown: Integrase B6851 sequence
  PTHR30461:SF3,IPR036162,PS51737,IPR011109,PTHR30461, PS00397,PF00239,G3DSA:1.10.10.2600,IPR006119,SSF53041, cd00338,SM00857,IPR025827,IPR038109,PS51736, IPR006118,PF13408,G3DSA:3.40.50.1390,PF07508,Coil
MQAQTQRVAAAYIRVSTDDQTDLSPESQFEKIREYAAKNNLILLSEYIFRDDGISGRAAEKRPGFQRMIAAAKDAAHPFDVVIVWKYSRFARNQEESIFYKSVLRSKCNVDVVSVSEPLVAGPFGSLIERIIEWMDEFYSIRLSEEVKRSMTVNAQKGRLQATPSFGYCVKDHMLEIVPEEAEIVQEIFRRFVAGDAMYGIAMDVNARGVRTHRGNPFENRTVDYILNNPTYIGKLRWTPTGKTRRNFKNQDSVIADGAHTPIIDMQMWEAAQERIAELKRTYKRYSKPAGDRKHWLCGIVRCPGCGGTLVYTAPHYMQCNNRLKGRCASSQHIAVELLEEAFLQQLQHDFTFAEAMAYTANYTHNDHVAAALAQKRSKITSRMARLREAYLDGIESLPEYKASLQKFQEQLSEIDEEIKKAAETPEGVSTESMREAIASVLRTLRAPDATVAQKYAAAQAIIDKCYFDKSKMLLTISYNFSV

SEQ ID NO: 6851 - protein, 483 aa, Unknown
  Description of Unknown: Integrase B6852 sequence
  PTHR30461:SF3,IPR036162,PS51737,IPR011109,PTHR30461, PS00397,PF00239,G3DSA:1.10.10.2600,IPR006119,SSF53041, cd00338,SM00857,IPR025827,IPR038109,PS51736, IPR006118,PF13408,G3DSA:3.40.50.1390,PF07508,Coil
MTFGAAYIRVSTDHQDEYSPDAQRRCILDYAKKNGIVINKEHIFADIGISGTKADKREAFQKMIALAKSKEHPIDTILVWKFSRFARNQEESILYKSLLSRSNVSVISVSEPINEGPFGKLIERILEWMDEYYSIRLSGEVKRGMMQKALAGGYNSKIPYGYAMNENKIPTIVPEQAKVVQIIFDQYVNQHESISNIALMLNKTGYRTARGNKFERRVIHYILQNPFYIGQIRWNYAPRARGKKKDGDIIIRDGKHEPLISVEMFEKAQELIKIAYETYHGTVRRVPSAAAKHWLSGVLKCPTCGSSLSFCRGQIPHFKCWKYNKGTCSTSNYLNAKKAEQYVLEGLKNLLLADKIDYEKIPANTLETNTKLLQDELRDLDKKMERIKMAYIDGIDSLDEYKSSKKIIDRKRREIEKQLVPKKAMKDKQQPKHTILDSIKIVIDTLESDCEPAKKSEAIRSICHKIEYNKENDTLYFDLYMVE

SEQ ID NO: 6852 - protein, 483 aa, Unknown
  Description of Unknown: Integrase B6853 sequence
  PTHR30461:SF3,IPR036162,PS51737,IPR011109,PTHR30461, PS00397,PF00239,G3DSA:1.10.10.2600,IPR006119,SSF53041, cd00338,SM00857,IPR025827,IPR038109,PS51736, IPR006118,PF13408,G3DSA:3.40.50.1390,PF07508,Coil
MTFGAAYIRVSTEHQDEYSPDAQRRCILDYAKKNGIVINKEHIFADIGISGTKADKREAFQKMIALAKSKEHPIDTILVWKFSRFARNQEESILYKSLLSRSNVSVVSVSEPIHEGPFGQLIERILEWMDEYYSIRLSGEVKRGMMQKALSGGYNSKIPYGYKMDENKIPVIVPEQAKVVQMIFDQYVNQHESISNIALMLNKTGYRTARGNKFERRVIHYILQNPFYIGQIRWNYAPRARGKKKDGDIIIREGKHEPLISVEMFEKAQELIKIAFETYHGTVRRVPSAAAKHWLSGVLKCSTCGSSLSFCKGQIPHFKCWKYNKGTCSTSNYLNAKKAEQYVLAGLKNLLLADKIDYEKIPANTLETNTKLLQDELRDLDKKMERIKMAYIDGIDSLDEYKSNKKIIDRKRREIEKQLVPKKAMKDKQQPKHTILDSIKIVIDTLESDCEPAKKSEAIRSICHKIEYNKENDTLYFDLYMVE

SEQ ID NO: 6853 - protein, 483 aa, Unknown
  Description of Unknown: Integrase B6854 sequence
  PTHR30461:SF3,cd00338,SM00857,IPR006118,G3DSA:1.10.10.2600, IPR036162,PF13408,IPR025827,G3DSA:3.40.50.1390,IPR006119, IPR038109,PF07508,IPR011109,SSF53041,PTHR30461, PS00397,Coil,PF00239
MTTQSTVEIGAAYIRVSTNDQTELSPDAQLRVILESAKADGYVIPKEFVYIEKKGVSGRRADNRQEFQRMVATAKTQPCPFKRLYLWKFSRFARNQDESVFYKSVLRKKCGVEIKSVSEPIADGMFGRLIESIIEWFDEYYSFNLSGEVMRGMTEKALREGYQCSPSLGYAAVGEGKPFIIIEKEYVIVEFIHQSFHKGKDMTAIAREANDMGFRTKRGNRFDRRGIYRILVNEFYNGIVVWNGIKFQGAHETRPSITDIFESNQQRIKEEYRPKSRRETSSCQHWLSGILKCSVCGASLSYNRSNDQKKRPDFFQCWKYGKGVHRESCSVSVKKAEEAVLTSLRQVMADQSVQYEYIRKPDQKVISEESRLSEALEKVAMKEMRVKDAYESGIDSLEEYKANKLRLQDERTHILDELEQLKETPDEPEGPDMQEILKRITTVYDLLMDPDIDNVTKGNAVRRIIKKIVFDRQMNEFHFYYYA

SEQ ID NO: 6854 - protein, 483 aa, Unknown
  Description of Unknown: Integrase B6855 sequence
  PTHR30461:SF3,IPR036162,PS51737,IPR011109,PTHR30461, PS00397,PF00239,G3DSA:1.10.10.2600,IPR006119,SSF53041, cd00338,SM00857,IPR025827,IPR038109,PS51736, IPR006118,PF13408,G3DSA:3.40.50.1390,PF07508,Coil
MRIAAAYIRVSTDDQLEYSPDSQLAQIHRYAKTNDFVLPQEYIFIEEEGRSGRNSTKRPEFLRMISTAKKKPKPFDAILVWKYSRFARNRQDSIVYKSMLRKELGIEVISVSEYLGDDKMSIITEAIIEAMDEFYSVNLAEEVTRGMTEKAHRGQPLTYAPFGYRIENKKYFPDPDTAPLVKMIYADFLSGMGYREIARKLNNMNVRTRFGNPMENRNIEYILRNPVYIGKIHWNPIGKVRRAPLPDTAILTDGEHEALIQPEDWDAVQQRIEQIKALYHRKAKTVVKPGREFALRGLVRCSNCGSTLVNNNSGHLQCYSYAHGRCQISHSIKRDYLTQWVFSTIQADMENGTFLLNIRQPVQTVDPANLLHGQIEREQMKLVRVREAYEAGIDTLEEYRHNKEKLTATIQQLQEELKSILPRTDSDPLKDGRLRLTDKVRALLPELTSQNTPEDEKNRLMRSFIEKIVFDRKENSIEIFYYL

SEQ ID NO: 6855 - protein, 483 aa, Unknown
  Description of Unknown: Integrase B6856 sequence
  PTHR30461:SF3,SM00857,IPR006118,G3DSA:1.10.10.2600,IPR036162, PF13408,IPR025827,G3DSA:3.40.50.1390,IPR006119,IPR038109, PF07508,IPR011109,SSF53041,PF00239,PTHR30461, PS00397,Coil,cd00338
MTTQSTVEIGAAYIRVSTNDQTELSPDAQLRVILESAKADGYVIPKEFVYIEKKGVSGRRADNRQEFQRMVATAKTQPCPFKRLYLWKFSRFARNQDESVFYKSVLRKKCGVEIKSVSEPIADGMFGRLIESIIEWFDEYYSFNLSGEVMRGMTEKALREGYQCSPSLGYAAVGEGKPFIIVEKEYAIVEFIHQSFHKGKDMTAIAREANDMGFRTKRGNRFDRRGIYRILVNEFYNGIVVWNGIKFQGAHETRSSVTDIFESNQQRIKKEYRPRSRRETSSCQHWLSGILKCSVCGASLSYNRSNDQKKRPDFFQCWKYGKGVHRESCSVSVKKAEEAVLTSLRQVMADQSVQYEYIRKPDQKVISEESRLSEALEKVAMKEMRVKDAYESGIDSLEEYKANKLRLQDERNHILEELEQLKETPGEPEGPDMQEVLKRITTVYDLLMDPDIDNVTKGNAVRRIIKKIVFDRQMNEFHFYYYA

SEQ ID NO: 6856 - protein, 483 aa, Unknown
  Description of Unknown: Integrase B6857 sequence
  IPR036162,PS51737,IPR011109,PTHR30461,PS00397, PF00239,G3DSA:1.10.10.2600,IPR006119,SSF53041,cd00338, SM00857,IPR025827,IPR038109,PS51736,IPR006118, PF13408,G3DSA:3.40.50.1390,PF07508,Coil
MDEMRYGALYIRVSTDKQEELSPDAQKRLLLDYAKAHNIFISPEYIFVENGISGRKADKRPEFQKMISIAKADEPPFSLILVWKFSRFARNQEESIVYKSMLKKQHGIDVVSITEPLIDGPFGGLIERIIEWMDEYYSINLSQEVKRGMTEKAMRGGYQATPSLGYASPAPGQPFVVVPEEAEIVKYIFDQYVNHNKSMGAIARKLNEKKLLTKRGNRFERRNVNIILRNRFYVGKVVWSGIERDGVHETFISQELFKGANDRLDATYRPKNRRELSGCVHWLSGLVRCSICGASLAYSRSQKYPYFNCWRYAKGMHDGSNTINERQLENGVLEYFEQLLGGADFSFSYRVPENISDLPGEKSVYEKELEKIDQRQHRIREAYEAGIDSLDEYRENKRRLEAEAARIADLIRESEAKKVDSDPEQHKAEMLEKIRTVYDIIKSDSIDYETKGNFMRSIVEKIVWDRKSNTLTFYLYCSDSREG

SEQ ID NO: 6857 - protein, 483 aa, Unknown
  Description of Unknown: Integrase B6858 sequence
  PTHR30461:SF3,IPR036162,PS51737,IPR011109,PTHR30461, PS00397,PF00239,G3DSA:1.10.10.2600,IPR006119,SSF53041, cd00338,SM00857,IPR025827,IPR038109,PS51736, IPR006118,PF13408,G3DSA:3.40.50.1390,PF07508,Coil
MIFGAAYIRVSTEHQDEYSPDAQRRCILDYAKKNGIVINKEHIFADIGISGTKADKREAFQKMIALAKSKEHPIDTIVVWKFSRFARNQEESILYKSLLSRSNVSVISVSEPINEGPFGKLIERILEWMDEYYSIRLSGEVKRGMMQKALAGGYNSKIPYGYAMNENKIPTIVPEQAKVVQIIFDQYVNQHESISNIALMLNKTGYRTARGNKFERRVIHYILQNPFYIGQIRWNYAPRARGKKKDGDIIIRDGKHEPLISVEMFEQAQELIKTAYETYHGTVRRVPSAAAKHWLSGVLKCSTCGSSLSFCKGQIPHFKCWKYNKGTCSTSNYLNAKKAEQYVLEGLKNLLLADKIDYEKIPANTLETNTKLLQDELRDLDKKMERIKIAYIDGIDSLDEYKSNKKIIDRKRREIEKQLVPKKAMKDKQQPKHTILDNIKIVIDTLESDCEPAKKSEAIRSICHKIEYNKENDTLYFDLYMVE

SEQ ID NO: 6858 - protein, 483 aa, Unknown
  Description of Unknown: Integrase B6859 sequence
  cd03768,PTHR30461:SF3,SM00857,G3DSA:1.10.10.2600,IPR036162, PS51737,G3DSA:3.40.50.1390,IPR006119,IPR038109,PF07508, SSF53041,IPR011109,PTHR30461,PS51736,Coil, PF00239
MRIDAIYARQSIEKRDSISIESQIEMCKRAADPDAAIYRDSGYSGKNTQRPAFTQLMADVRAGKIKRVFCYRLDRISRSVLDFSLLWQTFDANHVDFVSVTESFDTNSPMGRAMIMIIITFAQLERETIVSRYTTNRYARSNAGIWAGGRAPYGFEIQKVDWNGKRQSVLKPIPEKLQIVQDLFTKYTSGTASLYSLSKELNLNSTERWDAITVRRILKNPVYACADVDVYSFYYGNAEIINDVHEFDGSHAAYLVVKGGKSSAGHRTLSLAYHQGVVPSSVFIAAQNMLSQNKQLKNGHRSSFTWLSGLLKCHKCGGRINVFQNKGLTYFQCYKRFHQAGSCDAKIHGNSLRYESYVEDAIQNRIDTIVKNNSTEDVPNQQLNDMKIQLLENERQINNLVEALKIGGAVAMRSIQNELQALEAEHERITNEITAMQPVHQVPNGLAVIDFAKLDYDSKRDVARMMIDKILVGDDSPIQIIWK

SEQ ID NO: 6859 - protein, 483 aa, Unknown
  Description of Unknown: Integrase B6860 sequence
  PTHR30461:SF3,cd00338,SM00857,IPR006118,G3DSA:1.10.10.2600, IPR036162,PF13408,IPR025827,G3DSA:3.40.50.1390,IPR006119, IPR038109,PF07508,IPR011109,SSF53041,PTHR30461, PS00397,Coil,PF00239
MTTQSTVEIGAAYIRVSTNDQTELSPDAQLRVILESAKADGYVIPKEFVYIEKKGVSGRRADNRQEFQRMVATAKTQPCPFKRLYLWKFSRFARNQDESVFYKSVLRKKCGVEIKSVSEPIADGMFGRLIESIIEWFDEYYSFNLSGEVMRGMTEKALREGYQCSPSLGYAAVGEGKPFIIVEKEYVIVEFIHQSFHKGKDMTTIAREANDMGFRTKRGNRFDRRGIYRILVNEFYNGIVVWNGIKFQGAHETRPSITDIFESNQQRIKEEYRPRSRRETSSCQHWLSGILKCSVCGASLSYNRSNDQKKRPDFFQCWKYGKGVHRESCSVSVKKAEEAVLTSLRQVMEDQSVQYEYIRKPDQKVISEESRLSEALEKVAMKEMRVKDAYESGIDSLEEYKANKLRLQDERTHILDELEQLKETPDEPEGPDMQEVLKRITTVYDLLMDPDIDNVTKGNAVRRIIKKIVFDRQMNEFHFYYYA

SEQ ID NO: 6860 - protein, 483 aa, Unknown
  Description of Unknown: Integrase B6861 sequence
  PTHR30461:SF3,cd00338,SM00857,IPR006118,G3DSA:1.10.10.2600, IPR036162,PF13408,IPR025827,G3DSA:3.40.50.1390,IPR006119, IPR038109,PF07508,IPR011109,SSF53041,PTHR30461, PS00397,Coil,PF00239
MTTQSTVEIGAAYIRVSTNDQTELSPDAQLRVILESAKADGYVIPKEFVYIEKKGVSGRRADNRQEFQRMVATAKTQPCPFKRLYLWKFSRFARNQDESVFYKSVLRKKCGVEIKSVSEPIADGMFGRLIESIIEWFDEYYSFNLSGEVMRGMTEKALREGYQCSPSLGYAAVGEGKPFIIIEKEYAIVEFIHQSFHKGKDMTAIAREANDMGFRTKRGNRFDRRGIYRILVNEFYNGIVVWNGIKFQGAHETRSSVTDIFESNQQRIKKEYRPRSRRETSSCQHWLSGILKCSVCGASLSYNRSNDQKKRPDFFQCWKYGKGVHRESCSVSVKKAEEAVLTSLRQVMADQSVQYEYIRKPDQKVISEESRLSEALEKVAMKEMRVKDAYESGIDSLEEYKANKLRLQDERNHILEELEQLKETPGEPEGPDMQEVLKRITTVYDLLMDPDIDNVTKGNAVRRIIKKIVFDRQMNEFHFYYYA

SEQ ID NO: 6861 - protein, 483 aa, Unknown
  Description of Unknown: Integrase B6862 sequence
  PTHR30461:SF3,IPR036162,PS51737,IPR011109,PTHR30461, PS00397,PF00239,G3DSA:1.10.10.2600,IPR006119,SSF53041, cd00338,SM00857,IPR025827,IPR038109,PS51736, IPR006118,PF13408,G3DSA:3.40.50.1390,PF07508
MQAQAQRVAAAYIRVSTDDQTDLSPESQLEKIREYAAKNNLILLSEYIFRDDGISGRAAEKRPGFQQMIAAAKDAAHPFDVVIVWKYSRFARNQEESIFYKSVLRSKCNVDVVSVSEPLVAGPFGSLIERIIEWMDEFYSIRLSEEVKRSMTVNAQKGRLQATPSFGYCVKDHVLEIVPEEAEIVREIFRRFVAGDAMYGIAMDVNARGVRTHRGNPFENRTVDYILNNPTYIGKLRWTPTGKTRRNFKNQDSVIADGAHAPIIDMQTWEAAQDRIAELKRTYKRYSKPAGDRKHWLCGIVRCPDCGGTLVYTAPHYMQCNNRLKGRCASSQHIAVELLEEAFLQQLQHDFTFAEAMAYKALHTHNDHASAALAQKRAKITGRMARLREAYLDGIESLPDYKASLQKFQDQLCEIDEEIKKAAETPESVSTESMREAIASVLRTLRAPDATVAQKYAAAQAIIDKCYFDKSKMLLTVSYNFSV

SEQ ID NO: 6862 - protein, 483 aa, Unknown
  Description of Unknown: Integrase B6863 sequence
  PTHR30461:SF3,SM00857,G3DSA:1.10.10.2600,IPR036162,PF13408, PS51737,IPR025827,G3DSA:3.40.50.1390,IPR006119,IPR038109, PF07508,SSF53041,IPR011109,PF00239,PTHR30461, PS51736,Coil,cd00338
MKMAAYCRVSTEKEEQLSSLENQREFFEQYADKEGDTLVKIYADEGISGKSMNKREAFTQLLEDSQTGAFDYVAVKDISRFARNTSDFLYGIRTLRSNGVDVRFLSNNQTVIGESEFVLTVFAALAQEESSNLSKRVIFGKRQNAKKGRVPNVVYGYNKIDTYTLEINEKESYIVQLMFKWYIEGEGTRRIAIKLNEMAIPTKKQAKWVPKTIRRILQNPIYIGKIINNKSVTKDFLSGTREAIPPEEWYIHERPELRIISDDDFELVQQKFKERQEQYKNDNPGNRFSNRHLFSNLIKCGECGKSFTAKVYQWKNRYVRYRCCVHNNNGNAHCTNSVTVDEQELLNEVKAYLLTAIEDKKAFADKLMKQYQAQTTNVDVSKLTDTRQSLEKRRSKFKEMFAADIITMDELKKEMSAIDEGMRSIDEELKVYDEIQKKATHIDDIHKDIEQILMQNEYTNDDMRRIIENIVVYPDKSVEIFMK

SEQ ID NO: 6863 - protein, 483 aa, Unknown
  Description of Unknown: Integrase B6864 sequence
  PTHR30461:SF3,IPR036162,PS51737,IPR011109,PTHR30461, PS00397,PF00239,G3DSA:1.10.10.2600,IPR006119,SSF53041, cd00338,SM00857,IPR025827,IPR038109,PS51736, IPR006118,PF13408,G3DSA:3.40.50.1390,PF07508,Coil
MTFGAAYIRVSTDHQDEYSPDAQRRCILDYAKKNGIVINKEHIFADIGISGTKADKREAFQKIIALAKSKEHPIDTILVWKFSRFARNQEESILYKSLLSRSNVSVISVSEPINEGPFGKLIERILEWMDEYYSIRLSGEVKRGMMQKALAGGYNSKIPYGYAMNENKIPTIVPEQAKVVQIIFDQYVNQHESISNIALMLNKTGYRTARGNKFERRVIHYILQNPFYIGQIRWNYAPRARGKKKDGDIIIRDGKHEPLISVEMFEKAQELIKIAYETYHGTVRRVPSAAAKHWLSGVLKCPTCGSSLSFCRGQIPHFKCWKYNKGTCSTSNYLNAKKAEQYVLEGLKNLLLADKIDYEKIPANTLETNTKLLQDELRDLDKKMERIKMAYIDGIDSLDEYKSSKKIIDRKRREIEKQLVPKKAMKDKQQPKHTILDSIKIVIDTLESDCEPAKKSEAIRSICHKIEYNKENDTLYFDLYMVE

SEQ ID NO: 6864 - protein, 483 aa, Unknown
  Description of Unknown: Integrase B6865 sequence
  cd00338,SM00857,G3DSA:1.10.10.2600,IPR036162,PF13408, IPR025827,G3DSA:3.40.50.1390,PS51737,IPR006119,IPR038109, PF07508,IPR011109,SSF53041,PTHR30461,PS51736, Coil,PF00239
MQAAAYARYSTEHQTDSSIAYQMRKIEEYCDAHGITVSARYADEAMSGTNTQRPAFQSLCRDAAQRKFDAVVIYDISRGSRDVSDWFSFRKQMALLHIQVISVEDHIGDILNPADYLTELITVGLGQHHVLTSRQKSMDSIATKAKTGQFLGGTPNFGYVIDENGRYVIQPAEAEIVRTIYQMYAAGKSYGEILDTIGEVRGRRGKVMGKNSLHYLLRNERYIGVYSWCKYHHKIMGKYAGNIPNENAVRIEDSIPAIIDKDTWEAVQMRMNDKKQRACNKAKRNYLLSGLIECTECGASYVGHTSTNKRGYSTRYYCCGNKYRNHTCHAKNINADELEAFVVQNLKHYLANVDFSQMAQQIADEINGATADLKAERKELADIIFQLNNGTKAILKGIDYPELQEEMFRLRVRKSELEDMIQRGAEHNPVSVEKLVQLFQNAMERLDTDTKQVCKSMVKIYAHSNGDCDLEVGVHINGCGSQI

SEQ ID NO: 6865 - protein, 483 aa, Unknown
  Description of Unknown: Integrase B6866 sequence
  cd00338,SM00857,G3DSA:1.10.10.2600,IPR036162,PF13408, IPR025827,G3DSA:3.40.50.1390,PS51737,IPR006119,IPR038109, PF07508,IPR011109,SSF53041,PTHR30461,PS51736, Coil,PF00239
MQAAAYARYSTEHQTDSSIAYQMRKIEEYCDAHGITVSARYADEAMSGTNTQRPAFQSLCRDAAQRKFDAVVIYDISRGSRDVSDWFSFRKQMALLHIQVISVEDHIGDILNPADYLTELITVGLGQHHVLTSRQKSMDSIATKAKTGQFLGGTPNFGYTIDENGRYVIQPAEAKIVRTIYQMYAAGKSYGEILDTIGEVRGRRGKVMGKNSLHYLLRSERYIGVYSWCKYHHKIMGKYAGNIPNENAVRIEDSIPAIIDKDTWEAVQMRMNDKKQRACNKAKRNYLLSGLIECTECGASYVGHTSTNKRGYSTRYYCCGNKYRNHTCHAKNINAEELEKFVVQNLKHYLANVDFSQMAQQIADEINGATADLKAERKELADIIFQLNNGTKAILKGIDYPELQEEMFRLRVRKSDLEDIIQRGTEHNPVSVEKLVQLFQNAMERLDTDTKQVCKSMVKIYAHSNGDCDLEVGVHINGCGSQI

SEQ ID NO: 6866 - protein, 483 aa, Unknown
  Description of Unknown: Integrase B6867 sequence
  PTHR30461:SF3,IPR036162,PS51737,IPR011109,PTHR30461, PS00397,PF00239,G3DSA:1.10.10.2600,IPR006119,SSF53041, cd00338,SM00857,IPR025827,IPR038109,PS51736, IPR006118,PF13408,G3DSA:3.40.50.1390,PF07508,Coil
MEQKKIGAAYIRVSTDDQLDYSPESQIKLIQDYAKKNNIVIPEEFIFRDDGISGRSAKKRPGFLRMIAAAKEKPRPFEVILVWKFSRFARNQEESVVYKSLLKKEAGIDVVSISEPLIEGPFGGLIERIIEWFDAFYSVNLGTEVRRGMTERVRQGGAVSTAPIGYTYKDRKLVVEPQEAEVVRMIYRDFLSGSAVMAITKKLNSLGIKTKRGGAWENRTVRYVLTNPVYIGRVRWSPEGTNDYHKTDGWNDKTMLVDGAHEAILSEADFYAAQEAVETYVRRYKGNADRAQRESAGMMLQGLVKCSTCGGTLSRTGNGGMNCVRYTHGKCTESHYITVGKLEEIVLTGIELQLNNLQAEIIRREMPGAEDQAAVLRQQLKREETILQKCKAAYLAGADTLEEYKENKAACKERIKRIQELLAEQEKEKPVDVQAFAERTRPVLAQLRDAAVPPEKKNQLLRSFVDRIIFDNKTKTVTIVYYE

SEQ ID NO: 6867 - protein, 483 aa, Unknown
  Description of Unknown: Integrase B6868 sequence
  PTHR30461:SF3,IPR036162,PS51737,IPR011109,PTHR30461, PS00397,PF00239,G3DSA:1.10.10.2600,IPR006119,SSF53041, cd00338,SM00857,IPR025827,IPR038109,PS51736, IPR006118,PF13408,G3DSA:3.40.50.1390,PF07508,Coil
MTFGAAYIRVSTDHQDEYSPDAQRRCILDYAKKNGIVINKEHIFADIGISGTKADKREAFQKMIALAKSKEHPIDTILVWKFSRFARNQEESILYKSLLSRSNVSVISVSEPINEGPFGKLIERILEWMDEYYSIRLSGEVKRGMMQKALAGGYNSKIPYGYAMNENKIPTIVPEQAKVVQIIFDQYVNQHESISNIALMLNKTGYRTARGNKFERRVIHYILQNPFYIGQIRWNYAPRARGKKKDGDIIIRDGKHEPLISVEMFEKAQELIKIAYETYHGTVRRVPSAAAKHWLSGVLKCSTCGSSLSFCKGQIPHFKCWKYNKGTCSTSNYLNAKKAEQYVLEGLKNLLLADKIDYEKIPANTLETNTKLLQDELRDLDKKMERIKMAYIDGIDSLDEYKSNKKIIDRKRREIEKQLVPKKAMKDKQQPKHTILDSIKIVIDTLESDCEPAKKSEAIRSICHKIEYNKENDTLYFDLYMVE

SEQ ID NO: 6868 - protein, 483 aa, Unknown
  Description of Unknown: Integrase B6869 sequence
  PTHR30461:SF3,IPR036162,PS51737,IPR011109,PTHR30461, PS00397,PF00239,G3DSA:1.10.10.2600,IPR006119,SSF53041, SM00857,IPR025827,IPR038109,PS51736,cd03768, IPR006118,PF13408,G3DSA:3.40.50.1390,PF07508,Coil
MKQKIAAPPADPVADLVDLYIRVSTTEQALEGYSVAEQESRLRRYSEAMGFRIHKVHIDAGFSGASLDRPAIKEVIRDIQSHLVSKVIVWKLDRLSRSQKDMLVMLEDVFLANDCDFISMMESFDTSTAFGRAIVGILAAFAQLERENIKERTTMGRRARLAKGHYNGSRPPLGYRFLEGSNDLKVEPYEANMVHEIFSSFLAGQSINAIAATMQRKYPTTRTWNNTMIRRTLKNPVYMGKVKDVDVIRDGIHEPLISESEFVMASAVLSHNREIKKQSCRSNSLLTGLLYCGDCGARMQPRQIARGYPLRRYVCYSVSRTNKSMIRSDHCTNRLHPYTLEELDDIIIGEIRKLAADEDYLRAIIREDAGPILDESELLKDRLSEIDKQTDKLLNLFQIGVVDLSQIEQRLADLKQEREALKERLERTAPVVQMDIQKIQSYADAFQAALDSGDAEYQSSIIRLLIDKIVVLNEDIEIHWTFC

SEQ ID NO: 6869 - protein, 483 aa, Unknown
  Description of Unknown: Integrase B6870 sequence
  IPR036162,PS51737,IPR011109,PTHR30461,PS00397, PF00239,G3DSA:1.10.10.2600,IPR006119,SSF53041,cd00338, SM00857,IPR025827,IPR038109,PS51736,IPR006118, PF13408,G3DSA:3.40.50.1390,PF07508,Coil
MKTGALYIRVSTDDQTEYSPDAQIRLGLDYAKKNGIVIPKKFIYQDDGISGRKAKNRPAFQELIATAKSEEHPFDVILVWKFSRFARNQEEAIVYKNLLKKAGVDVVSVSEPIPDGFIGELVQRIFEWMDEYYSINLSGEVMRGMTERASRGGYNSDPPIGYKMQDGVPVINPDTAPIVEKIFDWYVNKQMSFWEIANALNLLGYKTKRGGKFQNRTVAYIIRNDFYNGKIIWNKMDHATRRIKDKSEWVITEGTHETFISEELFNAAQERDKSTYHAKGKRPTSTYKHWLSGILVCSACGQRLVRCSTSKKGNTYFQCTGYNHAACTVSHATNEFALKPAIFEALDKVIATGEVTYEIHSSNNDDNNEKKLIEDKLSRLVMKEERIKEAYRDGIDTLEEYKANKEILANERTNLNAMLEQCSAATPDDIQNKLIEKIRSAKEIIECDKSTDVQKHNALASVVEKIVYNKKEDSISMFFYIND

SEQ ID NO: 6870 - protein, 483 aa, Unknown
  Description of Unknown: Integrase B6871 sequence
  PTHR30461:SF3,cd00338,SM00857,IPR006118,G3DSA:1.10.10.2600, IPR036162,PF13408,IPR025827,G3DSA:3.40.50.1390,IPR006119, IPR038109,PF07508,IPR011109,SSF53041,PTHR30461, PS00397,Coil,PF00239
MTTQSTVEIGAAYIRVSTNDQTELSPDAQLRVILESAKADGYVIPKEFVYIEKKGVSGRRADNRQEFQRMVATAKTQPCPFKRLYLWKFSRFARNQDESVFYKSVLRKKCGVEIKSVSEPIADGMFGRLIESIIEWFDEYYSFNLSGEVMRGMTEKALREGYQCSPSLGYAAVGEGKPFIIIEKEYVIVEFIHQSFHKGKDMTAIAREANDMGFRTKRGNRFDRRGIYRILVNEFYNGIVVWNGIKFQGAHETRPSITDIFESNQQRIKEEYRPRSRRETSSCQHWLSGILKCSVCGASLSYNRSNDQKKRPDFFQCWKYGKGVHRESCSVSVKKAEEAVLTSLRQVMADQSVQYEYIRKPDQKVISEESRLSEALEKVAMKEMRVKDAYESGIDSLEEYKANKLRLQDERTHILDELEQLKETPDEPEGPDMQEILKRITTVYDLLMDPDIDNVTKGNAVRRIIKKIVFDRQMNEFHFYYYA

SEQ ID NO: 6871 - protein, 483 aa, Unknown
  Description of Unknown: Integrase B6872 sequence
  PTHR30461:SF3,IPR036162,PS51737,IPR011109,PTHR30461, PS00397,PF00239,G3DSA:1.10.10.2600,IPR006119,SSF53041, SM00857,IPR025827,IPR038109,PS51736,cd03768, IPR006118,PF13408,G3DSA:3.40.50.1390,PF07508,Coil
MKQKITAPPADPVVDLVDLYIRVSTTEQALEGYSVAEQESRLRRYSEAMGFRIHKVHIDAGFSGASLDRPAIKEVIRDIQSHLVSKVIVWKLDRLSRSQKDMLVMLEDVFLANDCDFISMMESFDTSTAFGRAIVGILAAFAQLERENIKERTTMGRRARLAKGHYNGSRPPLGYRFLEGSNDLKVEPYEANMVHEIFSSFLAGQSINAIAATMQRKYPTTRTWNNTMIRRTLKNPVYMGKVKDVDVIRDGIHEPLISESEFVMANAVLSHNREIKKQSCRSNSLLTGLLYCGDCGARMQPRQIARGYPLRRYVCYSVSRTNKSMIRSDHCTNRLHPYTLEELDDIIIGEIRKLAADEDYLRAIIREDAGPILDESELLKDRLSEIDKQTDKLLNLFQIGVVDLSQIEQRLADLKQEREALKERLERTAPVVQMDIQKIQSYADAFQEALDSGDAECQSSIIRLLIDKIVVLNEDIEIHWTFC

SEQ ID NO: 6872 - protein, 483 aa, Unknown
  Description of Unknown: Integrase B6873 sequence
  PTHR30461:SF3,IPR036162,PS51737,IPR011109,PTHR30461, PS00397,PF00239,G3DSA:1.10.10.2600,IPR006119,SSF53041, cd00338,SM00857,IPR025827,IPR038109,PS51736, IPR006118,PF13408,G3DSA:3.40.50.1390,PF07508,Coil
MTFGAAYIRVSTEHQDEYSPDAQRRCILDYAKKNGIVINKEHIFADIGISGTKADKREAFQKMIALAKSKEHPIDTILVWKFSRFARNQEESILYKSLLSRSNVSVVSVSEPIHEGPFGQLIERILEWMDEYYSIRLSGEVKRGMMQKALAGGYNSKIPYGYKMDENKIPVIVPEQAKVVQMIFDQYVNQHESISNITLMLNETGYRTARGNKFERRVIHYILQNPFYIGQIRWNYAPRARGKKKDGDIIIRDGKHKPLVSVEMFEQAQELIKTAYETYHGTVRRVPSAAAKHWLSGVLKCSTCGSSLSFCRGQISHFKCWKYNKGTCSTSNYLNAKKAEQYVLEGLKNLLLTDKIDYEKIPANTLETNTKLLQDELRNLDKKMERIKTAYIDGIDSLDEYKSNKKIIDRKRREIEKQLVPKKAMRDKQQPKHTILDNIKIVIDTLESDCEPAKKSEAIRSICHKIEYNKENDTLYFDLYMIE

SEQ ID NO: 6873 - protein, 483 aa, Unknown
  Description of Unknown: Integrase B6874 sequence
  PTHR30461:SF3,cd00338,SM00857,G3DSA:1.10.10.2600,IPR036162, PF13408,PS51737,G3DSA:3.40.50.1390,IPR025827,IPR006119, IPR038109,PF07508,IPR011109,SSF53041,PTHR30461, PS51736,Coil,PF00239
MRMAAYCRVSTEKEEQLSSLENQREFFEQYADKEGDTLVKIYADEGISGKSMNKREAFTQLLEDSKTGAFDYVAVKDISRFARNTSDFLYGIRTLRSNGVDVRFLSNNQTVIGESEFVLTVFAALAQEESSNLSKRVIFGKRQNAKKGRVPNVVYGYNKIDTYTLEINEQESYIVQLMFKWYIEGEGTRRIAIKLNEMAIPTKKQAKWVPKTIRRILQNPIYIGKIINNKSVTKDFLSGTREAIPPEEWYIHERPELRIISDDDFELVQHKIKERQEQYKNDNPGNRFSNRHLFSNLIKCGECGKSFTAKVYQWKNRYVRYRCCVHNNNGNAHCTNSVTVDEQELLNEVKSYLLTAIEDKKAFADKLMKQYQAQTTNVDVSKLTDTRQSLEKRRSKFKEMFAADIITMDELKKEMSAIDEGMRSIDEELKVYDEIQKKATHIDDIHKDIEQILMQNEYTNDDMRRIIEKIVVYPDKSVEIFMK

SEQ ID NO: 6874 - protein, 483 aa, Unknown
  Description of Unknown: Integrase B6875 sequence
  PTHR30461:SF3,IPR036162,PS51737,IPR011109,PTHR30461, PS00397,PF00239,G3DSA:1.10.10.2600,IPR006119,SSF53041, cd00338,SM00857,IPR025827,IPR038109,PS51736, IPR006118,PF13408,G3DSA:3.40.50.1390,PF07508,Coil
MTFGAAYIRVSTDHQDEYSPDAQRRCILDYAKKNDIIINKEHIFADIGISGTKADKREAFQKMIALAKSKEHPIDTILVWKFSRFARNQEESILYKSLLSRSNVSVVSVSEPINEGPFGKLIERILEWMDEYYSIRLSGEVKRGMMQKALAGGYNSKIPYGYTMNENKIPTIVPEQAKVVQIIFDQYVNQHESISNIALMLNKTGYRTARGNKFERRVIHYILQNPFYIGQIRWNYAPRARGKKKDGDIIIRDGKHEPLISVEMFEKAQELIKIAYETYHGTVRRVPSAAAKHWLSGVLKCSTCGSSLSFCKGQIPHFKCWKYNKGTCSTSNYLNAKKAEQYVLEGLKNLLLADKIDYEKISANTLETNTKLLQDELRDLDKKMERIKMAYIDGIDSLDEYKSNKKIIDRKRREIEKQLVPKKAMKDKQQPKHTILDSIKIVIDTLESDCEPAKKSEAIRSICHKIEYNKENDTLYFDLYMVE

SEQ ID NO: 6875 - protein, 483 aa, Unknown
  Description of Unknown: Integrase B6876 sequence
  PTHR30461:SF3,IPR036162,PS51737,IPR011109,PTHR30461, PS00397,PF00239,G3DSA:1.10.10.2600,IPR006119,SSF53041, cd00338,SM00857,IPR025827,IPR038109,PS51736, IPR006118,PF13408,G3DSA:3.40.50.1390,PF07508,Coil
MKTGALYVRVSTDDQVEYSPDAQIRLGLEYAKKNNIIIPKQFIFQDDGISGRKANNRPAFQNLIAIAKSDEHPIDVILVWKFSRFARNQEEAIVYKNLLKKANVDVISVSEPIPDGFIGELVQRIFEWMDEYYSINLSGEVMRGMTERASRGGYNSDPPLGYRMQDGVPVIVPEQSEIVKKIFNWYVNKHMSFFDIATKLNALGYKTKRNGKFQNRTVAYIIRNEFYKGKIVWNKSDHSTRKIKDKSEWIITDGEHETFISDELFNAAQEIDKATRRPFKARAQSTYKHWLSGILVCSACGGRLVRSGKSKSGNTYFQCTAYNHASCNESHLTNENALKPAILDALKKVLDSGTVNYVVHSTNKEEKTESELINRKLNRIAMKEERIKEAYRDGIDTIEEYKANKEILNKERQELIALLEQYSNEPSNENENRLMQKIRSSYDIISSDKSTDIQKHKALTSVVEKIVYDKKNHSLLMFFYIND

SEQ ID NO: 6876 - protein, 483 aa, Unknown
  Description of Unknown: Integrase B6877 sequence
  PTHR30461:SF3,IPR036162,PS51737,IPR011109,PTHR30461, PS00397,PF00239,G3DSA:1.10.10.2600,IPR006119,SSF53041, cd00338,SM00857,IPR025827,IPR038109,PS51736, IPR006118,PF13408,G3DSA:3.40.50.1390,PF07508,Coil
MTFGAAYIRVSTDHQDEYSPDAQRRCILDYAKKNDIIINKEHIFADIGISGTKADKREAFQKMIALAKSKEHPIDTILVWKFSRFARNQEESILYKSLLSRSNVSVVSVSEPINEGPFGKLIERILEWMDEYYSIRLSGEVKRGMMQKALAGGYNSKIPYGYTMNENKIPTIVPEQAKVVQIIFDQYVNQHESISNIALMLNKTGYRTARGNKFERRVIHYILQNPFYIGQIRWNYAPRARGKKKDGDIIIREGKHEPLISVEMFEKAQELIKIAYETYHGTVRRVPSAAAKHWLSGVLKCSTCGSSLSFCKGQIPHFKCWKYNKGTCSTSNYLNAKKAEQYVLEGLKNLLLADKIDYEKISANTLETNTKLLQDELRDLDKKMERIKMAYIDGIDSLDEYKSNKKIIDRKRREIEKQLVPKKAMKDKQQPKHTILDSIKIVIDTLESDCEPAKKSEAIRSICHKIEYNKENDTLYFDLYMVE

SEQ ID NO: 6877 - protein, 482 aa, Unknown
  Description of Unknown: Integrase B6878 sequence
  cd00338,SM00857,G3DSA:1.10.10.2600,IPR036162,PF13408, PS51737,IPR025827,G3DSA:3.40.50.1390,IPR006119,IPR038109, PF07508,IPR011109,SSF53041,PTHR30461,PS51736, Coil,PF00239
MQAAAYARYSTEHQTDSSIAYQMRKIEEYCAENGITISARYADEAMSGTNTQRPAFQSLCRDAAQRKFDAVVIYDISRGSRDVADWFGFRKQMAILGVQVISVEDHIGDILNPADYLTELITVGLGQHHVLTSRQKSMDSIATKAKTGQFLGGTPNFGYDIVDGKYVINPAESKIVQTIFQMYAAGKSYGEILGEIGEVRGKRGKIMGKNSLYYILRNERYAGVYSWCKYHSKIMGKYAGRTPNENAVRIEDCIPAIIDKDTWEAVQMRMEDKKHRACNKAKRSYLLSGLIECTECGASYVGHTSTNSRGYSTRYYCCGNKYRNHTCHSQNINAEELEVFVVQNLRQYLVNLDYEQMAQQIAGQINGATADLKAERKELADIIFQLENGTKAILKGIDYPELQEEMLRLRVRKSELEDIIQRGKEKNPVSVEKLVQLFRDAMERLDTNTKQVCKAMVKVYAHSNGDCDLEVGVHMDGKEPNL

SEQ ID NO: 6878 - protein, 482 aa, Unknown
  Description of Unknown: Integrase B6879 sequence
  PTHR30461:SF3,IPR036162,PS51737,IPR011109,PTHR30461, PS00397,PF00239,G3DSA:1.10.10.2600,IPR006119,SSF53041, cd00338,SM00857,IPR025827,IPR038109,PS51736, IPR006118,PF13408,G3DSA:3.40.50.1390,PF07508,Coil
MKVAAAYIRVSTDDQLEYSPDSQLSQIRRYAKNNDFVLPEEYIFVEEEGRSGRNSAKRPEFMRMIATAKKNPKPFDAILVWKFSRFARNRQDSIVYKSMLRKELGIDVISVSEYIGDDKMSIITEAIIEAMDEYYSVNLAEEVTRGMTEKAHRGEPLTYAPFGYRIENKQYLPDPDTAALVQMIYSDFLGGMGYMEIARKLNDLGVRTRFGNRMENRNIEYILKNPVYIGKIHWNPSGKVRRSTPPKTQILSDGQHPPLISQEDFEAAQQRIAQIKQLYHQKAKSRVKPANEYALRGLVRCSSCGSTLVISSPNQPSAYLQCNRYAKGSCATSHAINLVKITDWVMAAIQTDLENETFELHIRQTAVQADTSSVLQAQLEREKSKLERIREAYEAGIDTLEEYRRNKEKLTANIEKLTLQLPQLPDVRASRKAFADKVRSLLPSLLSADTPPSEKNRLLRSFIEKIVFDRQADSIEIYYYIQ

SEQ ID NO: 6879 - protein, 482 aa, Unknown
  Description of Unknown: Integrase B6880 sequence
  cd00338,SM00857,G3DSA:1.10.10.2600,IPR036162,PS51737, G3DSA:3.40.50.1390,IPR006119,IPR038109,PF07508,IPR011109, SSF53041,PTHR30461,PS51736,Coil,PF00239
MPGTNSIPGTAAAYIRVSDDKQDEYSPDSQLKLIRDYAKRNGYYVPDEFVFYDDGISAKTAAKRPKFIEMIGIAKQKNPPFDKILVWKFSRFARNQEESIVYKSLLRKNGVEVISISEPLIDGAFGSLIERIIEWMDEYYLVRLSGEVKRGMKEKASRGEAMSGRVFGYLPKDGTLIPHPEEAPLVRMIFDDYLKNGKGARQIAIKLQQLGVKTIRGNDPDNRFVDYVLHNPVYCGKVRWSTDGCAASKRDYNNENIMLVNGSFEPIISEQTFNAAQNKIADQKKRYPKYQRNEAPTEYMLRGLVRCDSCGATLTLQKASKALQCHNYARGSCKVSHSISIAKANKTIIEALQYAVDHLDFNILPAEEKHTPEDYSKPLAALRKKLARTKEAYINGVDTLEEYKENKQRITEDIAKLEKKQAANTALPEVDKEAFAAKVRGVIAVINSPDTTEQAKNEALRSVLAKIIYHKPAQSLELYFYA

SEQ ID NO: 6880 - protein, 482 aa, Unknown
  Description of Unknown: Integrase B6881 sequence
  PTHR30461:SF3,SM00857,G3DSA:1.10.10.2600,IPR036162,PF13408, IPR025827,G3DSA:3.40.50.1390,PS51737,IPR006119,IPR038109, PF07508,SSF53041,IPR011109,PTHR30461, PS51736,cd00338,PF00239
MQAAAYARYSTEHQTESSIAYQMRKIEEYCNDHSITVIARYTDEAKSGTNTQRPAFQQLCKDAAQRKFDAVVIYDISRGSRDVSDWFGFRKQMAILGIQVISVEDRIGDILNPSDYLTELITVGLGQHHVLTSRQKSMDSIATKAKTGQFLGGTPNFGYNVVNGRYVINPAEAEIVQKIYRMYAAGKSYGEILAEIGEVRGKRGRVIGKNSLHYLLRNERYIGVYSWCKYHHKIMGKYAGNIPNENAVRIEDSIPAIIDKDTWEAVQIRMNDKKQRACNKAKRSYLLSGLIECTECGANYVGHTSTNKKGYSTRYYCCGNKYRNHTCHAKNLNAEELEIFVVQNLKQYLSDLDFSQMAQQVADEINGASVDLKAERKELADIIFQLNNGTKAILKGIDYPELQEEMFRLRVRKSELEDIIRRGEEKKPVSAEKLEQLFQHAVKQLDTDTKQICKSMVKIYAHPNGDCDLEVGVHISGCGSQI

SEQ ID NO: 6881 - protein, 482 aa, Unknown
  Description of Unknown: Integrase B6882 sequence
  SM00857,IPR006118,G3DSA:1.10.10.2600,IPR036162,PF13408, IPR025827,G3DSA:3.40.50.1390,Coil,PS51737,IPR006119, IPR038109,PF07508,SSF53041,IPR011109,PTHR30461, PS00397,cd00338,PF00239
MNEKNLEIGAAYIRVSTDDQTELSPDAQLRVILEAAKKDGIVIPQEFVFMEDRGRSGRRADNRPEFQRMISTARQNPSPFRYLYLWKFSRFARNQEESAFYKGILRKKCGVTIKSVSEPIMEGMFGRLVEMIIEWSDEFYSVNLSGEVLRGMTQKALEHGYQLTPCLGYDAVGHGRPYVINEEQYQIVEFIHRSFFDGKDMTWIAREANRRGYHTRRGNPFDTRAVRIILANSFYVGLVKWNDVTFQGTHECRESVTSVFSANQERLNRIHRPRGRRQASSCKHWLSGLLKCSICGASLGYNQTKDLTKRGHAFQCWKYTKGIHPGSCSVSSLKAEAAVLESLRMILETGEVEYTYEQREKHLDDNKLTLIQKSLERLDTKELRIREAYESGIDTMEEFKANKARLQRERDQLMEELEELRSQEEPEDVPGKEILIERIQNVYDLLQSPDVDNDDKGNAVRSIIKKIVYIKESKTFCFYYYV

SEQ ID NO: 6882 - protein, 482 aa, Unknown
  Description of Unknown: Integrase B6883 sequence
  PTHR30461:SF3,SM00857,IPR006118,G3DSA:1.10.10.2600,IPR036162, PS51737,G3DSA:3.40.50.1390,IPR006119,IPR038109,PF07508, SSF53041,IPR011109,PF00239,PTHR30461,PS00397, PS51736,Coil,cd00338
MQTAAAYIRVSTDDQVEFSPDSQMKAIQKYAKDHDMILPQDLIFADEGISGRHAENRPAFQRMIGLAKTKPKPFDVILLWKFSRFARNREDSIVYKSMLRKQCGIDVVSISEQVGEDKTSILIEALLEAMDEYYSINLAEEVRRGMQEKFSRGGVVSQPPYGYRMGDNVFVIQPDEAEIVRKIYHDFLSGAGRREIAVELNALGVVTRKGRPFDNRRVEYILSNPVYTGMLRRSKNGRQSSGDPFNQREDMQVIPGNHEPIIDRETFDAVQKRLKEAKRLYVKHAHTEGRPFMLKGVVRCSNCGSTLVMAMRNTSLQCHLYAKGQCDVSHAISIAKANTAVLERIKEDLRLGAVGVNVENQHKKKKPTVDATSMLLQKEKQKLERIKEAYAAGVDTLQEYREQKQKITARIEELSKSATVEYHTPEQVSREIVKRIQASLEMLEDAAVSEELKNQAMRALVEKIIFNRKKNLFEIVYRDPFA

SEQ ID NO: 6883 - protein, 482 aa, Unknown
  Description of Unknown: Integrase B6884 sequence
  PTHR30461:SF3,IPR036162,PS51737,IPR011109,PTHR30461, PS00397,PF00239,G3DSA:1.10.10.2600,IPR006119,SSF53041, SM00857,IPR025827,IPR038109,PS51736,cd03768, IPR006118,PF13408,G3DSA:3.40.50.1390,PF07508,Coil
MKAAIYVRVSTMEQAEEGYSLDEQVDKLKKYCEIKGWNIYKIYRDGGFSGANTDRPGLSEMINDAKLRAFDTVLVYKLDRLSRSQKDTLYLIEDILAANDIAFVSLNENFDTSTAFGKAMIGILAVFAQLEREQIRDRLLMGKIGRAKSGKAMAWGVPPFGYVLPESNREKYEIVPVEAEIVKKIYHDYIAGKLVAKICDELNAEGHIGKREPWVHANMKRTLTNPVYAGFIRYRGEVFEANHEPIVSKETFDLVQEQIELRQTRAYQKFNNPRPFQAKYLLSGLIKCGICGARFEVIQYKPRADGSRIRYYKCVSYSPKNHAPSMWKNSDGCTSPKYYLDDLEKELLSELEKLRDDPSLITSYVSKTNQIDVSGLKKRLKTLNNQLKKLVTLFIDNDFPKDVIESKKKIIMDEKKLILDKINEAESIKPEVSTNEVIDELGQIKISMFDLDYEEQKRIARKLIKEIILYPDKMEIHWAFAI

SEQ ID NO: 6884 - protein, 482 aa, Unknown
  Description of Unknown: Integrase B6885 sequence
  PTHR30461:SF3,SM00857,G3DSA:1.10.10.2600,IPR036162,PF13408, PS51737,G3DSA:3.40.50.1390,IPR025827,IPR006119,IPR038109, PF07508,IPR011109,SSF53041,PTHR30461,Coil, PS51736,cd00338,PF00239
MQAAAYARYSTEHQTESSIAYQMRKIEEYCNDHSITVIARYTDEAKSGTNTQRPAFQQLCKDAAQRKFDAVVIYDISRGSRDVSDWFGFRKQMAILGIQVISVEDRIGDILNPSDYLTELITVGLGQHHVLTSRQKSMDSIATKAKTGQFLGGTPNFGYNVVNGRYVINPAEAEIVQKIYRMYAAGKSYGEILAEIGEVRGKRGRVIGKNSLHYLLRNERYIGVYSWCKYHHKIMGKYAGNIPNENAVRIEDSIPAIIDKDTWEAVQIRMNDKKQRACNKAKRSYLLSGLIECTECGANYVGHTSTNKKGYSTRYYCCGNKYRNHTCYAKNLNAEELEVFVVQNLKQYLSDLDFSQMAQQVADEINGASVDLKAERKELADIIFQLNNGTKAILKGIDYPELQEEMFRLRVRKSELEDIIRRGEEKKPVSVEKLEQLFQNAVKQLDTDTKQICKSMVKIYAHPNGDCDLEVGVHISGCGSQI

SEQ ID NO: 6885 - protein, 482 aa, Unknown
  Description of Unknown: Integrase B6886 sequence
  PTHR30461:SF3,IPR036162,PS51737,IPR011109,PTHR30461, PS00397,PF00239,G3DSA:1.10.10.2600,IPR006119,SSF53041, SM00857,IPR025827,IPR038109,PS51736,cd03768, IPR006118,PF13408,G3DSA:3.40.50.1390,PF07508,Coil
MMNTINKVAIYVRVSTNMQAEEGYSIDEQIDKLKSYCQVKDWTVYDIYKDGGFSGGNINRPALEKMIVDAKKKRFDTVLVYKLDRLSRSQKDTLFLIEDVFSKNDISFLSLQENFDTSTPFGKAMVGLLSVFAQLEREQIKERMQLGMIGRAKSGKPMMFTNVSFGYTYSPKTQQLTINQAEAVIVKQIFNEFLGGMSPLRLMAYLNENNILRNGKEWNYQGIQRILRNPVYIGKIKYNNVIYPGLHEPIIDEESYYKAQKLLDARQDEMRVKGKNRQFKAKYMLSGTAKCGYCGAPLRIKIGNKRLDGTRLRVYQCCNRYPRKYAVVTYNDNKKCNSGNYQKEDLEQYVIAEIRKLQLKPEKIDKLFNKVSKIDTVQINKQIASIDNKINRLNDLYLNDMIDIDKLKADAEKFKEQKRVLEKELDKDLKIQEQEKNKEDFKKTIGFKDVTKLDYEEQSFIVKSLIDKILVKKGFIKILWKI

SEQ ID NO: 6886 - protein, 482 aa, Unknown
  Description of Unknown: Integrase B6887 sequence
  cd03768,PTHR30461:SF3,SM00857,G3DSA:1.10.10.2600,IPR036162, PF13408,PS51737,G3DSA:3.40.50.1390,IPR025827,IPR006119, IPR038109,PF07508,IPR011109,SSF53041,PTHR30461, PS51736,PF00239
MDAIYARQSIDKKGSLSIEGQIELCRKFTVDDALVFSDKGFSGKNTKRPAFGELMEAVEAGRVKKIVVYRLDRFSRSLADFSQIWELLRKNDVEFLSVNEQFDTSSPMGRAMLNIVMTFAQLERETTAERVRDNYHHRVSLGAWPGGPAPYGYALSKAELDGRKVSSLIADENAKTVLRIFEEYVRSETSLRALAKTLTEQGIHGPKREAWDNVTLSRILRNPVYAQADEAVYCYYLAQGIQIRQMPEVFDGVHGCLLIGKRDRSRGKYTKKDEQMLSLSTHEGIIPSSLWLRAQDKLSGQMQLSRANAGKYSWLTGLLKCSKCGYAVKVNYIKSEQRCKLVCSGRSNFGSCDESIDVDLRELETHIANELQHILDACPAELPSVSEDHAQAKAVLEIEQKIDRLVNALAESSDVAVVYISKMIEKLHAEREQLLHTVPHSAPQIRRLDFSHSVFDEKKLIAAEFIERIELDGNHVNIIWKA

SEQ ID NO: 6887 - protein, 482 aa, Unknown
  Description of Unknown: Integrase B6888 sequence
  cd03768,PTHR30461:SF3,SM00857,IPR036162,PF13408, IPR025827,G3DSA:3.40.50.1390,PS51737,IPR006119,PF07508, SSF53041,IPR011109,PTHR30461,PS51736,PF00239
MDAIYARQSIDKKGSLSIEGQIELCRKFTADDALVFSDKGFSGKNTKRPAFGELMEAVEAGRVKKIVVYRLDRFSRSLADFSQIWELLRKNDVEFLSVNEQFDTSSPMGRAMLNIVMTFAQLERETTAERVRDNYHHRVSLGAWPGGPAPYGYALSKAELDGRKVSSLIADENAKTVLHIFEEYVRSETSLRALAKTLTEQGIHGPKREAWDNVTLSRILRNPVYVQADEAVYCYYLAQGIQIRQMPEVFDGVHGCLLIGKRDRSRGKYTKKDEQMLSLSTHEGIIPSSLWLRVQDKLSGQMQLPRANAGKYSWLTGLLKCGKCGYAVKVNYIKSEQRCKLVCSGRSNFGSCDESIDVDLRELETHIANELQHILDACPAEFPSVNEDHVQAKAVLEIEQKIDRLVNALAESSDVAVVYISKMIEKLHAEREQLLHTAPHSAPQIRRLDFSRSAFDEKKLIAAEFIERIELDGNHVNIIWKA

SEQ ID NO: 6888 - protein, 482 aa, Unknown
  Description of Unknown: Integrase B6889 sequence
  cd00338,SM00857,G3DSA:1.10.10.2600,IPR036162, PF13408,PS51737,G3DSA:3.40.50.1390,IPR025827, IPR006119,IPR038109,PF07508,IPR011109, SSF53041,PTHR30461,Coil,PF00239
MDIAVYTRVSTEKESQVSSYENQLSYFKNKIEKEGNVLYQFYGDPGLSGVNLKREQFIKMLYDAGIDTLNINTQQVFVLSKRNPKFDIIYTKSTSRLARTTDILNVIKLLKQKGITIYFEDINKSTNDIDAELLINLMILLDAQFSKDLSNKTRFGKRESNKKNLYKMRLLGYDKIDDKVVIIQEEAELVKKIFDMYVNQNLGTHIIAKKINEQGYRSIKGRKFNGTSIYGILHNEKYIGTYVANKRYTDSVNNIHRKNEEKDWIIRENAFEAIINKDLFNKAQEKLSSTAIGNPPTANNRYGTHLKCGICGGNTQIRARKNRSNRYVCSTKRKKGPSVCNGPYVLEETIDKFVNSVLRRIDYWYNGEIFWGIRALEKKKGNLKEDKDIEERRNKLVDLYLDNLIDKKLYEKRIKELDELNKTNEIIDKINNKIQQLKELRDIQLPTTPQELLSISTLYINEDKSLSIKFNIRKEIEEIVNS

SEQ ID NO: 6889 - protein, 482 aa, Unknown
  Description of Unknown: Integrase B6890 sequence
  cd03768,PTHR30461:SF3,SM00857,IPR036162,PF13408, IPR025827,G3DSA:3.40.50.1390,PS51737,IPR006119,PF07508, SSF53041,IPR011109,PTHR30461,PS51736,PF00239
MDAIYARQSIDKKGSLSIEGQIELCRKFTVDDALVFSDKGFSGKNTKRPAFGELMEAVEAGRVKKIVVYRLDRFSRSLADFSQIWELLRKNDVEFLSVNEQFDTSSPMGRAMLNIVMTFAQLERETTAERVRDNYHHRVSLGAWPGGPAPYGYALSKAELDGRKVSSLIADENAKTVLHIFEEYVRSETSLRALAKTLTEQGIHGPKREAWDNVTLSRILRNPVYVQADEAVYCYYLAQGIQIRQMPEVFDGVHGCLLIGKRDRSRGKYTKKDEQMLSLSTHEGIIPSSLWLRVQDKLSGQMQLPRANAGKYSWLTGLLKCGKCGYAVKVNYIKSEQRCKLVCSGRSNFGNCDESIDVDLRELEAHIANELQHILDACPAELPTVGEERAQAEAVLEIEQKIDRLVNALAESSDVAVVYISKMIEKLHAEREQLLHTAPHSASQIRRLDFSRSAFDEEKLIAAEFIERIELDGNHVNIIWKA

SEQ ID NO: 6890 - protein, 482 aa, Unknown
  Description of Unknown: Integrase B6891 sequence
  PTHR30461:SF3,SM00857,G3DSA:1.10.10.2600,IPR036162,PF13408, PS51737,IPR025827,G3DSA:3.40.50.1390,IPR006119,IPR038109, PF07508,SSF53041,IPR011109,PTHR30461, Coil,PS51736,cd00338,PF00239
MSKMKGVIYARYSPGPDQTERSIEGQVADCQAYADRNDIEIIKVYADRHVSGRSLKGRMEFQKMIKDAEKGLFDCVVTWKIDRFGRDRYDIANNKMKLKRTGVKLLYSKEAIPEGPEGIILESVLEGLAEYYSADLAQKVSRGHRENAKKGVWTFPLPLGYTRDDQKHIVPDPVVAPVVRRCFEMYAAGAKEKELIEYMRSQGITGQRGKPISTGVIYRMLRNRRYLGEFELQGVTYEGVEPIVPTDLFEKVQTMFPTSRNNAAGRAKMNYLLSCKCYCGKCGTMMSGECGTGKSGTVYAYYKCGNRKRGGACDLKPVKRELLEEAVLRHTMDDMLTDEVIDRLVAKIMEIQDRDDGQAVVTSLRSRLDGTKKKIENVLDAIENGGGASLVERLSALEEERDALDAELSKAQIKTPRLTADAVRAWLCSFRNGDISDEGFCRRLIDTFVDRVEVREGEALIIYNATKEGAASRCSSTAQLVE

SEQ ID NO: 6891 - protein, 482 aa, Unknown
  Description of Unknown: Integrase B6892 sequence
  PTHR30461:SF3,SM00857,IPR006118,G3DSA:1.10.10.2600,IPR036162, PS51737,PS00397,G3DSA:3.40.50.1390,IPR006119,IPR038109, PF07508,SSF53041,IPR011109,PTHR30461,Coil, PS51736,cd00338,PF00239
MQTAAAYIRVSTDDQVEFSPDSQMKAIQKYAKDHDMILPQDLIFADEGISGRHAENRPAFQRMIGLAKTKPKPFDVILLWKFSRFARNREDSIVYKSMLRKQCGIDVVSISEQVGEDKTSILIEALLEAMDEYYSINLAEEVRRGMQEKFSRGGVVSQPPYGYRMGDNVFVIQPDEAEIVRKIYHDFLSGAGRREIAVELNALGVVTRKGRPFDNRRVEYILSNPVYTGMLRRSKNGRQSSGDPFNQREDMQVIPGNHEPIIGRETFDATQKRLKEAKRLYVKHAHTEGRPFMLKGVVRCSNCGSTLVMAMRNTSLQCHLYAKGQCDVSHAISIAKANTAVLERIKEDLRLGAVGVNVENQHKKKKPTVDATSMLLQKEKQKLERIKEAYAAGVDTLQEYREQKQKITARIEELSKSATVEYHTPEQVSREIVKRIQASLEMLEDAAVSEELKNQAMRALVEKIIFNRKKNLFEIVYRDPFA

SEQ ID NO: 6892 - protein, 482 aa, Unknown
  Description of Unknown: Integrase B6893 sequence
  PTHR30461:SF3,IPR036162,PS51737,IPR011109,PTHR30461, PS00397,PF00239,G3DSA:1.10.10.2600,IPR006119,SSF53041, cd00338,SM00857,IPR025827,IPR038109,PS51736, IPR006118,PF13408,G3DSA:3.40.50.1390,PF07508,Coil
MRQGAVYIRVSTDDQTEYSPDAQLKRIKEYAQNHDILISQEYIYIENGVSGRTVAKREQFKKMIQKAKEKPKPFDIVLIHAYDRFARNVKESRIYKELLRDDLGIELISITEDFGSGKNSFLMEGIKDILNEYYSLNLRDEVLKGMYEKVSRGEVCGKAVLGYNLINKKLIINEEEAKTIKLIFNKYAYDNLGLLDIAKLVNQMGLKTKTGNKFENRTIKYILRNPVYIGKLRYSKKGKVDYHTYAVIKEEELYDGIHERIIDEETWNTVQKRLDKNILFSIPHKIDTINADYWLKGIVRCPYCNCTMIRHQKVNLRCNGYGKGKCHNKNTINLKFLEKLVLNQMKQDFDGKKISLNTIKIKSNECNERDIIIRQINNTEAKFARIKEAYVDGIDTLEEYKKNKEIISREISILKERLDKIEKPKEVPKDNLKLKIKDIYDLLTNEKVEMSVKKNAVHMLINKIVIDEKNMKILLTYNESPF

SEQ ID NO: 6893 - protein, 482 aa, Unknown
  Description of Unknown: Integrase B6894 sequence
  PTHR30461:SF3,SM00857,G3DSA:1.10.10.2600,IPR036162,PF13408, IPR025827,PS51737,G3DSA:3.40.50.1390,IPR006119,IPR038109, PF07508,SSF53041,IPR011109,PF00239,PTHR30461, PS51736,Coil,cd00338
MQAAAYARYSTEHQTSSSIAYQMRKIEEYCDSHGITVSARYADEAMSGTNTQRPAFQSLCQDAALRKFDAVVIYDISRGSRDVSDWFGFRKQMAVLGVQVISVEDHIGDILNPADYLTELITVGLGQHHVLTSRQKSMDSIATKAKTGQFLGGTPNYGYDIVDGRYVINPAEAEIVRKIYRMYAAGKSYGEILSAIGEVRGRRGKVMGKNSLYYLLRNERYIGVYSWCKYHHKIMGKYAGNLPNENAVRIEDSIPAIIDKDTWEAVQMRMDDKKHRACNKAKRSYLLSGLIECTECGASYVGHTSTNSRGYSTRYYCCGNKYRNHTCHSQNINAEELEVFVVQNLRQYLANLDYEQMAQQIASQINGATADLKEERKELADIIFQLENGTKAILKGIDYPELQEEMLRLRVRKSELEDIIRRGREKNPVSVEKLVQLFRDAMERLDTDTKQVCKAMVKVYAHSNGDCDLEVGVHMNGCGSQI

SEQ ID NO: 6894 - protein, 482 aa, Unknown
  Description of Unknown: Integrase B6895 sequence
  SM00857,IPR006118,G3DSA:1.10.10.2600,IPR036162,PF13408, PS51737,IPR025827,Coil,G3DSA:3.40.50.1390,IPR006119, IPR038109,PF07508,SSF53041,IPR011109,PTHR30461, PS00397,cd00338,PF00239
MNEKNLEIGAAYIRVSTDDQTELSPDAQLRVILEAAKKDGIVIPQEFVFMEDRGRSGRRADNRPEFQRMISTARQNPSPFRYLYLWKFSRFARNQEESAFYKGILRKKCGVTIKSVSEPIMEGMFGRLVEMIIEWSDEFYSVNLSGEVLRGMTQKALEHGYQLTPCLGYDAVGHGRPYIINEEQYQIVEFIHRSFFDGKDMTWIAREANRRGYHTRRGNPFDTRAVRIILTNSFYVGLVKWNDVTFQGAHECRESVTSVFSANQERLSRIHRPRGRRQASSCKHWLSGLLKCSICGASLGYNQTKDLTKRGHAFQCWKYTKGIHPGSCSVSSLKAEAAVLESLRMILETGEVEYTYEQREKHLDDNKLTLIQKSLERLDTKELRIREAYESGIDTLDEFKANKARLQREREQLMEELEELRSQEEPKRLPGKEVLIERIRNVYDLLQSPDVDNDDKGNAVRSIIKKIVYIKESKTFCFYYYV

SEQ ID NO: 6895 - protein, 482 aa, Unknown
  Description of Unknown: Integrase B6896 sequence
  cd03768,PTHR30461:SF3,SM00857,G3DSA:1.10.10.2600,IPR036162, PF13408,IPR025827,G3DSA:3.40.50.1390,PS51737,IPR006119, IPR038109,PF07508,SSF53041,IPR011109,PTHR30461, PS51736,PF00239
MDAIYARQSIDKKGSLSIEGQIELCRKFTADDALVFSDKGFSGKNTKRPAFGELMEAVEAGRVKKIVVYRLDRFSRSLADFSQIWELLRKNDVEFLSVNEQFDTSSPMGRAMLNIVMTFAQLERETTAERVRDNYHHRVSLGAWPGGPAPYGYALSKAELDGRKVSSLIADENAETVLRIFEEYVRSETSLRALAKTLTEQGIHGPKREAWDNVTLSRILRNPVYAQADEAVYCYYLAQGIQIRQMPEVFDGVHGCLLIGKRDRSRGKYTKKDEQMLSLSTHEGIIPSSLWLRVQDKLSGQMQLPRANAGKYSWLTGLLKCSKCGYAVKVNYIKSEQRCKLVCSGRSNFGSCDESIDVDLRELETHIANELQRILDACPAELPSVSEDHAQAKAVLEIEQKIDRLVNALAESSDVAVVYISKMIEKLHAEREQLLHTAPHSASQIRRLDFSRSAFDEKKLIAAEFIERIELDGNHVNIIWKA

SEQ ID NO: 6896 - protein, 482 aa, Unknown
  Description of Unknown: Integrase B6897 sequence
  cd03768,PTHR30461:SF3,SM00857,G3DSA:1.10.10.2600,IPR036162, PF13408,IPR025827,G3DSA:3.40.50.1390,PS51737,IPR006119, IPR038109,PF07508,IPR011109,SSF53041,PTHR30461, PS51736,PF00239
MDAIYARQSIDKKGSLSIEGQIELCRKFTVDDALVFSDKGFSGKNTKRPAFGELMEAVEAGCVKKIVVYRLDRFSRSLADFSQIWELLRKNDVEFLSVNEQFDTSSPMGRAMLNIVMTFAQLERETTAERVRDNYHHRVSLGAWPGGPAPYGYALSKAELDGRKVSSLIADENAKTVLHIFEEYVRSETSLRALAKALTEQGIHGPKREAWDNVTLSRILRNPVYAQADEAVYCYYLAQGIQIRQMPEVFDGVHGCLLIGKRDRSRGKYTKKDEQMLSLSTHEGIIPSSLWLRAQDKLSGQMQLPRANAGKYSWLTGLLKCSKCGYAVKVNYIKSEQRCKLVCSGRSNFGSCDESIDVDLRELETHIANELQHILDACPAEFPSVNEDHVQAKAVLEIEQKIDRLVNALAESSDVAVVYISKMIEKLHAEREQLLHTAPHSASQSRRLDFSHSVFDEKKLIAAEFIERIELDGNHVNIIWKA

SEQ ID NO: 6897 - protein, 482 aa, Unknown
  Description of Unknown: Integrase B6898 sequence
  PTHR30461:SF3,SM00857,G3DSA:1.10.10.2600,IPR036162,PF13408, PS51737,G3DSA:3.40.50.1390,IPR025827,IPR006119,IPR038109, PF07508,IPR011109,SSF53041,PTHR30461,Coil, cd00338,PF00239
MTGRNDNRDEFQQMLSDCAKKQFQVVIVWKVDRIGRNREEITFNKYRMKRHGVRVEYVAENIPDSPEAVILESVLEGMAEYYSLQLSQNIRRGYRENAKKCKYAGGRVPLGYKLAEDKSFEIDPATAPVVKDIFNRYAAGQTITEIITDLNAQGLRTATGSEFTKNSLRALLKNEKYIGIFDFKNGEIRIEDGVPAITDKSTFDKVQKLLVTNQRAPAHKWSKAEYLLTDKLFCGSCGGLMVGESGTSKTGAKYSYYLCTNHKRKRGCAQKAIRADWLEKYVLDMAKSIILDDKTIEFIADGTWEYYQQHERRREKVEALKGQLAEVDKALTNIMRAIESGLPFTETTKARVEELDGQKTALTSAIAEAELAYDSGLTRDHILFFLKQFQEFDYSQPQYQKRLIDTFINSIYVYPDEMTFNFNFGNESKTIKFEEMEAAKGGEVFVRCAPCSTIKLNQKRYQREKPRSFNDFRAFLRPFLEA

SEQ ID NO: 6898 - protein, 482 aa, Unknown
  Description of Unknown: Integrase B6899 sequence
  PTHR30461:SF3,IPR036162,PS51737,IPR011109,PTHR30461, PS00397,PF00239,G3DSA:1.10.10.2600,IPR006119,SSF53041, cd00338,SM00857,IPR025827,IPR038109,PS51736, IPR006118,PF13408,G3DSA:3.40.50.1390,PF07508,Coil
MKIAAAYIRVSTDDQEEYSPDSQLRIIREYAKAHGYILPGEYIFQDDGISAATARKRPAFNRMIALAKGTEKPFDVILVLMFSRFARNREESVLYKGLLRKQGIAVVSIKEPAVDGPFGTLIESIIEWFDEYYLINLSSEVRRGMSEKFRRGEAMGSAPFGYRIDSASKAFVADPARAEIVRQVFRDYADGAGCREIALKLGAMGIATKRGNVPDNRFVEYMLHNPVYLGKIRWTAEHKNDYRRTEAADDTEIVDGKHPPIITQELWDAVQQRAAQVKATYGKYQRQTPAAYMLRGMLRCSNCGATLVLAGRKGTAPHFQCHRYARGQCPVSHALSLRKANAAVIDGLRDAVDNLSFALVPRRTDPAGKQGPDYARLIEQERRKLARCKDAYQAGVDTLEEYRANKARLTDSIQSLQEQAAKAAGGDAETFDRAAYARKVAGVVKYLEGDADEAAKNEALRSVVDHITYDKANQRLVIYFYS

SEQ ID NO: 6899 - protein, 482 aa, Unknown
  Description of Unknown: Integrase B6900 sequence
  IPR036162,PS51737,IPR011109,PTHR30461,PS00397, PF00239,G3DSA:1.10.10.2600,IPR006119,SSF53041,cd00338, SM00857,IPR025827,IPR038109,PS51736,IPR006118, PF13408,G3DSA:3.40.50.1390,PF07508,Coil
MAIFYKTEVIFMSSKVACLYIRVSTEDQTELSPDAQKRLLLDYAQKNDMIVSGDFIFTESVSGRHAQKRPEFQKMIALAKQPSHPIDVILVWKFSRFARNQEESIVYKSMLKKDNVDVISVSEPLIEGPFGSLIERIIEWMDEYYSIRLSGEVLRGMKEKALQKGYQTSPCLGYTAVGHGKPYVINEAEYAIVSYIMDLYDNQNLDETAIARRCNDLGYRTKRGKLFERRSVDRILGNPFYCGTVVWNGVEFEGNHEVRLSRERYEKRQKLITSRKRPVKARNVSACKHWLSGLLKCSVCGATLSYTGNNKCPYFQCWKYAKGFHKTSVALSVKKAEDAVITYFEQILDGAEFTYVCKKKKTDHSLQIDQLQREISKLTMRESRIKEAYEAGVDTLEEYKNNKDRLVSDRLELTAALSQLLQEEQADQPDTEEILKEIRSVADVLKNPDVGYEEKGNLIRSVVEQIIYDKESGKMSFDIIIS

SEQ ID NO: 6900 - protein, 482 aa, Unknown
  Description of Unknown: Integrase B6901 sequence
  PTHR30461:SF3,IPR036162,PS51737,IPR011109,PTHR30461, PS00397,PF00239,G3DSA:1.10.10.2600,IPR006119,SSF53041, cd00338,SM00857,IPR025827,IPR038109,IPR006118, PF13408,G3DSA:3.40.50.1390,PF07508,Coil
MNEKNLEIGAAYIRVSTDDQTELSPDAQLRVILEAAKKDGIIIPQEFVFMEDRGRSGRRADNRPEFQRMISTARQNPSPFRYLYLWKFSRFARNQEESAFYKGILRKKCGVTIKSVSEPIMEGMFGRLVEMIIEWSDEFYSVNLSGEVLRGMTQKALEHGYQLTPCLGYDAVGHGRPYVINEEQYQIVEFIHRSFFDGKDMTWIAREANRRGYHTRRGNPFDTRAVRIILTNSFYVGLVKWNDVTFQGTHECRESVTSVFSANQERLNRIHRPRGRRQASSCKHWLSGLLKCSICGASLGYNQTKDLTKRGHAFQCWKYTKGIHPGSCSVSSLKAEAAVLESLQMILETGEVEYTYEQREKHLDDNKLTLIQKSLERLDTKELRIREAYESGIDTLDEFKTNKARLQRERDQLMEELEELHSQEEPEDVPGKEILIERIQNVYDLLQSPDVDNDDKGNAVRSIIKKIVYIKESKTFCFYYYV

SEQ ID NO: 6901 - protein, 482 aa, Unknown
  Description of Unknown: Integrase B6902 sequence
  IPR036162,PS51737,IPR011109,PTHR30461,PS00397, PF00239,G3DSA:1.10.10.2600,IPR006119,SSF53041,cd00338, SM00857,IPR025827,IPR038109,PS51736,IPR006118, PF13408,G3DSA:3.40.50.1390,PF07508,Coil
MAIFYKTEVIFMSSKVACLYIRVSTEDQTELSPDAQKRLLLDYAQKNDMIVSGDFIFTESVSGRHAQKRPEFQKMIALAKQPSHPIDVILVWKFSRFARNQEESIVYKSMLKKDNVDVISVSEPLIKGPFGSLIERIIEWMDEYYSIRLSGEVLRGMKEKALQKGYQTSPCLGYTAVGHGKPYIINEAEYAIVSYIMDLYDNQNLDETAIARRCNDLGYRTKRGKLFERRSVDRILGNPFYCGTVVWNGVEFEGNHEVRLSRERYEKRQKLITSRKRPVKARNVSACKHWLSGLLKCSVCGATLSYTGNNKCPYFQCWKYAKGFHKTSVALSVKKAEEAVISYFDQILDGAEFTYVCKKKKTDHSLQIDQLQREISKLAMREGRIKEAYEAGVDTLAEYKNNKDRLVSDRLELTAALSQLLQEEQSEQPNTEEVLKEIRSVADVLKNPDVGYEEKGNLIRSVVEQIIYDKESGKMSFDIIIS

SEQ ID NO: 6902 - protein, 482 aa, Unknown
  Description of Unknown: Integrase B6903 sequence
  PTHR30461:SF3,cd00338,SM00857,IPR006118,IPR036162, PF13408,PS51737,IPR025827,G3DSA:3.40.50.1390,IPR006119, SSF53041,IPR011109,PTHR30461,PS00397,PS51736, Coil,PF00239
MTNQTGTGQYVGGTNYIEEVAAYIRVSTQEQKLHGISLEAQVEKLTEYAENHGMKIVKFYKDEGVSGRKLIKKRPALQEMIQDAEKGKFKRIIFIKLDRFFRSVAEYHECMKRLSAGGVIWTATEEKYDLSTPSGEAFVNMKLTMAQFEADQAGERIRMVNEYKIKSGQPLFGAQCLPLGYTVTQPEDGERHKYVAKDAEMEAATNDLIEYALTHGTIRGAMSYINNKYDLHIGYNACAKTLKNEMICGEYRGNPNYCEPYIDRETFDRLQKLISRTPRSTGEKRTYYFTGLICCPKCGRRLVAGIFRSNTKWRKYTYKVYRCSAHFKEKNCEFSSVVLEQTLEDVLLEKLGSIVERKSIEAEDVAAADEKVGKYNIAELQAELDRLNYSWQKNRIKSAEEYDRKYDAIMEQIEAAQAEKEEMGNVDFDRIRDILQSDWRELYKALDDDHKRSFWRSFIEEIELDWGKGRYGKKDIKDITFF

SEQ ID NO: 6903 - protein, 482 aa, Unknown
  Description of Unknown: Integrase B6904 sequence
  cd03768,PTHR30461:SF3,SM00857,IPR036162,PF13408, PS51737,G3DSA:3.40.50.1390,IPR025827,IPR006119,PF07508, IPR011109,SSF53041,PTHR30461,PS51736,PF00239
MDAIYARQSIDKKGSLSIEGQIELCRKFTVDDALVFSDKGFSGKNTKRPAFGELMEAVEAGCVKKIVVYRLDRFSRSLADFSQIWELLRKNDVEFLSVNEQFDTSSPMGRAMLNIVMTFAQLERETTAERVRDNYHHRVSLGAWPGGPAPYGYALSKAELDGRKVSSLIADENAKTVLHIFEEYVRSETSLRALAKALTEQGIHGPKREAWDNVTLSRILRNPVYAQADEAVYCYYLAQGIQIRQMPEVFDGVHGCLLIGKRDRSRGKYTKKDEQMLSLSTHGGIIPSSLWLRAQDKLSGQMQLPRANAGKYSWLTGLLKCSKCGYAVKVNYIKSEQRCKLVCSGRSNFGSCDESIDVDLRELETHIANELQHILDACPAELPSVSEDHAQAKAVLEIEQKIDRLVNALAESSDVAVVYISKMIEKLHAEREQLLHTAPHSASQIRRLDFSHSVFDEKKLIAAEFIERIELDGNHVNIIWKA

SEQ ID NO: 6904 - protein, 482 aa, Unknown
  Description of Unknown: Integrase B6905 sequence
  cd03768,PTHR30461:SF3,SM00857,G3DSA:1.10.10.2600, IPR036162,PF13408,PS51737,G3DSA:3.40.50.1390, IPR025827,IPR006119,IPR038109,PF07508, IPR011109,SSF53041,PTHR30461,PS51736,PF00239
MDAIYARQSIDKKGSLSIEGQIELCRKFTADDALVFSDKGFSGKNTKRPAFGELMEAVEAGRVKKIVVYRLDRFSRSLADFSQIWELLRKNDVEFLSVNEQFDTSSPMGRAMLNIVMTFAQLERETTAERVRDNYHHRVSLGAWPGGPAPYGYALSKAELDGRKVSSLIADENAKTVLHIFEEYVWSETSLRALAKALTEQGIHGPKREAWDNVTLSRILRNPVYAQADEAVYCYYLAQGIQIRQMPEVFDGVHGCLLIGKRDRSRGKYTKKDEQMLSLSTHEGIIPSSLWLRVQDKLSGQMQLPRANAGKYSWLTGLLKCSKCGYAVKVNYIKSEQRCKLVCSGRSNFGSCDESIDVDLRELETHIANELQRILDACPAELPSVSEDHAQAKAVLEIEQKIDRLVNALAESSDVAVVYISKMIEKLHAEREQLLHTAPHSASQIRRLDFSRSAFDEKKLIAAEFIERIELDGNHVNIIWKA

SEQ ID NO: 6905 - protein, 482 aa, Unknown
  Description of Unknown: Integrase B6906 sequence
  PTHR30461:SF3,SM00857,G3DSA:1.10.10.2600,IPR036162,PF13408, IPR025827,G3DSA:3.40.50.1390,PS51737,IPR006119,IPR038109, PF07508,IPR011109,SSF53041,PF00239,PTHR30461, PS51736,Coil,cd00338
MQAAAYARYSTEHQTSSSIAYQMRKIEEYCDSHGITVSARYADEAMSGTNTQRPAFQSLCQDAALRKFDAVVIYDISRGSRDVSDWFGFRKQMAVLGVQVISVEDHIGDILNPADYLTELITVGLGQHHVLTSRQKSMDSIATKAKTGQFLGGTPNFGYDIVNGRYVINPAEAKIVRKIYRMYAAGKSYGEILSAIGEVRGRRGKVMGKNSLYYLLRNERYIGVYSWCKYHHKIMGKYAGNLPNENAVRIEDSIPAIIDKDTWEAVQMRMDDKKHRACNKAKRSYLLSGLIECTECGASYVGHTSTNSRGYSTRYYCCGNKYRNHTCHSQNINAEELEVFVVQNLRQYLANLDYEQMAQQIASQINGATADLKEERKELADIIFQLENGTKAILKGIDYPELQEEMLRLRVRKSELEDIIQRGKEKNPVSVEKLVQLFRNAMERLDTDTKQVCKAMVKVYAHSNGDCDLEVGVHMNGNARHK

SEQ ID NO: 6906 - protein, 482 aa, Unknown
  Description of Unknown: Integrase B6907 sequence
  PTHR30461:SF3,SM00857,G3DSA:1.10.10.2600,IPR036162,PF13408, IPR025827,G3DSA:3.40.50.1390,PS51737,IPR006119,IPR038109, PF07508,SSF53041,IPR011109,PTHR30461,PS51736, cd00338,PF00239
MQAAAYARYSTEHQTESSIAYQMRKIEEYCNDHSITVIARYTDEAKSGTNTQRPAFQQLCKDAAQRKFDAVVIYDISRGSRDVSDWFGFRKQMAILGIQVISVEDRIGDILNPSDYLTELITVGLGQHHVLTSRQKSMDSIATKAKTGQFLGGTPNFGYNVVNGRYVINPAEAEIVQKIYRMYAAGKSYGEILAEIGEVRGKRGRVIGKNSLHYLLRNERYIGIYSWCKYHHKIMGKYAGNIPNENAVRIEDSIPAIIDKDTWEAVQIRMNDKKQRACNKAKRSYLLSGLIECTECGANYVGHTSTNKKGYSTRYYCCGNKYRNHTCHAKNLNAEELEIFVVQNLKQYLSDLDFSQMAQQVADEINGASVDLKAERKELADIIFQLNNGTKAILKGIDYPELQEEMFRLRVRKSELEDIIRRGEEKKPVSAVKLEQLFQHAVKQLDTDTKQICKSMVKIYAHPNGDCDLEVGVHISGCGSQI

SEQ ID NO: 6907 - protein, 482 aa, Unknown
  Description of Unknown: Integrase B6908 sequence
  PTHR30461:SF3,SM00857,IPR006118,G3DSA:1.10.10.2600,IPR036162, PF13408,IPR025827,G3DSA:3.40.50.1390,PS00397,IPR006119, IPR038109,PF07508,SSF53041,IPR011109,PTHR30461, Coil,cd00338,PF00239
MDEKKIEIGAAYIRVSTDDQTELSPDAQLRVILEAAKKDGIVIPQEFVFMEDRGRSGRRADNRPEFQRMISTARQNPSPFRYLYLWKFSRFARNQEESAFYKGILRRKCGVTIKSVSEPIMEGMFGRLVEMIIEWSDEFYSVNLSGEVLRGMTQKALEHGYQLRPCLGYDAVGHGRPYVINEEQYKIVEFIHKAFYDGKDMIWIAREANNRGYRTRFGNLFDVRSVRIIITNSFYVGLVKWNDITFQGTHECRESVTALFPANQERMNREHRPHGRRQAAACKHWLSGLLKCSICGASLGYNQTKDLTKRGHAFQCWKYSKGIHPGSCSVSSLKAEAAVMESLRSVLETGEVEYSYEQREKKLDTDKFDLIQKSMDRLEVKELRIREAYESGIDTIDEFKANKTRLQREREQLMEELEELRSQEEPEDVPGKEVLIERIRNVYDLLQSPDVDNDDKGNAVRSIIKKIVYIKESKTFCFYYYV

SEQ ID NO: 6908 - protein, 482 aa, Unknown
  Description of Unknown: Integrase B6909 sequence
  PTHR30461:SF3,IPR036162,PS51737,IPR011109,PTHR30461, PS00397,PF00239,G3DSA:1.10.10.2600,IPR006119,SSF53041, cd00338,SM00857,IPR025827,IPR038109,PS51736, IPR006118,PF13408,G3DSA:3.40.50.1390,PF07508,Coil
MKIAAAYIRVSTDDQTEYSPAVQLDDILEFAKKNDYHIPKEFIFTDEGISGRTAEKRPAFQSMIRAARKKTNHIDAILVHKYDRFSRNKDDAVLYKALLKKDGVKVISIKEPIPQDDKFAVIYESMLEAMAEYYSLNLSEEVKKTMRKKAENGDYQARAPFGYRNDKKSLVIHPEEAEMVRYVFESYANGVSIFALTRELNQRGFRTIRGNQWEFRTVRYLLNNVTYHGYARWTPSGKTDWGYDIPAAIVAKGSWEPIIDDDLWERVQERYTQQQRRHYPHKRPDTEGIHWLSGKVKCSSCGRSLVISRQYVRGGFEMQCGGYNHGQCHVSHSVSSNRLIPAILDTLRQIADSPDTQAVNFSIRTNNTNSGEIDAISAMIHRTQQKIIKAKEAYLAGIDTIDEYRETKRTSEKEISELQERLSALSEEQTFDADAFSKKVRNVLLTISGDSSMDDKKSAFSEIVEKVVYDKAANSIRLFLID

SEQ ID NO: 6909 - protein, 482 aa, Unknown
  Description of Unknown: Integrase B6910 sequence
  cd03768,PTHR30461:SF3,SM00857,IPR036162,PF13408, IPR025827,G3DSA:3.40.50.1390,PS51737,IPR006119,PF07508, IPR011109,SSF53041,PTHR30461,PS51736,PF00239
MDAIYARQSIDKKGSLSIEGQIELCRKFTVDDALVFSDKGFSGKNTKRPAFGELMEAVEAGRVKKIVVYRLDRFSRSLADFSQIWELLRKNDVEFLSVNEQFDTSSPMGRAMLNIVMTFAQLERETTAERVRDNYHHRVSLGAWPGGPAPYGYALSKVELDGRKVSSLIADENAKTVLHIFEEYVRSETSLRALAKTLTEQGIHGPKREAWDNVTLSRILRNPVYVQADEAVYCYYLAQGIQIRQMPEVFDGVHGCLLIGKRDRSRGKYTKKDEQMLSLSTHEGIIPSSLWLRAQDKLSGQMQLPRANAGKYSWLTGLLKCGKCGYAVKVNYIKSEQRCKLVCSGRSNFGNCDESIDVDLRELETHIANELQHILDACPAELPSVSEDHAQAKAVLEIEQKIDRLVNALAESSDVAVVYISKMIEKLHAEREQLLHTAPHSASQIRRLDFSHSVFDEKKLIAAEFIERIELDGNHVNIIWKA

SEQ ID NO: 6910 - protein, 482 aa, Unknown
  Description of Unknown: Integrase B6911 sequence
  PTHR30461:SF3,cd00338,SM00857,G3DSA:1.10.10.2600,IPR036162, PF13408,IPR025827,G3DSA:3.40.50.1390,PS51737,IPR006119, IPR038109,PF07508,IPR011109,SSF53041, PTHR30461,PS51736,Coil,PF00239
MQAAAYARYSTEHQTSSSIAYQMRKIEEYCDSHGITVSARYADEAMSGTNTQRPAFQSLCQDAALRKFDAVVIYDISRGSRDVSDWFGFRKQMAVLGVQVISVEDHIGDILNPADYLTELITVGLGQHHVLTSRQKSMDSIATKAKTGQFLGGTPNFGYDIVNGRYVINPAEAKIVRKIYRMYAAGKSYGEILSAIGEVRGRRGKVMGKNSLYYLLRNERYIGVYSWCKYHHKIMGKYAGNLPNENAVRIEDSIPAIIDKDTWEAVQMRMDDKKHRACNKAKRSYLLSGLIECTECGASYVGHTSTNSRGYSTRYYCCGNKYRNHTCHSQNINAEELEVFVVQNLRQYLANLDYEQMAQQIASQINGATADLKEERKELADIIFQLENGTKAILKGIDYPELQEEMLRLRVRKSELEDIIQRGKEKNPVSVEKLVQLFRNAMERLDTDTKQVCKAMVKVYAHSNGDCDLEVGVHMNGCGSQI

SEQ ID NO: 6911 - protein, 482 aa, Unknown
  Description of Unknown: Integrase B6912 sequence
  cd00338,SM00857,G3DSA:1.10.10.2600,IPR036162,PF13408, IPR025827,PS51737,G3DSA:3.40.50.1390,IPR006119,IPR038109, PF07508,IPR011109,SSF53041,PTHR30461,PS51736, Coil,PF00239
MQAAAYARYSTEHQTDSSIAYQMRKIEEYCAENGITISARYADEAMSGTNTQRPAFQSLCRDAAQRKFDAVVIYDISRGSRDVSDWFSFRKQMALLHIQVISVEDHIGDILNPADYLTELITVGLGQHHVLTSRQKSMDSIATKAKTGQFLGGTPNFGYDIVGGKYVVNPAESKIVQTIFQMYAAGKSYGEILDTIGEVRGKRGKIMGKNSLYYILRNERYAGVYSWCKYHSKIMGKYAGRTPNENAVRIEDSIPAIIDKDTWEAVQMRMEDKKHRACNKAKRSYLLSGLIECTECGASYVGHTSTNKRGYSTRYYCCGNKYRNHTCHSQNINAEELEVFVVQNLRQYLVNLDYEQMAQQIAGQINGATADLKAERKELANIIFQLENGTKAILKGIDYPELQEEMLRLRVRKSELEDIIQRGKEKNPVSVEKLVQLFRDAMERLDTDTKQVCKAMVKVYAHSNGDCDLEVGVHMDGKEPNL

SEQ ID NO: 6912 - protein, 482 aa, Unknown
  Description of Unknown: Integrase B6913 sequence
  PTHR30461:SF3,IPR036162,PS51737,IPR011109,PTHR30461, PS00397,PF00239,G3DSA:1.10.10.2600,IPR006119,SSF53041, SM00857,IPR025827,IPR038109,PS51736,cd03768, IPR006118,PF13408,G3DSA:3.40.50.1390,PF07508,Coil
MKAAIYVRVSTMEQAEEGYSLDEQVDKLKKYCEIKGWNIYKIYRDGGFSGANTDRPGLSEMINDAKLRAFDTVLVYKLDRLSRSQKDTLYLIEDILAANDIAFVSLNENFDTSTAFGKAMIGILAVFAQLEREQIRDRLLMGKIGRAKSGKAMAWGIPPLGYVLPESNREKYEIVPVEAEIVKKIYHDYIAGKLVAKICDELNAEGHIGKREPWVHANMKRTLTNPVYAGFIRYRGEVFEANHEPIVSKETFDLVQEQIELRQTRAYQKFNNPRPFQAKYLLSGLIKCGICGARFEVIQYKPRADGSRIRYYKCVSYSPKNHAPSMWKNSDGCTSPKYYLDDLEKELLSELEKLRDDPSLITSYVSKTNQIDVSGLKKRLKTLNNQLKKLVTLFIDNDFPKDVIESKKKIIMDEKKLILDKINEAESIKPEVSTNEVIDELGQIKISMFDLDYEEQKRIARKLIKEIILYPDKMEIHWAFAI

SEQ ID NO: 6913 - protein, 482 aa, Unknown
  Description of Unknown: Integrase B6914 sequence
  PTHR30461:SF3,IPR036162,PS51737,IPR011109,PTHR30461, PS00397,PF00239,G3DSA:1.10.10.2600,IPR006119,SSF53041, cd00338,SM00857,IPR025827,IPR038109,PS51736, IPR006118,PF13408,G3DSA:3.40.50.1390,PF07508,Coil
MRQGAVYIRVSTDDQTEYSPDAQLKRIKEYAQNHDILISQEYIYIENGVSGRTVAKREQFKKMIQKAKEKPKPFDVVLIHAYDRFARNVKESRIYKELLRDDLGIELISITEDFGSGKNSFLMEGIKDILNEYYSLNLRDEVLKGMYEKVSRGEVCGKAVLGYNLINKKLIINEEEAKTIKLIFDRYAYDNLGLLDIAKLVNQMGLRTKTGNKFENRTIKYILRNPIYIGKLRYSKKGRVDYHTYSVIKEEDLYDGIHERIIDEETWNTVQKRLDKNILFSVPHKIDTVNADYWLKGIVRCPYCNNTMIRHQKINLRCNGYGKGKCHNKTTINLKFLEKLVLNQMKQDFDGKKISLNTIKIKSNESNERDIIIRQINNTEAKFARIKEAYVDGIDTLEEYKKNKEIISREINILKEILDKIEKPKEVPKDNLKLKIKDIYDLLTNEKVEMSVKKNAAHMLINKIVVDEKNMKILLTYNESPF

SEQ ID NO: 6914 - protein, 482 aa, Unknown
  Description of Unknown: Integrase B6915 sequence
  PTHR30461:SF3,IPR036162,PS51737,IPR011109,PTHR30461, PS00397,PF00239,G3DSA:1.10.10.2600,IPR006119,SSF53041, cd00338,SM00857,IPR025827,IPR038109,PS51736, IPR006118,PF13408,G3DSA:3.40.50.1390,PF07508,Coil
MAQLAAAYIRVSTEDQTEYSPAAQLAALQRYADDNGYILDPAHIYRDEGISGRSASKRPGFQRMIAAAKRKDHPFDVILVHKLDRFARSREDSVVYKSMLLRECGVRVISITEPLSDDKTSILIEPLLEAMAEYYSVNLGEEVKKGMTQKAKQGGLQSTPPFGYTVQNHTLVPDPETADYVRQIFRRYVDGDAVFALARWLNGLGVRTRRGNPIENRTVEYILRNPVYVGFLRWNPSGKTRRKFDNPNIITAKGPHEPLIDQALFDAAQARLDEQKRTHPYKGKPVGVQRKHWLCGIVRCANCGATLILSGAQYGSYFKCNYAVRGSCSTTQHISAERLEAAVVQQLEADAEDGSSLRFEQAQRRAAAARDDTQRSIAALRRRVDRLRDAYLAGVETLEDYSHGKAALTAQIAALEAEQAAVADDPEDLSAGLRQDIRRVLATLRDDSVSTEDKHTAAAGLLQSVIFDRENNLLRVYYHAAQ

SEQ ID NO: 6915 - protein, 482 aa, Unknown
  Description of Unknown: Integrase B6916 sequence
  PTHR30461:SF3,cd00338,SM00857,IPR006118,IPR036162, PF13408,PS51737,IPR025827,G3DSA:3.40.50.1390,IPR006119, SSF53041,IPR011109,PTHR30461,PS00397,PS51736, Coil,PF00239
MTNQTETGQYVGGTNYIEEVAAYIRVSTQEQKLHGISLEAQVEKLTEYAENHGMKIVKFYKDEGVSGRKLIKKRPALQEMIQDAEKGKFKRIIFIKLDRFFRSVAEYHECMKRLSAGGVIWTATEEKYDLSTPSGEAFVNMKLTMAQFEADQAGERIRMVNEYKIKSGQPLFGAQCLPLGYTVTQPEDGERHKYVAKDAEMEAATNDLIEYALTHGTIRGAMSYINNKYDLHIGYNACAKTLKNEMICGEYRGNPNYCEPYIDRETFDRLQKLISRTPRSTGEKRTYYFTGLICCPKCGRRLVAGIFRSNTKWRKYTYKVYRCSAHFKEKNCEFSSVVLEQTLEDVLLEKLGSIVERKSIEAEDVAAADEKVGKYNIAELQAELDRLNYSWQKNRIKSAEEYDRKYDAIMEQIEAAQAEKEEMGNVDFDRIRDILQSDWRELYKALDDDHKRSFWRSFIEEIELDWGKGRYGKKDIKDITFF

SEQ ID NO: 6916 - protein, 482 aa, Unknown
  Description of Unknown: Integrase B6917 sequence
  PTHR30461:SF3,SM00857,IPR006118,G3DSA:1.10.10.2600,IPR036162, PS51737,G3DSA:3.40.50.1390,Coil,IPR006119,IPR038109, PF07508,SSF53041,IPR011109,PTHR30461,PS00397, PS51736,cd00338,PF00239
MQTAAAYIRVSTDDQVEFSPDSQMKAIQKYAKDHDMILPQDLIFADEGISGRHAENRPAFQRMIGLAKTKPKPFDVILLWKFSRFARNREDSIVYKSMLRKQCGIDVVSISEQVGEDKTSILIEALLEAMDEYYSINLAEEVRRGMQEKFSRGGVVSQPPYGYRMGDNVFVIQPDEAEIVRKIYHDFLSGAGRREIAVELNALGVVTRKGRPFDNRRVEYILSNPVYTGMLRRSKNGRQSSGDPFNQREDMQVIPGNHEPIIDRETFDATQKRLKEAKRLYVKHAHTEGRPFMLKGVVRCSNCGSTLVMAMRNTSLQCHLYAKGQCDVSHAISIAKANTAVLERIKEDLRLGAVGVNVENQHKKKKPTVDATSMLLQKEKQKLERIKEAYAAGVDTLQEYREQKQKITARIEELSKSATVEYHTPEQVSREIVKRIQASLEMLEDAAVSEELKNQAMRVLVEKIIFNRKKNLFEIVYRDPFA

SEQ ID NO: 6917 - protein, 482 aa, Unknown
  Description of Unknown: Integrase B6918 sequence
  cd03768,PTHR30461:SF3,SM00857,G3DSA:1.10.10.2600,IPR036162, PF13408,PS51737,G3DSA:3.40.50.1390,IPR025827,IPR006119, IPR038109,PF07508,IPR011109,SSF53041,PTHR30461, PS51736,PF00239
MDAIYARQSIDKKGSLSIEGQIELCRKFTVDDALVFSDKGFSGKNTKRPAFGELMEAVEAGRVKKIVVYRLDRFSRSLADFSQIWELLRKNDVEFLSVNEQFDTSSPMGRAMLNIVMTFAQLERETTAERVRDNYHHRVSLGAWPGGPAPYGYALSKAELDGRKVSSLIADENAKTVLHIFEEYVRSETSLRALAKTLTEQGIHGPKREAWDNVTLSRILRNPVYAQADEAVYCYYLAQGIQIRQMPEVFDGVHGCLLIGKRDRSRGKYTKKDEQMLSLSTHEGIIPSSLWLRVQDKLSGQMQLPRANAGKYSWLTGLLKCGKCGYAVKVNYIKSEQRCKLVCSGRSNFGSCDESIDVDLRELETHIANELQHILDACPAELPSVSEDHAQAKAVLEIDQKIDRLVNALAESSDVAVVYISKMIEKLHAEREQLLHTAPHSASQIRRLDFSHSVFDEKKLIAAEFIGRIELDGNHVNIIWKA

SEQ ID NO: 6918 - protein, 482 aa, Unknown
  Description of Unknown: Integrase B6919 sequence
  PTHR30461:SF3,IPR036162,PS51737,IPR011109,PTHR30461, PS00397,PF00239,G3DSA:1.10.10.2600,IPR006119,SSF53041, cd00338,SM00857,IPR025827,IPR038109,PS51736, IPR006118,PF13408,G3DSA:3.40.50.1390,PF07508,Coil
MRQGAVYIRVSTDDQTEYSPDAQLKRIKEYAQNHDILISQEYIYIENGVSGRTVAKREQFKKMIQKAKEKPKPFDVVLIHAYDRFARNVKESRIYKELLRDDLGIELISITEDFGSGKNSFLMEGIKDILNEYYSLNLRDEVLKGMYEKVSRGEVCGKAVLGYNLINKKLIINEEEAKTIKLIFDRYAYDNLGLLDIAKLVNQMGLRTKTGNKFENRTIKYILRNPIYIGKLRYSKKGRVDYHTYSVIKEEDLYDGIHERIIDEETWNTVQKRLDKNILFSVPHKIDTVNADYWLKGIVRCPYCNNTMIRHQKINLRCNGYGKGKCHNKTTINLKFLEKLVLNQMKQDFDGKKISLNTIKIKSNESNERDIIIRQINNTEAKFARIKEAYVDGIDTLEEYKKNKEIISREINILKEILDKIEKPKEVPKDNLKLKIKDIYDLLTNGKVEMSVKKNAAHMLINKIVVDEKNMKILLTYNESPF

SEQ ID NO: 6919 - protein, 482 aa, Unknown
  Description of Unknown: Integrase B6920 sequence
  PTHR30461:SF3,cd00338,SM00857,IPR006118,IPR036162, PF13408,PS51737,IPR025827,G3DSA:3.40.50.1390,IPR006119, SSF53041,IPR011109,PTHR30461,PS00397,PS51736, Coil,PF00239
MTNQTGTWQYVGGTNYIEEVAAYIRVSTQEQKLHGISLEAQVEKLTEYAENHGMKIVKFYKDEGVSGRKLIKKRPALQEMIQDAEKGKFKRIIFIKLDRFFRSVAEYHECMKRLSAGGVIWTATEEKYDLSTPSGEAFVNMKLTMAQFEADQAGERIRMVNEYKIKSGQPLFGAQCLPIGYTVTQPEDGERHKYVSKDAEMEAATSDLIEYALTHGTIRGAMSYINNKYDLHIGYNACAKTLKNEMICGEYRGNPNYCEPYIDRETFDRLQKLISRTPRSTGEKRTYYFTGLICCPKCGRRLVAGIFRSNTKWRKYTYKVYRCSAHFKEKNCEFSSVVLEQTLEDVLLEKLGSIVERKSIEAEDVAAADEKVGKYNIAELQAELDRLNYSWQKNRIKSAEEYDRKYDAIMEQIEAAHAEKEEMGNVDFDRIRDILQSDWRELYKALDDDHKRSFWRSFIEEIELDWGKGRYGKKDIKDITFF

SEQ ID NO: 6920 - protein, 482 aa, Unknown
  Description of Unknown: Integrase B6921 sequence
  PTHR30461:SF3,SM00857,G3DSA:1.10.10.2600,IPR036162,PF13408, IPR025827,G3DSA:3.40.50.1390,PS51737,IPR006119,IPR038109, PF07508,IPR011109,SSF53041,PF00239,PTHR30461, PS51736,Coil,cd00338
MQAAAYARYSTEHQTSSSIAYQMRKIEEYCDSHGITVSARYADEAMSGTNTQRPAFQSLCQDAALRKFDAVVIYDISRGSRDVSDWFGFRKQMAVLGIQVISVEDHIGDILNPADYLTELITVGLGQHHVLTSRQKSMDSIATKAKTGQFLGGTPNFGYDIVNGRYVINPAEAKIVRKIYRMYAAGKSYGEILSAIGEVRGRRGKVMGKNSLYYLLRNERYIGVYSWCKYHHKIMGKYAGNLPNENAVRIEDSIPAIIDKDTWEAVQMRMDDKKHRACNKAKRSYLLSGLIECTECGASYVGHTSTNSRGYSTRYYCCGNKYRNHTCHSQNINAEELEVFVVQNLRQYLANLDYEQMAQQIASQINGATADLKEERKELADIIFQLENGTKAILKGIDYPELQEEMLRLRVRKSELEDIIQRGKEKNPVSVEKLVQLFRNAMERLDTDTKQVCKAMVKVYAHSNGDCDLEVGVHMNGCGSQI

SEQ ID NO: 6921 - protein, 482 aa, Unknown
  Description of Unknown: Integrase B6922 sequence
  PTHR30461:SF3,SM00857,G3DSA:1.10.10.2600,IPR036162,PF13408, IPR025827,G3DSA:3.40.50.1390,PS51737,IPR006119,IPR038109, PF07508,IPR011109,SSF53041,PTHR30461,Coil, PS51736,cd00338,PF00239
MQAAAYARYSTEHQTSSSIAYQMRKIEEYCDSHGITVSARYADEAMSGTNTQRPAFQSLCQDAALRKFDAVVIYDISRGSRDVSDWFGFRKQMAVLGVQVISVEDHIGDILNPADYLTELITVGLGQHHVLTSRQKSMDSIATKAKTGQFLGGTPNFGYDIVNGRYVINPAEAKIVRKIYRMYAAGKSYGEILSAIGEVRGRRGKVMGKNSLYYLLRNERYIGVYSWCKYHHKIMGKYAGNLPNENAVRIEDSIPAIIDKDTWEAVQMRMDDKKHRACNKAKRSYLLSGLIECTECGASYVGHTSTNSRGYSTRYYCCGNKYRNHTCHSQNINAEELEVFVVQNLRQYLANLDYEQMAQQIASQINGATADLKTERKELADIIFQLENGTKAILKGIDYPELQEEMLRLRVRKSELEDIIRRGREKNPVSVEKLVQLFRDAMERLDTDTKQVCKAMVKVYAHSNGDCDLEVGVHMNGCGSQI

SEQ ID NO: 6922 - protein, 482 aa, Unknown
  Description of Unknown: Integrase B6923 sequence
  PTHR30461:SF3,IPR036162,PS51737,IPR011109,PTHR30461, PS00397,PF00239,G3DSA:1.10.10.2600,IPR006119,SSF53041, SM00857,IPR025827,IPR038109,PS51736,cd03768, IPR006118,PF13408,G3DSA:3.40.50.1390,PF07508,Coil
MMNTINKVAIYVRVSTNVQAEEGYSIDEQIDKLKSYCQIKDWTVYDIYKDGGFSGGNINRPALEKMIIDAKKKRFDTVLVYKLDRLSRSQKDTLFLIEDVFSKNDISFLSLQENFDTSTPFGKAMVGLLSVFAQLEREQIKERMQLGMIGRAKSGKPMMFTNVSFGYTYSPKTQQLTINQAEAVIVKQIFNEFLGGMSPLRLMAYLNENNILRNGKEWNYQGIQRILRNPVYIGKIKYNNVIYPGLHEPIIDEESYYKAQKLLDARQDEMRIKGKNRQFKAKYMLSGTAKCGYCGAPLRIKIGNKRLDGTRLKVYQCCNRYPRKYAVVTYNDNKKCNSGNYQKEDLESYVIAEIRKLQLKPEKIDKLFNKVAKIDTVQINKQIASIDNKINRLNDLYLNDMIDIDKLKADAEKFKEQKRVLEKELDKDLKIQEQEKNKEDFKKTIGFKDVTKLDYKEQSFIVKSLIDKILVKKGFIKILWKI

SEQ ID NO: 6923 - protein, 481 aa, Unknown
  Description of Unknown: Integrase B6924 sequence
  PTHR30461:SF3,IPR036162,PS51737,IPR011109,PTHR30461, PS00397,PF00239,G3DSA:1.10.10.2600,IPR006119,SSF53041, cd00338,SM00857,IPR025827,IPR038109,PS51736, IPR006118,PF13408,G3DSA:3.40.50.1390,Coil
METGKFIGGENYIEEVAAYIRVSTQEQKLHGISLEAQVEKLTEYAQNHGMKIVKFYKDEGVSGRKLIKNRPALQEMIQDAEKGKFKRIIFIKLDRFFRSVAEYHECMKRLSVGGVIWTATEEKYDLSTPSGEAFVNMKLTMAQFEADQAGERIRMVNEYKIKSGQPLYGSQCLPFCYAVGCPEEGERHKYIGKRDEEIMLDLIDYVMKNHSVRAGMNYINQKYNRNFLYNAVMNALKNEMICGTYKGNPNYCEPYITREEFNKLQKIISRNPRTTEKRTYLFTGLIRCPRCGYRLSGGQYYTYSRPNKETGKREKRRGYLAYKCGRSRVNNQCDFNNIVQEQRLEKMLLEQLDDIIAGKKLQAISVKSAGKKVSKHDVEALTAELDRLNYAWQKGRIKSVEEYDKSYDDLMDKIHAAENEQAELNQEPDYEKIQAVLSNGWQEIYKELDGEHKRAFWRSFIEEIQVVWTKDKKEIKDIIFF

SEQ ID NO: 6924 - protein, 481 aa, Unknown
  Description of Unknown: Integrase B6925 sequence
  PTHR30461:SF3,SM00857,G3DSA:1.10.10.2600,IPR036162,PF13408, IPR025827,G3DSA:3.40.50.1390,PS51737,IPR006119,IPR038109, PF07508,IPR011109,SSF53041,PTHR30461,Coil, cd00338,PF00239
MTIIGEYCDRAISGKTDNRPNFQRLIKDSEKGQFEAVIMYTLDRFARNRYDSAIYKAKLKKNGVKVYYAKQPMPDTPEGIILESVLEGYAEYYSENLSRNIKRGLKENALQCLAVGGAGMPLGYTVGEDRKYKIDPVGAKIVQEIFQMYADGMSATQIINECNRRGYKTSRGNAFNKNSLRTMLKNDRYIGVYRFADVVVEDGVPPIISRELFEKVQATLRHNYSARARNKAKDDYLLTTKLFCGHCGSSMVGESGTSRSGKLHHYYKCIDRKRNHKCKKAVEKKDWIEELVVRFTVQNVLNDETIERIARKTMEIIEKESADTSYLNGLQNELKDIKKKIKNLMNAIEQGIITPTTKERMDELEAEKNDLEGKIAREEMKKPLLTKERIMHWLNSFKSGDIDDIEYRRRVVDTLVNSVYVYDDGEKGRRIVFTFNISGQNTATLSCSDIACMAPPKGANPNTLFFVKHCFGFVMNIEEVG

SEQ ID NO: 6925 - protein, 481 aa, Unknown
  Description of Unknown: Integrase B6926 sequence
  PTHR30461:SF3,SM00857,G3DSA:1.10.10.2600,IPR036162,PF13408, IPR025827,G3DSA:3.40.50.1390,PS51737,IPR006119,IPR038109, PF07508,SSF53041,IPR011109,PF00239,PTHR30461, Coil,cd00338
MTIIGEYCDRAISGKTDNRPNFQRLIKDSEKGQFEAVIMYTLDRFARNRYDSAIYKAKLKKNGVKVYYAKQPMPDTPEGIILESVLEGYAEYYSENLSRNIKRGLKENALQCLAVGGAGMPLGYTVGEDRKYKIDPVGAKIVQEIFQMYADGMSATQIINECNRRGYKTSRGNAFNKNSLRTMLKNDRYIGVYRFADVVVEDGVPPIISRELFEKVQATLRHNYSARARNKAKDDYLLTTKLFCGHCGSSMVGESGTSRSGKLHHYYKCIDRKRNHKCKKAVEKKDWIEELVVRFTVQNVLNDETIERIARKTMEIIEKESADTSYLNGLQNELKDIKKKIKNLMNAIEQGIITPTTKERMDELEAEKNDLEGKIAREEMKKPLLTKERIIHWLNSFKSGDIDDIEYRRRVVDTLVNSVYVYDDGEKGRRIVFTFNISGQNTATLSCSDIACMAPPKGANPNTLFFVKHCFGFVMNIEEVG

SEQ ID NO: 6926 - protein, 481 aa, Unknown
  Description of Unknown: Integrase B6927 sequence
  PTHR30461:SF3,SM00857,G3DSA:1.10.10.2600,IPR036162,PF13408, IPR025827,G3DSA:3.40.50.1390,PS51737,IPR006119,IPR038109, PF07508,SSF53041,IPR011109,PTHR30461,Coil, PS51736,cd00338,PF00239
MTVINEYCDRAISGKTDNRPSFQRLIKDSEKGQFEAVIMYTLDRFARNRYDSAIYKAKLKKHGVRVFYAKQPMPDTPEGIILESVLEGYAEYYSENLSRNIKRGLKENALQCIATGGAGVALGYTVGEDRKYKIDPVGAKIVQEVFEMYADGMSATQIINVCNERGYKTSRGNPFNKNSLRTMLKNDKYIGVYRFMDVVVEGGVPAIISKELFDKVQAKLQHNFTARARNKAKEDYLLTTKLFCGHCGSPMVGESGTSKTGKLHFYYKCIDRKRKHVCTKKVEKKDWIEELVTRFTVQEVLTDENIDRIATKAMEIIEKESADTTYLEGLQNELKEVQKKIKNIMTAIEQGIITSTTKDRLEELESEKNEIEGRISREEIKKPLLTKERIVYWLLSFKSGDINDIEYRRRVIDTLVNSVYIYDDGDKGRRIVLTFNVSGQNTATISCSDIACSAPPKGANPNSLFFVKHCFGFVVHIEEVG

SEQ ID NO: 6927 - protein, 481 aa, Unknown
  Description of Unknown: Integrase B6928 sequence
  PTHR30461:SF3,IPR036162,PS51737,IPR011109,PTHR30461, PS00397,PF00239,G3DSA:1.10.10.2600,IPR006119,SSF53041, cd00338,SM00857,IPR025827,IPR038109,PS51736, IPR006118,PF13408,G3DSA:3.40.50.1390,PF07508,Coil
MSELRTAAAYIRVSTDDQVELSPESQLVKVREYAAKNDMLLLPQYIFHDDGISGRDAKKRPGFQQMIAAAKDPAHPFDVIIVWKYSRFARNQEESIFYKSILRSKCKVEVISVSEPLIAGPFGSLIERIIEWMDEFYSVRLSEEVKRSMTVNAKNGAFQASPPFGYKSENHTLAIIPDEAEIVREIFRRFVDGEPMFALAKSVNARNIRTHRGNPFENRTVDYILNNPVYIGKLRWTPTGKVHRDFRNPDSIIADSSHPAIIDVPTWEAAQARILQLKQSYRYYAKPSTERKHWLCGIVRCATCGRTLTFTAPHYMQCSGRLKARCTTSQHTTIEALEEAFLQQLQHDMTFSEFVDCTVQRVSSSNALQDLHQRRSRVSGRLSRLRDAYLDGAETLEDYKAARQQLQKQLDEIDTDIKKAETASIPDTASALRSAIASTLETLRSPTATIAQKYESAQRLIEKCCFDKSRMLLTVYYKLTF

SEQ ID NO: 6928 - protein, 481 aa, Unknown
  Description of Unknown: Integrase B6929 sequence
  PTHR30461:SF3,IPR036162,PS51737,IPR011109,PTHR30461, PS00397,PF00239,G3DSA:1.10.10.2600,IPR006119,SSF53041, cd00338,SM00857,IPR025827,IPR038109,PS51736, IPR006118,PF13408,G3DSA:3.40.50.1390,Coil
METGKFIGGENYIEEVAAYIRVSSQEQKLHGISLEAQVEKLTEYAQNHGMKIVKFYKDEGVSGRKLIKNRPALQEMIQDAEKRKFKRIIFIKLDRFFRSVAEYHECMKRLSVGGVIWTATEEKYDLSTPSGEAFVNMKLTMAQFEADQAGERVRMINEYKIKTGQPLYGSQCLPFCYAVGMPEEGERHKYIGKRDEEIMRDLIDYVMKNHSVRAGMSYINQKYNRNFLYNAVMNALKNEMICGTYKGNPNYCEPYITREEFNQLQKIISRNPRTTEKRTYLFTGLIRCPRCGYRLSGGQYYTYSRPNKETGKREKRRGYLAYKCGRSRVNNQCDFNNIVQEQRLEKMLLEQLGDIIAGKKLQAISVKSAGKKVSKHDVEALTAELDRLNYAWQKGRIKSVEEYDKSYDDLMDKIHAAENEQAELNQEPDYEKIQAVLSNGWQEIYKELDGEHKRAFWRSFIEEIQVVWSKDKKEIKDIIFF

SEQ ID NO: 6929 - protein, 481 aa, Unknown
  Description of Unknown: Integrase B6930 sequence
  PTHR30461:SF3,IPR036162,PS51737,IPR011109,PTHR30461, PS00397,PF00239,G3DSA:1.10.10.2600,IPR006119,SSF53041, cd00338,SM00857,IPR025827,IPR038109,PS51736, IPR006118,PF13408,G3DSA:3.40.50.1390,PF07508,Coil
MPEPRIAAAYIRVSTDDQMELSPDSQMEKIREYAAKNGLLLLSEYIFHDDGISGRAAEKRPGFQQMIATAKDPSHPFDVIIVWKFSRFARNQEESIFYKSILRSKCKVDVVSVSEPLIAGPFGSLIERIIEWMDEFYSVRLAEEVKRSMTVNAKNGTLQATPSFGYRVENRQLVIVPEEAEIIREIFRRFISGDAMFRIAKDLSARGVRTHRGNPFENRTIDYILNNPVYLGKLRWTPTGRTRRNFKNEDSIIADALHEPIIDAETWDAAQARCAELKKSYKRYGKPSSERKHWLCGVVRCSTCGATLIWASPHFMKCNNYAHGRCTTAQHIAVEALEESFLAQLQHDLTFAESVACVVQAAKPAHSDQRLQQQRSRIVSRIDRLRESYLDGVETLETYKVARQQMQAQLDDLDAQIAESAAVPVVDAAALLRNAIAAVLETLRSPTATVAQKYESAMSIIDRCTFDKSQMLLAISYKFIF

SEQ ID NO: 6930 - protein, 481 aa, Unknown
  Description of Unknown: Integrase B6931 sequence
  PTHR30461:SF3,IPR036162,PS51737,IPR011109,PTHR30461, PS00397,PF00239,G3DSA:1.10.10.2600,IPR006119,SSF53041, cd00338,SM00857,IPR025827,IPR038109,PS51736, IPR006118,PF13408,G3DSA:3.40.50.1390,PF07508,Coil
MPEPRIAAAYIRVSTDDQMELSPDSQMEKIREYAAKNGLLLLSEYIFHDDGISGRAAEKRPGFQQMIATAKDPSHPFDTIIVWKFSRFARNQEESIFYKSILRSKCKVDVVSVSEPLIAGPFGSLIERIIEWMDEFYSVRLAEEVKRSMTVNAKNGTLQATPSFGYRAEDRRLVVVPEEAEIIREIFRRFISGDAMFRIAKDLSARGVRTHRGNPFENRTIDYILNNPVYLGKLRWTPTGRTHRNFKNDDSIIADALHEPIIDAETWDAAQARCAELKKSYKRYGKPSSERKHWLCGVVRCSTCGATLIWASPHFMKCNNYAHGRCTTAQHIAVEALEESFLAQLQHDLTFAESVACVVQAAKPAHSDQRLQQQRARIVSRIDRLRESYLDGVETLETYKAARQQMQAQLDDLDAQIAESAAVPVVDTAALLRNAIAAVLETLRSPTATVAQKYESAMSIIDRCTFDKSQMLLAISYKFIF

SEQ ID NO: 6931 - protein, 481 aa, Unknown
  Description of Unknown: Integrase B6932 sequence
  SM00857,G3DSA:1.10.10.2600,IPR036162,PF13408,PS51737, IPR025827,G3DSA:3.40.50.1390,IPR006119,IPR038109,PF07508, IPR011109,SSF53041,PTHR30461,Coil,PS51736, cd00338,PF00239
MPGTNSIPGTAAAYIRVSDDKQDEYSPDSQLKLIRDYAKRNGYYVPDEFVFYDDGISAKTAAKRPKFIEMIGIAKQKNPPFDKILVWKFSRFARNQEESIVYKSLLRKNGVEVISISEPLIDGAFGSLIERIIEWMDEYYLVRLSGEVKRGMKEKASRGEAMSGRVFGYLPKDGTLIPHPEEAPLVRMIFDDYLNGKGARQIAIKLQQLGVKTIRGNDPDNRFVDYVLHNPVYCGKVRWSTDGCAASKRDYNNENIMLVNGNFEPIISEHTFNAAQNKIADQKKRYPKYQRNEAPTEYMLRGLVRCDSCGATLTLQRASKALQCHNYARGSCKVSHSISIAKANKTVIEALQYAVDHLDFNILPDEEKHTPEDYSKPLAALRKKLARTKEAYINGVDTLEEYKENKQRITEEIAKLEKKQAANTALPEVDKEAFAAKVRGVIAVINSPDTTEQAKNEALRSVLAKIIYHKPAQSLELYFYA

SEQ ID NO: 6932 - protein, 481 aa, Unknown
  Description of Unknown: Integrase B6933 sequence
  PTHR30461:SF3,IPR036162,PS51737,IPR011109,PTHR30461, PS00397,PF00239,G3DSA:1.10.10.2600,IPR006119,SSF53041, SM00857,IPR025827,IPR038109,PS51736,cd03768, IPR006118,PF13408,G3DSA:3.40.50.1390,PF07508,Coil
MKTTNKVAIYVRVSTTSQVEEGYSIDEQKAKLSSYCDIKDWNVYKVYTDGGFSGANTDRPALESLIKDAKKRKFDTVLVYKLDRLSRSQKDTLYLIEDIFIKNNIAFLSLQENFDTSTPFGKAMIGLLSVFAQLEREQIKERMQLGKIGRAKAGKSMMWARTSYGYDYHRGTGTITVNPVQALAVKFIFESYLRGRSITKLRDDLNENYPKHVPWSYRAVRAILDNPVYCGFNQFKGEIYPGNHEPIITEEVYNKTKEELKIRQRTAAENVNPRPFQAKYILSGIGQCGYCGAPLKIILGVKRKDGSRFKKYECHQRHPRTLRGITTYNDNKKCDSGFYYKDDLEAYVLTEISKLQDDAGYLDKIFSEDSAETIDRESYKRQIEELSKKLSRLNDLYIDDRITLEELQSKSAEFISMRATLETELENDPTLRRDKRKADMRKLLNAEKVFSMDYERQKILVRGIINKVQVTADKVVIRWKV

SEQ ID NO: 6933 - protein, 481 aa, Unknown
  Description of Unknown: Integrase B6934 sequence
  PTHR30461:SF3,IPR036162,PS51737,IPR011109,PTHR30461, PS00397,PF00239,G3DSA:1.10.10.2600,IPR006119,SSF53041, cd00338,SM00857,IPR025827,IPR038109,PS51736, IPR006118,PF13408,G3DSA:3.40.50.1390,PF07508,Coil
MPEPRIAAAYVRVSTDDQMELSPDSQMEKIREYAAKNGLLLLSEYIFHDDGISGRAAEKRPGFQQMIATAKDPSHPFDVIIVWKFSRFARNQEESIFYKSILRSKCKVDVVSVSEPLIAGPFGSLIERIIEWMDEFYSVRLAEEVKRSMTVNAKNGTLQATPSFGYRVENRQLVIVPEEAEIIREIFRRFISGDAMFRIAKDLSARGVRTHRGNPFENRTIDYILNNPVYLGKLRWTPTGRTRRNFKNEDSIIADALHEPIIDAETWGAAQARCAELKKSYKRYGKPSSERKHWLCGVVRCSACGATLIWANPHFMKCNNYAHGRCTTTQHIAVEALEESFLAQLQHDLTFAESVACVVQAANPAHSDQRLQQQRAHIVSRIDRLRESYLDGVETLETYKAARQQMQAQLDDLDAQIAESAAVPVVDAAALLRNAISAVLETLRSPTATVAQKYESAMSIIDRCTFDKSQMLLAISYKFIF

SEQ ID NO: 6934 - protein, 481 aa, Unknown
  Description of Unknown: Integrase B6935 sequence
  PTHR30461:SF3,SM00857,G3DSA:1.10.10.2600,IPR036162,PF13408, PS51737,IPR025827,G3DSA:3.40.50.1390,IPR006119,IPR038109, PF07508,SSF53041,IPR011109,PTHR30461,Coil, PS51736,cd00338,PF00239
MTIIGEYCDRAISGKTDNRPNFQRLIKDSEKGQFEAVIMYTLDRFARNRYDSAIYKAKLKKNGVRVYYAKQPMPDTPEGIILESVLEGYAEYYSENLSRNIKRGMKENALQCLANGGAGMPLGYIVGEDRKYKVDPVGAKIVQEIFQMYADGMSATQIINECNKRGYKTSRGNAFNKNSLRTMLKNDRYIGIYRFADVIVEDGIPPIISRELFNKVQAMLKHNYSARARKKAKDDYLLTTKLFCGHCGSAMVGESGTSKSGKLHHYYKCIDRKRNRKCKKAVEKKDWIEELVVRFTVQKVLTDENIERIAEKAMEIIEKESADTTYIDGLQSKLKDIKKKIKNLMNAIEQGIITSTTKERMNELELEKNEVEGKIAREEMKKPLLTKERIMYWLYSFKSGDIDDIEYRRRVIDTLVNSVYVYDDGEKGRRIVFTFNISGQNTATLSCSDIACAAPPNSANPNTLFFVKHCFGFVMNIEEVG

SEQ ID NO: 6935 - protein, 481 aa, Unknown
  Description of Unknown: Integrase B6936 sequence
  PTHR30461:SF3,IPR036162,PS51737,IPR011109,PTHR30461, PS00397,PF00239,G3DSA:1.10.10.2600,IPR006119,SSF53041, cd00338,SM00857,IPR025827,IPR038109,PS51736, IPR006118,PF13408,G3DSA:3.40.50.1390,PF07508,Coil
MPEPRIAAAYIRVSTDDQMELSPDSQMEKIREYAAKNGLLLLSEYIFHDDGISGRAAEKRPGFQQMIATAKDPSHPFDVIIVWKFSRFARNQEESIFYKSILRSKCKVDVVSVSEPLIAGPFGSLIERIIEWMDEFYSVRLAEEVKRSMTVNAKNGSLQATPSFGYRVENRQLVIVPEEAEIIREIFRRFISGDAMFCIAKDLSSRGIRTHRGNPFENRTIDYILNNPVYLGKLRWTPTGRTCRNFKNEDSIIADALHEPIIDAETWDAAQARCAELKKSYKRYGKPSSERKHWLCGVVRCSACGATLIWVSPHFMKCNNYAHGRCTTTQHIAVEALEESFLAQLQHDLTFAESVACVVQAAKPAHSDQRLQQQRARIVSRIDRLRESYLDGVETLETYKAARQQMQAQLDDLDAQIAESAAVPVVDAAALLRNAIAAVLETLRSPTATVAQKYESAMSIIDRCTFDKSQMLLAISYKFIF

SEQ ID NO: 6936 - protein, 481 aa, Unknown
  Description of Unknown: Integrase B6937 sequence
  PTHR30461:SF3,IPR036162,PS51737,IPR011109,PTHR30461, PS00397,PF00239,G3DSA:1.10.10.2600,IPR006119,SSF53041, SM00857,IPR025827,IPR038109,PS51736,cd03768, IPR006118,PF13408,G3DSA:3.40.50.1390,PF07508,Coil
MDKINKVALYVRVSTTSQMEEGYSIEEQKAKLESYCDIKDWHIYKVYTDGGFSGSTTERPALEQLIKDAQSKLFDTVLVYKLDRLSRSQKDTLYLIEDIFLKNNIEFVSLLENFDTSTPFGRAVIGLLSVFAQLEREQIKERMQLGKLGRAKAGKSMMWAKTSYGYNYDKETGSMTVNEYEALAVKEIFSSYLAGMSITKLRDKINDEYPKQPAWSYRTIRGILANPVYCGLNQYKGQTFQGTHKPIISLVDFEQTQRELAKRQQKAKELSNPRPFQAKYMLSGLAQCGYCHAPLKVILGQKRKDGSRFKRYECYQRHPRTTKGVTVYNDNKKCDSGYYDMELLEHYVLTRIAQLQNDPDKIQELFSDDTSPEIDKQAIQKQIDSLTLKLSKLNDLYLDDRITLDELRSKSADFIKQRATLEEEIKKAVTDKQAGKREKIEKLLDASSVLDMSYDNQKVIVRELIDKVQVTSDKIVIRWKI

SEQ ID NO: 6937 - protein, 481 aa, Unknown
  Description of Unknown: Integrase B6938 sequence
  PTHR30461:SF3,SM00857,G3DSA:1.10.10.2600,IPR036162,PF13408, IPR025827,G3DSA:3.40.50.1390,PS51737,IPR006119,IPR038109, PF07508,SSF53041,IPR011109,PF00239,PTHR30461, PS51736,Coil,cd00338
MGLKIGAAYIRVSDERQDEYSPDSQLKLIRKYAKNNDYIIPDEYIFYDDGISAKSTKKRAEFNRMIALAKSDDKPFESIFVWKFSRFARNQEESIVYKSLLKKKGVSVISISEPIVDDVFGSLIERIIEWMDEYYLIRLSGEVKRGMTEKASRGEPMCHPALGYDLINNQYVPNAESVYIRRIFESYLNGMGEREIARNLALQGMRTHRGNPPDNRLIDYILHNPVYIGKIRWSTNGRAASTRDYDNENIMIVDGTHEPLIDLDTWNEVQELLMENKHKYKRYQRREQPVQFMLKGLVRCDHCGATLVMQSTKCPSIQCHNYARGSCGVSHSLSINKANKAVIEALEAAVNTLQFTIEPAAVKSESPGLDFDKLISSERNKLKKIKEAYLSGVDTLEEYQQSKAEIQETIDRLENEQKASQEKADCNKVSKKEFSKRVINVLDFIKSPDVSEQAKNEALRTIISKIIYVKPENRLDIIFYT

SEQ ID NO: 6938 - protein, 481 aa, Unknown
  Description of Unknown: Integrase B6939 sequence
  SM00857,G3DSA:1.10.10.2600,IPR036162,PF13408,IPR025827, G3DSA:3.40.50.1390,PS51737,IPR006119,IPR038109,PF07508, SSF53041,IPR011109,PTHR30461,Coil,PS51736, cd00338,PF00239
MPGTNSIPGTAAAYIRVSDDKQDEYSPDSQLKLIRDYAKRNGYYVPDEFVFYDDGISAKTAAKRPKFIEMIGIAKQKNPPFDKILVWKFSRFARNQEESIVYKSLLRKNGVEVISISEPLIDGAFGSLIERIIEWMDEYYLVRLSGEVKRGMKEKASRGEAMSGRVFGYLPKDGTLIPHPEEAPLVRMIFDDYLNGKGARQIAIKLQQLGVKTIRGNDPDNRFVDYVLHNPVYCGKVRWSTDGCAASKRDYNNENIMLVNGNFEPIISEQTFNAAQNKIADQKKRYPKYQRNEAPTEYMLRGLVRCDSCGATLTLQRASKALQCHNYARGSCKVSHSISIAKANKTVIEALQYAVDHLDFNILPDEEKHTPEDYSKPLAALRKKLARTKEAYINGVDTLEEYKDNKQRITEEIAKLEKKQAANTALPEVDKEAFAAKVRGVIAVINSPDTTEQAKNEALRSVLAKIIYHKPAQSLELYFYA

SEQ ID NO: 6939 - protein, 481 aa, Unknown
  Description of Unknown: Integrase B6940 sequence
  PTHR30461:SF3,SM00857,G3DSA:1.10.10.2600,IPR036162,PF13408, PS51737,IPR025827,G3DSA:3.40.50.1390,IPR006119,IPR038109, PF07508,IPR011109,SSF53041,PF00239,PTHR30461, PS51736,Coil,cd00338
MTIIGEYCDRAISGKTDNRPNFQRLIKDSEKGQFEAVIMYTLDRFARNRYDSAIYKAKLKKNGVRVYYAKQPMPDTPEGIILESVLEGYAEYYSENLSRNIKRGMKENALQCLANGGAGMPLGYIVGEDRKYKIDPVGAKIVQEIFQMYADGMSATQIINECNKRGYKTSRGNAFNKNSLRTMLKNDRYIGIYRFADVIVENGIPPIISRELFDKVQAMLKHNYSARARKKAKDDYLLTTKLFCGHCGSAMVGESGTSKSGKLHHYYKCIDRKRNRKCKKAVEKKDWIEELVVRFTVQKVLTDENIERISARAMEIIEKESTDTTYIDGLQNELKDIKKKIKNLMNAIEQGIITSTTKERMNELELEKNEVEGKIAREEMKKPLLTKERIMYWLYSFKSGDIDDIEYRRRVIDTLVNSVYVYDDGEKGRRIVFTFNISGQNTATLSCSDIACAAPPNSANPNTLFFIKHCFGFVVNIEEVG

SEQ ID NO: 6940 - protein, 481 aa, Unknown
  Description of Unknown: Integrase B6941 sequence
  PTHR30461:SF3,SM00857,IPR006118,G3DSA:1.10.10.2600,IPR036162, PS51737,G3DSA:3.40.50.1390,Coil,IPR006119,IPR038109, PF07508,IPR011109,SSF53041,PTHR30461,PS00397, PS51736,cd00338,PF00239
MKKGAIYVRVSSEEQARDGYSIDAQIKALKDYAIKNDIFLEEQYIYKDEGISGRVAKKRPAFMEMIKTAKSKPKKFDVILVHKFDRFSRNREDSIVYKSLLKKECGINVISITEHLDPDDKMSIILEAFLEAMAEYYSINLSEEVKKGQLEKHSQGGLQTNPSFGYNVENNKLIINEQEEKIVKLIFESYAIENKSMMDIAKKVNSLGILTKRGNKFENRTIYYILNNPTYIGKLRYTPGRKNTYDFNDPNTILVDGKHTPIITNELWDLTQLKLSKNNIWKKPKSRIDYSIKHWSKGIIRCKECNCTLVTSGVGKYRCNGYNKGKCSNHTTININEAENLILVQIKKDFNEGTINNIVSNKKEKKSINEYDIITSSITSLEEKEERIKQSYINGIDTLEEYKQNKEMLLKEKEKLTTKLLTLEKPSIEKYKKEIIENGKKVYEILTNDKISLEEKNDIVNKLINKVEYDGEINNLTIFYN

SEQ ID NO: 6941 - protein, 481 aa, Unknown
  Description of Unknown: Integrase B6942 sequence
  PTHR30461:SF3,IPR036162,PS51737,IPR011109,PTHR30461, PS00397,PF00239,G3DSA:1.10.10.2600,IPR006119,SSF53041, cd00338,SM00857,IPR025827,IPR038109,PS51736, IPR006118,PF13408,G3DSA:3.40.50.1390,PF07508,Coil
MPEPHIAAAYIRVSTDDQMELSPDSQMEKIREYAAKNGLLLLSEYIFHDDGISGRAAEKRPGFQQMIATAKDPSHPFDVIIVWKFSRFARNQEESIFYKSILRSKCKVDVVSVSEPLIAGPFGSLIERIIEWMDEFYSVRLAEEVKRSMTVNAKNGALQATPSFGYRVENRQLVIVPEEAEIIREIFRRFISGDAMFRIAKDLSARGVRTHRGNPFENRTIDYILNNPVYLGKLRWTPTGRTHRNFKNDDSIIADALHEPIIDAETWNAAQARCAELKKSYKRYGKPSSERKHWLCGVVRCSTCGATLIWASPHFMKCNNYAHGRCTTAQHIAVEALEESFLAQLQHDLTFAESVACVVQAAKPAHSDQRLQQQRARIVSRIDRLRESYLDGVETLETYKAARQQMQAQLDDLDAQIAESAAVPVVDTAALLRNAIAAVLETLRSPTATVAQKYESAMSIIDRCTFDKSQMLLAISYKFIF

SEQ ID NO: 6942 - protein, 481 aa, Unknown
  Description of Unknown: Integrase B6943 sequence
  PTHR30461:SF3,IPR036162,PS51737,IPR011109,PTHR30461, PS00397,PF00239,G3DSA:1.10.10.2600,IPR006119,SSF53041, cd00338,SM00857,IPR025827,IPR038109,PS51736, IPR006118,PF13408,G3DSA:3.40.50.1390,PF07508,Coil
MPEPRIAAAYVRVSTDDQMELSPDSQMEKIREYAAKNGLLLLSEYIFHDDGISGRAAEKRPGFQQMIATAKDPSHPFDVIIVWKFSRFARNQEESIFYKSILRSKCKVDVVSVSEPLIAGPFGSLIERIIEWMDEFYSVRLAEEVKRSMTVNAKNGALQATPSFGYRAEDRRLVVVPEEAEIIREIFRRFISGDAMFRIAKDLSARGVRTHRGNPFENRTIDYILNNPVYLGKLRWTPTGRTHRNFKNDDSIIADALHEPIIDAETWDAAQARCAELKKSYKRYGKPSSERKHWLCGVVRCSTCGATLIWASPHFMKCNNYAHGRCKTTQHIAVEALEESFLAQLQHDLTFAESVACVVQAANPAHSDHRLQQQRAHIVSRIDRLRESYLDGVETLETYKAARQQMQAQLDDLDAQIAESAAVPVVDAAALLRNAISAVLETLRSPTATVAQKYESAMSIIDRCTFDKSQMLLAISYKFIF

SEQ ID NO: 6943 - protein, 481 aa, Unknown
  Description of Unknown: Integrase B6944 sequence
  SM00857,G3DSA:1.10.10.2600,IPR036162,PF13408,IPR025827, G3DSA:3.40.50.1390,PS51737,IPR006119,IPR038109,PF07508, IPR011109,SSF53041,PTHR30461,Coil,PS51736, cd00338,PF00239
MPGTNSIPGTAAAYIRVSDDKQDEYSPDSQLKLIRDYAKRNGYYVPDEFVFYDDGISAKTAAKRPKFIEMIGIAKQKNPPFDKILVWKFSRFARNQEESIVYKSLLRKNGVEVISISEPLIDGAFGSLIERIIEWMDEYYLVRLSGEVKRGMKEKASRGEAMSGRVFGYLPKDGTLFPHPEEAPLVRMIFDDYLNGKGARQIAIKLQQLGVKTIRGNDPDNRFVDYVLHNPVYCGKVRWSTDGCAASKRDYNNENIMLVNGSFEPIISEQTFNAAQNKIADQKKRYPKYQRNEAPTEYMLRGLVRCDSCGATLTLQRASKALQCHNYARGSCKVSHSISIAKANKTVIEALQYAVDHLDFNILPDEEKHTPEDYSKPLAALRKKLARTKEAYINGVDTLEEYKDNKQRITEEIAKLEKKQAANTALPEVDKEAFAAKVRGVIAVINSPDTTEQAKNEALRSVLAKIIYHKPAQSLELYFYA

SEQ ID NO: 6944 - protein, 481 aa, Unknown
  Description of Unknown: Integrase B6945 sequence
  PTHR30461:SF3,cd00338,SM00857,IPR006118,IPR036162, PF13408,IPR025827,G3DSA:3.40.50.1390,PS51737,IPR006119, SSF53041,IPR011109,PTHR30461,PS00397,PS51736, Coil,PF00239
METGKFMGGENYIEEVAAYIRVSSQEQKLHGISLEAQVEKLTEYAQNHGMKIVKFYKDEGVSGRKLIKNRPALQEMIQDAEKRKFKRIIFIKLDRFFRSVAEYHECMKRLSVGGVIWTATEEKYDLSTPSGEAFVNMKLTMAQFEADQAGERVRMINEYKIKTGQPLYGSQCLPFCYAVGMPEEGERHKYIGKRDEEIMLDLIDYVMTNHSVRAGMNYINQKYNRNFLYNAVMNALKNEMICGTYKGNPNYCEPYITREEFNQLQKIISRNPRTTEKRTYLFTGLIRCPRCGYRLSGGQYYTYSRPNKETGKREKRRGYLAYKCGRSRVNNQCDFNNIVQEQRLEKMLLEQLDDIIAGKKLQAISVKSAGKKVSKHDVEALTAELDRLNYAWQKGRIKSVEEYDKSYDDLMDKIHAAENEQAELNQEPDYEKIQAVLSNGWQEIYKELDGEHKRAFWRSFIEEIQVVWSKDKKEIKDIIFF

SEQ ID NO: 6945 - protein, 481 aa, Unknown
  Description of Unknown: Integrase B6946 sequence
  PTHR30461:SF3,IPR036162,PS51737,IPR011109,PTHR30461, PS00397,PF00239,G3DSA:1.10.10.2600,IPR006119,SSF53041, cd00338,SM00857,IPR025827,IPR038109,PS51736, IPR006118,PF13408,G3DSA:3.40.50.1390,PF07508,Coil
MPEPHIAAAYVRVSTDDQMELSPDSQMEKIREYAAKNGLLLLSEYIFHDDGISGRAAEKRPGFQQMIATAKDPSHPFDVIIVWKFSRFARNQEESIFYKSILRSKCKVDVVSVSEPLIAGPFGSLIERIIEWMDEFYSVRLAEEVKRSMTVNAKNGALQATPSFGYRVENRQLVIVPEEAEIIREIFRRFISGDAMFRIAKDLSSRGIRTHRGNPFENRTIDYILNNPVYVGKLRWTPTGRTHRNFKNEDSIIADALHEPIIDAETWDAAQARCAELKKSYKRYGKPSSERKHWLCGVVRCSTCGATLIWVSPHFMKCNNYAHGRCTTTQHIAVEALEESFLAQLQHDLTFAESVACVVQAAKPAHSDQRLQQQRSRIVSRIDRLRESYLDGVETLETYKAARQQMQAQLDDLDAQIAESAAVPVVDAAALLRNAIAAVLETLRSPTATVAQKYESAMSIIDRCTFDKSQMLLAISYKFIF

SEQ ID NO: 6946 - protein, 481 aa, Unknown
  Description of Unknown: Integrase B6947 sequence
  PTHR30461:SF3,IPR036162,PS51737,IPR011109,PTHR30461, PS00397,PF00239,G3DSA:1.10.10.2600,IPR006119,SSF53041, cd00338,SM00857,IPR025827,IPR038109,PS51736, IPR006118,PF13408,G3DSA:3.40.50.1390,PF07508,Coil
MPEPRIAAAYVRVSTDDQMELSPDSQMEKIREYAAKNGLLLLSEYIFHDDGISGRAAEKRPGFQQMIATAKDPSHPFDTIIVWKFSRFARNQEESIFYKSILRSKCKVDVVSVSEPLIAGPFGSLIERIIEWMDEFYSVRLAEEVKRSMTVNAKNGTLQATPSFGYRAEDRRLVVVPEEAEIIREIFRRFISGDAMFRIAKDLSARGVRTHRGNPFENRTIDYILNNPVYLGKLRWTPTGRTHRNFKNEDSIIADALHEPIIDAETWDAAQARCAELKKSYKRYGKPSSERKHWLCGVVRCSTCGATLIWASPHFMKCNNYAHGRCTTAQHIAVEALEESFLAQLQHDLTFAESVACVVQAAKPAHSDQRLQQQRARIVSRIDRLRESYLDGVETLETYKAARQQMQAQLDDLDAQIAESAAVPVVDAAALLRNAIAAVLETLRSPTATVAQKYESAMSIIDRCTFDKSQMLLAISYKFIF

SEQ ID NO: 6947 - protein, 481 aa, Unknown
  Description of Unknown: Integrase B6948 sequence
  PTHR30461:SF3,IPR036162,PS51737,IPR011109,PTHR30461, PS00397,PF00239,G3DSA:1.10.10.2600,IPR006119,SSF53041, cd00338,SM00857,IPR025827,IPR038109,PS51736, IPR006118,PF13408,G3DSA:3.40.50.1390,Coil
METGKFMGGENYIEEVAAYIRVSTQEQKLHGISLEAQVEKLTEYAQNHGMKIVKFYKDEGVSGRKLIKNRPALQEMIQDAEKGKFKRIIFIKLDRFFRSVAEYHECMKRLSVGGVIWTATEEKYDLSTPSGEAFVNMKLTMAQFEADQAGERIRMVNEYKIKSGQPLYGSQCLPFCYAVGCPEEGERHKYIGKRDEEIMRDLIDYVMKNHSVRAGMNYINQKYNRNFLYNAVMNALKNEMICGTYKGNPNYCEPYITREEFNQLQKIISRNPRTTEKRTYLFTGLIRCPRCGYRLSGGQYYTYSRPNKETGKREKRRGYLAYKCGRSRVNNQCDFNNIVQEQKLEKMLLEQLDDIIAGKKLQAISVKSAGKKVSKHDVEALTAELDRLNYAWQKGRIKSVEEYDKSYDDLMDKIHAAENEQAELNQEPDYEKIQAVLSNGWQEIYKELDGEHKRAFWRSFIEEIQVVWSKDKKEIKDIIFF

SEQ ID NO: 6948 - protein, 481 aa, Unknown
  Description of Unknown: Integrase B6949 sequence
  PTHR30461:SF3,IPR036162,PS51737,IPR011109,PTHR30461, PS00397,PF00239,G3DSA:1.10.10.2600,IPR006119,SSF53041, cd00338,SM00857,IPR025827,IPR038109,PS51736, IPR006118,PF13408,G3DSA:3.40.50.1390,PF07508,Coil
MPEPHIAAAYVRVSTDDQMELSPDSQMEKIREYAAKNGLLLLSEYIFHDDGISGRAAEKRPGFQQMIATAKDPSHPFDVIIVWKFSRFARNQEESIFYKSILRSKCKVDVVSVSEPLIAGPFGSLIERIIEWMDEFYSVRLAEEVKRSMTVNAKNGSLQATPSFGYRVENRQLVIVPEEAEIIREIFRRFISGDAMFCIAKDLSARGVRTHRGNPFENRTIDYILNNPVYLGKLRWTPTGRTCRNFKNEDSIIADALHEPIIDAETWGAAQARCAELKKSYKRYGKPSSERKHWLCGVVRCSACGATLIWVSPHFMKCNNYAHGRCTTTQHIAVEALEESFLAQLQHDLTFAESVACVVQAAKPAHSDQRLQQQRARIVSRIDRLRESYLDGVETLETYKAARQQMQAQLDDLDAQIAESAAVPVVDAAALLRNAIAAVLETLRSPTATVAQKYESAMSIIDRCTFDKSQMLLAISYKFIF

SEQ ID NO: 6949 - protein, 481 aa, Unknown
  Description of Unknown: Integrase B6950 sequence
  PTHR30461:SF3,IPR036162,PS51737,IPR011109,PTHR30461, PS00397,PF00239,G3DSA:1.10.10.2600,IPR006119,SSF53041, cd00338,SM00857,IPR025827,IPR038109,PS51736, IPR006118,PF13408,G3DSA:3.40.50.1390,PF07508,Coil
MPEPHIAAAYVRVSTDDQMELSPDSQMEKIREYAAKNGLLLLSEYIFHDDGISGRAAEKRPGFQQMIATAKDPSHPFDVIIVWKFSRFARNQEESIFYKSILRSKCKVDVVSVSEPLIAGPFGSLIERIIEWMDEFYSVRLAEEVKRSMTVNAKNGSLQATPSFGYRAENRQLVIVPEEAEIIQEIFRRFISGDAMFRIAKDLSSRGIRTHRGNPFENRTIDYILNNPVYLGKLRWTPTGRTRRNFKNEDSIIADALHEPIIDAETWGAAQARCSELKKSYKRYGKPSSERKHWLCGVVRCSACGATLIWASPHFMKCNNYAHGRCSTTQHIAVEALEESFLAQLQHDLTFAESVACVVQAAKPAHSDQRLQQQRARIVSRIDRLRESYLDGVETLETYKAARQQMQAQLDDLDAQIAESAAVPVVDAAALLRNAIAAVLETLRSPTATVAQKYESAMSIIDRCTFDKSQMLLAISYKFIF

SEQ ID NO: 6950 - protein, 481 aa, Unknown
  Description of Unknown: Integrase B6951 sequence
  cd00338,SM00857,G3DSA:1.10.10.2600,IPR036162,PF13408, IPR025827,PS51737,G3DSA:3.40.50.1390,IPR006119,IPR038109, PF07508,IPR011109,SSF53041,PTHR30461,PS51736, Coil,PF00239
MPGTNSIPGTAAAYIRVSDDKQDEYSPDSQLKLIRDYAKRNGYYVPDEFVFYDDGISAKTAAKRPKFIEMIGIAKQKNPPFDKILVWKFSRFARNQEESIVYKSLLRKNGVEVISISEPLIDGAFGSLIERIIEWMDEYYLVRLSGEVKRGMKEKASRGEAMSGRVFGYLPKDGTLFPHPEEAPLVRMIFDDYLNGKGARQIAIKLQQLGVKTIRGNDPDNRFVDYVLHNPVYCGKVRWSTDGRAASKRDYHNENIMLVNGSFEPIISEQTFNAAQKKIVDQKKRYPKYQRNEAPTEYMLRGLVRCDSCGATLTLQRASKALQCHNYARGSCKVSHSISIAKANKTVIEALQYAVDHLDFNILPDEEKHTPEDYSKPLAALRKKLARTKEAYINGVDTLEEYKDNKLRITEEIAKLEKKQAANTALPEVDKEAFAAKVRGVIAVINSPDTTEQAKNEALRSVLAKIIYHKPAQSLELYFYA

SEQ ID NO: 6951 - protein, 481 aa, Unknown
  Description of Unknown: Integrase B6952 sequence
  SM00857,G3DSA:1.10.10.2600,IPR036162,PS51737,G3DSA:3.40.50.1390, IPR006119,IPR038109,PF07508,IPR011109,SSF53041, PTHR30461,Coil,PS51736,cd00338,PF00239
MPTARTAVIYARFSCNKQREASIDDQLRICRQWCQREKYAIVAEYCDYAISGRTDDRPEFQRMVANAGESDIVLVYMMDRFSRGEYDAPIYKRELAQHGVKLVSALEQIPDSPEGIIYEKLLEGLAACESKKTAIRTRRGMEGNALKCKTNGVRVFGYASNEADEYVINEDEAAFVREAFKRRIAKETTNSIARDFAARGVKTSQGNPCGYSMVERMVKNRKYTGRYEWGGVVKEGGMPAIIDEVTFMEAQGIRAAKERSAESWGDFALSGKAICAGCGRNLQGVSGRGRGNRKYEYYRCHDGCVKPVRREELEGEIVKALRALLQDREEALRIARMVAESSDGAEVAARRKQAAQSLSAAERGLRNILNAIEQGIIAPGAKERIAELEHQRDRAKLDLEAIRDDQLDPERLADFLQCGSALDDATLLKAFVYQASVSDEECIVTLNYDVENNEPARLDVQRVRTKCKWCPQRDSNPRYPP

SEQ ID NO: 6952 - protein, 481 aa, Unknown
  Description of Unknown: Integrase B6953 sequence
  PTHR30461:SF3,IPR036162,PS51737,IPR011109,PTHR30461, PS00397,PF00239,G3DSA:1.10.10.2600,IPR006119,SSF53041, SM00857,IPR025827,IPR038109,PS51736, cd03768,IPR006118,PF13408,G3DSA:3.40.50.1390,PF07508,Coil
MITTNKVAIYVRVSTTSQAEEGYSIEEQKAKLSSYCDIKDWSVYKIYTDGGFSGSNTDRPALEGLIKDAKKRKFDTVLVYKLDRLSRSQKDTLYLIEDIFIKNNIAFLSLQENFDTSTPFGKAMIGLLSVFAQLEREQIKERMQLGKIGRAKAGKSMMWAKTSYGYDYHRETGTITINPAQALAVKFIFESYLRGRSITKLRDDLNEKYPKHVPWSYRSVRAILDNPVYCGFNQYKGEIYPGNHEPIISKEEYDKTQSELKIRQRTAAENVNPRPFQAKYILSGIAQCGYCGAPLKIMLGVKRKDGSRLKKYECHQRHPRTLRGVTTYNDNKKCDSGFYYKDKLEAYVLEEISKLQDNADYLDKIFSGDNAETIDRESYKKQIEELSKKLSRLNDLYIDDRITLEELQNKSAEFISMRATLETELENDPALGKDKRKADMRELLNAKKIFSMDYEGQKVLVRGLINKVQVTAEDIVINWKI

SEQ ID NO: 6953 - protein, 481 aa, Unknown
  Description of Unknown: Integrase B6954 sequence
  PTHR30461:SF3,IPR036162,PS51737,IPR011109,PTHR30461, PS00397,PF00239,G3DSA:1.10.10.2600,IPR006119,SSF53041, SM00857,IPR025827,IPR038109,PS51736,cd03768, IPR006118,PF13408,G3DSA:3.40.50.1390,PF07508,Coil
MNTINKVAIYVRVSTNVQAEEGYSIDEQIDKLKSYCQIKDWTVYDVYKDGGFSGGNINRPALEKMIVDAKKKRFDTVLVYKLDRLSRSQKDTLFLIEDVFSKNDISFLSLQENFDTSTPFGKAMVGLLSVFAQLEREQIKERMQLGMIGRAKSGKPMMFTNVSFGYTYSPKTQQLTINQAEAVIVKQIFNEFLGGMSPLRLMAYLNENNILRNGKEWNYQGIQRILRNPVYIGKIKYNNVIYPGLHEPIIDEESYYKAQKLLDARQDEMRIKGKNRQFKAKYMLSGTAKCGYCGAPLRIKIGNKRLDGTRLKVYQCCNRYPRKYAVVTYNDNKKCNSGNYQKEDLEQYVIAEIRKLQLKPEKIDKLFNKVSKIDTVQINKQIASIDNKINRLNDLYLNDMIDIDKLKADAEKFKEQKRVLEKELDKDLKIQEQEKNKEDFKKTIGFKDVTKLDYEEQSFIVKSLIDKILVKKGFIKILWKI

SEQ ID NO: 6954 - protein, 481 aa, Unknown
  Description of Unknown: Integrase B6955 sequence
  PTHR30461:SF3,IPR036162,PS51737,IPR011109,PTHR30461, PS00397,PF00239,G3DSA:1.10.10.2600,IPR006119,SSF53041, cd00338,SM00857,IPR025827,IPR038109,PS51736, IPR006118,PF13408,G3DSA:3.40.50.1390,PF07508,Coil
MPEPHIAAAYVRVSTDDQMELSPDSQMEKIREYAAKNGLLLLSEYIFHDDGISGRAADKRPGFQQMIATAKDPSHPFDVIIVWKFSRFARNQEESIFYKSILRSKCKVDVVSVSEPLIAGPFGSLIERIIEWMDEFYSVRLAEEVKRSMTVNAKNGTLQATPSFGYRAEDRRLVVVPEEAEIIREIFRRFISGDAMFRIAKDLSARGVRTHRGNPFENRTIDYILNNPVYLGKLRWTPTGRTHRNFKNDDSIIADALHEPIIDAETWDAAQARCAELKKSYKRYGKPSSERKHWLCGVVRCSACGATLIWANPHFMKCNNYAHGRCTTTQHIAVEALEESFLAQLQHDLTFAESVACVVQAAKPAHSDQRLQQQRARIVSRIDRLRDSYLDGIETLETYKAARQQMQAQLDDLDAQIAESAAVPVVDTAALLRNAIAAVLETLRSPTATVAQKYESAMSIIDRCTFDKSQMLLAISYKFIF

SEQ ID NO: 6955 - protein, 481 aa, Unknown
  Description of Unknown: Integrase B6956 sequence
  PTHR30461:SF3,SM00857,G3DSA:1.10.10.2600,IPR036162,PF13408, IPR025827,PS51737,G3DSA:3.40.50.1390,IPR006119,IPR038109, PF07508,IPR011109,SSF53041,PF00239,PTHR30461, Coil,cd00338
MTIIGEYCDRAISGKTDNRPNFQRLIKDSEKGQFEAVIMYTLDRFARNRYDSAIYKAKLKKNGVKVYYAKQPMPDTPEGIILESVLEGYAEYYSENLSRNIKRGLKENALQCLAVGGAGMPLGYTVGEDRKYKIDPVGAKIVQEIFQMYADGMSATQIINECNRRGYKTSRGNAFNKNSLRTMLKNDRYIGVYRFADVVVEDGVPPIISRELFEKVQTTLRHNYSARARNKAKDDYLLTTKLFCGHCGSSMVGESGTSRSGKLHHYYKCIDRKRNRKCKKAVEKKDWIEELVVRFTVQNVLNDETIERIARKTMEIIEKESADTSYLNGLQNELKGIKKKIKNLMNAIEQGIITPTTKERMDELEAEKNDLEGKIAREEMKKPLLTKERIMHWLNSFKSGNVNDIEYRRRVIDTLVNSVYIYDDGDKGRRIVFTFNMSGQNTATLSCSDIACVAPPKGANPNTLFFVKHCFGFVMNIEEVG

SEQ ID NO: 6956 - protein, 481 aa, Unknown
  Description of Unknown: Integrase B6957 sequence
  PTHR30461:SF3,IPR036162,PS51737,IPR011109,PTHR30461, PS00397,PF00239,G3DSA:1.10.10.2600,IPR006119,SSF53041, cd00338,SM00857,IPR025827,IPR038109,PS51736, IPR006118,PF13408,G3DSA:3.40.50.1390,PF07508,Coil
MKKGAIYVRVSSAEQAREGYSIDAQIKALRDYAIKNDIFLEEQYIYKDEGISGRKAEKRPAFMEMIKTAKSKPKKFDVILVHKFDRFSRNREDSIVYKSLLKKECGINVISITEHLDPDDKTSIILEAFLEASAEYYSINLSEEVKKGQLEKHSQGGLQTNPSFGYNVVNNKLVINEEEEKIVKLIFESYAIENKSMMDIAKKINSLGILTKRGNKFENRTIYYILNNPTYIGKLRYTPGRKNTYDFDDPNTILVEGQHTPIISSDLWDLVQLKLSKNSIWKKPKARLDFSIKHWSKGLIRCSECNCTLVATGVEKYRCNGYNKGKCSNHTKISISEAENLILSQLKQDFSKGIIRNIVPNKKEKKSINEYEIIISSIRSLEEKEERIKQSYINGVDTLEEYKQNKNMLNKEKDRLNEKLLTLEKPSIEKHKKEIIENGKKVYEILTNDKISLEEKNDIVNKLINKVEYEEKTNNLVIFYN

SEQ ID NO: 6957 - protein, 481 aa, Unknown
  Description of Unknown: Integrase B6958 sequence
  PTHR30461:SF3,SM00857,G3DSA:1.10.10.2600,IPR036162,PF13408, PS51737,G3DSA:3.40.50.1390,IPR025827,IPR006119,IPR038109, PF07508,IPR011109,SSF53041,PTHR30461,Coil, PS51736,cd00338,PF00239
MTIIGEYCDKAISGKTDNRPSFQRLIKDSEKGQFEAVIMYTLDRFARNRYDSAIYKAKLKKNGVRVYYAKQPMPDTPEGIILESVLEGYAEYYSENLSRNIKRGMKENALQCIANGGAGMPLGYTVGEDRRYKIDPVGARIVQEIFQMYADGMSATQIINECNKRGYKTARGNAFNKNSLRTMLKNDRYIGVYRFADVVVEGGVPPIISRELFDKVQATLKHNYSARARNKAKDDYLLTAKLFCGHCGSSMVGESGTSKSGKLHHYYKCIERKRKHKCNKAVEKKDWMEELVVRFTVQKVLTDENIERIAVKAMEIIEKESADTTYIDGLRNELKEVKKKIKNLMTAIEQGIITPSTKERMDELELEKNEIEGRIASEEMKKPLLTKERIMYWLYSFKSGNIDDVEYKRRVIDTLVNSVYVYDEGDRGRRIVFTFNISGQNTATLSCSDIACFAPPHMKNPNLFPIGNAFGFFIFIKDISY

SEQ ID NO: 6958 - protein, 481 aa, Unknown
  Description of Unknown: Integrase B6959 sequence
  cd00338,SM00857,G3DSA:1.10.10.2600,IPR036162,PF13408, IPR025827,G3DSA:3.40.50.1390,PS51737,IPR006119,IPR038109, PF07508,SSF53041,IPR011109,PTHR30461,PS51736, Coil,PF00239
MPGTNSIPGTAAAYIRVSDDKQDEYSPDSQLKLIRDYAKRNGYYVPDEFVFYDDGISAKTAAKRPKFIEMIGIAKQKNPPFDKILVWKFSRFARNQEESIVYKSLLRKNGVEVISISEPLIDGAFGSLIERIIEWMDEYYLVRLSGEVKRGMKEKASRGEAMSGRVFGYLPKDGTLIPHPEEAPLVRMIFDDYLNGKRERQIAIKLQQLGVKTIRGNDPDNRFVDYVLNNPVYCGKVRWSTDGRAASKRDYHNENIMLVNGSFEPIISEQTFNAAQKKIVDQKKRYPKYQRNEAPTEYMLRGLVRCDSCGATLTLQRASKALQCHNYARGSCKVSHSISIAKANKTVIEALQYAVDHLDFNILPDEEKHTPEDYSKPLAALRKKLARTKEAYINGVDTLEEYKENKQRITEDIAKLEKKQAANTALPEVDKEAFAAKVRGVIAVISSPDTTEQAKNEALRSVIAKIVYHKLAQSLELYFYA

SEQ ID NO: 6959 - protein, 481 aa, Unknown
  Description of Unknown: Integrase B6960 sequence
  PTHR30461:SF3,IPR036162,PS51737,IPR011109,PTHR30461, PS00397,PF00239,G3DSA:1.10.10.2600,IPR006119,SSF53041, SM00857,IPR025827,IPR038109,PS51736,cd03768, IPR006118,PF13408,G3DSA:3.40.50.1390,PF07508,Coil
MMTTNKVAIYVRVSTTSQVEEGYSIDEQKAKLSSYCDIKDWNVYKIYTDGGFSGANTDRPALEGLIQDAKKRKFDTVLVYKLDRLSRSQKDTLYLIEDIFIKNNIAFLSLQENFDTSTPFGKAMIGLLSVFAQLEREQIKERMQLGKIGRAKAGKSMMWAKTSYGYDYHRDTGTITINPAQALAVKFIFESYLRGRSITKLRDDLNEKYPKHVPWSYRAVRTILDNPVYCGFNQYKGEIYPGNHEPIISKEEYDKTQSELKIRQRTAAENVNPRPFQAKYILSGIAQCGYCGAPLKIMLGVKRKDGSRLKKYECHQRHPRTLRGVTTYNDNKKCDSGFYYKDKLEAYVLEEISKLQDDADFLDKIFSGDNAETIDRESYKKQIEELSKKLSRLNDLYIDDRITLEELQSKSAEFISMRATLETELENDPALRKNKRKADMRKLLNAEKIFSMDYEGQKVLVRGLINKVQVTAEDIVIKWKI

SEQ ID NO: 6960 - protein, 481 aa, Unknown
  Description of Unknown: Integrase B6961 sequence
  PTHR30461:SF3,cd00338,SM00857,IPR006118,G3DSA:1.10.10.2600, IPR036162,PS51737,G3DSA:3.40.50.1390,IPR006119,IPR038109, PF07508,IPR011109,SSF53041,PTHR30461,PS00397, PS51736,Coil,PF00239
MPEPRIAAAYVRVSTDDQMELSPDSQMEKIREYAAKNGLLLLSEYIFHDDGISGRAAEKRPGFQQMIATAKDPSHPFDTIIVWKFSRFARNQEESIFYKSILRSKCKVDVVSVSEPLIAGPFGSLIERIIEWMDEFYSVRLAEEVKRSMTVNAKNGTLQSTPSFGYRVENRQLVIVPEEADIIREIFRRFISGDAMFRIAKDLSARGVRTHRGNPFENRTIDYILNNPVYLGKLRWTPTGRTHRNFKNEDSIIADALHEPIIDAETWDAAQARCAELKKSYKRYGKPSSERKHWLCGVVRCSTCGATLIWAGPHFMKCNNYAHGRCTTAQHIAVEALEESFLAQLQHDLTFAESVACVVQAAKPAHSDQRLQQQRARIVSRIDRLRESYLDGVETLETYKAARQQMQAQLDDLDAQISESAAVPVVDAAALLRNAIAAVLETLRSPTATVAQKYESAMSIIDRCTFDKSQMLLAISYKFIF

SEQ ID NO: 6961 - protein, 481 aa, Unknown
  Description of Unknown: Integrase B6962 sequence
  PTHR30461:SF3,IPR036162,PS51737,IPR011109,PTHR30461, PS00397,PF00239,G3DSA:1.10.10.2600,IPR006119,SSF53041, SM00857,IPR025827,IPR038109,PS51736,cd03768, IPR006118,PF13408,G3DSA:3.40.50.1390,PF07508,Coil
MNTINKVAIYVRVSTNMQAEEGYSIDEQIDKLKSYCQIKDWTVYDVYKDGGFSGGNINRPALEKMIIDAKKKRFDTVLVYKLDRLSRSQKDTLFLIEDVFSKNDISFLSLQENFDTSTPFGKAMVGLLSVFAQLEREQIKERMQLGMIGRAKSGKPMMFTNVSFGYTYSPKTQQLTINQAEAVIVKQIFNEFLGGMSPLRLMAYLNENNILRNGKEWNYQGIQRILRNPVYIGKIKYNNVIYPGLHEPIIDEESYYKAQKLLDARQDEMRIKGKNRQFKAKYMLSGTAKCGYCGAPLRIKIGNKRLDGTRLKVYQCCNRYPRKYAVVTYNDNKKCNSGNYQKEDLEQYVIAEIRKLQLKPEKIDKLFNKVSKIDTVQINKQIASIDNKINRLNDLYLNDMIDIDKLKADAEKFKEQKRVLEKELDKDLKIQEQEKNKEDFKKTIGFKDVTKLDYEEQSFIVKSLIDKILVKKGFIKILWKI

SEQ ID NO: 6962 - protein, 481 aa, Unknown
  Description of Unknown: Integrase B6963 sequence
  PTHR30461:SF3,SM00857,G3DSA:1.10.10.2600,IPR036162,PS51737, G3DSA:3.40.50.1390,IPR006119,IPR038109,PF07508,IPR011109, SSF53041,PF00239,PTHR30461,PS51736,Coil, cd00338
MKIAAVYTRVSTDEQAREGYSLDAQLKAIKKYAQNNDILIDSKYIFSDEGISGRKAEKRPAFMEMIKQAKSKPRKFDVILVHKFDRFSRNREDSVVYKSLLKKEYGIPVISISEPLDPDDKMSVIMEAFLEAMAEYYSLNLSGEVKKGQLEKHSKGELQTNPSFGYNVSDNKLIVNEDEANVVKMIFEQYAIDNLPMMQIARNVNALNVKTKRGRHFENRTIYYILNNPVYIGKLRYTPGRRNQYDFDDPNTILVDGQHEPIISMDLWNSVQMKLTKNSIWKKPKQHIDVNPKHWTKGLVRCKECGCTMVTCGKTKLRCNGYNKGKCSNSSTLLIADVYDLIIDNIKQVMKNGRIEHIVQSKKEKKESNQYLILQHQLEQLSDKEQRIKEAYREGVDTIDEYKENKNIILREKNRLLKEIDKVEKPKTENKKKEIIENGKKVYEILTDDKISLKEKNEVAHILINKVEYDPTSNTLELYYN

SEQ ID NO: 6963 - protein, 481 aa, Unknown
  Description of Unknown: Integrase B6964 sequence
  PTHR30461:SF3,IPR036162,PS51737,IPR011109,PTHR30461, PS00397,PF00239,G3DSA:1.10.10.2600,IPR006119,SSF53041, SM00857,IPR025827,IPR038109,PS51736,cd03768, IPR006118,PF13408,G3DSA:3.40.50.1390,PF07508,Coil
MNEINKVALYVRVSTTSQMEEGYSIEEQKAKLESYCDIKDWHIYKVYTDGGFSGSTTERPALEQLIKDAQSKLFDTVLVYKLDRLSRSQKDTLYLIEDIFLKNNIEFVSLLENFDTSTPFGRAVIGLLSVFAQLEREQIKERMQLGKLGRAKAGKSMMWAKTSYGYDYNKETGSMTINEYEALAVKEIFTSYLAGMSITKLRDKINEEYPKQPAWSYRTIRGILANPVYCGLNQYKGQTFQGTHKAIISLVDFEQTQRELAKRQQTAKELSNPRPFQAKYMLSGLAQCGYCHAPLKVILGQKRKDGTRFKRYECYQRHPRKTRGVTVYNDNKKCESGYYDMELLEHYVLTRIAQLQNDPDKIQELFSDDTSPAVDKQAIQKQIDSLTLKLSKLNDLYLDDRITLDELRAKSSDFIKQRAALEEEIKKASTDKQAGKRKKIEKLLDASSVLDMSYDNQKVIVRELIDKVQVTSDKIVIRWKI

SEQ ID NO: 6964 - protein, 481 aa, Unknown
  Description of Unknown: Integrase B6965 sequence
  SM00857,IPR006118,G3DSA:1.10.10.2600,IPR036162,PF13408, IPR025827,G3DSA:3.40.50.1390,PS51737,IPR006119,IPR038109, PF07508,SSF53041,IPR011109,PF00239,PTHR30461, PS00397,Coil,cd00338
MTPKALEIGAAYIRVSTDDQTELSPDAQLRVILDEAKKDGFVIPPEYIFEEKKGISGRKADNRPEFQKMIAIAKSQSPAPFKRLYLWKFSRFARNQEESTFYKGILRKKCGVEIKSVSEPIMEGMFGRLIETIIEWFDEYYSYNLSGEVVRGMTEKALRQGYQSSPSLGYEAVGEGKAFVINEETYKIVEYIFRSYYDGKDMTAIARACNEHHWRTRRGNPFERRTISRILQNQFYNGTVLWNGYSFQGTHEVRPSVTKIFPAVQERIRAEYRPLKRREVSSCGHWLSGLLVCSVCGASLSLNRVRSNHGSDFFQCWKYSKGLHPGSCAITVAKAEQLLLHSIKTVLESESVEYEYLPPETTAAATEQDLITDALDKVTLKELRIKEAYEAGIDTLEEYKENKLRLAAEREELLQKLQETAPSPQAEIPDQNEVLRRIQSAYDLFSDPNVDFEIKGNALRKIVKKIIYDRQNGEFKVIYYV

SEQ ID NO: 6965 - protein, 481 aa, Unknown
  Description of Unknown: Integrase B6966 sequence
  PTHR30461:SF3,SM00857,G3DSA:1.10.10.2600,IPR036162,PF13408, IPR025827,PS51737,G3DSA:3.40.50.1390,IPR006119,IPR038109, PF07508,IPR011109,SSF53041,PTHR30461,Coil, cd00338,PF00239
MTIIGEYCDRAISGKTDNRPNFQRLIKDSEKGQFEAVIMYTLDRFARNRYDSAIYKAKLKKNGVKVYYAKQPMPDTPEGIILESVLEGYAEYYSENLSRNIKRGLKENALQCLAVGGAGMPLGYTVGEDRKYKIDPVGAKIVQEIFQMYADGMSATQIINECNRRGYKTSRGNAFNKNSLRTMLKNDRYIGVYRFADVVVEDGVPPIISRELFEKVQTTLRHNYSARARNKAKDDYLLTTKLFCGHCGSSMVGESGTSRSGKLHHYYKCIDRKRNHKCKKAVEKKDWIEELVVRFTVQNVLNDETIERIARKTMEIIEKESADTSYLNGLQNELKGIKKKIKNLMNAIEQGIITPTTKERMDELEAEKNDLEGKIAREEMKKPLLTKERIIHWLNSFKSGNVNDIEYRRRVIDTLVNSVYIYDDGDKGRRIVFTFNMSGQNTATLSCSDIACVAPPKGANPNTLFFVKHCFGFVMNIEEVG

SEQ ID NO: 6966 - protein, 481 aa, Unknown
  Description of Unknown: Integrase B6967 sequence
  PTHR30461:SF3,IPR036162,PS51737,IPR011109,PTHR30461, PS00397,PF00239,G3DSA:1.10.10.2600,IPR006119,SSF53041, cd00338,SM00857,IPR025827,IPR038109,PS51736, IPR006118,PF13408,G3DSA:3.40.50.1390,PF07508,Coil
MPEPHIAAAYVRVSTDDQMELSPDSQMEKIREYAAKNGLLLLSEYIFHDDGISGRAAEKRPGFQQMIATAKDPSHPFDVIIVWKFSRFARNQEESIFYKSILRSKCKVDVVSVSEPLIAGPFGSLIERIIEWMDEFYSVRLAEEVKRSMTVNAKTGTLQATPSFGYRVENRQLVIVPEEAEIIREIFRRFISGDAMFRIAKDLSSRGIRTHRGNPFENRTIDYILNNPVYLGKLRWTPTGRTCRNFKNEDSIIADALHEPIIDAETWGAAQARCAELKKSYKRYGKPSSERKHWLCGVVRCSTCGATLIWANPHFMKCNNYAHGRCTTTQHIAVEALEESFLAQLQHDLTFAESVACVVQAAKPAHSNQRLQQQRARIVSRIDRLRESYLDGVETLETYKAARQQMQAQLDDLDAQISESASVPVVDTAALLRNAIAAVLETLRSPTATVAQKYESAMSIIDRCTFDKSQMLLAISYKFIF

SEQ ID NO: 6967 - protein, 481 aa, Unknown
  Description of Unknown: Integrase B6968 sequence
  PTHR30461:SF3,SM00857,G3DSA:1.10.10.2600,IPR036162,PF13408, PS51737,G3DSA:3.40.50.1390,IPR025827,IPR006119,IPR038109, PF07508,SSF53041,IPR011109,PTHR30461,Coil, PS51736,cd00338,PF00239
MTVINEYCDRAISGKTDNRPSFQRLIKDSEKGQFEAVIMYTLDRFARNRYDSAIYKAKLKKHGVRVFYAKQPMPDTPEGIILESVLEGYAEYYSENLSRNIKRGLKENALQCIATGGAGVALGYTVGEDRKYKIDPVGAKIVQEVFEMYADGMSATQIINVCNERGYKTSRGNPFNKNSLRTMLKNDKYIGVYRFMDVVVEGGVPAIISKELFDKVQAKLQHNFTARARNKAKEDYLLTTKLFCGHCGSPMVGESGTSKTGKLHFYYKCIDRKRKHVCTKKVEKKDWIEELVTRFTVQEVLTDENIDRIATKAMEIIEKESADTTYLEGLQNELKEVQKKIKNIMTAIEQGIITSTTKDRLEELESEKNEIEGRIAREEIKKPLLTKERIVYWLLSFKSGDINDIEYRRRVIDTLVNSVYIYDDGDKGRRIVLTFNVSGQNTATISCSDIACSAPPKGANPNSLFFVKHCFGFVVHIEEVG

SEQ ID NO: 6968 - protein, 481 aa, Unknown
  Description of Unknown: Integrase B6969 sequence
  PTHR30461:SF3,SM00857,G3DSA:1.10.10.2600,IPR036162,PS51737, G3DSA:3.40.50.1390,IPR006119,IPR038109,PF07508,IPR011109, SSF53041,PTHR30461,Coil,PS51736,cd00338, PF00239
MPIARTAVIYARFSCNKQREASIDDQLRICRQWCQREKYAIVAEYCDYAISGRTDDRPEFQRMVANAGESDIVLVYMMDRFSRGEYDAPIYKRELAQHGVKLVSALEQIPDSPEGIIYEKLLEGLAACESKKTAIRTRRGMEGNALKCKTNGVRVFGYASNEADEYVINEDEAAFVREAFKRRIAKETTNSIARDFAARGVKTSQGNPCGYSMVERMVKNRKYTGRYEWGGVVKEGGMPAIIDEVTFMEAQGIRAAKERSAESWGDFALSGKAICAGCGRNLQGVSGRGRKNVKYEYYRCHDGCVRPVRREELEGEIVKALRALLQDREEALRIARMVAESSDGAEVAARRKQAAQSLSAAERGLKNILNAIEQGIIAPGAKERIAELEHQRDRAKLDLEAIRDEQIDPERLADFLQCGSSLDDATLLKAFVYQVSVSDEECIVTLNYDVESNEPARLDVQRVRTKCKWCPRADSNRRHPL

SEQ ID NO: 6969 - protein, 481 aa, Unknown
  Description of Unknown: Integrase B6970 sequence
  PTHR30461:SF3,SM00857,G3DSA:1.10.10.2600,IPR036162,PF13408, PS51737,G3DSA:3.40.50.1390,IPR025827,IPR006119,IPR038109, PF07508,IPR011109,SSF53041,PTHR30461,Coil, PS51736,cd00338,PF00239
MTIIGEYCDKAISGKTDNRPSFQRLIKDSEKGQFEAVIMYTLDRFARNRYDSAIYKAKLKKNGVRVYYAKQPMPDTPEGIILESVLEGYAEYYSENLSRNIKRGMKENALQCIANGGAGMPLGYTVGEDRRYKIDPVGARIVQEVFQMYADGMSATQIINECNKRGYKTARGNAFNKNSLRTMLKNDRYIGVYRFADVVVEGGVPPIISRELFDKVQATLKHNYSARARNKAKDDYLLTAKLFCGHCGSSMVGESGTSKSGKLHHYYKCIERKRKHKCNKAVEKKDWMEELVVRFTVQKVLTDENIERIAVKAMEIIEKESADTTYIDGLRNELKEVKKKIKNLMTAIEQGIITPSTKERMDELELEKNEIEGRIASEEMKKPLLTKERIMYWLYSFKSGNIDDVEYKRRVIDTLVNSVYVYDEGDKGRRIVFTFNISGQNTATLSCSDIACFAPPNSANPNTLFFVKHCFGFVMNIEEVG

SEQ ID NO: 6970 - protein, 481 aa, Unknown
  Description of Unknown: Integrase B6971 sequence
  PTHR30461:SF3,cd00338,SM00857,G3DSA:1.10.10.2600,IPR036162, PF13408,PS51737,IPR025827,G3DSA:3.40.50.1390,IPR006119, IPR038109,PF07508,IPR011109,SSF53041,PTHR30461, PS51736,Coil,PF00239
MCAKKKPAMLEPDMQDAVIYTRYSSHNQRDCSIEQQVADCEIFARQNNLRVVKVYADRHLSGTTDNRPQFQQMLKDASHGHWAYVICWKIDRFARNRYDSATYKFRLKKAGVRVLYAKESIPDGPEGILLESVLEGSAEYYSAALAQNIRRGMKFNAEQCKVNSGSIPFGYCKGPDGRFAIHEANAEVVREIFRKAAAGMPFVDIANDLNSRGLKTSRGGRWNKGSFRLLMNEAYIGVYHFSDTRIEGGMPALIDQGTFWAANERLKANSSVRGRHQDGGDYLLTGKLKCAHCGSYMIGFSGTGKSGELHYYYGCQKRRRERACKKANVPREWIERVVVKAALDYVLRPDVMEWIADAVMEYQEREAASAQLAALTAELEENQKATDNVMKAIEAGIITSTTKQRLLDLEAKAQDLKRAIELEKLSHVRLERDQVLFWLDRFRGGSLQSQEFRRKVIDAFVSVVYLSDDHLRIAFNYSGGV

SEQ ID NO: 6971 - protein, 481 aa, Unknown
  Description of Unknown: Integrase B6972 sequence
  PTHR30461:SF3,IPR036162,PS51737,IPR011109,PTHR30461, PS00397,PF00239,G3DSA:1.10.10.2600,IPR006119,SSF53041, cd00338,SM00857,IPR025827,IPR038109,IPR006118, PF13408,G3DSA:3.40.50.1390,PF07508,Coil
MAPTVLQIGAAYIRVSTDDQTELSPDAQLRVIKEEATRDGFVIPPEYIFVEHKGISGRKASNRPEFQRMISIAKSQSPAPFKRLYLWKFSRFARNQEESTFYKSILRKKCGVEIKSVSEPIMEGMFGRLIETIIEWFDEYYSYNLSGEVIRGMTEKALRQGYQMTPPLGYKAVGEGKPFVINEDAYRIVEFIFKSYAAGMDMSAITRYCNEHCWKTQRGNPFERRGIQRILKNRFYIGEVEWNGYKFQGPHETRGSVKDCFETVQKRIRDEYTPANRRDASASLHWLAGIMVCGTCGATLGYNRVFSQKRPSYYQCWKYAKGMHTGSCSITAAKAERLLLQSLNEVLSSQAVEYEHIQQAQSDTISERELIEAAIERVAVKEQRVKEAYEAGIDTLEEYKGNKLRLAEEREDLRMKLENISPAADPDDPGLDEVLSRIKNIYDLISSPDVDDETKGKAIRRIVKKIVLDKEKGEFKVVYYA

SEQ ID NO: 6972 - protein, 481 aa, Unknown
  Description of Unknown: Integrase B6973 sequence
  PTHR30461:SF3,SM00857,G3DSA:1.10.10.2600,IPR036162,PF13408, PS51737,G3DSA:3.40.50.1390,IPR025827,IPR006119,IPR038109, PF07508,IPR011109,SSF53041,PTHR30461,Coil, PS51736,cd00338,PF00239
MTIIGEYCDKAISGKTDNRPSFQRLIKDSEKGQFEAVIMYTLDRFARNRYDSAIYKAKLKKNGVRVYYAKQPMPDTPEGIILESVLEGYAEYYSENLSRNIKRGMKENALQCIANGGAGMPLGYTVGEDRRYKIDPVGARIVQEIFQMYADGMSSTQIINECNKRGYKTARGNAFNKNSLRTMLKNDRYIGVYRFADVVVEGGVPPIISRELFDKVQATLKHNYSARARNKAKDDYLLTAKLFCGHCGSSMVGESGTSKSGKLHHYYKCIERKRKHKCNKAVEKKDWMEELVVRFTVQKVLTDENIERIAVKAMEIIEKESADTTYVDGLRNELKEVKKKIKNLMTAIEQGIITPSTKERMDELELEKNEIEGRIASEEMKKPLLTKERIMYWLYSFKSGNIDDVEYKRRVIDTLVNSVYIYDEGDKGRRIVFTFNVSGQNTATLSCSDIACFAPPNSANPNTLFFVKHCFGFVMNIEEVG

SEQ ID NO: 6973 - protein, 481 aa, Unknown
  Description of Unknown: Integrase B6974 sequence
  cd00338,SM00857,G3DSA:1.10.10.2600,IPR036162,PF13408, IPR025827,PS51737,G3DSA:3.40.50.1390,IPR006119,IPR038109, PF07508,IPR011109,SSF53041,PTHR30461,PS51736, Coil,PF00239
MPGTNSIPGTAAAYIRVSDDKQDEYSPDSQLKLIRDYAKRNGYYVPDEFVFYDDGISAKTAAKRPKFIEMIGIAKQKNPPFDKILVWKFSRFARNQEESIVYKSLLRKNGVEVISISEPLIDGAFGSLIERIIEWMDEYYLVRLSGEVKRGMKEKASRGEAMSGRVFGYLPKDGTLIPHPEEAPLVRMIFDDYLNGKRERQIAIKLQQLGVKTIRGNDPDNRFVDYVLNNPVYCGKVRWSTDGRAASKRDYHNENIMLVNGSFEPIISEQTFNAAQNKIADQKKRYPKYQRNEAPTEYMLRGLVRCDSCGATLTLQRASKALQCHNYARGSCKVSHSISIAKANKTVIEALQYAVDHLDFNILPDEEKHTPEDYSKPLAALRKKLARTKEAYINGVDTLEEYKENKQRIAEEIAKLEKKQAANTALPEVDKEAFAAKVRGVIAVINSPDTTEQAKNEALRSVLAKIIYHKPAQSLELYFYA

SEQ ID NO: 6974 - protein, 481 aa, Unknown
  Description of Unknown: Integrase B6975 sequence
  PTHR30461:SF3,IPR036162,PS51737,IPR011109,PTHR30461, PS00397,PF00239,G3DSA:1.10.10.2600,IPR006119,SSF53041, cd00338,SM00857,IPR025827,IPR038109,PS51736, IPR006118,PF13408,G3DSA:3.40.50.1390,PF07508,Coil
MPEPRIAAAYIRVSTDDQMELSPDSQMEKIREYAAKNGLLLLSEYIFHDDGISGRAAEKRPGFQQMIATAKDPSHPFDVIIVWKFSRFARNQEESIFYKSILRSKCKVDVVSVSEPLIAGPFGSLIERIIEWMDEFYSVRLAEEVKRSMTVNAKNGSLQATPSFGYRVENRQLVIVPEEAEIIREIFRRFISGDAMFCIAKDLSSRGIRTHRGNPFENRTIDYILNNPVYLGKLRWTPTGRTCRNFKNEDSIIADALHEPIIDAETWDAAQSRCAELKKSYKRYGKPSSERKHWLCGVVRCSVCGATLIWVSPHFMKCNNYAHGRCTTTQHIAVEALEESFLAQLQHDLTFAESVSCVVQAAKPAHSDQRLQQQRARIVSRIDRLRESYLDGVETLETYKAARQQMQAQLDDLDAQIAESASVPVVDTAALLRNAIAAVLETLRSPTATVAQKYESAMSIIDRCTFDKSQMLLAISYKFIF

SEQ ID NO: 6975 - protein, 480 aa, Unknown
  Description of Unknown: Integrase B6976 sequence
  PTHR30461:SF3,IPR036162,PS51737,IPR011109,PTHR30461, PS00397,PF00239,G3DSA:1.10.10.2600,IPR006119,SSF53041, cd00338,SM00857,IPR025827,IPR038109,PS51736, IPR006118,PF13408,G3DSA:3.40.50.1390,PF07508,Coil
MKIGALYIRVSTDDQLEYSPAAQQKLGLDYAKKNGIVIPKDFIFVDEGISGRKVKNRPAFQQLISLAKSNEHPIEVILVWKFSRFARNQEESIVYKNLLKRAGVELVSISEPLPDGAIGQLVERIFEWMDEYYSINLGVEVLRGMSERARQGGCNVSPPLGYKMEDGSPVIVPEQAIIVKKIFDLFVNDKLSFYDIAGKLNSLGYKTKRGGKFQNRTVAYIVRNEFYDQQLVWNKTEKATRKLKDSSEWISVKGDYPRIISHELWEAAQERDKATRRPRGSRPASTYRHWLSGMLVCSNCGGKLVRVGTNKSGNTYFQCTNYNHASCSESHSTNARVIQSAILESFKDVISSGNVVYNATATKKDDSERALIEDSIKKISFKEARIKQAYRDGIDTIEEYKENKRILSEEKANLEQMLSELKDDNAEQTLLLKKIRSAYDIIASDETSETQKHEALTSVVRKIVFNKKEEKFTLYYFINY

SEQ ID NO: 6976 - protein, 480 aa, Unknown
  Description of Unknown: Integrase B6977 sequence
  PTHR30461:SF3,IPR036162,PS51737,IPR011109,PTHR30461, PS00397,PF00239,G3DSA:1.10.10.2600,IPR006119,SSF53041, SM00857,IPR025827,IPR038109,PS51736,cd03768, IPR006118,PF13408,G3DSA:3.40.50.1390,PF07508,Coil
MATHKVAIYVRVSTTSQVDEGYSIDEQKAKLTSYCDIKDWSIYDIYTDGGFSGSNTERPALERLIKDAKRKLFDTVLVYKLDRLSRSQKDTLYLIEDVFLENDIEFVSLLENFDTSTPFGKALIGLLSVFAQLEREQIKERMQLGKLGRAKSGKSMMWSKTSYGYDYIKETGTLSVNPYQALIVRKMFEWYLSGMSVTKLRDTLNEQYGQDKEWSYRTVRVILSNPVYCGYNQFKGQIFPGTHEPIISEEDFNKAQEEIKTRQRTAAQRFNPRPFQAKYMLSGIAQCGYCSAPLAIKLGTIRKDGTRLVKYECKQRHPRKTKGVTVYNNNEKCDSGFYFKDDIEHFVLTEISKLQTDSDYIDKLFSNTNQETIDRDSYQKQIDNLTAKISRLNDLYIDDRISLEELQKRSSDFMAKRAALEKELDADTSLKTVERKEDVKRVLDTKDIFTLDYEQQKAIARALISKVRVTSESIVILWKL

SEQ ID NO: 6977 - protein, 480 aa, Unknown
  Description of Unknown: Integrase B6978 sequence
  PTHR30461:SF3,IPR036162,PS51737,IPR011109,PTHR30461, PS00397,PF00239,G3DSA:1.10.10.2600,IPR006119,SSF53041, SM00857,IPR025827,IPR038109,PS51736,cd03768, IPR006118,PF13408,G3DSA:3.40.50.1390,PF07508,Coil
MTMHKVAIYVRVSTTSQVDEGYSIDEQKAKLTSYCDIKDWNIYDIYTDGGFSGSNTERPALEQLIRDAKRKLFDTVLVYKLDRLSRSQKDTLYLIEDVFLENDIEFVSLLENFDTSTPFGKAMIGLLSVFAQLEREQIKERMQLGKLGRAKSGKSMQWAKTSFGYDYIKETGTLSVNPYQALIVRKMFEWYLSGMSITKLRDALNEQYGQDKEWNYRTVRVILSNPVYCGYNQFKGQIFPGTHEPIISEEDFNKTQEEIKTRQRTAAQRFNPRPFQAKYMLSGIAQCGYCSAPLAIKLGMKRKDGTRLVKYECKQRHPRKTKGVTVYNNNEKCDSGFYFKDDIEHFVLTEISKLQTDSDYIDKLFSNTDKETIDRDSYQKQIDKLTAKISRLNDLYIDDRISLEELQKRSSDFMAERTALEKELEADSSVKTVERKKDIRRVLDTKDIFSLDYEQQKAIARALISKVRVTSETIVILWKL

SEQ ID NO: 6978 - protein, 480 aa, Unknown
  Description of Unknown: Integrase B6979 sequence
  PTHR30461:SF3,IPR036162,PS51737,IPR011109,PTHR30461, PS00397,PF00239,G3DSA:1.10.10.2600,IPR006119,SSF53041, SM00857,IPR025827,IPR038109,PS51736,cd03768, IPR006118,PF13408,G3DSA:3.40.50.1390,PF07508,Coil
MAMHKVAIYVRVSTTSQVDEGYSIDEQKAKLTSYCEIKDWNIYEIYTDGGFSGSNTERPALEQLIRDAKRKLFDTVLVYKLDRLSRSQKDTLYLIEDVFLENDIEFVSLLENFDTSTPFGKAMIGLLSVFAQLEREQIKERMQLGKLGRAKSGKSMQWAKTSYGYDYIKETGTLSVNPYQALIVRKMFEWYLSGMSITKLRDALNEQYGQDKEWNYRTVRVILSNPVYCGYNQFKGQIFLGTHEPIISEEDFNKTQEEIKTRQRTAAQRFNPRPFQAKYMLSGIAQCGYCSAPLAIKLGMKRKDGTRLVKYECKQRHPRKTKGVTVYNNNEKCDSGFYFKDDIEHFVLTEISKLQTDSDYIDKLFSNTDKETIDRASYQKQIANLTAKISRLNDLYIDDRISLEELQKRSSDFMAERSALEKELDADSSVKAVERKKDMRRVLDTKDVFTLDYEQQKAIARALISKVRVTSETIVILWKL

SEQ ID NO: 6979 - protein, 480 aa, Unknown
  Description of Unknown: Integrase B6980 sequence
  PTHR30461:SF3,SM00857,G3DSA:1.10.10.2600,IPR036162,PF13408, IPR025827,PS51737,G3DSA:3.40.50.1390,IPR006119,IPR038109, IPR011109,SSF53041,PTHR30461,PS51736,cd00338, PF00239
MNSTYFRPQPELFGLRVVKYIRCSHDGQVLHGDTLEAQDALLDEFIKVNRMVLIDTFIDEALTARKKFTRRKEFVRLLDGVRAHSFDMILFTKLDRWFRNIGDYHKIQEILEANGVQWKAITESYDTTTTNGRLHINIRLSVAQDECDRDSDRIKDVFAYKLKNKTYLSGSLPRGLKLDDEKHVIIDPEWKQFALDMFDHFEQTNSKRGTLLYLKEKYGIYLCYDTISRNLRNSLYKGMYRDDPDFCEPLIEPERFDRIQVLGKRNVRQRYSNRTYVFTGLLICSSCNHYLVGQTTHRTLSDGTEKHYPSYRCNQRYQSHSCDRNRSYREDYVEEYLLQHIRPALSEYVAEYEVTGTNPARKNPAAEAAKIRTKMQKLYELYMDDLIDRDTYKRDYSAFQEKLKELDSIVVAPSRDLADLKKLLEQDYEEIYRTFSPQEKNAFWKSFVQSITVHEDGEMDIVFFMILFLLTMHRLSVLRS

SEQ ID NO: 6980 - protein, 480 aa, Unknown
  Description of Unknown: Integrase B6981 sequence
  PTHR30461:SF3,IPR036162,PS51737,IPR011109,PTHR30461, PS00397,PF00239,G3DSA:1.10.10.2600,IPR006119,SSF53041, SM00857,IPR025827,IPR038109,PS51736,cd03768, IPR006118,PF13408,G3DSA:3.40.50.1390,PF07508,Coil
MATHKVAIYVRVSTTSQVDEGYSIDEQKAKLTSYCDIKDWNIYDIYTDGGFSGSNTERPALEQLIRDAKRKLFDTVLVYKLDRLSRSQKDTLYLIEDVFLENDIEFVSLLENFDTSTPFGKAMIGLLSVFAQLEREQIKERMQLGKLGRAKSGKSMQWAKTSFGYDYIKETGTLSVNPYQALIVRKMFEWYLSGMSITKLRDTLNEQYGQDKEWNYRTVRVILSNPVYCGYNQFKGQIFPGTHEPIISEEDFNKTQEEIKTRQRTAAQRFNPRPFQAKYMLSGIAQCGYCSAPLAIKLGMKRKDGTRLVKYECKQRHPRKTKGVTVYNNNEKCDSGFYFKDDIEHFVLTEISKLQTDSDYIDKLFSNTDKETIDRASYQKQIDNLTAKISRLNELYIDDRISLEELQKRSSDFMAERSALEKELETDTSLKAVERKKDIRRVLDTKDIFTLDYEQQKAIARALISKVRVTSETIVILWKL

SEQ ID NO: 6981 - protein, 480 aa, Unknown
  Description of Unknown: Integrase B6982 sequence
  PTHR30461:SF3,IPR036162,PS51737,IPR011109,PTHR30461, PS00397,PF00239,G3DSA:1.10.10.2600,IPR006119,SSF53041, SM00857,IPR025827,IPR038109,PS51736,cd03768, IPR006118,PF13408,G3DSA:3.40.50.1390,PF07508,Coil
MATHKVAIYVRVSTTSQVDEGYSIDEQKAKLTSYCDIKDWNIYEIYTDGGFSGSNTERPALEQLIRDAKRKLFDTVLVYKLDRLSRSQKDTLYLIEDVFLENDIEFVSLLENFDTSTPFGKAMIGLLSVFAQLEREQIKERMQLGKLGRAKSGKSMMWSKTSYGYDYIKETGTLSVNPYQALIVRKMFQWYLSGMSITKLRDALNEQYGQDKEWNYRTVRVILSNPVYCGYNQFKGQIFPGTHEPIISEEDFNKTQEEIKTRQRTAAQRFNPRPFQAKYMLSGMAQCGYCSAPLAIKLGMKRKDGTRLVKYECKQRHPRKTKGVTVYNNNEKCDSGFYFKDDIEHFVLTEISKLQTDSDYIDKLFSNTNQETIDRDSYQKQIDNLTAKISRLNDLYIDDRISLEELQKRSSDFMAERTTLEKELDADSSVKVVERKEDIKRVLDTKDIFTLDYEQQKAIARALISKARVTSETIVILWKL

SEQ ID NO: 6982 - protein, 480 aa, Unknown
  Description of Unknown: Integrase B6983 sequence
  PTHR30461:SF3,IPR036162,PS51737,IPR011109,PTHR30461, PS00397,PF00239,G3DSA:1.10.10.2600,IPR006119,SSF53041, cd00338,SM00857,IPR025827,IPR038109,PS51736, IPR006118,PF13408,G3DSA:3.40.50.1390,PF07508,Coil
MKIGALYIRVSTDDQLEYSPAAQQKLGLDYAKKNGIVIPKDFIFVDEGISGRKVKNRPAFQQLISLAKSNEHPIEVILVWKFSRFARNQEESIVYKNLLKRAGVELVSISEPLPDGAIGQLVERIFEWMDEYYSINLGVEVLRGMSERARQGGCNVSPPLGYKMEDGSPVIDPEQAIIVKKIFDFFVNDKLSFYDIAVKLNSLGYKTKRGGKFQNRTVAYIVRNEFYDQQLVWNKTEKATRKLKDSSEWISVKGDYPRIISHELWEAAQERDKATRRPRGSRPASTYRHWLSGMLVCSNCGGKLVRVGTNKSGNTYFQCTNYNHASCSESHSTNARVIQSAILESFKDVISSGNVVYNATATKKDDSERALIEDSIKKISFKEARIKQAYRDGIDTIEEYKENKRILSEEKANLEQMLSELKDDNAEQTLLLKKIRSAYDIIASDETSETQKHEALTSVVQKIVFNKKEEKFTLYYFINY

SEQ ID NO: 6983 - protein, 480 aa, Unknown
  Description of Unknown: Integrase B6984 sequence
  cd00338,SM00857,G3DSA:1.10.10.2600,IPR036162,PS51737, G3DSA:3.40.50.1390,IPR006119,IPR038109,PF07508,IPR011109, SSF53041,PTHR30461,PS51736,Coil,PF00239
MPEDIKTAVIYARFSCSKQREASIDDQLRVCRDWCAREGYAIVGEYSDYAMSGRSDDRPQFQKMISNAGESDIVLVYMMDRFSRDEYDAPAYKHELRRKGVEVVSAMEAMPDGPERILIEKIYEGLAAVESVKTSMRTRRGMEGNALKCKTNGVRVYGYGRNDDDEYVVNEDEAAIVREAFRRSCDHEPVDSIASDFARRGVTTRTGRPCGYSMVYQMLHNRKYTGFYSWGGIEVEGGMPQIIDKATFAMAQEVKPKKRRASEDWGTFALSGRAICSECGHNMAGTSGRGKKNVKYEYYGCRCGAKPVRRDWLEHELAEAIRGMLRDRETALRISHMLWDEPEPEIADARRRAMASKRKAENGLQNIMAAIEQGIVMPEFTDRIAQLQAQKARAERDLASYDEARIDPEEFADFLQCGGGMDDAAVLDSFVYQVMVTPEECVATLYCDDERNEPARLSIARVRTFSGWCPQRDSNPRYPP

SEQ ID NO: 6984 - protein, 480 aa, Unknown
  Description of Unknown: Integrase B6985 sequence
  PTHR30461:SF3,IPR036162,PS51737,IPR011109,PTHR30461, PS00397,PF00239,G3DSA:1.10.10.2600,IPR006119,SSF53041, cd00338,SM00857,IPR025827,IPR038109, PS51736,IPR006118,PF13408,G3DSA:3.40.50.1390,PF07508,Coil
MQDLLPTAIYVRVSSEMQAGEDRYSIPEQIDRLRKYCDAQGWTIAKEYVDPGHSGSNLKRPAIQELISDTKNGFIRRVVVFKLDRLSRSQRDTMYLIEDVFKAHDVAFVSLSEMFDTSTPFGMAMIGILSVFAQLERENIKDRMSMGRLGRAKRGLWRGGCNTPVGYDFMDGQLVINEYEALQVREIFRLFIDEQLSFHAISREMQGRFTNKYSTYNDSGSISTILRNRLYIGKIKYGTQEFDGQHQPIIDREIFERAQARIEEISRNTGEHWKNPYHGKHLLSGLIWCGNCGARYFCVTTKRKNGPQYRYYQCYTRNGSSDMRKADFCKNPNWRVEKLNAAVMEEIRRLCTDEKYFNRIARDGKKENNNAGKEKALQRELSSIEKQISRLVELYQMGVSVQDIATRIHDAQERKNKLTQELLSLNQQSPKNRRQEALTYIHELKWCLDADDVAAQRRLLDALVNKIVITEGGFEVDWKF

SEQ ID NO: 6985 - protein, 480 aa, Unknown
  Description of Unknown: Integrase B6986 sequence
  PTHR30461:SF3,SM00857,G3DSA:1.10.10.2600,IPR036162,PF13408, IPR025827,G3DSA:3.40.50.1390,PS51737,IPR006119,IPR038109, PF07508,IPR011109,SSF53041,PTHR30461,Coil, PS51736,cd00338,PF00239
MTIIGEYCDKAISGKTDNRPSFQRLVKDSEKGQFEAVIMYTLDRFARNRYDSAIYKAKLKKNGVRVYYAKQPMPDTPEGIILESVLEGYAEYYSENLSRNIKRGMKENALQCIANGGAGMPLGYTVGEDRRYKIDPVGARIVQEIFQMYADGMSATQIINECNKRGYKTARGNAFNKNSLRTMLKNDRYIGVYRFADVVVEGGVPPIISRELFDKVQATLKHNYSARARNKAKDDYLLTAKLFCGHCGSSMVGESGTSKSGKLHHYYKCIERKRKHKCNKAVEKKDWMEELVVRFTVQQVLTDENIERIAVKAMEIIEKESADTTYVDGLRNELKEVKKKIKNLMTAIEQGIITPSTKERMDELELEKNEIEGRIASEEMKKPLLTKERIMYWLYSFKSGNIDDVEYKRRVIDTLVNSVYIYDEGDKGRRIVFTFNVSGQNTATLSCSDIACFAPPKKHCNFDTMCIRVAVLFLALFRII

SEQ ID NO: 6986 - protein, 480 aa, Unknown
  Description of Unknown: Integrase B6987 sequence
  PTHR30461:SF3,IPR036162,PS51737,IPR011109,PTHR30461, PS00397,PF00239,G3DSA:1.10.10.2600,IPR006119,SSF53041, SM00857,IPR025827,IPR038109,PS51736,cd03768, IPR006118,PF13408,G3DSA:3.40.50.1390,PF07508,Coil
MIATNKVAIYIRVSTTNQAEEGYSIEEQQEKLKAYCAIKDWSIYDVYIDGGFTGSNTDRPELKRLVKEAKNKKFDTVLVYKLDRLSRSQKDTLYLIEEVFTKNNIAFLSLLENFDTSSAFGKAMIGILSVFAQLEREQIKERMQLGKVGRAKSGKSMMWAKPSYGYIYHQETGEMTVDEYESIAIKFIFSSYLAGRSITKLRDDLNKKYPKKIAWNYKMVRHILDNPVYCGNIRFKDEIYSGNHEAIISKEDFEKVQEELVIRQRTAAENSNPRPFQAKYMLSGIAQCGYCKAPLKIIMGAIRKDGTRFIRYECYQRHPRKIKGVTVYNDNKKCNSGYYDKKELEQYVLKEVSKLQEDKEYLESLFNVPDKSIERDKIQGQVNILEKKIRRLNDLYVDDRISLDELKIKSDNFFKMKAVLETELENDPAIKQQKKKENMKKILKTKDILSMNYEQQKAIIRALITKVKVTAESIIIKWKI

SEQ ID NO: 6987 - protein, 480 aa, Unknown
  Description of Unknown: Integrase B6988 sequence
  PTHR30461:SF3,IPR036162,PS51737,IPR011109,PTHR30461, PS00397,PF00239,G3DSA:1.10.10.2600,IPR006119,SSF53041, cd00338,SM00857,IPR025827,IPR038109,PS51736, IPR006118,PF13408,G3DSA:3.40.50.1390,PF07508,Coil
MKIGALYIRVSTDDQLEYSPAAQQKLGLDYAKKNGIVIPKDFIFVDEGISGRKVKNRPAFQQLISLAKSNEHPIEVILVWKFSRFARNQEESIVYKNLLKRAGVELVSISEPLPDGAIGQLVERIFEWMDKYYSINLGVEVLRGMSERARQGGCNVSPPLGYKMEDGSPVIVPEQAIIVKKIFDFFVNDKLSFYDIAVKLNSLGYKTKRGGNFQNRTVAYIVRNEFYDQQLLWNKTEKATRKLKDSSEWISVKGDYPRIISHELWEAAQERDKATRRPRGSRPASTYRHWLSGMLVCSNCGGKLVRVGTNKSGNTYFQCTNYNHASCSESHSTNARVIQAAILESFKDVISSGNVVYNATATKKDDSERALIEDSIKKISFKEARIKQAYRDGIDTIEEYKENKRILSEEKANLEQMLSELKDDNAEQTLLLKKIRSAYDIIASDETSETQKHEALTSVVQKIVFNKKEEKFTLYYFINY

SEQ ID NO: 6988 - protein, 480 aa, Unknown
  Description of Unknown: Integrase B6989 sequence
  PTHR30461:SF3,IPR036162,PS51737,IPR011109,PTHR30461, PS00397,PF00239,G3DSA:1.10.10.2600,IPR006119,SSF53041, SM00857,IPR025827,IPR038109,PS51736,cd03768, IPR006118,PF13408,G3DSA:3.40.50.1390,PF07508,Coil
MATHKVAIYVRVSTTSQVDEGYSIDEQKAKLTSYCEIKDWNVYEIYTDGGFSGSNTERPALEQLIRDAKRKLFDTVLVYKLDRLSRSQKDTLYLIEDVFLENDIEFVSLLENFDTSTPFGKAMIGLLSVFAQLEREQIKERMQLGKLGRAKSGKAMQWSKTSYGYDYVKETGTLSINPYQALIVRKMFKWYLSGMSITKLRDALNEQYGQDKEWNYRTVRVILSNPVYCGYNQFKGQIFPGTHEPIISEDDFNKTQEEIKTRQRTAAQRFNPRPFQAKYMLSGIAQCGYCSAPLAIKLGMKRKDGTRLVKYECKQRHPRKTKGVTVYNNNEKCDSGFYFKDDIEHFVLTEISKLQTDSDYIDKLFSNTDKETIDRDSYQKQIDNLTAKISRLNDLYIDDRISLEELQKRSSDFMAERTALEKELDADTSLKAVERKKDIRRVLDTKDIFTLDYNQQKAIARALISKVKVTSKSIVILWKL

SEQ ID NO: 6989 - protein, 480 aa, Unknown
  Description of Unknown: Integrase B6990 sequence
  PTHR30461:SF3,IPR036162,PS51737,IPR011109,PTHR30461, PS00397,PF00239,G3DSA:1.10.10.2600,IPR006119,SSF53041, cd00338,SM00857,IPR025827,IPR038109,PS51736, IPR006118,PF13408,G3DSA:3.40.50.1390,PF07508,Coil
MIDKEIVALYVRVSTQEQAREGYSIEEQKDKLIKYAEAHGWIIYNTYVDAGYSGGSLERPSIKRLLDDADGNKFSKVVVYKLDRISRSQKDTLFLIEDVFIPNGVDFVSMSENFDTSTPFGKFMIGILSTFAQLERETIKERTRLGKEGRAKSGLWGGGGRVPIGYRYDNNDNLTIDPYEATIVKRIYKEYTEDLKTIREISRQLRQEKLRSSYGPFPKTTVFNILHHKVYAGYIMYNGKDYAGIHEPIISLETWEKAQERLKYYQKEDKNNLNFYKKASIITSMVVCPYCGDIMILKYDKVGGKKNWTKEKGYKIFLSCKDKIKKGCPNKRYKLSEIEDLVLKELKKLKIDPDYLDSVKSKTESAIDNNEADVLRNQIKVNEDKISKLMDLYSLGTIDITTIKEKVDEINDEIDGLRSRIEVLEKNTDEVITVEDIVERLDKLEYYLDLEDIENTHAIISSLINRIEVTPDETRIYWRF

SEQ ID NO: 6990 - protein, 480 aa, Unknown
  Description of Unknown: Integrase B6991 sequence
  PTHR30461:SF3,IPR036162,PS51737,IPR011109,PTHR30461, PS00397,PF00239,G3DSA:1.10.10.2600,IPR006119,SSF53041, SM00857,IPR025827,IPR038109,PS51736,cd03768, IPR006118,PF13408,G3DSA:3.40.50.1390,PF07508,Coil
MATHKVAIYVRVSTTSQVDEGYSIDEQKAKLTSYCDIKDWNIYDIYTDGGFSGSNTERPALELLIRDAKRKLFDTVLVYKLDRLSRSQKDTLYLIEDVFLENDIEFVSLLENFDTSTPFGKAMIGLLSVFAQLEREQIKERMQLGKLGRAKSGKSMQWAKTSYGYDYIKETGTLSVNPYQALIVRKMFEWYLSGMSITKLRDTLNEQYGQDKEWSYRTVRVILSNPVYCGYNQFKGQIFPGTHEPIISEEDFNKAQEEIKTRQRTAAQRFNPRPFQAKYMLSGIAQCGYCSAPLAIKLGTIRKDGTRLVKYECKQRHPRKTKGVTVYNNNAKCDSGFYFKDDIEHFVLTEISKLQTDSDYIDKLFSNTDKETIDRDSYQKQIDNLTAKISRLNDLYIDDRISLEELQKRSSDFMAERTALEKELEADTSLKAVERKEDVRRVLDTKDIFTLDYEQQKAIARALISKVRVTSESIIILWKL

SEQ ID NO: 6991 - protein, 480 aa, Unknown
  Description of Unknown: Integrase B6992 sequence
  PTHR30461:SF3,IPR036162,PS51737,IPR011109,PTHR30461, PS00397,PF00239,G3DSA:1.10.10.2600,IPR006119,SSF53041, SM00857,IPR025827,IPR038109,PS51736,cd03768, IPR006118,PF13408,G3DSA:3.40.50.1390,PF07508,Coil
MTTHKVAIYVRVSTTSQADEGYSIDEQKAKLTSYCEIKDWNIYEIYTDGGFSGSNTERPALEQLIRDAKRKLFDTVLVYKLDRLSRSQKDTLYLIEDVFLENNIEFVSLLENFDTSTPFGKAMIGLLSVFAQLEREQIKERMQLGKLGRAKSGKSMQWAKTSYGYDYIKETGTLSVNPYQALIVRKMFKWYLSGMSITKLRDALNEQYGQDKEWNYRTVRVILSNPVYCGYNQFKGQIFPGTHEPIVSEDDFNKTQEEIKTRQRTAAQRFNPRPFQAKYMLSGIAQCGYCSAPLAIKLGMIRKDGTRLVKYECKQRHPRKTKGVTVYNNNAKCDSGFYFKDDIEHFVLAEISKLQTDSDYIDKLFSNTDKETIDRASYQKQIDNLTAKISRLNDLYIDDRISLEELQKRSSDFMAERTALEKELDADTSLKAVERKKDIRRVLDTKDVFTLDYEQQKAIARALISKVRVTSETIVILWKL

SEQ ID NO: 6992 - protein, 480 aa, Unknown
  Description of Unknown: Integrase B6993 sequence
  PTHR30461:SF3,IPR036162,PS51737,IPR011109,PTHR30461, PS00397,PF00239,G3DSA:1.10.10.2600,IPR006119,SSF53041, cd00338,SM00857,IPR025827,IPR038109,PS51736, IPR006118,PF13408,G3DSA:3.40.50.1390,PF07508,Coil
MKIGALYIRVSTDDQLEYSPAAQQKLGLDYAKKNGIVIPKDFIFVDEGISGRKVKNRPAFQQLISLAKSNEHPIEVILVWKFSRFARNQEESIVYKNLLKRAGVELVSISEPLPDGAIGQLVERIFEWMDEYYSINLGVEVLRGMSERARQGGCNISPPLGYKMEDGSPVIVPEQAIIVKKIFDLFVNDKLSFYEIAGKLNSLGYKTKRGGNFQNRTVAYIVRNEFYDQQLLWNKTEKATRKLKDSSEWISVKADYPRIISHELWKAAQERDKATRRPRGSRPASTYRHWLSGMLVCSNCGGKLVRVGTNKSGNTYFQCTNYNHASCSESHSTNARIIQSAILESFKDVISSGNVVYNATATKKDDSERALIEDNIKKISFKEARIKQAYRDGIDTIEEYKENKRILFEEKANLEQMLSELKDDNAEQTLLLKKIRSAYDIIASDETSETQKHEALTSVVQKIVFNKKEEKFTLYYFINY

SEQ ID NO: 6993 - protein, 480 aa, Unknown
  Description of Unknown: Integrase B6994 sequence
  PTHR30461:SF3,IPR036162,PS51737,IPR011109,PTHR30461, PS00397,PF00239,G3DSA:1.10.10.2600,IPR006119,SSF53041, SM00857,IPR025827,IPR038109,PS51736,cd03768, IPR006118,PF13408,G3DSA:3.40.50.1390,PF07508,Coil
MTTHKVAIYVRVSTTSQVDEGYSIDEQKAKLTSYCEIKDWNIYEIYTDGGFSGSNTERPALEQLIRDAKRKLFDTVLVYKLDRLSRSQKDTLYLIEDVFLENDIEFVSLLENFDTSTPFGKAMIGLLSVFAQLEREQIKERMQLGKLGRAKSGKSMQWAKTSYGYDYIKETGTLSVNPYQALIVRKMFEWYLSGMSITKLRDALNEQHGQDKEWNYRTVRVILSNPVYCGYNQFKGQIFPGTHEPIISEEDFNKTQEEIKTRQRTAAQRFNPRPFQAKYMLSGIAQCGYCSAPLAIKLGMIRKDGTRLVKYECKQRHPRKTKGATVYNNNEKCDSGFYFKDDIEHFVLTEISKLQTDSDYIDKLFSNTGKETIDRASYQKQIDNLTAKISRLNDLYIDDRISLEELQKRSSDFMAERTALEKELDADTSLKAVERKEDIRRVLDTKDIFTLDYEQQKAIARALISKVRVTSESIVILWKL

SEQ ID NO: 6994 - protein, 480 aa, Unknown
  Description of Unknown: Integrase B6995 sequence
  PTHR30461:SF3,IPR036162,PS51737,IPR011109,PTHR30461, PS00397,PF00239,G3DSA:1.10.10.2600,IPR006119,SSF53041, SM00857,IPR025827,IPR038109,PS51736,cd03768, IPR006118,PF13408,G3DSA:3.40.50.1390,PF07508,Coil
MATHKVAIYVRVSTTSQVDEGYSIDEQKAKLTSYCDIKDWSIYEIYTDGGFSGSNTERPALEQLIRDAKRKLFDTVLVYKLDRLSRSQKDTLYLIEDVFLENNIEFVSLLENFDTSTPFGKAMIGLLSVFAQLEREQIKERMQLGKLGRAKSGKSMQWAKTSYGYDYIKETGTLSVNPYQALIVRKMFEWYLSGMSITKLRDALNEQYGQDKEWSYRTVRVILSNPVYCGYNQFKGQIFPGTHEPIISEEDFNKAQEEIKTRQRTAAQRFNPRPFQAKYMLSGIAQCGYCSAPLAIKLGTIRKDGTRLVKYECKQRHPRKTKGVTVYNNNEKCDSGFYFKDDIEHFVLTEISKLQTDSDYIDKLFSNTNQETIDRDGYQKQIDNLTAKISRLNDLYIDDRISLEELQKRSSDFMAERTALEKELEADTSLKAVERKEDVRRVLDTKDIFTLDYEQQKTIVRSLINKVRVTSETIIILWKL

SEQ ID NO: 6995 - protein, 480 aa, Unknown
  Description of Unknown: Integrase B6996 sequence
  PTHR30461:SF3,IPR036162,PS51737,IPR011109,PTHR30461, PS00397,PF00239,G3DSA:1.10.10.2600,IPR006119,SSF53041, SM00857,IPR025827,IPR038109,PS51736,cd03768, IPR006118,PF13408,G3DSA:3.40.50.1390,PF07508,Coil
MTMHKVAIYVRVSTTSQVDEGYSIDEQKAKLTSYCDIKDWNVYDIYTDGGFSGSNTERPALEQLVRDAKRKLFDTVLVYKLDRLSRSQKDTLYLIEDVFLENNIEFVSLLENFDTSTPFGKAMIGLLSVFAQLEREQIKERMQLGKLGRAKSGKSMMWSKTSFGYDYIKETGTLSVNPYQALIVKKMFQWYLSGMSITKLRDTLNEQYGQDKEWSYRTVRGILSNPVYCGYNQFKGQIFPGTHEAIISEEEYNKTQEEIKTRQRTAAQRFNPRPFQAKYMLSGIAQCGYCSAPLAIKLGTIRKDGTRLVKYECKQRHPRKTKGVTVYNNNEKCDSGFYFKDDIEHFVLTEISKLQTDSDYIDELFSNTNQETIDRDSYQKQIDNLTAKISRLNDLYIDDRISLEGLQKRSSDFMAERTALEKELDADTSLKAVERKEDVRRVLDTKDIFTLDYEQQKAIARALISKVRVTSESIVILWKL

SEQ ID NO: 6996 - protein, 480 aa, Unknown
  Description of Unknown: Integrase B6997 sequence
  PTHR30461:SF3,IPR036162,PS51737,IPR011109,PTHR30461, PS00397,PF00239,G3DSA:1.10.10.2600,IPR006119,SSF53041, SM00857,IPR025827,IPR038109,PS51736,cd03768, IPR006118,PF13408,G3DSA:3.40.50.1390,PF07508,Coil
MATHKVAIYVRVSTTSQVDEGYSIDEQKAKLTSYCDIKDWNIYEIYTDGGFSGSNTERPALEQLIRDAKRKLFDTVLVYKLDRLSRSQKDTLYLIEDIFLENDIEFVSLLENFDTSTPFGKAMIGLLSVFAQLEREQIKERMQLGKLGRAKSGKSMQWAKTSFGYDYIKETGTLSVNPYQALIVRKMFEWYLSGMSITKLRDALNEQYGQDKEWSYRTVRVILSNPVYCGYNQFKGQIFPGAHEPIISEEDFNKTQEEIKTRQRTAAQRFNPRPFQAKYMLSGIAQCGYCSAPLAIKLGMIRKDGTRLVKYECKQRHPRKIKGVTVYNNNAKCDSGFYFKDDIEHFVLTEISKLQTDSDYIDKLFSNTDKETIDRASYQKQIDNLTAKISRLNDLYIDDRISLEELQKRSSDFMAERSALEKELDADSSLKAVERKKDIRRVLDTKDIFTLDYEQQKTIARALISKVRVTSESIVILWKL

SEQ ID NO: 6997 - protein, 480 aa, Unknown
  Description of Unknown: Integrase B6998 sequence
  PTHR30461:SF3,IPR036162,PS51737,IPR011109,PTHR30461, PS00397,PF00239,G3DSA:1.10.10.2600,IPR006119,SSF53041, SM00857,IPR025827,IPR038109,PS51736,cd03768, IPR006118,PF13408,G3DSA:3.40.50.1390,PF07508,Coil
MAMHKVAIYVRVSTTSQVDEGYSIDEQKAKLTSYCDIKDWNIYEIYTDGGFSGSNTERPALEQLIRDAKRKLFDTVLVYKLDRLSRSQKDTLYLIEDVFLENDIEFVSLLENFDTSTPFGKAMIGLLSVFAQLEREQIKERMQLGKLGRAKSGKSMQWAKTSYGYDYIKETGTLSVNPYQALIVRKMFEWYLSGMSMTKLRDTLNEQYGQDKEWNYRTVRVILSNPVYCGYNQFKGQIFPGTHEPIISEEDFNKTQEEIKTRQRTAAQRFNPRPFQAKYMLSGIAQCGYCSAPLAIKLGMIRKDGTRLVKYECKQRHPRKTKGVTVYNNNAKCDSGFYFKDDIEHFVLTEISKLQTDSDYIDKLFSNTDKETIDRASYQKQIDNLTAKISRLNDLYIDDRISLEELQKRSSDFMAERSALEKELDADTSLKAVERKKDIRRVLDTKDILTLDYERQKTIARALISKVRVTSESIVILWKL

SEQ ID NO: 6998 - protein, 480 aa, Unknown
  Description of Unknown: Integrase B6999 sequence
  PTHR30461:SF3,IPR036162,PS51737,IPR011109,PTHR30461, PS00397,PF00239,G3DSA:1.10.10.2600,IPR006119,SSF53041, SM00857,IPR025827,IPR038109,PS51736,cd03768, IPR006118,PF13408,G3DSA:3.40.50.1390,PF07508,Coil
MATHKVAIYVRVSTTSQVDEGYSIDEQKAKLTSYCDIKDWNIYDIYTDGGFSGSNTERPALERLIRDAKRKLFDTVLVYKLDRLSRSQKDTLYLIEDVFLENDIEFVSLLENFDTSTPFGKAMIGLLSVFAQLEREQIKERMQLGKLGRAKSGKSMQWAKTSYGYDYIKETGTLSVNPYQALIVRKMFEWYLSGMSITKLRDALNEQYGQDKEWSYRTVRVILSNPVYCGYNQFKGQIFPGTHEPIISEDDFNKTQEEIKTRQRTAAQRFNPRPFQAKYMLSGIAQCGYCSAPLAIKLGMKRKDGTRLVKYECKQRHPRKTKGVTVYNNNEKCDSGFYFKDDIEHFVLTEISKLQTDSDYIDKLFSNTDKETIDRASYQKQIDNLTAKISRLNDLYIDDRISLEELQKRSSDFMAERSALEKELDADSSLKAVERKKDIRRVLDTKDIFTLDYEQQKTIARALISKVRVTSESIVILWKL

SEQ ID NO: 6999 - protein, 480 aa, Unknown
  Description of Unknown: Integrase B7000 sequence
  PTHR30461:SF3,IPR036162,PS51737,IPR011109,PTHR30461, PS00397,PF00239,G3DSA:1.10.10.2600,IPR006119,SSF53041, cd00338,SM00857,IPR025827,IPR038109,PS51736, IPR006118,PF13408,G3DSA:3.40.50.1390,PF07508,Coil
MKIGALYIRVSTDDQLEYSPAAQQKLGLDYAKKNGIVIPKDFIFVDEGISGRKVKNRPAFQQLISLAKSNEHPIEVILVWKFSRFARNQEESIVYKNLLKRAGVELVSISEPLPDGAIGQLVERIFEWMDEYYSINLGVEVLRGMSERARQGGCNVSPPLGYKMEDGSPVIVPEQAIIVKKIFDFFVNDKLSFYDIAGKLNSLGYKTKRGGNFQNRTVAYILRNEFYDQQLVWNKTEKATRKLKDSSEWISVKGDYPRIISHELWEAAQERDKATRRPRGSRPASTYRHWLSGMLVCSNCGGKLVRVGTNKSGNTYFQCTNYNHASCSESHSTNAHIIQSAILESFKDVISSGNVVYNATATKKDDSERALIEDNIKKISFKEARIKQAYRDGIDTIEEYKENKRILFEEKANLEQMLSELKDDNAEQTLLLKKIRSAYDIIASDETSETQKHEALTSVVHKIVFNKKEEKFTLYYFINY

SEQ ID NO: 7000 - protein, 480 aa, Unknown
  Description of Unknown: Integrase B7001 sequence
  cd00338,SM00857,IPR006118,G3DSA:1.10.10.2600,IPR036162, PS51737,G3DSA:3.40.50.1390,IPR006119,IPR038109,PF07508, IPR011109,SSF53041,PTHR30461,PS00397,PS51736, Coil,PF00239
MDKKIGAAYIRVSTDDQLEYSPESQIKLIQEYAKQHDIIVPEEYIFRDDGISGRTAKKRPGFLQMIATAKQKPRPFEVILVWKFSRFARNQEESVVYKSLLKKENGIEVVSISEPLMEGPFGDLIERIIEWFDAFYSINLATEVRRGMTERVQKGGAVSVAPLGYVYEDKQLIIEPSEAETVRMIYRDFLDGASIVGIAKKLNSIGIKTKRGGTWENRTVRYILTNPIYTGKVRWSPQGANNYHKHNASSLDTIIIEGKHEAIISQDTFDAAQKQIVERVDSLHGSFDLVRKREDGHHMLQGVVKCSACGGTLTKTAHGQLQCSKYMHGRCTQSHSIKLETMENLVLSAMKMQFETLDFNFASKPAQQDDQKDEIMRQIKKEQEILQRCREAYAAGIDTLEEYRQNKMACKARIDRLQASIIKPEKPVDKAEFAAKHSNALQRLTDQSTPPEEKHRIINSFVDHITYFKEFQAVDIVYRT

SEQ ID NO: 7001 - protein, 480 aa, Unknown
  Description of Unknown: Integrase B7002 sequence
  PTHR30461:SF3,IPR036162,PS51737,IPR011109,PTHR30461, PS00397,PF00239,G3DSA:1.10.10.2600,IPR006119,SSF53041, cd00338,SM00857,IPR025827,IPR038109,PS51736, IPR006118,PF13408,G3DSA:3.40.50.1390,PF07508,Coil
MQDLLPTAIYVRVSSEMQAGEDRYSIPEQIDRLRKYCDAQGWTIAKEYVDPGHSGSNLKRPAIQELISDAKNGFIRRVVVFKLDRLSRSQRDTMYLIEDVFKAHDVAFVSLSEMFDTSTPFGMAMIGILSVFAQLERENIKDRMSMGRLGRAKRGLWRGGSNTPVGYDFIDGQLVINEYEALQVREIFRLFIDEQLSFHAISREMQSRFTNKYSTYNDSGSISTILRNRLYIGKIKYGTQEFDGQHQPIIDRETFERAQARIEEISRNTGEHWKNPYHGKHLLSGLIWCGNCGARYFCVTTKRKNGPQYRYYQCYTRNGSSDMRKADFCKNPNWRVEKLNAAVMEEIRRLCTDEKYFNRIARDGKKENNNAGKEKALQRELSSIEKQISRLVELYQMGVSVQDIATRIHDAQERKNKLTQELLSLNQQSPKNRRQEALTYIHELKWCLDTDDVAAQRRLLDALVNKIVITDGGFEVDWKF

SEQ ID NO: 7002 - protein, 480 aa, Unknown
  Description of Unknown: Integrase B7003 sequence
  PTHR30461:SF3,IPR036162,PS51737,IPR011109,PTHR30461, PS00397,PF00239,G3DSA:1.10.10.2600,IPR006119,SSF53041, cd00338,SM00857,IPR025827,IPR038109,PS51736, IPR006118,PF13408,G3DSA:3.40.50.1390,PF07508,Coil
MKFAIYVRVSTLEQAEEGYSIEEQIDKLIKYCEVKNWDIFKVYKDGGFSGSTTDRPGLSSLITDSKRKKFQGVLVYKLDRLSRSQKDTLYLIEDIFTANDISFVSLNENFDTSSAFGKAMIGILAVFAQLEREQIKERMVMGKVGRAKSGKAMSWSKVPFGYIYENDTYVAHPIQAPIVKQIFDDYMSGISITKLKEKLNDEGHIGKEISWSYRTIRQTLANPIYAGINRYNGELFEGNHEGIITKDYFEKVQSELKVRQVAAYEKNNNPRPFQSKYMLSGIIRCGLCGASLSVGMRAKRKDGSRHRYYRCYSKSKKKNLTMTKDPNGCSSPNYSMDELEKHILSQIEKIRLNPELIDVLSSNDSVVDLSSYDKRIDELDLSLEKIVNLFIDDAIPKDILEARMEKIKQEKDSLENKIDSLKLKRPILEPIDAKDILSKLTDNIWNLSYEDQKSIVMELISKILVYPDKLEIHWKFAINQ

SEQ ID NO: 7003 - protein, 480 aa, Unknown
  Description of Unknown: Integrase B7004 sequence
  PTHR30461:SF3,IPR036162,PS51737,IPR011109,PTHR30461, PS00397,PF00239,G3DSA:1.10.10.2600,IPR006119,SSF53041, SM00857,IPR025827,IPR038109,PS51736,cd03768, IPR006118,PF13408,G3DSA:3.40.50.1390,PF07508,Coil
MATHKVAIYVRVSTTSQVDEGYSIDEQKAKLTSYCDIKDWNIYEIYTDGGFSGSNTERPALEQLIRDAKRKLFDTVLVYKLDRLSRSQKDTLYLIEDVFLENDIEFVSLLENFDTSTPFGKAMIGLLSVFAQLEREQIKERMQLGKLGRAKSGKSMQWAKTSFGYDYIKETGTLSVNPYQALIVRKMFEWYLSGMSITKLRDALNEQYGQDKEWSYRTVRVILSNPVYCGYNQFKGQIFPGAHEPIISEEDFNKTQEEIKTRQRTAAQRFNPRPFQAKYMLSGIAQCGYCSAPLAIKLGMIRKDGTRLVKYECKQRHPRKIKGVTVYNNNAKCDSGFYFKDDIEHFVLTEISKLQTDSDYIDKLFSNTDKETIDRASYQKQIDNLTAKISRLNDLYIDDRISLEELQKRSSDFMAERSALEKELDADSSLKAVERKKDIRRVLDTKDIFTLDYEQQKTIARALISKVRVTSESIVILWKL

SEQ ID NO: 7004 - protein, 480 aa, Unknown
  Description of Unknown: Integrase B7005 sequence
  PTHR30461:SF3,IPR036162,PS51737,IPR011109,PTHR30461, PS00397,PF00239,G3DSA:1.10.10.2600,IPR006119,SSF53041, SM00857,IPR025827,IPR038109,PS51736,cd03768, IPR006118,PF13408,G3DSA:3.40.50.1390,PF07508,Coil
MTMHKVAIYVRVSTTNQVEEGYSIDEQKAKLTSYCDIKDWNIYEIYTDGGFSGSNTERPALEQLIRDAKRKLFDTVLVYKLDRLSRSQKDTLYLIEDIFLENDIEFVSLLENFDTSTPFGKAMIGLLSVFAQLEREQIKERMQLGKLGRAKSGKSMMWSKTSYGYDYIKETGTLSVNPYQALIVRKMFEWYLSGMSITKLRDALNEQYGQGKEWSYRTVRVILSNPVYCGYNQFKGQIFPGTHEPIISEEDFNKTQEEIKTRQRTAAQRFNPRPFQAKYMLSGIAQCGYCSAPLAIKLGMKRKDGTRLVKYECKQRHPRKTKGVTVYNNNAKCDSGFYFKDDIEHFVLTEISKLQTDSDYIDKLFSNTNQETIDRDSYQKQIDNLTAKISRLNDLYIDDRISLEELQKRSSDFMAKRATLEKELDADTSLKAVERKKDIRRVLDAKDIFTLDYEHQKAIVRALISKVRVTSETIVILWKL

SEQ ID NO: 7005 - protein, 480 aa, Unknown
  Description of Unknown: Integrase B7006 sequence
  PTHR30461:SF3,SM00857,G3DSA:1.10.10.2600,IPR036162,PF13408, IPR025827,G3DSA:3.40.50.1390,PS51737,IPR006119,IPR038109, PF07508,SSF53041,IPR011109,PTHR30461,Coil, cd00338,PF00239
MTIIGEYCDRAISGKTDNRPNFQRLIKDSEKGQFEAVIMYTLDRFARNRYDSAIYKAKLKKNGVKVYYAKQPMPDTPEGIILESVLEGYAEYYSENLSRNIKRGMKENALQCLANGGAGMPLGYTVGEDRKYQIDPVGAKIVQEIFQMYADGMSATQIINECNRRGYKTSRGNTFNKNSLRTMLKNDRYIGVYRFADVIVEDGVPPIISRELFDKVQATLRHNYSARARNKAKDDYLLTTKLFCGHCGSSMVGESGTSKSGKLHHYYKCIDRKRKRKCKKAVEKKAWIEELVVRFTVQNVLTDENIERIAAKAMEIIEKESADTSYLDGLQSELKDIKKKIKNLMTAIEQGIITASTKERMDELESEKNEIEGKIAREEMKKPLLTKERIMYWLYSFKSGDIDNIEYQRRVIDTLVNSVYVYDDGEKGRRIVFTFNISGQNTATLSCSDIACMAPPKRQNPNLFLIRDGFGFVFYLEDTI

SEQ ID NO: 7006 - protein, 480 aa, Unknown
  Description of Unknown: Integrase B7007 sequence
  PTHR30461:SF3,IPR036162,PS51737,IPR011109,PTHR30461, PS00397,PF00239,G3DSA:1.10.10.2600,IPR006119,SSF53041, cd00338,SM00857,IPR025827,IPR038109,PS51736, IPR006118,PF13408,G3DSA:3.40.50.1390,PF07508,Coil
MQDLLPTAIYVRVSSEMQAGEDRYSIPEQIDRLRKYCDAQGWTIAKEYVDPGHSGSNLKRPAIQELISDAKNGFIRRVVVFKLDRLSRSQRDTMYLIEDVFKAHDVAFVSLSEMFDTSTPFGMAMIGILSVFAQLERENIKDRMSMGRLGRAKRGLWRGGSNTPVGYDFIDGQLVINEYEALQVREIFRLFIDEQLSFHAISREMQGRFTNKYSTYNDSGSISTILRNRLYIGKIKYGTQEFDGQHQPIIDRETFERAQARIEEISRNTGEHWKNPYHGKHLLSGLIWCGNCGARYFCVTTKRKNGPQYRYYQCYTRNGSSDMRKADFCKNPNWRVEKLNAAVMEEIRRLCTDEKYFNRIARDGKKENNNAGKEKALQRELSSIEKQISRLVELYQMGVSVQDIATRIHDAQERKNKLTQELLSLNQQSPKNRRQEALTYIHELKWCLDADDVAAQRRLLDALVNKIVITEGGFEVDWKF

SEQ ID NO: 7007 - protein, 480 aa, Unknown
  Description of Unknown: Integrase B7008 sequence
  PTHR30461:SF3,IPR036162,PS51737,IPR011109,PTHR30461, PS00397,PF00239,G3DSA:1.10.10.2600,IPR006119,SSF53041, cd00338,SM00857,IPR025827,IPR038109,PS51736, IPR006118,PF13408,G3DSA:3.40.50.1390,PF07508,Coil
MKIGALYIRVSTDDQLEYSPAAQQKLGLDYAKKNGIVIPKDFIFVDEGISGRKVKNRPAFQQLISLAKSNEHPIEVILVWKFSRFARNQEESIVYKNLLKRAGVELVSISEPLPDGAIGQLVERIFEWMDEYYSINLGVEVLRGMSERARQGGCNVSPPLGYKMEDGSPVIVPEQAIIVKKIFDFFVNDKLSFYDIAVKLNSLGYKTKRGGNFQNRTVAYILRNEFYDQQLVWNKTEKATRKLKDSSEWISVKGDYPRIISHELWEAAQERDKATRRPRGSRPASTYRHWLSGMLVCSNCGGKLVRVGTNKSGNTYFQCTNYNHASCSESHSTNARVIQSAILESFKDVISSGNVVYNATATKKDDSERALIEDSIKKISFKEARIKQAYRDGIDTIEEYKENKRILSEEKANLERMLSELKDDNAEQTLLLKKIRSAYDIIASDETSETQKHEALTSVVQKIVFNKKEEKFTLYYFINY

SEQ ID NO: 7008 - protein, 480 aa, Unknown
  Description of Unknown: Integrase B7009 sequence
  PTHR30461:SF3,IPR036162,PS51737,IPR011109,PTHR30461, PS00397,PF00239,G3DSA:1.10.10.2600,IPR006119,SSF53041, SM00857,IPR025827,IPR038109,PS51736,cd03768, IPR006118,PF13408,G3DSA:3.40.50.1390,PF07508,Coil
MATHKVAIYVRVSTTSQADEGYSIDEQKAKLTSYCDIKDWNIYEIYTDGGFSGSNTERPALEQLIRDAKRKLFDTVLVYKLDRLSRSQKDTLYLIEDVFLENDIEFVSLLENFDTSTPFGKAMIGLLSVFAQLEREQIKERMQLGKLGRAKSGKSMQWAKTSYGYDYVKETGTLSINPYQALIVRKMFKWYLSGMSITKLRDALNEQYGQDKEWSYRTVRAILSNPVYCGYNQFKGQIFPGAHEPIISEEDFNKTQEEIKIRQRTAAQRFNPRPFQAKYMLSGIAQCGYCSAPLAIKLGMKRKDGTRLVKYECKQRHPRKTKGVTVYNNNEKCDSGFYFKDDIEHFVLTEISKLQTDSDYIDKLFSNSNQETIDRDSYQKQIDNLTAKISRLNDLYIDDRISLEELQKRSSDFMAERTALEKELDADSSIKTVERKKDIRRVLDTKDIFSLDYEHQKAIARALISKVRVTSETIVILWKL

SEQ ID NO: 7009 - protein, 480 aa, Unknown
  Description of Unknown: Integrase B7010 sequence
  PTHR30461:SF3,IPR036162,PS51737,IPR011109,PTHR30461, PS00397,PF00239,G3DSA:1.10.10.2600,IPR006119,SSF53041, SM00857,IPR025827,IPR038109,PS51736,cd03768, IPR006118,PF13408,G3DSA:3.40.50.1390,PF07508,Coil
MRTAIYVRVSTLEQAQEGYSIDEQIDKLKKYCAAKDWNVYQIYKDPGFTGSNTNRPGLNALISAAKRNLFDTVLVYKLDRLSRSQKDTLYLIEDVFGKMGISFVSLNENFDTSTPFGKAMIGILAVFAQLEREQIKERMSMGKLGRAKSGKAMAWNKSPFGYRYENGNYVIEPIEAQIVKRIFDEYLSGTSITKIRDHLNEEGHIGKKAEWPYRSIRSILDNATYAGFSKFKEELFEGNHEAIVTKEAYFTTQKELEIRQKEAYKKNNNPRPFQAKYMLSGLMRCGICGSTFEVNLRNVRKDGTRLKKYRCASHSSKRHNYTIKRNPNGCTSPTYDMEELENAILAQIEKLRINTDIIQEKSLTQSDVDTNSYEIKLKQLNSQLEKLIDLYLDMEIPKKTLEIRKKSIIHEIDSIETKLESLKENNNNQVSVKELMRELSNIKSSVYTLPYDQQKNLVRKLIKNIVVYPERMEVHWVFEK

SEQ ID NO: 7010 - protein, 480 aa, Unknown
  Description of Unknown: Integrase B7011 sequence
  PTHR30461:SF3,IPR036162,PS51737,IPR011109,PTHR30461, PS00397,PF00239,G3DSA:1.10.10.2600,IPR006119,SSF53041, SM00857,IPR025827,IPR038109,PS51736,cd03768, IPR006118,PF13408,G3DSA:3.40.50.1390,PF07508,Coil
MKTTNKVAIYIRVSTTSQVEEGYSIDEQKDKLASYCKIKDWNVYKVYTDGGFSGSNTERPALEKLIKDAKNKKFDTVLVYKLDRLSRSQKDTLYLIEEIFIKNGIEFLSLQENFDTSTPFGKAMIGLLAVFAQLEREQIKERMQLGKLGRAKSGKSMMWARTSYGYDYHRDTGTMTINEVEAIAIRDIFESYLNGMSVTKIRDMLNDKYPKTPNWHYRIVRGILANPVYCGYNQYKGHVFPGNHEPIINEEAFNKTQEELKIRQQTALEKFNPRPFRAKYMLSGIAQCGYCGAPLSITLGTIRKDGTRNIRYQCKNRFPRATKGVTVYNDNKKCDSGFYEKADIERYVIEQICKLQHDKKYVEELFADNGPSVDRVACQKQIDLLTNKISRLNDLYIDDRITLEELQVKSSEFSSQRAILEKELENDPALKRKKREKEMKKILRTGDISGLDYEHQKNLVRSLINKVQVTVDKIVIKWKI

SEQ ID NO: 7011 - protein, 480 aa, Unknown
  Description of Unknown: Integrase B7012 sequence
  PTHR30461:SF3,IPR036162,PS51737,IPR011109,PTHR30461, PS00397,PF00239,G3DSA:1.10.10.2600,IPR006119,SSF53041, SM00857,IPR025827,IPR038109,PS51736,cd03768, IPR006118,PF13408,G3DSA:3.40.50.1390,PF07508,Coil
MTMHKVAIYVRVSTTSQVDEGYSIDEQKAKLTSYCEIKDWNVYDVYTDGGFSGSNTERPALEQLVRDAKRKLFDTVLVYKLDRLSRSQKDTLYLIEDVFLENDIEFVSLLENFDTSTPFGKAMIGLLSVFAQLEREQIKERMQLGKLGRAKSGKSMMWSKTSYGYDYIKETGTLSVNQYQALIVRKMFKWYLSGMSITKLRDALNEQYGQDKEWSYRTVRAILSNPVYCGYNQFKGQIFPGTHEPIISEEDFNKTQEEIKTRQRTAAQRFNPRPFQAKYMLSGIAQCGYCSAPLAIKLGMKRKDGTRLVKYECKQRHPRKTKGVTVYNNNEKCDSGFYFKDDIEHFVLTEISKLQTDSDYIDKLFSNTNQETIDRASYQKQIDKLTAKISRLNDLYIDDRISLEELQKRSSDFMAERTALEKELDADSSVKAVERKKDIKRVLDTKDIFTLDYEHQKAMARALISKVRVTSETIVILWKL

SEQ ID NO: 7012 - protein, 480 aa, Unknown
  Description of Unknown: Integrase B7013 sequence
  PTHR30461:SF3,IPR036162,PS51737,IPR011109,PTHR30461, PS00397,PF00239,G3DSA:1.10.10.2600,IPR006119,SSF53041, SM00857,IPR025827,IPR038109,PS51736,cd03768, IPR006118,PF13408,G3DSA:3.40.50.1390,PF07508,Coil
MATHKVAIYVRVSTTSQADEGYSIDEQKAKLTSYCDIKDWNIYDIYTDGGFSGSNTERPALEQLIRDAKRKLFDTVLVYKLDRLSRSQKDTLYLIEDVFLENDIEFVSLLENFDTSTPFGKAMIGLLSVFAQLEREQIKERMQLGKLGRAKSGKSMQWAKISYGYDYIKETGTLSVNPYQALIVRKMFEWYLSGMSITKLRDALNEQYGQDKEWSYRTVRVILSNPVYCGYNQFKGQIFPGAHEPIISEEDFNKTQEEIKTRQRTAAQRFNPRPFQAKYMLSGIAQCGYCSAPLAIKLGMIRKDGTRLVKYECKQRHPRKTKGVTVYNNNAKCDSGFYFKDDIEHFVLTEISKLQTDSDYIDKLFSNTNQETIDRASYQKQIDNLTAKISRLNDLYIDDRISLEELQKRSSDFMAERAALEKELDADTSLKAAERKKDIRRVLDTKDIFTLDYEQQKAIARALISKVRVTSETIVILWKL

SEQ ID NO: 7013 - protein, 480 aa, Unknown
  Description of Unknown: Integrase B7014 sequence
  PTHR30461:SF3,IPR036162,PS51737,IPR011109,PTHR30461, PS00397,PF00239,G3DSA:1.10.10.2600,IPR006119,SSF53041, cd00338,SM00857,IPR025827,IPR038109,PS51736, IPR006118,PF13408,G3DSA:3.40.50.1390,PF07508,Coil
MKIGALYIRVSTDDQLEYSPAAQQKLGLDYAKKNGIVIPKDFIFVDEGISGRKVKNRPAFQQLISLAKSNEHPIEVILVWKFSRFARNQEESIVYKNLLKRAGVELVSISEPLPDGAIGQLVERIFEWMDEYYSINLGVEVLRGMSERARQGGCNVSPPLGYKMEDGSPVIVPEQAIIVKKIFDFFVNDKLSFYDIAVKLNSLGYKTKRGGNFQNRTVAYILRNEFYDQQLVWNKTEKATRKLKDSSEWISVKGDYPRIISHELWKAAQERDKATRRPRGSRPASTYRHWLSGMLVCSNCGGKLVRVGTNKSGNTYFQCTNYNHASCSESHSTNARIIQSAILESFKDVISSGNVVYNATATKKDDSERALIEDNIKKISFKEARIKQAYRDGIDTIEEYKENKRILSEEKANLEHMLSELKDDNAEQTLLLKKIRSAYDIIASDETSETQKHEALTSVVQKIVFNKKEEKFTLYYFINY

SEQ ID NO: 7014 - protein, 480 aa, Unknown
  Description of Unknown: Integrase B7015 sequence
  PTHR30461:SF3,IPR036162,PS51737,IPR011109,PTHR30461, PS00397,PF00239,G3DSA:1.10.10.2600,IPR006119,SSF53041, SM00857,IPR025827,IPR038109,PS51736,cd03768, IPR006118,PF13408,G3DSA:3.40.50.1390,PF07508,Coil
MATHKVAIYVRVSTTSQVDEGYSIDEQKAKLTSYCDIKDWNIYEIYTDGGFSGSNTERPALEQLIRGAKRKLFDTVLVYKLDRLSRSQKDTLYLIEDVFLENDIEFVSLLENFDTSTPFGKAMIGLLSVFAQLEREQIKERMQLGKLGRAKSGKSMQWAKTSFGYDYIKETGTLSVNPYQALIVRKMFEWYLSGMSITKLRDALNEQYGQDKEWNYRTVRVILSNPVYCGYNQFKGQIFPGTHEPIISEEDFNKTQEEIKTRQRTAAQRFNPRPFQAKYMLSGIAQCGYCSAPLAIKLGMIRKDGTRLVKYECKQRHPRKTKGVTVYNNNEKCDSGFYFKDDIEHFVLTEISKLQTDLDYIDKLFSNTDKETIDRASYQKQIDNLTAKISRLNDLYIDDRISLEELQKRSSDFMAERTALEKELDADTSLKAVERKKDIRRVLDTKDVFTLDYEQQKAIARALISKVRVTSETIVILWKL

SEQ ID NO: 7015 - protein, 480 aa, Unknown
  Description of Unknown: Integrase B7016 sequence
  PTHR30461:SF3,IPR036162,PS51737,IPR011109,PTHR30461, PS00397,PF00239,G3DSA:1.10.10.2600,IPR006119,SSF53041, SM00857,IPR025827,IPR038109,PS51736,cd03768, IPR006118,PF13408,G3DSA:3.40.50.1390,PF07508,Coil
MTMHKVAIYVRVSTTNQAEEGYSIDEQKAKLTSYCDIKDWNIYDIYTDGGFSGSNTERPALERLIRDAKRKLFDTVLVYKLDRLSRSQKDTLYLIEDVFLENDIEFVSLLENFDTSTPFGKAMIGLLSVFAQLEREQIKERMQLGKLGRAKSGKSMQWAKTSYGYDYVKETGTLSVNPYQALIVRKMFEWYLSGMSITKLRDALNEQYGQDKEWSYRTVRVILSNPVYCGYNQFKGQIFPGTHEPIVSEEDFNKTQEEIKTRQRTAAERFNPRPFQAKYMLSGIAQCGYCLAPLAIKMGMRRKDGTRLVKYECKQRHPRKTKGVTVYNNNEKCDSGFYFKDDIEHLVLTEISKLQTDSDYIDKLFSNTDKETIDRDSYQKQIDNLTAKISRLNDLYIDDRISLEELQKRSSNFMAERSALEKELDADSSLKAVERKKDIKRVLDTKDIFTIDYEQQKAIVRALISKVRVTSESIVILWKL

SEQ ID NO: 7016 - protein, 480 aa, Unknown
  Description of Unknown: Integrase B7017 sequence
  PTHR30461:SF3,IPR036162,PS51737,IPR011109,PTHR30461, PS00397,PF00239,G3DSA:1.10.10.2600,IPR006119,SSF53041, SM00857,IPR025827,IPR038109,PS51736,cd03768, IPR006118,PF13408,G3DSA:3.40.50.1390,PF07508,Coil
MAMHKVAIYVRVSTTNQAEEGYSIDEQKSKLTSYCEIKDWNIYDIYTDGGFSGSNTERPALERLIRDAKRKLFDTVLVYKLDRLSRSQKDTLYLIEDVFLENNIEFVSLLENFDTSTPFGKAMIGLLSVFAQLEREQIKERMQLGKLGRAKSGKSMQWAKTSYGYDYVKETGTLSVNPYQALIVRKMFEWYLSGMSITKLRDALNEQYGQDKEWNYRTVRVILSNPVYCGYNQFKGQIFPGTHEPIISEEDFNKAQEEIKTRQRTAAQRFNPRPFQAKYMLSGIAQCGYCLAPLAIKMGMRRKDGTRLVKYECKQRHPRKTKGVTVYNNNEKCDSGFYFKDDIEHFVLTEISKLQTDSDYIDKLFSNTDKETIDRDSYQKQIDNLTAKISRLNNLYIDDRISLEELQKRSSDFMAERAALEKELDADSSVRAVERKKDIRRVLDTKDIFMLDYEQQKAIVRALISKVRVTSESIVILWKL

SEQ ID NO: 7017 - protein, 480 aa, Unknown
  Description of Unknown: Integrase B7018 sequence
  PTHR30461:SF3,SM00857,G3DSA:1.10.10.2600,IPR036162,PF13408, IPR025827,G3DSA:3.40.50.1390,PS51737,IPR006119,IPR038109, PF07508,IPR011109,SSF53041,PTHR30461,Coil, PS51736,cd00338,PF00239
MTIIGEYCDKAISGKTDNRPSFQRLIKDSEKGQFEAVIMYTLDRFARNRYDSAIYKAKLKKNGVRVYYAKQPMPDTPEGIILESVLEGYAEYYSENLSRNIKRGMKENALQCIANGGAGMPLGYTVGEDRRYKIDPVGARIVQEIFQMYADGMSATQIINECNKRGYKTARGNAFNKNSLRTMLKNDRYIGVYRFADVVVEGGVPPIISRELFDKVQATLKHNYSARARNKAKDDYLLTAKLFCGHCGSSMVGESGTSKSGKLHHYYKCIERKRKHKCNKAVEKKDWMEELVVRFTVQKVLTDENIERIAVKAMEIIEKESADTTYIDGLRNELKEVKKKIKNLMTAIEQGIITPSTKERMDELELEKNEIEGRIASEEMKKPLLTKERIMYWLYSFKSGNIDDVEYKRRVIDTLVNSVYVYDEGDKGRRIVFTFNISGQNTATLSCSDIACFAPPNCANPNTLFFVKHCFGFVLIVEEV

SEQ ID NO: 7018 - protein, 480 aa, Unknown
  Description of Unknown: Integrase B7019 sequence
  PTHR30461:SF3,IPR036162,PS51737,IPR011109,PTHR30461, PS00397,PF00239,G3DSA:1.10.10.2600,IPR006119,SSF53041, cd00338,SM00857,IPR025827,IPR038109,PS51736, IPR006118,PF13408,G3DSA:3.40.50.1390,PF07508,Coil
MKFAIYVRVSTLEQAEEGYSIEEQIDKLIKYCEVKNWDIFKVYKDGGFSGSTTDRPGLSSLITDSKRKKFQGVLVYKLDRLSRSQKDTLYLIEDIFTANDISFVSLNENFDTSSAFGKAMIGILAVFAQLEREQIKERMVMGKVGRAKSGKAMSWSKVPFGYIYENDTYVAHPIQAPIVKQIFDDYMSGISITKLKEKLNDEGHIGKEISWSYRTIRQTLANPIYAGINRYNGELFEGNHEGIITKDYFEKVQSELKVRQVAAYEKNNNPRPFQSKYMLSGIIRCGLCGASLSVGMRAKRKDGSRHRYYRCYSKSKKKNLTMTKDPNGCSSPNYSMDELEKHILSQIEKIRLNPELIDVLSANDSVVDLSSYNKRIDELDLSLEKIVNLFIDDAIPKDILEARMEKIKQEKDSLENKIDSLKIKRPILAPIDAKDILSKLTDNIWNLSYEDQKSIVMELISKILVYPDKLEIHWKFANNQ

SEQ ID NO: 7019 - protein, 480 aa, Unknown
  Description of Unknown: Integrase B7020 sequence
  PTHR30461:SF3,IPR036162,PS51737,IPR011109,PTHR30461, PS00397,PF00239,G3DSA:1.10.10.2600,IPR006119,SSF53041, SM00857,IPR025827,IPR038109,PS51736,cd03768, IPR006118,PF13408,G3DSA:3.40.50.1390,PF07508,Coil
MATHKVAIYVRVSTTSQVDEGYSIDEQKAKLTSYCDIKDWNIYEIYTDGGFSGSNTERPALEQLIRDAKRKLFDTVLVYKLDRLSRSQKDTLYLIEDVFLENDIEFVSLLENFDTSTPFGKAMIGLLSVFAQLEREQIKERMQLGKLGRAKSGKSMMWSKTSYGYDYIKETGTLSVNPYQALIVRKMFEWYLSGMSITKLRDALNEQYGQGKEWSYRTVRVILSNPVYCGYNQFKGQIFPGTHEPIISEEDFNKTQEEIKTRQRTAAQRFNPRPFQAKYMLSGIAQCGYCSAPLAIKLGMKRKDGTRLVKYECKQRHPRKTKGVTVYNNNAKCDSGFYFKDDIEHFVLTEISKLQTDSDYIDKLFSNTNQETIDRDSYQKQIDNLTAKISRLNDLYIDDRISLEELQKRSSDFMAERTALEKELDADTSLKAVERKKDIRRVLDAKDIFTLDYEQQKAIVRALISKVRVTSESIVILWKL

SEQ ID NO: 7020 - protein, 480 aa, Unknown
  Description of Unknown: Integrase B7021 sequence
  PTHR30461:SF3,IPR036162,PS51737,IPR011109,PTHR30461, PS00397,PF00239,G3DSA:1.10.10.2600,IPR006119,SSF53041, SM00857,IPR025827,IPR038109,PS51736,cd03768, IPR006118,PF13408,G3DSA:3.40.50.1390,PF07508,Coil
MTTHKVAIYVRVSTTSQADEGYSIDEQKAKLTSYCDIKDWNIYDIYTDGGFSGSNTERPALEQLIRDAKRKLFDTVLVYKLDRLSRSQKDTLYLIEDVFLENDIEFVSLLENFDTSTPFGKAMIGLLSVFAQLEREQIKERMQLGKLGRAKSGKSMQWAKTSYGYDYIKETGTLSVNPYQALIVRKMFEWYLSGMSITKLRDALNEQYGQDKEWNYRTVRVILSNPVYCGYNQFKGQIFLGTHEPIISEEDFNKTQEEIKTRQRTAAQRFNPRPFQAKYMLSGIAQCGYCSAPLAIKLGMIRKDGTRLVKYECKQRHPRKTKGVTVYNNNEKCDSGFYFKDDIEHFVLTEISKLQTDSDYIDKLFSNTNQETIDRDSYQKQIDNLTAKISRLNDLYIDDRISLEELQKRSSDFMAERSVLEKELDADTSLKAVERKKDIRRVLDTKDIFTLDYEQQKTIARALISKVRVTSESIVILWKL

SEQ ID NO: 7021 - protein, 480 aa, Unknown
  Description of Unknown: Integrase B7022 sequence
  PTHR30461:SF3,IPR036162,PS51737,IPR011109,PTHR30461, PS00397,PF00239,G3DSA:1.10.10.2600,IPR006119,SSF53041, SM00857,IPR025827,IPR038109,PS51736,cd03768, IPR006118,PF13408,G3DSA:3.40.50.1390,PF07508,Coil
MATHKVAIYVRVSTTSQVDEGYSIDEQKAKLTSYCDIKDWNIYEIYTDGGFSGSNTERPALEQLIRDAKRKLFDTVLVYKLDRLSRSQKDTLYLIEDVFLENNIEFVSLLENFDTSTPFGKAMIGLLSVFAQLEREQIKERMQLGKLGRAKSGKSMQWAKTSYGYDYVKETGTLSVNPYQALIVRKMFEWYLSGMSITKLRDALNEQYGQDKEWNYRTVRVILSNPVYCGYNQFKGQIFPGTHEAIISVDDFNKTQEEIKTRQRTAAQRFNPRPFQAKYMLSGIAQCGYCSAPLAIKLGMKRKDGTRLVKYECKQRHPRKTKGVTVYNNNEKCDSGFYFKDDIEHFVLTEISKLQTDSDYIDKLFSNTDKETIDRDSYQKQIDNLTAKISRLNDLYIDDRISLEELQKRSSDFMAKRAALEKELDTDTSLKAVERKEDVRRVLDTKDIFTLDYEQQKAIARALISKVRVTSESIVILWKL

SEQ ID NO: 7022 - protein, 479 aa, Unknown
  Description of Unknown: Integrase B7023 sequence
  IPR036162,PS51737,IPR011109,PTHR30461,PS00397, PF00239,G3DSA:1.10.10.2600,IPR006119,SSF53041,SM00857, IPR025827,IPR038109,PS51736,cd03768,IPR006118, PF13408,G3DSA:3.40.50.1390,PF07508,Coil
MPKVAIYARVSTLNQAEEGYSIEGQLANLRKYCSALDWQIYQEYVDPGFSGGSLNRPAIQKLIVDAKSHRFDIVLIYKLDRLSRSVQDTLYLVKDVFDKNKISFVSLNEKIDTSSPMGNLFLTLLASIAEFEREQIKERMMMGKVGRAKSGKAMGWSKVPFGYTYDKQTGIYQINTLQAQIVKRIYRDYLDGVSITKLVDLLNAEGHITKDRPWTYRTVRQALDNVVYTGRQFYQGNVYPGQHEAIISIEDYDKTQAELKRRQLTNAQKFNPRPFRAKYMLSGLLRCSFCGSSMMVQTRYLKYADDYHYYRCVSSIRKRIRFSYRQDTELCQNRSDYLKDDLESAIIKTIRHLQLHPDQMPVNTVKFDDKPLKDELNRINDKLNKLVDLYLNSNGISIGIINQKRDELLQQKEALENKLQERKPKQPELDPKKALLLLSKKNILELPYKEQVKLVKSLISKIEVSPSKMKIHWRFNVEK

SEQ ID NO: 7023 - protein, 479 aa, Unknown
  Description of Unknown: Integrase B7024 sequence
  PTHR30461:SF3,cd00338,SM00857,IPR006118,G3DSA:1.10.10.2600, IPR036162,PS51737,G3DSA:3.40.50.1390,IPR006119,IPR038109, PF07508,IPR011109,SSF53041,PTHR30461,PS00397, PS51736,Coil,PF00239
MEKKLKTAAAYIRVSTDRQTELSPDSQLRIIKEYAKQNGYNIPSEYIFRENGLSGKYVKKRPQFIEMIGLAKQKPAPFSAILVWKFSRFARNQEESIVYKSMLKKNDVSVISCSETLDEENPFSSLIERIIEWMDEYYSIRLSGEVLRGMSEKVKRGQPVTIPSFGYDIVDKQYVINEEKAAIVRKIFTDYIDGKSSMQIASELNEIGVKTTRGNPFENRTIDYILKNPVYIGKIRWNQNGKTDYRYSNNKDIVYTQGVHKSIVSDEIFYKVQNLIETNGRKQRKGIHNNIKQEYMLHGLIKCSNCGSALAYSNKGLQCIKYSKSICKQSHYISLTNINNLVILGLEQVFENKDFKLSVKSLSQTVADCIDYTNLIEKENQKIQRIKSAYLEGIYTVEEVKEYKKSVEDKIKNLSSRQVQLKQEKTKPRKENVKEKKNFLATLKSPAISEKEKNEILKGFVDCIVFNRSTSSVDIFLYI

SEQ ID NO: 7024 - protein, 479 aa, Unknown
  Description of Unknown: Integrase B7025 sequence
  PTHR30461:SF3,SM00857,G3DSA:1.10.10.2600,IPR036162,PF13408, PS51737,G3DSA:3.40.50.1390,IPR025827,IPR006119,IPR038109, PF07508,IPR011109,SSF53041,PTHR30461,Coil, PS51736,cd00338,PF00239
MSKSKIYCLKYLYTITFSKGVIIMETIVKKAACYCRVSHEEQKLHGLSIEAQKEDLKQYCKRNNYKIYKFYIDEGLTAKNTKRQGLQNLLSDLDKDKFDIVLFTKLDRLSRNIIDANLLDEKFKNNNVCMKAIFEDDIDTSTADGKFTFNLKLSLAERELDKTSERIKDIFRYKIERNEVISGSVPKGYKIVDKKLAIDENTAWIVKKSFDLVEELMSARAAFIQINTVYNQPTSLRSFSKLLKNVIYTGTYKSKNYYKENYCEPIISLEQFNNVQRILKNNKQYTSNNRKETYIFSGLLRCSHCGYKIVGHYSNRSGKNVIKTYRCNRYSIYKDCDQKKSINEKKLEKVLLSCIVEEYKNYLYSFDISSKKTNSIDVSQNKSKIQKKVDKLRELYLNDLISLEDYKKDYAIFTQALKEIESKEVTKVAPKDADKILSILDNIETIYYNLDATERKRFWSSFIDVITIDGNYNIDIKFL

SEQ ID NO: 7025 - protein, 479 aa, Unknown
  Description of Unknown: Integrase B7026 sequence
  PTHR30461:SF3,cd00338,SM00857,IPR006118,G3DSA:1.10.10.2600, IPR036162,PS51737,G3DSA:3.40.50.1390,IPR006119,IPR038109, PF07508,SSF53041,IPR011109,PTHR30461,PS00397, PS51736,Coil,PF00239
MEKELKTAAAYIRVSTDRQTELSPDSQLRIIKEYAKQNGYNIPSEYIFREDGLSGKYVKKRPQFIEMIGLAKQNPAPFSTILVWKFSRFARNQEESIVYKSMLKKNDVSVISCSETLDEENPFSSLIERIIEWMDEYYSIRLSGEVLRGMSEKVKRGQPVTIPSFGYDIVDKQYVINEEKAAIVRKIFTDYIDGKNSMQIASELNEIGVKTTRGNPFENRTIDYILKNPVYIGKIRWNQNGKTDYRYSNNKDIVYTQGIHKSIVSDEIFYKVQNLIEANSRKQRKGIHNNIKQEYMLHGLIKCSNCGSALAYSNKGLQCIKYSKSICKQSHYISLTNINNLVILGLEQVFENKDFKLSVKSLSQTVADCIDYTNLIEKENQKIQRIKNAYLEGIYTVEEVKEYKKSVEDKIKNLSSRQVQLKQEKTKPRKENVKEKKNFLATLKSPAISEKEKNEILKGFVDCIVFNRSTSSVDIFLYI

SEQ ID NO: 7026 - protein, 479 aa, Unknown
  Description of Unknown: Integrase B7027 sequence
  PTHR30461:SF3,SM00857,IPR006118,G3DSA:1.10.10.2600,IPR036162, PS51737,G3DSA:3.40.50.1390,Coil,IPR006119,IPR038109, PF07508,IPR011109,SSF53041,PTHR30461,PS00397, PS51736,cd00338,PF00239
MDDLKIAAAYIRVSTDDQTELSPDSQIKVVREFAKQKGYLIPKEYIFRDDGISGRKASKRPEFNHMIAVAKQTPSPFSAIMVWKFSRFARNQEEAIFYKGMLKKRGIDVISTSEPIIDGPFGSLIERIIEWFDEYYSINLSTEVKRGMTEKVSRGGAVSIPAFGYDIVDKKYQVNPINAPIVQRIFIKYLNGVGCRAIANELNDLGIKTTRGNNWENRTIEYILRNPVYIGKIRWNPKRRTRRNYDDKDIMIVDGIHQPIIDTDIFDKVQKKLDENKAKYRPYITDRQNGKEYMLKGLVKCSNCGATLSLACNSLQCIKYAHGTCNVSHSIQVNRLNEVVINAIDDTLKSGDFQLKPKEQPHEEPQELNIDFMIEKENTKLRRIKEAYEEGVYNLAEFKQRKELIESKIRSLQKQNKPPEPKPDHLLAKKKLMSRRKEIISTLKSKSTPEVEKNALLCTFIDKIIFNRSLSSVELFFCF

SEQ ID NO: 7027 - protein, 479 aa, Unknown
  Description of Unknown: Integrase B7028 sequence
  SM00857,G3DSA:1.10.10.2600,IPR036162,PS51737,G3DSA:3.40.50.1390, IPR006119,IPR038109,PF07508,IPR011109,SSF53041, PTHR30461,Coil,PS51736,cd00338,PF00239
MPKTAVIYARFSCNKQREASIDDQLRVCRDWCKREGYAIAAEYCDYAISGRTDDRPEFQRMIANAGESDIVLVYMMDRFSRGEYDAPIYKRELAKKGVKLVSALEAIPDSPEGIIYEKLLEGLAACESKKTAIRTKRGMEGNALRCKTNGVRVFGYRKSEDDEYEIDEHDAAFVREAFKRRINRETVNSIARDFAQRGVKTSNGNPCGYSMVYQMLHNRRYTGRYEWGGIVKEGGMPAIIDEVTFMDAQQVQGTKKRSSEDWGDFALAGKAICAGCGRNLQGVSGRGRHNVKYEYYSCVDGCMRNVRREELEGAIVGALRELLSDREEALRIARMVADRADGAEIATRRKQAAESLSAAERGLKNILNAIEQGIIAPGVKERIAELEQQKARANYDLQAIQEQKIDPERFADFLQCGAKLDDATLLKAFVWQVSVSDEDVLVTLNYDTESNEPARLDIQRVRGKLEWCPRADSNRRHPL

SEQ ID NO: 7028 - protein, 479 aa, Unknown
  Description of Unknown: Integrase B7029 sequence
  PTHR30461:SF3,cd00338,SM00857,IPR006118,G3DSA:1.10.10.2600, IPR036162,PS51737,G3DSA:3.40.50.1390,IPR006119,IPR038109, PF07508,IPR011109,SSF53041,PTHR30461, PS00397,PS51736,Coil,PF00239
MGKKLKTAAAYIRVSTDRQTELSPDSQLRIIKEYAKQNGYNIPSEYIFRENGLSGKYVKKRPQFIEMIGLAKQKPAPFSAILVWKFSRFARNQEESIVYKSMLKKNDVSVISCSETLDEENPFSSLIERIIEWMDEYYSIRLSGEVLRGMSEKVKRGQPVTIPSFGYDIVDKQYVINEEKAAIVRKIFTDYIDGKSSMQIASELNEIGVKTTRGNPFENRTIDYILKNPVYIGKIRWNQNGKTDYRYSNNKDIVYTQGVHKSIVSDEIFYKVQNLIETNGRKQRKGIHNNIKQEYMLHGLIKCSNCGSALAYSNKGLQCIKYSKSICKQSHYISLTNINNLVILGLEQVFENKDFKLSVKSLSQTVADCIDYTNLIEKENQKIQRIKSAYLEGIYTVEEVKEYKKSVEDKIKNLSSRQVQLKQEKTKPRKENVKEKKNFLATLKSPAISEKEKNEILKGFVDCIVFNRSTSSVDIFLYI

SEQ ID NO: 7029 - protein, 479 aa, Unknown
  Description of Unknown: Integrase B7030 sequence
  PTHR30461:SF3,SM00857,G3DSA:1.10.10.2600,IPR036162,PF13408, IPR025827,PS51737,G3DSA:3.40.50.1390,IPR006119,IPR038109, PF07508,SSF53041,IPR011109,PF00239,PTHR30461, PS51736,Coil,cd00338
MSNAVIYARYSSDKQSEDSIEAQLRACRQYAATKGYNIVAVYADEAISGKGSMTASRAQYQKMLRDCNKGTFDTILIHKYDRVARSLGEHVNLDARLQKMGITLIAVGQDFGFGPESKIMRALMWSMSEYYIDNLANETKKGEREIALKGLHNGGYPPFGYDIVDQKYVINPYEAEYVRKIFAAVKNHEGTKDIIAEMAAVGIVGKRGKPLKYSAVYEILRNEKYTGTYIYCVDEEKDRSKRRSKPNAIRIENALPMIIDKATFDEVQKIMDSRKQSGPKTSYLCSGLVYCSCGAKMHAHISTKKGHVYHYYRCSKKCGAPMISMDIVDDAAKTYLRTLLNEENQKAIATAMRKYKCGEPERAADFKKIVASKISEKQKQYDTLMTNMSSGVLPADVIEDIGAKMNQLRSEIEALKKTEMPKDYTTDQISLWLKALHDSPDDKAIRLLISRIDIKNTTEINIQSTLTSVVGTIGCGSWI

SEQ ID NO: 7030 - protein, 479 aa, Unknown
  Description of Unknown: Integrase B7031 sequence
  PTHR30461:SF3,cd00338,SM00857,G3DSA:1.10.10.2600,IPR036162, PF13408,IPR025827,G3DSA:3.40.50.1390,PS51737,IPR006119, IPR038109,PF07508,IPR011109,SSF53041,PTHR30461, PS51736,Coil,PF00239
MRGVIYARYSPGPRQTEQSIEGQVADCQQYAEEHGIDIIEIYADRKVSGKSVVGRDEFQRMLRDAEKGRFDCVLVWKIDRFGRDRQDIALGKMTLKRAGVKLMYARESVPEGPEGIILESVLEGLAEYYSADLRQKVIRGMRETAKKGQYCGQSLPIGYKVDAERHIVVDEREAAVVREAFKLHIAGGQIRDIVQLFADRGIMGRRGKPVSNAVVYRMLRNEKYLGEFYIQDVKLNVEPIIDQATFLEAARHFKTSRNNAAGRAKVNYLLSCKMFCGYCGSMINAETGTGKLGKVYRYYKCGDKKRGKACELKPFPKDHLEDAIILATVNDMLTDDMIEKLTVRILEVQEQENADDPVVGLRRRLDSNKKRQRNLLDAIEEGGARGLVSRLAALEEEEEQLVLEIQRAEIKRPRLTREVVEAWLRSFRVGDVTDDDFRARLVDTFIARVELRNDEALIFYNIREKGPHSRVRVRPEWWT

SEQ ID NO: 7031 - protein, 479 aa, Unknown
  Description of Unknown: Integrase B7032 sequence
  PTHR30461:SF3,cd00338,SM00857,IPR006118,G3DSA:1.10.10.2600, IPR036162,PS51737,G3DSA:3.40.50.1390,IPR006119,IPR038109, PF07508,IPR011109,SSF53041,PTHR30461,PS00397, PS51736,Coil,PF00239
MEKELKTAAAYIRVSTDRQTELSPDSQLRIIKEYAKQNGYNIPSEYIFREDGLSGKYVKKRPQFIEMIGLAKQKPAPFSAILVWKFSRFARNQEESIVYKSMLKKNDVSVISCSETLDEENPFSSLIERIIEWMDEYYSIRLSGEVLRGMSEKVKRGQPVTIPSFGYDIIDKQYVINEEKAAIVRKIFTDYIDGKSSIQIASELNEIGVKTTRGNPFENRTIDYILKNPVYIGKIRWNQNGKTDYRYSNNKDIVYTQGVHKSIVSDEIFYKVQNLIEANGRKQRKGIHNNIKQEYMLHGLIKCSNCGSALAYSNKGLQCIKYSKSICKQSHYISLTNINNLVILGLEQVFKNKDFKLSVKSLSQTVADCIDYTNLIKKENQKIQRIKSAYLEGIYTVEEVKEYKKSVEDKIKNLSSRQVQLKQEKTKPRKENVKEKKNFLATLKSPAISEKEKNEILKGFVDCVVFNRSTSSVDIFLYI

SEQ ID NO: 7032 - protein, 479 aa, Unknown
  Description of Unknown: Integrase B7033 sequence
  IPR036162,PS51737,IPR011109,PTHR30461,PS00397, PF00239,G3DSA:1.10.10.2600,IPR006119,SSF53041,SM00857, IPR025827,IPR038109,PS51736,cd03768,IPR006118, PF13408,G3DSA:3.40.50.1390,PF07508,Coil
MPKVAIYARVSTLNQAEEGYSIEGQLANLRKYCSALDWQIYQEYVDPGFSGGSLNRPAIQKLIVDAKSHRFDIVLIYKLDRLSRSVQDTLYLVKDIFDKNKISFVSLNEKIDTSSPMGNLFLTLLASIAEFEREQIKERMMMGKVGRAKSGKAMGWSKVPFGYTYDKQTGIYQINTLQAQIVKRIYRDYLDGVSITKLVDLLNAEGHITKDRPWTYRTVRQALDNVVYTGRQFYQGNVYPGQHEAIISIEDYDKTQAELKRRQLTNAQKFNPRPFRAKYMLSGLLRCSFCGSSMMVQTRYLKYADDYHYYRCVSSIRKRIRFSYRQDTELCQNRSDYLKDDLENAIIKTIRHLQLHPDQMPVNTVKFDDKPLKDELNRINDKLNKLVDLYLNSNGISIGIINQKRDELLQQKEALENKLQERKPKQPELDPKKALLLLSKKNILELPYKEQVKLVKSLISKIEVSPSKMKIHWRFNVEK

SEQ ID NO: 7033 - protein, 479 aa, Unknown
  Description of Unknown: Integrase B7034 sequence
  PTHR30461:SF3,SM00857,G3DSA:1.10.10.2600,IPR036162,PF13408, IPR025827,PS51737,G3DSA:3.40.50.1390,IPR006119,IPR038109, PF07508,IPR011109,SSF53041,PTHR30461,Coil, PS51736,cd00338,PF00239
MNAVIYARYSCDRQTEQSIEGQLRECKAFAASEGINIIGEYIDRAISGTTANRPEFQRMIADSRYKTFQAVIVYKLDRFARNRYDSAMYKSKLKANGVRVLSAKEHITDSPEGIILEGLLEAMNEYYSAELSQKIKRGMRENAIKGKTTGGNVALGYRIGADKQMEIEPAGASLVRRIFTSYDNGRTFTEICDDLNHAGYTTSRGKQFRIDTISRILANQRYTGTFQCAGEDAHCPPIIEPELFRSVQERLTESRHKHRHTQSPHEYVLTGKAICGTCGRRLTGRAGTSKTDKRYYYYCCPNKCCGWLPAAELEHAVLDAIAQYTTPEACEQIANATYVLYQQSTHENADLTAAQRRLQETEKKLENAVNAVLNGITSAALQATMQQLEQQKAALETEVRLLQTDAPELKLEHFQYFAHRLLEVQAEGTEKILQLLVNQVIVYKEQITVLVNLTDKTKTPPLEQVTAALRESSCSVACA

SEQ ID NO: 7034 - protein, 479 aa, Unknown
  Description of Unknown: Integrase B7035 sequence
  PTHR30461:SF3,IPR036162,PS51737,IPR011109,PTHR30461, PS00397,PF00239,G3DSA:1.10.10.2600,IPR006119,SSF53041, cd00338,SM00857,IPR025827,IPR038109,PS51736, IPR006118,PF13408,G3DSA:3.40.50.1390,PF07508,Coil
MIRKVAIYVRVSTTNQAEEGYSIDGQIDSLEKYCEAMGWDVYNKYIDAGFSGGSLKRPEMANLINDVKKGLFDTVLVYKLDRLSRNVRDTLYLIKDVFNINKIDFVSIQENIDTSSAMGTLFLTLLSAIAEFEREQIKERMQLGKLGRAKSGKSMQWAKTSYGYDYIKETGTLSVNPYQALIVRKMFEWYLSGMSITKLRDTLNEQYGQDKEWSYRTVRVILSNPVYCGYNQFKGQIFPGTHEAIISEDDFNKTQEEIKTRQRTAAQRFNPRPFQAKYMLSGIAQCGYCSAPLAIKLGMKRKDGTRLVKYECKQRHPRKTKGVTVYNNNEKCDSGFYFKDDIEHFVLTEISKLQTDSDYIDKLFSNTNQETIDRDSYQKQIDNLTAKISRLNDLYIDDRISLEELQKRSSDFMAERTALEKELEADTSLKAVERKEDVRRVLDTKDIFTLDYEQQKAIARALISKVRVTSESIVILWKL

SEQ ID NO: 7035 - protein, 479 aa, Unknown
  Description of Unknown: Integrase B7036 sequence
  PTHR30461:SF3,SM00857,IPR006118,G3DSA:1.10.10.2600,IPR036162, PS51737,G3DSA:3.40.50.1390,Coil,IPR006119,IPR038109, PF07508,IPR011109,SSF53041,PTHR30461,PS00397, PS51736,cd00338,PF00239
MDDLKIAAAYIRVSTDDQTELSPDSQIKVVRDFAKQKGYLIPKEYIFRDDGISGRKASKRPEFNHMIAVAKQTPSPFSAIMVWKFSRFARNQEEAIFYKGMLKKRGIDVISTSEPIIDGPFGSLIERIIEWFDEYYSINLSTEVKRGMTEKVSRGGAVSIPAFGYDIVDKKYQVNPINAPIVQRIFIKYLNGVGCRAIANELNDLGIKTTRGNNWENRTIEYILRNPVYIGKIRWNPKRRTRRNYDDKDIMIVDGIHQPIIDTDLFDKVQKKLDENKAKYRPYITDRQNGKDYMLKGLVKCSNCGATMSMSCNGLQCIKYTHGTCRVSHYIQLNKLNEVVINAIDDTLKSGDFQLKPKEQPHEEPQELNIDFMIEKENTKLRRIKEAYEEGVYNLAEFKQRKELIESKIHSLQKQNKPPEPKPDLLLAKKKLMSRRKEIISTLKSKSTPEVEKNALLCTFIDKIIFNRSLSSVELFFCF

SEQ ID NO: 7036 - protein, 479 aa, Unknown
  Description of Unknown: Integrase B7037 sequence
  PTHR30461:SF3,IPR036162,PS51737,IPR011109,PTHR30461, PS00397,PF00239,G3DSA:1.10.10.2600,IPR006119,SSF53041, cd00338,SM00857,IPR025827,IPR038109,PS51736, IPR006118,PF13408,G3DSA:3.40.50.1390,PF07508,Coil
MKTAACYIRVSTDDQTEYSPDSQLKIVRDYAFKHDISLVEKYIFAEDGGKSGKNMTNRTEFMRLISLTKKKPKPFDAILVWKFSRFARNQEESIVLKSMLHKNGIDVISVSEALPEGPFGSLVERIIEWSDEYYLINLAQEVKRGMKERASRGQPVCPPPIGYSMDNGKYVPNADAQFVKNVFADYLAGLGLRAIAIKYGNLGLKTTRGNAPDNRFIEYMLRNPVYIGKIRWSVDGRAASRRVYDDPNIMISDGNHEPIISEEVFNEVQKRIGETKRLYKKYQRPDQPMEYMLKGLVRCSACGSTLTRVITGSAPGLQCHNYSRGSCHVSHSIRISKANDAIIAGLESSIETGNFNIVPPKINNAESTIDYDKLLANEQLRLERVKAAYQNGIDTLEEYKRNKEQIYAFMDKIKAEMKANGTRAAAADNAGFRQKAANVLKIIKDPSQPESAKNIALRSIVERIVFKKPENEFDIFFYV

SEQ ID NO: 7037 - protein, 479 aa, Unknown
  Description of Unknown: Integrase B7038 sequence
  PTHR30461:SF3,SM00857,IPR006118,G3DSA:1.10.10.2600,IPR036162, PS51737,G3DSA:3.40.50.1390,Coil,IPR006119,IPR038109, PF07508,IPR011109,SSF53041,PTHR30461,PS00397, PS51736,cd00338,PF00239
MDDLKIAAAYIRVSTDDQTELSPDSQIKVVREFAKQKGYLIPKEYIFRDDGISGRKASKRPEFNHMIAVAKQTPSPFSAIMVWKFSRFARNQEEAIFYKGMLKKRGIDVISTSEPIIDGPFGSLIERIIEWFDEYYSINLSTEVKRGMTEKVSRGGAVSIPAFGYDIVDKKYQVNPINAPIVQRIFIKYLNGVGCRAIANELNDLGIKTTRGNNWENRTIEYILRNPVYIGKIRWNPKRRTRRNYDDKDIMIVDGIHQPIIDTDLFDKVQKKLDENKAKYRPYITDRQNGKEYMLKGLVKCSNCGATLSLACNSLQCIKYAHGTCNVSHSIQVNRLNEVVINAIDDTLKSGDFQLKPKEQPHEEPQELNIDFMIEKENTKLRRIKEAYEEGVYNLAEFKQRKELIESKIHSLQKQNKPPEPKPDHLLAKKKLMSRRKEIISTLKSKSTPEVEKSALLCTFIDKIIFNRSLSSVELFFCF

SEQ ID NO: 7038 - protein, 479 aa, Unknown
  Description of Unknown: Integrase B7039 sequence
  PTHR30461:SF3,SM00857,IPR006118,G3DSA:1.10.10.2600,IPR036162, PS51737,G3DSA:3.40.50.1390,Coil,IPR006119,IPR038109, PF07508,IPR011109,SSF53041,PTHR30461,PS00397, PS51736,cd00338,PF00239
MDDLKIAAAYIRVSTDDQTELSPDSQIKVVREFAKQKGYLIPKEYIFRDDGISGRKASKRPEFNHMIAVAKQTPSPFSAIMVWKFSRFARNQEEAIFYKGMLKKRGIDVISTSEPIIDGPFGSLIERIIEWFDEYYSINLSTEVKRGMTEKVSRGGAVSIPAFGYDIVDKKYQVNPINAPIVQRIFIKYLNGVGCRAIANELNDLGIKTTRGNNWENRTIEYILRNPVYIGKIRWNPKRRTKRNYDDKDIMIVDGIHQPIIDTDLFDKVQKKLDENKAKYRPYITDRQNGKEYMLKGLVKCSNCGATMSMSCNGLQCIKYTHGTCKVSHYIQLNKLNEVVINAIDDTLKSGDFQLKPKEQPHEEPQELNIDFMIEKENTKLRRIKEAYEEGVYNLAEFKQRKELIESKIHSLQKQNKPPEPKPDHLLAKKKLMSRRKEIISTLKSKSTPEVEKNALLCTFIDKIIFNRSLSSVELFFCF

SEQ ID NO: 7039 - protein, 479 aa, Unknown
  Description of Unknown: Integrase B7040 sequence
  PTHR30461:SF3,SM00857,IPR006118,G3DSA:1.10.10.2600,IPR036162, PS51737,G3DSA:3.40.50.1390,PS00397,IPR006119,IPR038109, PF07508,IPR011109,SSF53041,PTHR30461,Coil, PS51736,cd00338,PF00239
MDDLKIAAAYIRVSTDDQTELSPDSQIKVVREFAKQKGYLIPKEYIFRDDGISGRKASKRPEFNHMIAVAKQTPSPFSAIMVWKFSRFARNQEEAIFYKGMLKKRGIDVISTSEPIIDGPFGSLIERIIEWFDEYYSINLSTEVKRGMTEKVSRGGAVSIPAFGYDIVDKKYQVNPINAPIVQRIFIKYLNGVGCRAIANELNDLGITTTRGNNWENRTIEYILRNPVYIGKIRWNPKRRTRRNYDDKDIMIVDGIHQPIIDTDLFDKVQKKLDENKAKYRPYITDRQNGKEYMLKGLVKCSNCGATMSMSCNGLQCIKYTHGTCKVSHYIQLNKLNEVVINAIDDTLKSGDFQLKPKEQPHEETQELNIDFMIEKENTKLRRIKEAYEEGVYNLAEFKQRKELIESKIHSLQKQNKPPEPEPDHLLAKKKLMSRRKEIISTLKSKSTPEVEKNALLCTFIDKIIFNRSLSSVELFFCF

SEQ ID NO: 7040 - protein, 479 aa, Unknown
  Description of Unknown: Integrase B7041 sequence
  PTHR30461:SF3,SM00857,G3DSA:1.10.10.2600,IPR036162,PF13408, PS51737,G3DSA:3.40.50.1390,IPR025827,IPR006119,IPR038109, PF07508,IPR011109,SSF53041,PF00239,PTHR30461, PS51736,Coil,cd00338
MSNAVIYARYSSDKQSEDSIEAQLRACRQYAATKGYNIVAVYADEAISGKGSMTASRAQYQKMLRDCNKGTFDTILIHKYDRVARSLGEHVNLDTRLQKMGITLIAVGQDFGFGPESKIMRALMWSMSEYYIDNLASETKKGEREIALKGLHNGGYPPFGYDIVNQKYVINPYEAEYVRKIFAAVKNHEGTKDIIAEMAAVGIVGKRGKPLKYSAVYEILRNEKYTGTYIYCVDEEKDRSKRRSKPNAIRIENALPIIIDKATFDEVQKIMDSRKQSGPKTSYLCSGLVYCSCGAKMHAHISTKKGHIYHYYRCSKKCGAPMISMDIVDDAAKTYLRTLLSEENQKAIAKAMRKYKCGEPERAADFKKIVASKISEKQKQYDTLMTNMSSGVLPADVIKDIGAKMNQLRSEIEALKKTEMPKDYTSDQISIWLKALHDSPDDKAIRLLISRIDIKNTTEINIQSTLTSVVGTIGCGSWI

SEQ ID NO: 7041 - protein, 479 aa, Unknown
  Description of Unknown: Integrase B7042 sequence
  IPR036162,PS51737,IPR011109,PTHR30461,PS00397, PF00239,G3DSA:1.10.10.2600,IPR006119,SSF53041,cd00338, SM00857,IPR025827,IPR038109,PS51736,IPR006118, PF13408,G3DSA:3.40.50.1390,PF07508,Coil
MDQSNKENINQLRVGCLYIRVSTTDQEELSPDAQKRLLLDYAKSNHIVVPDEFIFEESVSGRNAQKRPKFQQMIALAKSSEHPVDVVLVWKFSRFARNQEESIVYKSMLRKDHVDVISVSEPLVDGPFGSLIERIIEWMDEYYSIRLSGEVLRGMKQKALNNGYQSSPCLGYDSVGKGKPFIINEEDFKIVSYIMDQYDNHNMDPTAIARKCNEIGYRTRRGGLFERRSIEYILRNPFYCGVVEWNGIRFEGTHEVRYTREQYENRIRLMDSRKPPKRHRNISACQHWLSGLLKCSICGATLSYNYNKQCSFFQCWKYAKGFHKQSSCISVKKVERTVKECLELLMRGENSAYIRRQPKPVDNTDEINSLTRELNRISVKEMRVKDAYENGIDSLQEYKENRIRLNKQRQELEERIKVLDSQTTHCKSESEFLKDCEAAYNAIVDPDVSNEERGTLIRTVFESISFDRKSGELLFDAKS

SEQ ID NO: 7042 - protein, 479 aa, Unknown
  Description of Unknown: Integrase B7043 sequence
  PTHR30461:SF3,SM00857,IPR006118,G3DSA:1.10.10.2600,IPR036162, PS51737,G3DSA:3.40.50.1390,IPR006119,IPR038109,PF07508, IPR011109,SSF53041,PTHR30461,PS00397,PS51736, cd00338,PF00239
MDDLKIAAAYIRVSTDDQTELSPDSQIKVVREFAKQKGYLIPKEYIFRDDGISGRKASKRPEFNHMIAVAKQTPSPFSAIMVWKFSRFARNQEEAIFYKGMLKKRGIDVISTSEPIIDGPFGSLIERIIEWFDEYYSINLSTEVKRGMTEKVSRGGAVSIPAFGYDIVDKKYQVNPINAPIVQRIFIKYLNGVGCRAIANELNDLGIKTTRGNNWENRTIEYILRNPVYIGKIRWNPKRRTRRNYDDKDIMIVDGIHQPIIDTDLFDKVQKKLDENKAKYRPYITDRQNGKEYMLKGLVKCSNCGATMSMSCNGLQCIKYTHGTCKVSHYIQLNKLNEVVINAIDDTLKSGDFQLKPKEQPHEEPQELNIDFMIEKENTKLRRIKEAYEEGVYNLAEFKQRKELIESKICSLQKQNKPPEPKPDHLLAKKKLMSRRKEIISTLKSKSTPEVEKNALLCTFIDKIIFNRSLSSVELFFCF

SEQ ID NO: 7043 - protein, 479 aa, Unknown
  Description of Unknown: Integrase B7044 sequence
  PTHR30461:SF3,SM00857,IPR006118,G3DSA:1.10.10.2600,IPR036162, PS51737,G3DSA:3.40.50.1390,Coil,IPR006119,IPR038109, PF07508,SSF53041,IPR011109,PTHR30461,PS00397, PS51736,cd00338,PF00239
MDDLKMAAAYIRVSTDDQTELSPDSQIKVVREFAKQKGYLIPKEYIFRDDGISGRKASKRPEFNHMIAVAKQTPSPFSAIMVWKFSRFARNQEEAIFYKGMLKKRGIDVISTSEPIIDGPFGSLIERIIEWFDEYYSINLSTEVKRGMTEKVSRGGAVSIPAFGYDIVDKKYQVNPINAPIVQRIFIKYLNGVGCRAIANELNDLSIKTTRGNNWENRTIEYILRNPVYIGKIRWNPKRRTRRNYDDKDIMIVDGIHQPIIDTDLFDKVQKKLDENKAKYRPYITDRQNGKEYMLKGLVKCSNCGATMSMSCNGLQCIKYTHGTCKVSHYIQLNKLNEVVINAIDDTLKSGDFQLKPKEQPHEEPQELNIDFMIEKENTKLRRIKEAYEEGVYNLTEFKQRKELIESKIHSLQKQNKPPEPKPDHLLAKKKLMSRRKEIISTLKSKSTPEVEKNALLCTFIDKIIFNRSLSSVELFFCF

SEQ ID NO: 7044 - protein, 479 aa, Unknown
  Description of Unknown: Integrase B7045 sequence
  PTHR30461:SF3,SM00857,IPR006118,G3DSA:1.10.10.2600,IPR036162, PS51737,G3DSA:3.40.50.1390,IPR006119,IPR038109,PF07508, IPR011109,SSF53041,PTHR30461,PS00397,PS51736, cd00338,PF00239
MDDLKIAAAYIRVSTDDQTELSPDSQIKVVRDFAKQKGYLIPKEYIFRDDGISGRKASKRPEFNHMIAVAKQTPSPFSAIMVWKFSRFARNQEEAIFYKGMLKKRGIDVISTSEPIIDGPFGSLIERIIEWFDEYYSINLSTEVKRGMTEKVSRGGAVSIPAFGYDIVNKKYQVNPINAPIVQRIFIKYLNGVGCRAIANELNDLGIKTTRGNNWENRTIEYILRNPVYIGKIRWNPKRRTRRNYDDKDIMIVDGIHQPIIDTDLFDKVQKKLDENKAKYRPYITDRQNGKEYMLKGLVKCSNCGATMSMSCNGLQCIKYTHGTCKVSHYIQLNKLNEVVINAIDDTLKSGDFQLKPKEQPHEEPQELNIDFMIEKENTKLRRIKEAYEEGVYNLAEFKQRKELIESKICSLQKQNKPPEPKLDHLLAKKKLMSRRKEIISTLKSKSTPEVEKNALLCTFIDKIIFNRSLSSVELFFCF

SEQ ID NO: 7045 - protein, 479 aa, Unknown
  Description of Unknown: Integrase B7046 sequence
  PTHR30461:SF3,SM00857,G3DSA:1.10.10.2600,IPR036162,PF13408, IPR025827,PS51737,G3DSA:3.40.50.1390,IPR006119,IPR038109, PF07508,SSF53041,IPR011109,PF00239,PTHR30461, PS51736,Coil,cd00338
MNNAVIYARYSSDKQTEDSIEAQLRACREYAAAHGLNVVGEYIDEAVSGKGSKTASRAGYQKMLRECGKGGFDTILIHKYDRIARSLGEHVNLASKLQSLNINLVATAQDFGTSNEAKIMRTLMWSLSEYYIDNLSSEVKKGHKETALKALHNGGYPPFGYDVVEQKYVINELEAHYVRRIFNAALDNAGYTDIIKEMSERGITGKRGKPIKYTQIYEMLRNEKYTGVYVYSPQEERNRADRRTKPNAIRIENALPIIIDKAKFEEVQKIMNERKHVGRKSNYLCSGLVYCSCGAKMHAVKPTKKGHTYYYYYCSAKCGAPMVRMEEVDKAAVNYLRALLSDDNQERIMKALRAYKGAENARIADFREIIKRKVSEKQKRYDTLMKNLSSGVLPAEIVSDIGEEMNSIKAEIKQLESTEPPKDYTVDHIKAWLNALKNTPDDKAVRLLIERIDIKNKTDFNIQSTLKSVLRNIGCGGRI

SEQ ID NO: 7046 - protein, 479 aa, Unknown
  Description of Unknown: Integrase B7047 sequence
  IPR036162,PS51737,IPR011109,PTHR30461,PS00397, PF00239,G3DSA:1.10.10.2600,IPR006119,SSF53041,SM00857, IPR025827,IPR038109,PS51736,cd03768,IPR006118, PF13408,G3DSA:3.40.50.1390,PF07508,Coil
MPKVAIYARVSTLNQAEEGYSIEGQLASLRKYCNALDWQIYQEYVDPGFSGGSLKRPAIQKLIEDAKSCRFDIVLIYKLDRLSRSVQDTLYLVKDIFDKNKISFVSLNEKIDTSSPMGNLFLTLLASIAEFEREQIKERMMMGKVGRAKSGKAMGWSKVPFGYTYDKQTGIYQINTLQAQIVKRIYRDYLDGVSITKLVDLLNAEGHITKDRPWTYRTVRQALDNVVYTGRQFYQGNVYPGQHEAIISIEDYDKTQAELKRRQLTNAQKFNPRPFRAKYMLSGLLHCSVCGSSMMVQTRYLKYADDYHYYRCVSSIRKRIRFSYRQDTELCQNRSNYLKDDLESAIIKTIRHLQLHPDQMPVDTVKFDDKPLKDELNRINDKLNKLVDLYLNSNGISIGIINQKREELLQQKEALENKLQERKPKQPELDPKKALLLLSKKNILELPYEEQVKLVKSLISKIEVSPSKMKIHWRFNVEK

SEQ ID NO: 7047 - protein, 479 aa, Unknown
  Description of Unknown: Integrase B7048 sequence
  PTHR30461:SF3,IPR036162,PS51737,IPR011109,PTHR30461, PS00397,PF00239,G3DSA:1.10.10.2600,IPR006119,SSF53041, SM00857,IPR025827,IPR038109,PS51736,cd03768, IPR006118,PF13408,G3DSA:3.40.50.1390,PF07508,Coil
MIRKVAIYARVSTTNQAEEGYSIDGQIDSLEKYCEAMGWDVYNKYIDAGFSGGSLKRPEMANLINDVKKGLFDTVLVYKLDRLSRNVRDTLYLIKDVFNINKIDFVSIQENIDTSSAMGTLFLTLLSAIAEFEREQIKERMQLGKLGRAKSGKSMQWAKTSFGYDYIKETGTLSVNPYQALIVRKMFEWYLSGMSITKLRDTLNEQYGQDKEWNYRTVRVILSNPVYCGYNQFKGQIFPGTHEPIISEEDFNKTQEEIKTRQRTAAQRFNPRPFQAKYMLSGIAQCGYCSAPLAIKLGMKRKDGTRLVKYECKQRHPRKTKGVTVYNNNEKCDSGFYFKNDIERFVLTEISKLQTDSDYIDKLFSNTNQETIDRDSYQKQIDNLTAKISRLNDLYIDDRISLEELQKRSSDFMAERSALEKELETDTSLKAVERKKDIRRVLDTKDIFTLDYEQQKAIARALISKVRVTSETIVILWKL

SEQ ID NO: 7048 - protein, 479 aa, Unknown
  Description of Unknown: Integrase B7049 sequence
  PTHR30461:SF3,IPR036162,PS51737,IPR011109,PTHR30461, PS00397,PF00239,G3DSA:1.10.10.2600,IPR006119,SSF53041, SM00857,IPR025827,IPR038109,PS51736,cd03768, IPR006118,PF13408,G3DSA:3.40.50.1390,PF07508,Coil
MNKVAIYVRVSTKGQAEEGYSIDEQIALLTSYCSIHKWKIHDTYVDAGISGATIERPELSRLSRDAQKKKFNTMIVYDLKRLGRSQRNNISFIEDVLEKNGIGFISLTENFDTSTPLGKAMVGILSAFGQLDRDTIRERMMMGKIGRAKSGKPMMTSTIAFGYTYDKVTSSLNINQAEAIIVKTIFNEYLSGRSLTKLRDYLNENDLLRNGKPWNYQGVSRVLRNPVYMGMVRFRGEVYQGNHDPIIDSETFEAVQKELKKRQLETYEFNKNTRPFRAKYMLSGIIKCGYCGSPMGVTLGTKRKDGTRNIRYQCVNRFPRTTKGITVYNNGQKCNSGFYEKDDIEIYVLGQVRLLQLNKAKLNKMFETPEIINVEEIENQINSLNNKMKRLNDLYLNDMISLDELKTQTYTFLKQKDLLENALNNNPAIHQEENRKQFQKLLGTKDITQLSYEEQSFAIKNLIDKVFVKPGIIDINWRI

SEQ ID NO: 7049 - protein, 479 aa, Unknown
  Description of Unknown: Integrase B7050 sequence
  PTHR30461:SF3,SM00857,G3DSA:1.10.10.2600,IPR036162,PF13408, PS51737,IPR025827,G3DSA:3.40.50.1390,IPR006119,IPR038109, PF07508,IPR011109,SSF53041,PF00239,PTHR30461, PS51736,Coil,cd00338
MARKKKFELNDNNLAIAYYRFSSHSQNEASIDQQRELAHAWADAHGFKIVKEYEDAAISGTTENRPGFQQMLSEVAKIRPRVLIMWKTDRLGRDKYVLAMAKRTIRDAGCEIRLLAENIPTDGPEGVLIEGLMDAMAEYYSRQLSQNIQRGMDYNAQHALYNGHKLFGYGVDKSTKRYIVDPDTAPFVQRMFAEYAEGKAMQTICDELNAQGLRTTRGAKFGVKTMNKMLQNRAYIGEYRHGDIVVEGGMPALVDEETFDKVQRKFAENKRKGSQRARGMDENDAPRYWLTGKVYCGKCGSTLQGVSGTSGTGRTYYYYYCSAQRRKQCTLKKVRKEKLEDAVTMILRSILHDSENLMSLAVDAAAYYEKNYRDTGYLDGLEAKRREVEKSLANLVKVIESGLISETVTERLVQLEEQKSALNEAIEAENIRAALCEDEHTIKAYFEKFLHADFDNPETRDQVLEYFVDKIYLTDDGLG

SEQ ID NO: 7050 - protein, 479 aa, Unknown
  Description of Unknown: Integrase B7051 sequence
  PTHR30461:SF3,SM00857,G3DSA:1.10.10.2600,IPR036162,PS51737, G3DSA:3.40.50.1390,IPR006119,IPR038109,PF07508,SSF53041, IPR011109,PTHR30461,Coil,PS51736,cd00338, PF00239
MPKTAVIYARFSCNKQREASIDDQLRICRQWCQRERYAIVAEYCDYAISGRTDDRPEFQRMVANAGESDIVLVYMMDRFSRGEYDAPIYKRELAQHGVKLVSALEQIPDSPEGIIYEKLLEGLAACESKKTAIRTRRGMEGNALKCKTNGVRVFGYASNEADEYVIDEDEAAFVREAFKRRIAKETTNSIARDFAARGVKTSQGNPCGYSMVERMVKNRKYTGRYEWGGVVKEGGMPAIIDEVTFMEAQGIRAAKERSAESWGDFALSGKAICAGCGRNLQGVSGRGRKNVKYEYYRCHDGCVRPVRREELEGGIVEALRALLQDREEALRIARMVAESSDGAEVAARRKQAAQSLSVAERGLKNILNAIEQGIIAPGAKERIAELEHQRDRAKLDLEAIKDEQIDPERLADFLQCGSALDDATLLNAFVYQASVSDEECIVTLNYDVENNEPARLDIQRVRTKCKWCPQRDSNPRYPP

SEQ ID NO: 7051 - protein, 479 aa, Unknown
  Description of Unknown: Integrase B7052 sequence
  PTHR30461:SF3,SM00857,IPR006118,G3DSA:1.10.10.2600,IPR036162, PS51737,G3DSA:3.40.50.1390,IPR006119,IPR038109,PF07508, SSF53041,IPR011109,PF00239,PTHR30461,PS00397, PS51736,Coil,cd00338
MEKKLKTAAAYIRVSTDRQTELSPDSQLRIIKEYAKRNGYNIPSEYIFREDGLSGKYVKKRPQFIEMIGLAKQNPAPFSTILVWKFSRFARNQEESIVYKSMLKKNDVSVISCSETLDEENPFSSLIERIIEWMDEYYSIRLSGEVLRGMSEKVKRGQPVTIPSFGYDIVDKQYVINEEKAAIVRKIFTDYIDGKSSMQIAAELNEIGVKTTRGNPFENRTIDYILKNPVYIGKIRWNQNGKTDYRYSNNKDIVYTQGVHKSIVSDEIFYKVQNLIETNGRKQRKGIHNNIKQEYMLHGLIKCSNCGSALAYSNKGLQCIKYSKSICKQSHYISLTNINNLVILGLEQVFENKDFKLLVKSLSQTVADCIDYTNLIEKENQKIQRIKNAYLEGIYTVEEVKEYKKSVEDKIKKLSSRQVQLKQEKTKPIKENVKEKKNFLATLKSPAISEKEKNEILKGFVDCIVFNRSTSSVDIFLYI

SEQ ID NO: 7052 - protein, 479 aa, Unknown
  Description of Unknown: Integrase B7053 sequence
  PTHR30461:SF3,cd00338,SM00857,IPR006118,G3DSA:1.10.10.2600, IPR036162,PS51737,G3DSA:3.40.50.1390,IPR006119,IPR038109, PF07508,SSF53041,IPR011109,PTHR30461,PS00397, PS51736,Coil,PF00239
MEKELKTAAAYIRVSTDRQTELSPDSQLRIIKEYAKQNGYNIPSEYIFREDGLSGKYVKKRPQFIEMIGFAKQKPAPFSAILVWKFSRFARNQEESIVYKSMLKKNDVSVISCSETLDEENPFSSLIERIIEWMDEYYSIRLSGEVLRGMSEKVKRGQPVTIPSFGYDIVDKQYVINEEKAAIVRKIFTDYIDGKNSMQIASELNEIGVKTTRGNPFENRTIDYILKNPVYIGKIRWNQNGKTDYRYSNNKDIVYTQGVHKSIVSDEIFYKVQNLIETNGRKQRKGIHNNIKQEYMLHGLIKCSNCGSALAYSNKGLQCIKYSKSICKQSHYISLTNINNLVILGLEQVFENKDFKLSVKSLSQTVADCIDYTNLIEKENQKIQRIKNAYLEGIYTVEEVKEYKKSVEDKIKNLSSRQVQLKQEKTKPRKENVKEKKNFLATLKSPAISEKEKNEILKGFVDCIVFNRSTSSVDIFLYI

SEQ ID NO: 7053 - protein, 479 aa, Unknown
  Description of Unknown: Integrase B7054 sequence
  PTHR30461:SF3,cd00338,SM00857,IPR006118,G3DSA:1.10.10.2600, IPR036162,PS51737,G3DSA:3.40.50.1390,IPR006119,IPR038109, PF07508,IPR011109,SSF53041,PTHR30461,PS00397, PS51736,Coil,PF00239
MEKELKTVAAYIRVSTDRQTELSPDSQLRIIKEYAKQNGYNIPSEYIFREDGLSGKYVKKRPQFIEMIGLAKQKPAPFSAILVWKFSRFARNQEESIVYKSMLKKNDVSVISCSETLDEENPFSSLIERIIEWMDEYYSIRLSGEVLRGMSEKVKRGQPVTIPSFGYDIVDKQYVINEEKAAIVRKIFTDYIDGKNSMQIASELNEIGVKTTRGNPFENRTIDYILKNPVYIGKIRWNQNGKTDYRYSNNKDIVYTQGVHKSIISDEIFYKVQNLIETNGRKQRKGIHNNIKQEYMLHGLIKCSNCGSALAYSNKGLQCIKYSKSICKQSHYISLTNINNLVILGLEQVFENKDFKLSVKSLSQTVADCIDYTNLIEKENQKIQRIKNAYLEGIYTVEEVKEYKKSVEDKIKNLSSRQVQLKQEKTKPRKENVKEKKNFLATLKSPAISEKEKNEILKGFVDCIVFNRSTSSVEIFLYI

SEQ ID NO: 7054 - protein, 479 aa, Unknown
  Description of Unknown: Integrase B7055 sequence
  PTHR30461:SF3,SM00857,G3DSA:1.10.10.2600,IPR036162,PF13408, PS51737,IPR025827,G3DSA:3.40.50.1390,IPR006119,IPR038109, PF07508,IPR011109,SSF53041,PTHR30461,Coil, PS51736,cd00338,PF00239
MNAVIYARYSCDRQTEQSIEGQLRECKAFAASEGIHIIGEYIDRAISGTTANRPEFQRMISDSKYKTFQAVIVYKLDRFARNRYDSAMYKSKLKANGVKVLSAKEHITDSPEGIILEGLLEAMNEYYSAELSQKIKRGMRENAIKGKTTGGNVALGYRIGADKQMEIDPAGASLVHRIFTGYDSGMTFTEICDDLNHAGYTTSRGKQFRIDTISRILANQRYTGTFQCAGEDAHCPPIIEPELFRSVQERLTESRHKHRHTQSPHEYVLTGKAICGTCDRRLTGRAGTSKTDKRYYYYCCPNKCCGWLPAAELEHAVLDAIAQYTTPEACEQIANATYALYQQSTHENADLTAAQRRLQETEKKLENAVNAVLNGITSAALQATMQQLEQQKAALETEVRLLQTDAPELKLEHFQYFAHRLLEVQAEGTEKILQLLVNQVIVYKEQITVLVNLTDKTKTPPLEQVTAALRESSCSIACA

SEQ ID NO: 7055 - protein, 479 aa, Unknown
  Description of Unknown: Integrase B7056 sequence
  PTHR30461:SF3,cd00338,SM00857,IPR036162,PF13408, IPR025827,G3DSA:3.40.50.1390,IPR006119,SSF53041,PTHR30461, PS51736,Coil,PF00239
MIADLPRKGKDKMAQSRSVTEKILRVALYPRVSTEEQFLRGYSLQTQEEVLTQYAHDHGYKIVGVYRDEGHSARKPALKRKVMQELLADVQAGKIDRILFIKLDRWFRNVREYHKIQEILEANNVTWQATMEDYNTATADGRLKVNIMLSVAENESDRTSERIKFVFDGKRRRKEWCFTGGPDQWPYGYMPQVIDGAKRCVKNPETEVIVQDFWDYVVKYSSVRKAGMYCCEKYGITRDYRTWMTTARNELYTGIFHGVEDYCPAYINRADWERIILGHEVIKKTQHPDRVYLFTGLIRCPGCGATMKATFKTYPNDRSKEYNGYRCNNSKLRTCAYRHQLSERKIEKYLLGNIKSQLENYIVQAEAQETQKRRQPKIQSLVALNEQLRRLNVIFIAGNIGDEEYAAETKRIKAEIKKAKQQESENRPANLDWIKSFLESDFLSTYESLDKEDQRRLWRSIIEEIYIDGTEVTGIKPRI

SEQ ID NO: 7056 - protein, 479 aa, Unknown
  Description of Unknown: Integrase B7057 sequence
  PTHR30461:SF3,cd00338,SM00857,IPR006118, G3DSA:1.10.10.2600,IPR036162,PS51737,G3DSA:3.40.50.1390, IPR006119,IPR038109,PF07508,IPR011109, SSF53041,PTHR30461,PS00397,PS51736,Coil,PF00239
MEKELKTAAAYIRVSTDRQTELSPDSQLRIIKEYAKQNGYNIPSEYIFREDGLSGKYVKKRPQFIEMIGLAKQKPAPFSAILVWKFSRFARNQEESIVYKSMLKKNDVSVISCSETLDEENPFSSLIERIIEWMDEYYSIRLSGEVLRGMSEKVKRGQPVTIPSFGYDIVDKQYVINEEKATIVRKIFTDYIDGKSSMQIASELNEIGVKTTRGNPFENRTIDYILKNPVYIGKIRWNQNGKTDYRYSNNKDIVYTQGVHKSIVSDEIFYKVQNLIEANGRKQRKGIHNNIKQEYMLHGFIKCSNCGSALAYSNKGLQCIKYSKSICKQSHYISLTNINNLVILGLEQVFKNKDFKLSVKSLSQTCADCIDYINLIEKENQKIQRIKNAYLEGIYTVEEVKEYKKSVEDKIKNLSSRQVQLKQEKTKPRKENVKEKKNFLATLKSPAISEKEKNEILKGFVDCIVFNRSTSSVDIFLYI

SEQ ID NO: 7057 - protein, 479 aa, Unknown
  Description of Unknown: Integrase B7058 sequence
  PTHR30461:SF3,cd00338,SM00857,IPR006118,G3DSA:1.10.10.2600, IPR036162,PS51737,G3DSA:3.40.50.1390,IPR006119,IPR038109, PF07508,IPR011109,SSF53041,PTHR30461,PS00397, PS51736,Coil,PF00239
MEKELKTAAAYIRVSTDRQTELSPDSQLRIIKEYAKQNGYNIPSEYIFREDGLSGKYVKKRPQFIEMIGLAKQKPAPFSAILVWKFSRFARNQEESIVYKSMLKKNDVSVISCSETLDEENPFSSLIERIIEWMDEYYSIRLSGEVLRGMSEKVKRGQPVTIPSFGYDIVDKQYVINEEKAAIVRKIFTDYIDGKNSTQIASELNEIGVKTTRGNPFENRTIDYILKNPVYIGKIRWNQNGKTDYRYSNNKDIVYTQGVHKSIVSDEIFYKVQNLIETNGRKQRKGIHNNIKQEYMLHGLIKCSNCGSALAYSNKGLQCIKYSKSICKQSHYISLTNINNLVILGLEQVFENKDFKLSVKSLSQTVADCIDYTNLIEKENQKIQRIKNAYLEGIYTVEEVKEYKKSVEDKIKNLSSRQVQLKQEKTKPRKENVKEKKNFLATLKSPAISEKEKNEILKGFVDCIVFNRSTSSIDIFLYI

SEQ ID NO: 7058 - protein, 479 aa, Unknown
  Description of Unknown: Integrase B7059 sequence
  PTHR30461:SF3,cd00338,SM00857,IPR006118,G3DSA:1.10.10.2600, IPR036162,PS51737,G3DSA:3.40.50.1390,IPR006119,IPR038109, PF07508,IPR011109,SSF53041,PTHR30461,PS00397, PS51736,Coil,PF00239
MEKELKTAAAYIRVSTDRQTELSPDSQLRIIKEYAKQNGYNIPSEYIFREDGLSGKYVKKRPQFIEMIGLAKQNPAPFSAILVWKFSRFARNQEESIVYKSMLKKNDVSVISCSETLDEENPFSSLIERIIEWMDEYYSIRLSGEVLRGMSEKVKRGQPVTIPSFGYDIVDKQYVINEEKAAIVRKIFTDYIDGKNSTQIASELNEIGVKTTRGNPFENRTIDYILKNPVYIGKIRWNQNGKTDYRYSNNKDIVYTQGVHKSIVSDEIFYKVQNLIETNGRKQRKGIHNNIKQEYMLHGLIKCSNCGSALAYSNKGLQCIKYSKSICKQSHYISLTNINNLVILGLEQVFENKDFKLSVKSLSQTVADCIDYTNLIEKENQKIQRIKNAYLEGIYTVEEVKEYKKSVEDKIKNLSSRQVQLKQEKTKPRKENVKEKKNFLATLKSPAISEKEKNEILKGFVDCIVFNRSTSSVDIFLYI

SEQ ID NO: 7059 - protein, 479 aa, Unknown
  Description of Unknown: Integrase B7060 sequence
  PTHR30461:SF3,cd00338,SM00857,G3DSA:1.10.10.2600,IPR036162, PF13408,IPR025827,PS51737,G3DSA:3.40.50.1390,IPR006119, IPR038109,PF07508,IPR011109,SSF53041,PTHR30461, PS51736,Coil,PF00239
MSNAVIYARYSSDKQSEESIEAQLRACRQYAATKGYNIVAVYADEAISGKGSMTASRAQYQKMLRDCNKGTFDTILIHKYDRVARSLGEHVNLDARLQKMGITLIAVGQDFGFGPESKIMRALMWSMSEYYIDNLANETKKGEREVALKGLHNGGYPPFGYDIVDQKYVINPYEAEYVRKIFAAVKNHEGTKDIIAEMAAVGIVGKRGKPLKYSAVYEILRNEKYTGTYIYCVDEEKDRSKRRSKPNAIRIENALPMIIDKATFDEVQKIMDSRKQSGPKTSYLCSGLVYCSCGAKMHAHISTKKGHVYHYYRCSKKCGAPMISMDIVDDAAKTYLRTLLSEENQKAIANAMRKYKCGEPERAADFKKIVASKISEKQKQYDTLMTNMSSGVLPVDVIEDIGAKMNQLRSEIEALKKTEMPKDYTTDQISLWLKALHDSPDDKAIRLLISRIDIKNTTEINIQSTLTSVVGTIGCGSWI

SEQ ID NO: 7060 - protein, 479 aa, Unknown
  Description of Unknown: Integrase B7061 sequence
  PTHR30461:SF3,cd00338,SM00857,IPR006118,G3DSA:1.10.10.2600, IPR036162,PS51737,G3DSA:3.40.50.1390,IPR006119,IPR038109, PF07508,IPR011109,SSF53041,PTHR30461,PS00397, PS51736,Coil,PF00239
MEKELKTAAAYIRVSTDRQTELSPDSQLRIIKEYAKQNGYNIPSEYIFREDGLSGKYVKKRPQFIEMIGLAKQKPAPFSAILVWKFSRFARNQEESIVYKSMLKKNDVSVISCSETLDEENPFSSLIERIIEWMDEYYSIRLSGEVLRGMSEKVKRGQPVTIPSFGYDIVDKQYVINEEKAAIVRKIFTDYIDGKNSMQIASELNEIGVKTTRGNPFENRTIDYILKNPVYIGKIRWNQNGKTDYRYSNNKDIVYTQGVHKSIVSDEIFYKVQNLIEANGRKQRKGIHNNIKQEYMLHGLIKCSNCGSALAYSNKGLQCIKYSKSICKQSHYISLTNINNLVILGLEQVFKNKDFKLSVKSLSQTCADCIDYINLIEKENQKIQRIKNAYLEGIYTVEEVKEYKKSVEDKIKNLSSRQVQLKQEKTKPRKENVKEKKNFLATLKSPAISEKEKNEILKGFVDCIVFNRSTSSVDIFLYI

SEQ ID NO: 7061 - protein, 479 aa, Unknown
  Description of Unknown: Integrase B7062 sequence
  PTHR30461:SF3,SM00857,IPR006118,G3DSA:1.10.10.2600,IPR036162, PS51737,G3DSA:3.40.50.1390,Coil,IPR006119,IPR038109, PF07508,IPR011109,SSF53041,PTHR30461,PS00397, PS51736,cd00338,PF00239
MDDLKIAAAYIRVSTDDQTELSPDSQIKVVREFAKQKGYLIPKEYIFRDDGISGRKASKRPEFNHMIAVAKQTPSPFSAIMVWKFSRFARNQEEAIFYKGMLKKRGIDVISTSEPIIDGPFGSLIERIIEWFDEYYSINLSTEVKRGMTEKVSRGGAVSIPAFGYDIVNKKYQVNPINAPIVQRIFIKYLNGVGCRAIANELNDLGIKTTRGNNWENRTIEYILRNPVYIGKIRWNPKRRTMRNYDDKDIMIVDGIHQPIIDTDLFDKVQKKLDENKAKYRPYITDRQNGKEYMLKGLVKCSNCGATMSMSCNGLQCIKYTHGTCKVSHYIQLNKLNEVVINAIDDTLKSGDFQLKPKEQPHEEPQELNVEFMIEKENTKLKRVKEAYEEGVYNLAEFKQRKELIESKIHSLQKQNKPPEPKLDHLLAKKKLMSRRKEIISTLKSKSTPEVEKNALLCTFIDKIIFNRSLSSVELFFCF

SEQ ID NO: 7062 - protein, 479 aa, Unknown
  Description of Unknown: Integrase B7063 sequence
  PTHR30461:SF3,cd00338,SM00857,IPR006118,G3DSA:1.10.10.2600, IPR036162,PS51737,G3DSA:3.40.50.1390,IPR006119,IPR038109, PF07508,IPR011109,SSF53041,PTHR30461,PS00397, PS51736,Coil,PF00239
MEKELKTAAAYIRVSTDRQTELSPDSQLRIIKEYAKQNGYNIPSEYIFREDGLSGKYVKKRPQFIEMIGLAKQKPAPFSTILVWKFSRFARNQEESIVYKSMLKKNDVSVISCSETLDEENPFSSLIERIIEWMDEYYSIRLSGEVLRGMSEKVKRGQPVTIPSFGYDIVDKQYVINEEKAAIVRKIFTDYIDGKNSMQIASELNEIGVKTTRGNPFENRTIDYILKNPVYIGKIRWNQNGKTDYRYSNNKDIVYTQGIHKSIVSDEIFYEVQNLIETNGRKQRKGIHNNIKQEYMLHGLIKCSNCGSALAYSNKGLQCIKYSKSICKQSHYISLTNINNLVILGLEQVFENKDFKLSVKSLSQTVADCIDYTNLIEKENQKIQRIKNAYLEGIYTVEEVKEYKKSVEDKIKNLSSRQVQLKQEKTKPRKENVKEKKNFLATLKSPAISEKEKNEILKGFVDCIVFNRSTSSVDIFLYI

SEQ ID NO: 7063 - protein, 479 aa, Unknown
  Description of Unknown: Integrase B7064 sequence
  PTHR30461:SF3,cd00338,SM00857,IPR036162,PF13408, IPR025827,G3DSA:3.40.50.1390,IPR006119,SSF53041,PTHR30461, PS51736,Coil,PF00239
MIADLPRKGKDKMAQSRSVTEKILRVALYPRVSTEEQFLRGYSLQTQEEVLTQYAHDHGYKIVGVYRDEGHSARKPALKRKVMQELLADVQAGKIDRILFIKLDRWFRNVREYHKIQEILEANNVTWQATMEDYNTATADGRLKVNIMLSVAENESDRTSERIKFVFDGKRRRKEWCFTGGPDQWPYGYMPQIIDGAKRCVKNPETEMIVQDFWDYVVKYSSVRKAGMYCCEKYGITRNYRTWMTTARNELYTGIFHGVEDYCPAYINRADWERIILGHEVIKKTQRPDRVYLFTGLIRCPGCGATMKATFKTYPNDRSKEYNGYRCNNSKLKTCAYRHQLSERKIEKYLLENIKSQLESYIVQAEAQETQKRRQPKIQSLVALNEQLRRLNVIFIAGNIGDEEYAAETKRIKAEVEKAKQQESENRPANLDWIKSFLESDFLSTYESLDKEEQRRLWRSIIEEIYIDGTEVTGIKPRI

SEQ ID NO: 7064 - protein, 479 aa, Unknown
  Description of Unknown: Integrase B7065 sequence
  PTHR30461:SF3,cd00338,SM00857,IPR006118, G3DSA:1.10.10.2600,IPR036162,PS51737,G3DSA:3.40.50.1390, IPR006119,IPR038109,PF07508,IPR011109, SSF53041,PTHR30461,PS00397,PS51736,Coil,PF00239
MEKELKTAAAYIRVSTDRQTELSPDSQLRIIKEYAKQNGYNIPSEYIFREDGLSGKYVKKRPQFIEMIGLAKQKPAPFSAILVWKFSRFARNQEESIVYKSMLKKNDVSVISCSETLDEENPFSSLIERIIEWMDEYYSIRLSGEVLRGMSEKVKRGQPVTIPSFGYDIVDKQYVINEEKAAIVRKIFTDYIDGKNSTQIASELNEIGVKTTRGNPFENRTIDYILKNPVYIGKIRWNQNGKTDYRYSNNKDIVYTQGVHKSIVSDEIFYKVQNLIETNGRKQRKGIHNNIKQEYMLHGLIKCSNCGSALAYSNKGLQCIKYSKSICKQSHYISLTNINNLVILGLEQVFENKDFKLSVKSLSQTVADCIDYTNLIEKENQKIQRIKNAYLEGIYTVEEVKEYKKSVEDKIKNLSSRQVQLKQEKTKPRKENVKEKKNFLATLKSPAISEKEKNEILKGFVDCIVFNRSTSSVDIFLYI

SEQ ID NO: 7065 - protein, 479 aa, Unknown
  Description of Unknown: Integrase B7066 sequence
  PTHR30461:SF3,SM00857,IPR006118,G3DSA:1.10.10.2600,IPR036162, PS51737,G3DSA:3.40.50.1390,Coil,IPR006119,IPR038109, PF07508,IPR011109,SSF53041,PTHR30461,PS00397, PS51736,cd00338,PF00239
MDDLKIAAAYIRVSTDDQTELSPDSQIKVVREFAKQKGYLIPKEYIFRDDGISGRKASKRPEFNHMIAVAKQTPSPFSAIMVWKFSRFARNQEEAIFYKGMLKKRGIDVISTSEPIIDGPFGSLIERIIEWFDEYYSINLSTEVKRGMTEKVSRGGAVSIPAFGYDIVDKKYQVNPINAPIVQRIFIKYLNGVGCRAIANELNDLGIKTTRGNNWENRTIEYILRNPVYIGKIRWNPKRRTRRNYDDKDIMIVDGIHQPIIDTDIFDKVQKKLDENKAKYRPYITDRQNGKDYMLKGLVKCSNCGATLSLACNSLQCIKYAHGTCNVSHSIQVNRLNEVVINAIDDTLKSGDFQLKPKEQPHEEPQELNIDFMIEKENTKLRRIKEAYEEGVYNLAEFKQRKELIESKIRSLQKQNKPPEPKPDHLLAKKKLMSRRKEIISTLKSKSTPEVEKNALLCTFIDKIIFNRSLSSVELFFCF

SEQ ID NO: 7066 - protein, 479 aa, Unknown
  Description of Unknown: Integrase B7067 sequence
  PTHR30461:SF3,IPR036162,PS51737,IPR011109,PTHR30461, PS00397,PF00239,G3DSA:1.10.10.2600,IPR006119,SSF53041, cd00338,SM00857,IPR025827,IPR038109,PS51736, IPR006118,PF13408,G3DSA:3.40.50.1390,PF07508,Coil
MIRKVAIYARVSTMNQAEEGYSIDGQIDSLEKYCEAMGWDVYNKYIDAGFSGGSLKRPEMTNLINDVKKGLFDTVLVYKLDRLSRDVRDTLYLIKDVFNINKIDFVSIQENIDTSSAMGTLFLTLLSAIAEFEREQIKERMQLGKLGRAKSGKSMQWAKTSYGYDYIKETGTLSVNPYQALIVRKMFEWYLSGMSITKLRDALNEQYGQDKEWSYRTVRVILSNPVYCGYNQFKGQIFPGTHEAIISEEDFNKTQEEIKTRQRTAAQRFNPRPFQAKYMLSGIAQCGYCSAPLAIKLGMKRKDGTRLVKYECKQRHPRKTKGVTVYNNNEKCDSGFYFKDDIEHFVLTEISKLQTDSNYIDKLFSNTNQETIDRASYQKQIDNLTAKIRRLNDLYIDDRISLEELQKRSSDFMAERTALEKELDADTSLKAVERKEDVRRVLDTKDIFTLDYEQQKAIARALISKVRVTSESIVILWKL

SEQ ID NO: 7067 - protein, 479 aa, Unknown
  Description of Unknown: Integrase B7068 sequence
  PTHR30461:SF3,SM00857,IPR006118,G3DSA:1.10.10.2600,IPR036162, PS51737,G3DSA:3.40.50.1390,IPR006119,IPR038109,PF07508, IPR011109,SSF53041,PTHR30461,PS00397,PS51736, cd00338,PF00239
MDDLKIAAAYIRVSTDDQTELSPDSQIKVVRDFAKQKGYLIPKEYIFRDDGISGRKASKRPEFNHMIAVAKQTPSPFSAIMVWKFSRFARNQEEAIFYKGMLKKRGIDVISTSEPIIDGPFGSLIERIIEWFDEYYSINLSTEVKRGMTEKVSRGGAVSTPAFGYDIVDKKYQVNPINAPIVQRIFIKYLNGVGCRAIANELNDLGIKTTRGNNWENRTIEYILRNLVYIGKIRWNPKRRTRRNYDDKDIMIVDGIHQPIIDTDLFNKVQKKLDENKSKYRPYITERKNGKEYMLKGLVKCSNCGATMSMTCNGLQCIKYAHGTCNVSHYIQLNKLNEVVINAIDDTLKSGDFQLKPKEQPHEEPQELNIDFMIEKENTKLRRIKEAYEEGVYNLAEFKQRKELIESKICSLQKQNKPPEPKPDHLLAKKKLMSRRKEIISTLKSKSTPEVEKNALLCTFIDKIIFNRSLSSVELFFCF

SEQ ID NO: 7068 - protein, 479 aa, Unknown
  Description of Unknown: Integrase B7069 sequence
  PTHR30461:SF3,SM00857,IPR006118,G3DSA:1.10.10.2600,IPR036162, PS51737,G3DSA:3.40.50.1390,Coil,IPR006119,IPR038109, PF07508,IPR011109,SSF53041,PTHR30461,PS00397, PS51736,cd00338,PF00239
MDDLKIAAAYIRVSTDDQTELSPDSQIKVVREFAKQKGYLIPKEYIFRDDGISGRKASKRPEFNHMIAVAKQTPSPFSAIMVWKFSRFARNQEEAIFYKGMLKKRGIDVISTSEPIIDGPFGSLIERIIEWFDEYYSINLSTEVKRGMTEKVSRGGAVSIPAFGYDIVDKKYQVNPINAPIVQRIFIKYLNGVGCRAIANELNDLGIKTTRGNNWENRTIEYILRNPVYIGKIRWNPKRRTRRNYDDKDIMIVDGIHQPIIDTDLFDKVQKKLDENKSKYRPYITDRRNGKEYMLKGLVKCSNCGATMSMSCNGLQCIKYTHGTCKVSHYIQLNKLNEVVINAIDDTLKSGDFQLKPKEQPHEEPQELNIDFMIEKENTKLRRIKEAYEEGVYNLAEFKQRKELIESKIHSLQKQNKPPEPKSDHLLAKKKLMSRRKEIISTLKSKSTPEVEKNALLCTFIDKIIFNRSLSSVELFFCF

SEQ ID NO: 7069 - protein, 479 aa, Unknown
  Description of Unknown: Integrase B7070 sequence
  PTHR30461:SF3,IPR036162,PS51737,IPR011109,PTHR30461, PS00397,PF00239,G3DSA:1.10.10.2600,IPR006119,SSF53041, SM00857,IPR025827,IPR038109,PS51736,cd03768, IPR006118,PF13408,G3DSA:3.40.50.1390,PF07508,Coil
MPKVAIYARVSTLNQAEEGYSIEGQLASLRKYCSALDWQIYQEYVDPGFSGGSLNRPAIQKLIVDAKSHRFDIVLIYKLDRLSRSVQDTLYLVKDIFDKNKISFVSLNEKIDTSSPMGNLFLTLLASIAEFEREQIKERMMMGKVGRAKSGKAMGWSKVPFGYTYDKQTGIYQINTLQAQIVKRIYRDYLDGVSITKLVDLLNAEGHIAKDRPWTYRTVRQALDNVVYTGRQFYQGNVYPGQHEAIISIEDYDKTQAELKRRQLTNAQKFNPRPFRAKYMLSGLLRCSVCGSSMMVQTRYLKYADDYHYYRCVSSIRKRIRFSYRQDTELCQNRSDYLKDDLENAIIKTIRHLQLHPDQMPVNTVKFDDKPLKDEINRINDKLNKLVDLYLNSNGISIGIINQKRDELLQQKEALENKLQERKPKQPELDPKKALLLLSKKNILELPYEEQVKLVKSLISKIEVSPSKMKIHWRFNVEK

SEQ ID NO: 7070 - protein, 479 aa, Unknown
  Description of Unknown: Integrase B7071 sequence
  PTHR30461:SF3,IPR036162,PS51737,IPR011109,PTHR30461, PS00397,PF00239,G3DSA:1.10.10.2600,IPR006119,SSF53041, cd00338,SM00857,IPR025827,IPR038109,PS51736, IPR006118,PF13408,G3DSA:3.40.50.1390,PF07508
MKTAACYIRVSTDDQTEYSPDSQLKIIRDYAFKHEISLIENYIFAEDGGKSGKNMTNRTQFMRLISLTKKKPKPFDIILVWKFSRFARNQEESIVLKSMLHKNGIEVISVSESLPEGPFGSLVERIIEWSDEYYLINLAQEVKRGMKERASRGQPVCPPPIGYSMENGNYVPNDDAQFVKNVFADYLAGLGVRTIAIKYGKLGLKTTRGNAPDNRFIEYMLRNPVYIGKIRWSIDGRAASRRNYDDPNIMIADGNHEPLISEEDFNAVQKKIDETKQLYRKYQRSEQPVEYMLKGLVHCSACGSTLVRINGGKKPGLQCHNYGRGNCHVSHSVRLEKATNAIIEGIENSLRTGNFNIAPPKRLETESTVDYDKLLANEQIKLERVKTAYRDGIDTLEEYKHNKEQIYTFIEKIKTEQAEARSLSAPIGKEEFRKKAANVLKIIKDPKQPENAKNIALRSIVERIVYQKSQNAFEIYFYV

SEQ ID NO: 7071 - protein, 479 aa, Unknown
  Description of Unknown: Integrase B7072 sequence
  IPR036162,PS51737,IPR011109,PTHR30461,PS00397, PF00239,G3DSA:1.10.10.2600,IPR006119,SSF53041,SM00857, IPR025827,IPR038109,PS51736,cd03768,IPR006118, PF13408,G3DSA:3.40.50.1390,PF07508,Coil
MPKVAIYARVSTLNQAEEGYSIEGQLASLRKYCSALDWQIYQEYVDPGFSGGSLNRPAIQKLIVDAKSHRFDIVLIYKLDRLSRSVQDTLYLVKDIFDKNKISFVSLNEKIDTSSPMGNLFLTLLASIAEFEREQIKERMMMGKVGRAKSGKAMGWSKVPFGYTYDKQTGIYQINTLQAQIVKRIYRDYLDGVSITKLVDLLNAEGHITKDRPWTYRTVRQALDNVVYTGRQFYQGNVYPGQHEAIISIEDYDKTQAELKRRQLTNAQKFNPRPFRAKYMLSGLLRCSFCGSSMMVQTRYLKYADDYHYYRCVSSIRKRIRFSYRQDTELCQNRSDYLKDDLESAIIKTIRHLQLHPDQMPVNTVKFDDKSLKDELNRINDKLNKLVDLYLNSNGISIGIINQKRDELLQQKEALENKLQERKPKQPELDPKKALLLLSKKNILELPYKEQVKLVKSLISKIEVSPSKMKIHWRFNVEK

SEQ ID NO: 7072 - protein, 479 aa, Unknown
  Description of Unknown: Integrase B7073 sequence
  PTHR30461:SF3,cd00338,SM00857,IPR006118,G3DSA:1.10.10.2600, IPR036162,PS51737,G3DSA:3.40.50.1390,IPR006119,IPR038109, PF07508,IPR011109,SSF53041,PTHR30461,PS00397, PS51736,Coil,PF00239
MEKELKTAAAYIRVSTDRQTELSPDSQLRIIKEYAKQNGYNIPSEYIFREDGLSGKYVKKRPQFIEMIGLAKQNPAPFSAILVWKFSRFARNQEESIVYKSMLKKNDVSVISCSETLDEENPFSSLIERIIEWMDEYYSIRLSGEVLRGMSEKVKRGQPVTIPSFGYDIVDKQYVIDEEKAVIVRKIFTDYIDGKSSMQIASELNEIGVKTTRGNPFENRTIDYILKNPVYIGKIRWNQNGKTDYRYSNNKDIVYTQGVHKSIVSDEIFYKVQNLIETNGRKQRKGIHNNIKQEYMLHGLIKCSNCGSALAYSNKGLQCIKYSKSICKQSHYISLTNINNLVILGLEQVFENKDFKLSVKSLSQTVADCIDYTNLIEKENQKIQRIKNAYLEGIYTVEEVKEYKKSVEDKIKNLSSRQVQLKQEKTKPRKENVKEKKNFLATLKSPAISEKEKNEILKGFVDCIVFNRSTSSVDIFLYI

SEQ ID NO: 7073 - protein, 479 aa, Unknown
  Description of Unknown: Integrase B7074 sequence
  PTHR30461:SF3,IPR036162,PS51737,IPR011109,PTHR30461, PS00397,PF00239,G3DSA:1.10.10.2600,IPR006119,SSF53041, cd00338,SM00857,IPR025827,IPR038109,PS51736, IPR006118,PF13408,G3DSA:3.40.50.1390,PF07508,Coil
MKTAACYIRVSTDDQTEYSPDSQLKIVRDYAFKHDISLVEKYIFAEDGGKSGKNMTNRTEFMRLISLTKKKPKPFDAILVWKFSRFARNQEESIVLKSMLHKNGIDVISVSEALPEGPFGSLVERIIEWSDEYYLINLAQEVKRGMKERASRGQPVCPPPIGYSMDNGKYVPNADAQFVKNVFADYLAGLGLRAIAIKYGNLGLKTTRGNAPDNRFIEYMLRNPVYIGKIRWSVDGRAASRRVYDDPNIMISDGNHEPIISEEVFNEVQKRIGETKRLYKKYQRPDQPMEYMLKGLVRCSACGSTLTRVITGSAPGLQCHNYSRGSCHVSHSIRISKANDAIIAGLESSIETGNFNIVPPKINNAESTIDYDKLLANEQLRLERVKAAYQNGIDTLEEYKRNKEQIYAFMEKIKAEMEANGTRAAAADNAGFRQKAANVLKIIKDPSQPESAKNIALRSIVERIVFKKPENEFDIFFYV

SEQ ID NO: 7074 - protein, 479 aa, Unknown
  Description of Unknown: Integrase B7075 sequence
  PTHR30461:SF3,cd00338,SM00857,G3DSA:1.10.10.2600,IPR036162, PF13408,IPR025827,G3DSA:3.40.50.1390,PS51737,IPR006119, IPR038109,PF07508,SSF53041,IPR011109,PTHR30461, PS51736,Coil,PF00239
MSNAVIYARYSSDKQSEESIEAQLRACRQYAATRGYNIVAVYADEAISGKGSMTASRAQYQRMLRDCNKGTFDTILIHKYDRVARSLGEHVNLDARLQKMGITLIAVGQDFGFGPESKIMRALMWSMSEYYIDNLANETKKGEREIALKGLHNGGYPPFGYDIVDQKYVINPYEAEYVRKIFAAVKNREGTKDIIAEMAAVGIVGKRGKPLTYSAVYEILRNEKYTGTYIYCVDEEKDRSKRRSKPNAIRIENALPMIIDKATFDEVQKIMDSRKQSGPKTSYLCSGLVYCSCGAKMHAHISTKKGHVYHYYRCSKKCGAPMISMDIVDDAAKTYLRTLLNEENQKAIATAMRKYKCGEPERAADFKKIVASKISEKQKQYDTLMTNMSSGVLPADVIEDIGAKMNQLRSEIEALKKTEMPKDYTTDQISLWLKALHDSPDDKAIRLLISRIDIKNTTEINIQSTLTSVVGTIGCGSWI

SEQ ID NO: 7075 - protein, 479 aa, Unknown
  Description of Unknown: Integrase B7076 sequence
  SM00857,G3DSA:1.10.10.2600,IPR036162,PF13408,PS51737, G3DSA:3.40.50.1390,IPR025827,IPR006119,IPR038109,PF07508, IPR011109,SSF53041,PTHR30461,Coil,PS51736, cd00338,PF00239
MRGVIYARYSPGPHQTEQSIEGQVADCQQYAEEHGIDIIEIYADRHVSGKSVVGRDEFQRMLRDAEKGRFDCVLVWKIDRFGRDRQDIAMGKMTLKRAGVKLMYARESVPEGPEGIILESVLEGLAEYYSADLRQKVIRGMKETAKKGQYCGQPLPIGYKVDSQRHVVIDEREAAAVREAFKMHIAGAQLRDIVQMFAERGIMGRRGKPVSNAVVYRMLRNEKYLGEFYIQDVKLNVEPIIDQATFLEAARHFKTSRNNAAGRAKVNYLLSCKTFCGYCGSMISAEAGTGKLGKVYRYYKCGDKKRGKKCELKPFPKDHLEDAIILATVNDMLTDEMIEKLTVRILEVQEQENADDPVVGLRRRLDSNKKRQRNLLDAIEEGGARGLVSRLAALEEEEERLVLEIQRAEIKRPRLTHEVVEAWLRSFRVGDVTDDDFRARLVDTFIARVELRNDEALIFYNIREKGPHSRVRVRPEWWT

SEQ ID NO: 7076 - protein, 479 aa, Unknown
  Description of Unknown: Integrase B7077 sequence
  PTHR30461:SF3,SM00857,G3DSA:1.10.10.2600,IPR036162,PS51737, G3DSA:3.40.50.1390,IPR006119,IPR038109,PF07508,SSF53041, IPR011109,PF00239,PTHR30461,PS51736,Coil, cd00338
MPKTAVIYARFSCNKQREASIDDQLRICRQWCQREKYAIVAEYCDYAISGRTDDRPEFQRMVANAGESDIVLVYMMDRFSRGEYDAPIYKRELAQHGVKLVSALEQIPDSPEGIIYEKLLEGLAACESKKTAIRTRRGMEGNALKCKTNGVRVFGYASNEADEYVIDEDEAAFVREAFKRRIAKETTNSIARDFAARGVKTSQGNPCGYSMVERMVKNRKYTGRYEWGGVVKEGGMPAIIDEVTFMEAQGIRAAKERSAESWGDFALSGKAICAGCGRNLQGVSGRGRGNRKYEYYRCHDGCVKPVRREELEGEIVKALRALLQDREEALRIARMVAESSDGAEVAARRKQAAQSLSAAERGLKNILNAIEQGIIAPGAKERIAELEHQRDRAKLDLEAIRDDQIDPERLADFLQCGSALDDATLLKAFVYQASVSDEECIVTLNYDVENNEPARLDIQRVRTKCKWCPRADSNRRHPL

SEQ ID NO: 7077 - protein, 479 aa, Unknown
  Description of Unknown: Integrase B7078 sequence
  PTHR30461:SF3,SM00857,IPR006118,G3DSA:1.10.10.2600,IPR036162, PS51737,G3DSA:3.40.50.1390,Coil,IPR006119,IPR038109, PF07508,IPR011109,SSF53041,PTHR30461,PS00397, PS51736,cd00338,PF00239
MDNLKIAAAYIRVSTDDQTELSPDSQIKVVREFAKQKGYLIPKEYIFRDDGISGRKASKRPEFNHMIAVAKQTPSPFSAIMVWKFSRFARNQEEAIFYKGMLKKRGIDVISTSEPIIDGPFGSLIERIIEWFDEYYSINLSTEVKRGMTEKVSRGGAVSIPAFGYDIVDKKYQVNPINAPIVQRIFIKYLNGVGCRAIANELNDLGIKTTRGNNWENRTIEYILRNPVYIGKIRWNPKRRTRRNYDDKDIMIVDGIHQPIIDTDLFDKVQKKLDENKAKYRPYITDRQNGKEYMLKGLVKCSNCGATMSMSCNGLQCIKYTHGTCKVSHYIQLNKLNEVVINAIDDTLKSGDFQLKPKEQPHEEPQELNIDFMIEKENTKLRRIKEAYEEGVYNLAEFKQRKELIESKIHSLQKQNKPPEPKPDHLLAKKKLMSRRKEIISTLKSKSTPEVEKNALLCTFIDKIIFNRSLSSVELFFCF

SEQ ID NO: 7078 - protein, 479 aa, Unknown
  Description of Unknown: Integrase B7079 sequence
  PTHR30461:SF3,SM00857,IPR006118,G3DSA:1.10.10.2600,IPR036162, PS51737,G3DSA:3.40.50.1390,Coil,IPR006119,IPR038109, PF07508,IPR011109,SSF53041,PTHR30461,PS00397, PS51736,cd00338,PF00239
MDDLKIAAAYIRVSTDDQTELSPDSQIKVVREFAKQKGYLIPKEYIFRDDGISGRKASKRPEFNHMIAVAKQTPSPFSAIMVWKFSRFARNQEEAIFYKGMLKKRGIDVISTSEPIIDGPFGSLIERIIEWFDEYYSINLSTEVKRGMTEKVSRGGAVSIPAFGYDIVDKKYQVSPINAPIVQRIFIKYLNGVGCRAIANELNDLGIKTTRGNNWENRTIEYILRNPVYIGKIRWNPKRRTRRNYDDKDIMIVDGIHQPIIDTDLFDKVQKKLDENKAKYRPYITDRQNGKEYMLKGLVKCSNCGATLSLACNSLQCIKYAHGTCNVSHSIQVNRLNEVVINAIDDTLKSGDFQLKPKEQPHEEPQELNIDFMIEKENTKLRRIKEAYEEGVYNLAEFKQRKELIESKIHSLQKQNKPPEPKPDHLLAKKKLMSRRKEIISTLKSKSTPEVEKNALLCTFIDKIIFNRSLSSVELFFCF

SEQ ID NO: 7079 - protein, 479 aa, Unknown
  Description of Unknown: Integrase B7080 sequence
  PTHR30461:SF3,SM00857,IPR006118,G3DSA:1.10.10.2600,IPR036162, PS51737,G3DSA:3.40.50.1390,PS00397,IPR006119,IPR038109, PF07508,IPR011109,SSF53041,PTHR30461,Coil, PS51736,cd00338,PF00239
MDDLKIAAAYIRVSTDDQTELSPDSQIKVVREFAKQKGYLIPKEYIFRDDGISGRKASKRPEFNHMIAVAKQTPSPFSAIMVWKFSRFARNQEEAIFYKGMLKKRGIDVISTSEPIIDGPFGSLIERIIEWFDEYYSINLSTEVKRGMTEKVSRGGAVSIPAFGYDIVDKKYQVNPINAPIVQRIFIKYLNGVGCRAIANELNDLGIKTTRGNNWENRTIEYILRNPVYIGKIRWNPKRRTRRNYDDKDIMIVDGIHQPIIDTDLFDKVQKKLDENKAKYRPYITDRQNGKEYMLKGLVKCSNCGATLSLACNSLQCIKYAHGTCNVSHSIQVNRLNEVVINAIDDTLKSGDFQLKPKEQPHEEPQELNIDFMIEKENTKLRRIKEAYEEGVYNLAEFKQRKELIESKIHSLQKQNKPPEPKPDHLLAKKKLMSRRKEIISTLKSKSTPEVEKNALLCTFIDKIIFNRSLSSVELFFCF

SEQ ID NO: 7080 - protein, 479 aa, Unknown
  Description of Unknown: Integrase B7081 sequence
  PTHR30461:SF3,cd00338,SM00857,IPR006118,G3DSA:1.10.10.2600, IPR036162,PS51737,G3DSA:3.40.50.1390,IPR006119,IPR038109, PF07508,SSF53041,IPR011109,PTHR30461,PS00397, PS51736,Coil,PF00239
MEKELKTAAAYIRVSTDRQTELSPDSQLRIIKEYAKRNGYNIPSEYIFREDGLSGKYVKKRPQFIEMIGLAKQKPAPFSTILVWKFSRFARNQEESIVYKSMLKKNDVSVISCSETLDEENPFSSLIERIIEWMDEYYSIRLSGEVLRGMSEKVKRGQPVTIPSFGYDIVDKQYVINEEKAAIVRKIFTDYIDGKNSMQIASELNEIGVKTTRGNPFENRTIDYILKNPVYIGKIRWNQNGKTDYRYSNNKDIVYTQGVHKSIVSDEIFYKVQNLIETNGRKQRKGIHNHIKQEYMLHGLIKCSNCGSALAYSNKGLQCIKYSKSICKQSHYISLTNINNLVILGLEQVFENKDFKLSVKSLSQTVADCIDYTNLIEKENQKIQRIKNAYLEGIYTVEEVKEYKKSVEDKIKNLSSRQVQLKQEKTKPRKENVKEKKNFLSTLKSPAISEKEKNEILKGFVDRIVFNRSTSSVDIFLYI

SEQ ID NO: 7081 - protein, 479 aa, Unknown
  Description of Unknown: Integrase B7082 sequence
  IPR036162,PS51737,IPR011109,PTHR30461,PS00397, PF00239,G3DSA:1.10.10.2600,IPR006119,SSF53041,SM00857, IPR025827,IPR038109,PS51736,cd03768,IPR006118, PF13408,G3DSA:3.40.50.1390,PF07508,Coil
MPKVAIYARVSTLNQAEEGYSIEGQLASLRKYCSALDWQIYQEYVDPGFSGGSLNRPAIQKLIVDAKSHRFDIVLIYKLDRLSRSVQDTLYLVKDIFDKNKISFVSLNEKIDTSSPMGNLFLTLLASIAEFEREQIKERMMMGKVGRAKSGKAMGWSKVPFGYTYDKQTGIYQINTLQAQIVKRIYRDYLDGVSITKLVDLLNAEGHITKDRPWTYRTVRQALDNVVYTGRQFYQGNVYPGQHEAIISIEDYDKTQAELKRRQLTNAQKFNPRPFRAKYMLSGLLYCSVCGSSMMVQTRYLKYADDYHYYRCVSSIRKRIRFSYRQDTELCQNRSNYLKDDLESAIIKTIRHLQLHPDQMPVDTVKFDDKPLKDELNRINDKLNKLVDLYLNSNGISIGIINQKREELLQQKEALENKLQERKPKQPELDPKKALLLLSKKNILELPYEEQVKLVKSLISKIEVSPSKMKIHWRFNVEK

SEQ ID NO: 7082 - protein, 479 aa, Unknown
  Description of Unknown: Integrase B7083 sequence
  PTHR30461:SF3,SM00857,IPR006118,G3DSA:1.10.10.2600,IPR036162, PS51737,G3DSA:3.40.50.1390,Coil,IPR006119,IPR038109, PF07508,IPR011109,SSF53041,PTHR30461,PS00397, PS51736,cd00338,PF00239
MDDLKIAAAYIRVSTDDQTELSPDSQIKVVREFAKQKGYLIPKEYIFRDDGISGRKASKRPEFNHMIAVAKQTPSPFSAIMVWKFSRFARNQEEAIFYKGMLKKRGIDVISTSEPIIDGPFGSLIERIIEWFDEYYSINLSTEVKRGMTEKVSRGGAVSIPAFGYDIVDKKYQVNPINAPIVQRIFIKYLNGVGCRAIANELNDLGIKTTRGNNWENRTIEYILRNPVYIGKIRWNPKRRTRRNYDDKDIMIVDGIHQTIIDTDLFDKVQKKLDENKAKYRPYITDRQNGKEYMLKGLVKCSNCGATMSMSCNGLQCIKYTHGTCKVSHYIQLNKLNEVVINAIDDTLKSGDFQLKPKEQPHEEPQELNIDFMIEKENTKLRRIKEAYEEGVYNLAEFKQRKELIESKIHSLQKQNKPPEPKSDHLLAKKKLMSRRKEIISTLKSKSTPEVEKNALLCTFIDKIIFNRSLSSVELFFCF

SEQ ID NO: 7083 - protein, 479 aa, Unknown
  Description of Unknown: Integrase B7084 sequence
  SM00857,G3DSA:1.10.10.2600,IPR036162,PF13408,PS51737, IPR025827,G3DSA:3.40.50.1390,IPR006119,IPR038109,PF07508, IPR011109,SSF53041,PTHR30461,Coil,PS51736, cd00338,PF00239
MLNEYRCNFKSSCSLYSCQVSTEDQAELSPDAQKRLLLDYAQKNDMIVSGDFIFTESVSGRHAQKRPEFQKMIALAKQPSHPIDVILVWKFSRFARNQEESIVYKSMLKKDNVDVISVSEPLIEGPFGSLIERIIEWMDEYYSIRLSGEVLRGMKEKALQKGYQTSPCLGYTAVGHGKPYIINEAEYAIVSYIMDLYDNQNLDETAIARRCNDLGYRTKRGKLFERRSVDRILGNPFYCGTVVWNGVEFEGNHEVRLSRERYEKRQKLITSRKRPVKARNVSACKHWLSGLLKCSVCGATLSYTGNNKCPYFQCWKYAKGFHKTSVALSVKKAEEAVISYFDQILDGAEFTYVCKKKKTDHSLQIEQLQKGIGKLTMRESRIKEAYEAGVDTLEEYKNNKDRLVSDRLELTAALSQLLQEEQAEQPDTEKILKEIRSVADVLKNPDVGYEEKGNLIRSVVEQIIYDKESGKMSFDIIIS

SEQ ID NO: 7084 - protein, 479 aa, Unknown
  Description of Unknown: Integrase B7085 sequence
  PTHR30461:SF3,IPR036162,PS51737,IPR011109,PTHR30461, PS00397,PF00239,G3DSA:1.10.10.2600,IPR006119,SSF53041, SM00857,IPR025827,IPR038109,PS51736,cd03768, IPR006118,PF13408,G3DSA:3.40.50.1390,PF07508,Coil
MQNKVAIYVRVSTTSQVEEGYSIDEQKAKLSSYCDIKDWNVYKIYTDGGFSGANTDRPALEGLIKDAKRKKFDTVLVYKLDRLSRSQKDTLYLIEDIFIKNNIAFLSLQENFDTSTPFGKAMIGLLSVFAQLEREQIKERMQLGKIGRAKAGKSMMWAKTSYGYDYHRETGTITINPAQALAVKFIFESYLRGRSITKLRDDLNEKFPKGIDWSYRAVRAILDNPVYCGFNQFKGEVYPGNHEPIITEEVYNKTKEELKIRQRTAAENVNPRPFQAKYILSGIAQCGYCGAPLKIMLGVKRKDGSRLKKYECHQRHPRTLRGVTTYNDNKKCDSGFYYKDKLEAYVLEEISKLQDNADYLDKIFSGDNAETIDRESYKRQIEELSKKLSRLNDLYIDDRITLEELQSKSAEFISMRATLETELENDPALRKDKRKADMRKLLNAEKVFSMDYESQKVLVRGLINKVQVTAEDIVINWKI

SEQ ID NO: 7085 - protein, 479 aa, Unknown
  Description of Unknown: Integrase B7086 sequence
  PTHR30461:SF3,SM00857,G3DSA:1.10.10.2600,IPR036162,PF13408, IPR025827,PS51737,G3DSA:3.40.50.1390,IPR006119,IPR038109, PF07508,SSF53041,IPR011109,PTHR30461,Coil, PS51736,cd00338,PF00239
MSNAVIYARYSSDKQSEESIEAQLRACRQYAATKGYNIVAVYADEAISGKGSMTASRAQYQKMLRDCNKGTFDTILIHKYDRVARSLSEHVNLDTRLQKMGVTLIAVGQDFGLGPESKIMRALMWSMSEYYIDNLANETKKGEREIALKGLHNGGYPPFGYDIVDQKYVINPYEAEYVRKIFAAVKNHEGTKDIIAEMAAVGIVGKRGKPLKYSAVYEILRNEKYTGTYIYCVDEEKDRSKRRSKPNAIRIENALPMIIDKATFDEVQKIMDSRKQSGPKTSYLCSGLVYCSCGAKMHAHISTKKGHVYHYYRCSKKCGAPMISMDIVDDAAKTYLRTLLNEENQKAIATAMRKYKCGEPERAADFKKIVASKISEKQKQYDTLMTNMSSGVLPADVIEDIGAKMNQLRSEIEALKKTEMPKDYTTDQISLWLKALHDSPDDKAIRLLISRIDIKNTTEINIQSTLTSVVGTIGCGSWI

SEQ ID NO: 7086 - protein, 479 aa, Unknown
  Description of Unknown: Integrase B7087 sequence
  PTHR30461:SF3,IPR036162,PS51737,IPR011109,PTHR30461, PS00397,PF00239,G3DSA:1.10.10.2600,IPR006119,SSF53041, cd00338,SM00857,IPR025827,IPR038109,PS51736, IPR006118,PF13408,G3DSA:3.40.50.1390,PF07508,Coil
MIRKVAIYVRVSTTNQAEEGYSIDGQIDSLEKYCEAMGWDVYNKYIDAGFSGGSLKRPEMANLINDVKKGLFDTVLVYKLDRLSRNVRDTLYLIKDVFNINKIDFVSIQENIDTSSAMGTLFLTLLSAIAEFEREQIKERMQLGKLGRAKSGKSMQWAKTSFGYDYIKETGTLSVNPYQALIVRKMFEWYLSGMSITKLRDALNKQYGQDKEWSYRTVRVILSNPVYCGYNQFKGQIFPGTHEPIISEEDFNKTQEEIKTRQRTAAERFNPRPFQAKYMLSGIAQCGYCSAPLAIKLGMVRKDGTRLVKYECKQRHPRKTKGVTVYNNNAKCDSGFYFKDDIEHFVLTEISKLQTDSSYIDKLFSNTNQETIDRDSYQKQIDNLTAKISRLNDLYIDDRISLEELQKRSSDFMAKRTALEKELDADSSIKTVERKKDIRRVLDTKDIFTLDYEQQKVIARALISKVRVTSESIVILWKL

SEQ ID NO: 7087 - protein, 479 aa, Unknown
  Description of Unknown: Integrase B7088 sequence
  PTHR30461:SF3,cd00338,SM00857,G3DSA:1.10.10.2600,IPR036162, PS51737,G3DSA:3.40.50.1390,IPR006119,IPR038109,PF07508, IPR011109,SSF53041,PTHR30461,PS51736,Coil, PF00239
MPKTAVIYARFSCNKQREASIDDQLRICRQWCQRERYAIVAEYCDYAISGRTDDRPEFQRMVANAGESDIVLVYMMDRFSRGEYDAPIYKRELAQHGVKLVSALEQIPDSPEGIIYEKLLEGLAACESKKTAIRTRRGMEGNALKCKTNGVRVFGYASNEADEYVVNEDEAAFVREAFKRRIAKETTNSIARDFAARGVKTSQGNPCGYSMVERMVKNRKYTGRYEWGGVVKEGGMPAIIDEVTFMEAQGIRAAKERSAESWGDFALSGKAICAGCGRNLQGVSGRGRKNVKYEYYRCHDGCVRPVRREELEGEIVKALRALLQDREEALRIAHMVAESSDGAEVAARRKQAAQSLSAAERGLKNILNAIEQGIIAPGAKERIAELEHQRDRAKLDLEAIRDDQIDPERLADFLQCGSALDDATLLKAFVYQVSVSDEECIVTLNYDVESNEPARLDVQRVRTKCKWCPQRDSNPRYPP

SEQ ID NO: 7088 - protein, 479 aa, Unknown
  Description of Unknown: Integrase B7089 sequence
  SM00857,G3DSA:1.10.10.2600,IPR036162,PF13408,IPR025827, G3DSA:3.40.50.1390,PS51737,IPR006119,IPR038109,PF07508, SSF53041,IPR011109,PTHR30461,Coil,PS51736, cd00338,PF00239
MRGVIYARYSPGPHQTEQSIEGQVADCQQYAEEHGIDIIEIYADRHVSGKSVVGRDEFQRMLRDAEKGRFDCVLVWKIDRFGRDRQDIAMGKMTLRRAGVKLMYARESVPDGPEGIILESVLEGLAEYYSADLRQKVIRGMKETAKKGQYCGQPLPIGYKVDAERHVVIDEREAAAVRDAFKMHIAGAQLRDIVQMFADHGVMGRRGKPVSNAVVYRMLRNEKYLGEFYIQDVKLNVEPIIDQATFLEAARHFKTSRNNAAGRAKVNYLLSCKMFCGYCGSMISAEAGTGKLGKVYRYYKCGDKKRGKKCELKPFPKDHLEDAIILATVNDMLTDEMIEKLTVRILEVQEQENADDPVVGLRRRLDSNKKRQRNLLDAIEEGGARGLVSRLAALEEEEEQLVLEIQRAEIKRPRLTHEVVEAWLRSFRVGDVTDDDFRARLVDTFIARVELRNDEALIFYNIREKGPHSRVRVRPEWWR

SEQ ID NO: 7089 - protein, 479 aa, Unknown
  Description of Unknown: Integrase B7090 sequence
  PTHR30461:SF3,cd00338,SM00857,IPR006118,G3DSA:1.10.10.2600, IPR036162,PS51737,G3DSA:3.40.50.1390,IPR006119,IPR038109, PF07508,IPR011109,SSF53041,PTHR30461,PS00397, PS51736,Coil,PF00239
MEKELKTAAAYIRVSTDRQTELSPDSQLRIIKEYAKQNGYNIPSEYIFREDGLSGKYVKKRPQFIEMIGLAKQKPAPFSAILVWKFSRFARNQEESIVYKSMLKKNDVSVISCSETLDEENPFSSLIERIIEWMDEYYSIRLSGEVLRGMSEKVKRGQPVTIPSFGYDIVDKQYVINEEKATIVRKIFTDYIDGKNCMQIASELNEIGVKTTRGNPFENRTIDYILKNPVYIGKIRWNQNGKTDYRYSNNKDIVYTQGVHKSIVSDEIFYKVQNLIETNGHKQRKGIHNNIKQEYMLHGLIKCSNCGSALAYSNKGLQCIKYSKSICKQSHYISLTNINNLVILGLEQVFENKDFKLSVKSLYQTVADCIDYTNLIEKENQKIQRIKNAYLEGIYTVEEVKEYKKSVEDKIKNLSSRQVQLKQEKTKPRKENVKEKKNFLATLKSPAISEKEKNEILKGFVDCIVFNRSTSSVDIFLYI

SEQ ID NO: 7090 - protein, 479 aa, Unknown
  Description of Unknown: Integrase B7091 sequence
  PTHR30461:SF3,IPR036162,PS51737,IPR011109,PTHR30461, PS00397,PF00239,G3DSA:1.10.10.2600,IPR006119,SSF53041, SM00857,IPR025827,IPR038109,PS51736,cd03768, IPR006118,PF13408,G3DSA:3.40.50.1390,PF07508,Coil
MPKVAIYARVSTLNQAEEGYSIEGQLASLRKYCSALDWQIYQEYVDPGFSGGSLNRPAIQKLIVDAKSHRFDIVLIYKLDRLSRSVQDTLYLVKDIFDKNKISFVSLNEKIDTSSPMGNLFLTLLASIAEFEREQIKERMMMGKVGRAKSGKAMGWSKVPFGYTYDKQTGIYQINTLQAQIVKRIYRDYLDGVSITKLVDLLNAEGHIAKDRPWTYRTVRQALDNVVYTGRQFYQGNVYPGQHEAIISIEDYDKTQAELKRRQLTNAQKFNPRPFRAKYMLSGLLRCSVCGSSMMVQTRYLKYADDYHYYRCVSSIRKRIRFSYRQDTELCQNRSDYLKDDLENAIIKTIRHLQLHPDQMPVNTVKFDDKPLKDEINRINDKLNKLVDLYLNSNGISIGIINQKRDELLQQKEALENKLQERKPKQPELDPKKALLLLSKKNILELPYEEQVKLVKFLISKIEVSPSKMKIHWRFNVEK

SEQ ID NO: 7091 - protein, 479 aa, Unknown
  Description of Unknown: Integrase B7092 sequence
  PTHR30461:SF3,SM00857,IPR006118,G3DSA:1.10.10.2600,IPR036162, PS51737,PS00397,G3DSA:3.40.50.1390,IPR006119,IPR038109, PF07508,IPR011109,SSF53041,PTHR30461,Coil, PS51736,cd00338,PF00239
MDDLKIAAAYIRVSTDDQTELSPDSQIKVVREFAKQKGYLIPKEYIFRDDGISGRKASKRPEFNHMIAVAKQTPSPFSAIMVWKFSRFARNQEEAIFYKGMLKKRGIDVISTSEPIIDGPFGSLIERIIEWFDEYYSINLSTEVKRGMTEKVSRGGAVSIPAFGYDIVDKKYQVNPINAPIVQRIFIKYLNGVGCRAIANELNDLGIKTTRGNNWENRTIEYILRNPVYIGKIRWNPKRRTRRNYDDKDIMIVDGIHQPIIDTDLFDKVQKKLDENKAKYRPYITDRQNGKDYMLKGLVKCSNCGATMSMSCNGLQCIKYTHGTCKVSHYIQLNKLNEVVINAIDDTLKSGDFQLKPKEQPHEEPQELNIDFMIEKENTKLRRIKEAYEEGVYNLAEFKQRKELIESKIHSLQKQNKPPEPKPDHLLAKKKLMNRRKEIISTLKSKSTPEVEKNTLLCTFIDKIIFNRSLSSVELFFCF

SEQ ID NO: 7092 - protein, 479 aa, Unknown
  Description of Unknown: Integrase B7093 sequence
  PTHR30461:SF3,SM00857,G3DSA:1.10.10.2600,IPR036162,PS51737, G3DSA:3.40.50.1390,IPR006119,IPR038109,PF07508,IPR011109, SSF53041,PTHR30461,Coil,PS51736,cd00338, PF00239
MPKTAVIYARFSCNKQREASIDDQLRICRQWCQREGYAVVAEYCDYAISGRTDDRPEFQRMIASAGESDIVLVYMMDRFSRGEYDAPIYKRELAQHGVKLVSALEQIPDSPEGIIYEKLLEGLAACESKKTAIRTRRGMEGNALKCKTNGVRVFGYTRNDADEYVIDEGEASFVREAFKRRIAKETTNSIARDFAARGVKTSNGNPCGYSMVERMVKNRKYTGRYEWGGIVKEGGMPAIVDEVTFMEAQGIRAAKERSAESWGDFALSGKAICAGCGRNLQGVSGRGRGNRKYEYYRCHDGCVKPVRREELEGEIVKALRALLQDRDEALRIAKMVAESSDGAEVAARRKQAARSLSAAERGLRNILNAIEQGIIAPGAKERIAELEYQRDRARLDLEAIRDEEIDPERLADFLQCGAALDDSTLMRAFVYQVSVSDDECIVTLNYDVENNEPARLDVQRVRTKCKWCPRADSNRRHPL

SEQ ID NO: 7093 - protein, 479 aa, Unknown
  Description of Unknown: Integrase B7094 sequence
  PTHR30461:SF3,cd00338,SM00857,IPR006118,G3DSA:1.10.10.2600, IPR036162,PS51737,G3DSA:3.40.50.1390,IPR006119,IPR038109, PF07508,SSF53041,IPR011109,PTHR30461,PS00397, PS51736,Coil,PF00239
MEKELKTAAAYIRVSTDRQTELSPDSQLRIIKEYAKQNGYNIPSEYIFREDGLSGKYVKKRPQFIEMIGLAKQNPAPFSTILVWKFSRFARNQEESIVYKSMLKKNDVSVISCSETLDEENPFSSLIERIIEWMDEYYSIRLSGEVLRGMSEKVKRGQPVTIPSFGYDIVDKQYVINEEKAAIVRKIFTDYIGGKNSMQIASELNEIGVKTTRGNPFENRTIDYILKNPVYIGKIRWNQNGKTDYRYSNNKDIVYTQGVHKSIVSDEIFYKVQNLIEANSRKQRKGIHNHIKQEYMLHGLIKCSNCGSALAYSNKGLQCIKYSKSICKQSHYISLTNINNLVILGLEQVFENKDFKLSVKSLSQTVADCIDYTNLIEKENQKIQRIKNAYLEGIYTVEEVKEYKKSVEDKIKNLSSRQVQLKQEKTKPRKENVKEKKNFLATLKSPAISEKEKNEILKGFVDCIVFNRSTSSVDIFLYI

SEQ ID NO: 7094 - protein, 479 aa, Unknown
  Description of Unknown: Integrase B7095 sequence
  PTHR30461:SF3,SM00857,IPR006118,G3DSA:1.10.10.2600,IPR036162, PS51737,G3DSA:3.40.50.1390,Coil,IPR006119,IPR038109, PF07508,SSF53041,IPR011109,PTHR30461,PS00397, PS51736,cd00338,PF00239
MDDLKMAAAYIRVSTDDQTELSPDSQIKVVREFAKQKGYLIPKEYIFRDDGISGRKASKRPEFNHMIAVAKQTPSPFSAIMVWKFSRFARNQEEAIFYKGMLKKRGIDVISTSEPIIDGPFGSLIERIIEWFDEYYSINLSTEVKRGMTEKVSRGGAVSIPAFGYDIVDKKYQVNPINAPIVQRIFIKYLNGVGCRAIANELNDLSIKTTRGNNWENRTIEYILRNPVYIGKIRWNPKRRTRRNYDDKDIMIVDGIHQPIIDTDLFDKVQKKLDENKAKYRPYITDRQNGKEYMLKGLVKCSNCGATMSMSCNGLQCIKYTHGTCKVSHYIQLNKLNEVVINAIDDTLKSGDFQLKPKEQPHEEPQELNIDFMIEKENTKLRRIKEAYEEGVYNLTEFKQRKESIESKIHSLQKQNKPPEPKPDHLLAKKKLMSRRKEIISTLKSKSTPEVEKNALLCTFIDKIIFNRSLSSVELFFCF

SEQ ID NO: 7095 - protein, 479 aa, Unknown
  Description of Unknown: Integrase B7096 sequence
  PTHR30461:SF3,SM00857,G3DSA:1.10.10.2600,IPR036162,PF13408, PS51737,G3DSA:3.40.50.1390,IPR025827,IPR006119,IPR038109, PF07508,IPR011109,SSF53041,PTHR30461,Coil, PS51736,cd00338,PF00239
MSKSKIYCLKYLYTITFSKGVIIMETIVKKAACYCRVSHEEQKLHGLSIEAQKEDLKQYCKRNNYKIYKFYIDEGLTAKNTKRQGLQNLLSDLDKDKFDIVLFTKLDRLSRNIIDANLLDEKFKNNNVCMKAIFEDDIDTSTADGKFTFNLKLSLAERELDKTSERIKDIFRYKIERNEVISGSVPKGYKIVDKKLAIDENTAWIVKKSFDLVEELMSARAAFIQINTVYNQPTSLRSFSKLLKNVIYTGTYKSKNYYKENYCEPIISLEQFNNVQRILKNNKQYTSNNRKETYIFSGLLRCSHCGYKIVGHYSNRSGKNVIKTYRCNRYSIYKDCDQKKSINEKKLEKVLLSCIVEEYKNYLYSFDVSSKKTNSIDVSQNKSKIQKKVDKLRELYLNDLISLEDYKKDYAIFTQALKEIESKEVTKVAPKDADKILSILDNIETIYYNLDATERKRFWSSFIDVITIDGNYNIDIKFL

SEQ ID NO: 7096 - protein, 479 aa, Unknown
  Description of Unknown: Integrase B7097 sequence
  PTHR30461:SF3,IPR036162,PS51737,IPR011109,PTHR30461, PS00397,PF00239,G3DSA:1.10.10.2600,IPR006119,SSF53041, cd00338,SM00857,IPR025827,IPR038109,PS51736, IPR006118,PF13408,G3DSA:3.40.50.1390,PF07508,Coil
MIRKVAIYARVSTMNQAEEGYSIDGQIDSLEKYCEAMGWDVYNKYIDAGFSGGSLKRPEMTNLIIDVKKGLFDTVLVYKLDRLSRNVRDTLYLIKDVFNINKIDFVSIQENIDTSSAMGTLFLTLLSAIAEFEREQIKERMQLGKLGRAKSGKSMQWAKTSYGYDYIKETGTLSVNPYQALIVRKMFEWYLSGMSITKLRDALNEQYGQDKEWNYRTVRVILSNPVYCGYNQFKGQMFPGTHEPIISEEDFNKTQEEIKTRQRTAAQRFNPRPFQAKYMLSGIAQCGYCPAPLAIKLGMKRKDGTRLVKYECKQRHPRKTKGVTVYNNNEKCDSGFYFKDDIEHFVLTEISKLQTDSDYIDKLFSNTDKETIDRDSYQKQIDKLTAKISRLNDLYIDDRISLEELQKRSSDFMAERTALEKELDADKSVKTVKRKKDIRRVLDTKDIFTLDYEQQKAIARALISKVRVTSESIVILWKL

SEQ ID NO: 7097 - protein, 479 aa, Unknown
  Description of Unknown: Integrase B7098 sequence
  PTHR30461:SF3,IPR036162,PS51737,IPR011109,PTHR30461, PS00397,PF00239,G3DSA:1.10.10.2600,IPR006119,SSF53041, cd00338,SM00857,IPR025827,IPR038109,PS51736, IPR006118,PF13408,G3DSA:3.40.50.1390,PF07508,Coil
MIRKVAIYVRVSTTNQAEEGYSIDGQIDSLEKYCEAMGWDVYNKYIDAGFSGGSLKRPEMANLINDVKKGLFDTVLVYKLDRLSRNVRDTLYLIKDVFNINKIDFVSIQENIDTSSAMGTLFLTLLSAIAEFEREQIKERMQLGKLGRAKSGKSMQWAKTSFGYDYIKETGTLSVNPYQALIVRKMFEWYLSGMSVTKLRDTLNEQYGQDKEWSYRTVRVILSNPVYCGYNQFKGQIFPGTHEAIISEDDFNKTQEEIKTRQRTAAQRFNPRPFQAKYMLSGIAQCGYCSAPLAIKLGMKRKDGTRLVKYECKQRHPRKTKGVTVYNNNEKCDSGFYFKDDIEHFVLTEISKLQTDSDYIDKLFSNTDKETIDRDSYQKQIDNLTAKISRLNDLYIDDRISLEELQKRSSDFMAKRAALEKELDTDTSLKAVERKEDVRRVLDTKDIFTLDYEQQKAIARALISKVRVTSESIVILWKL

SEQ ID NO: 7098 - protein, 479 aa, Unknown
  Description of Unknown: Integrase B7099 sequence
  IPR036162,PS51737,IPR011109,PTHR30461,PS00397, PF00239,G3DSA:1.10.10.2600,IPR006119,SSF53041,cd00338, SM00857,IPR025827,IPR038109,PS51736,IPR006118, PF13408,G3DSA:3.40.50.1390,PF07508,Coil
MSENDTKQLQTGALYIRVSTADQAELSPDAQKRLLLDYAKKNNIIISNDFIYMESVSGRRAQKRPEFQKMIATAKQESHPIDVILVWKYSRFARNQEESIVYKSMLKKDGVEVISVSEPLIDGPFGTLIERIIEWMDEYYSIRLSGEVLRGMKEKALKNGYQATPCLGYDAVGSGQPFVINEEEYRIIDYIMDQYDHYNVDATAIARKCNDLGYRTKRGNPFERRNIDFILRNPFYTGTVVWNGTEFEGAHEARLSKERYEERIRLMNARKRPAKHRNVSTCKHWLSGLLKCSICGSTLSYTGNQTCPYFQCWKYAKGFHKTSVSLSVKKAEEAVLEYFKKILDGADFSYVYKGEAPSEKDISQIESLQQELEHIAVKEQRVRAAYENEIDTLEEYRENRRRLSIQREELSNEIYRLESQQNNIEPSPQDVLKEIQTVYDIIQNSDITYETKGMFIRTVLDQIIYDKESGCLYFDIIIS

SEQ ID NO: 7099 - protein, 479 aa, Unknown
  Description of Unknown: Integrase B7100 sequence
  PTHR30461:SF3,IPR036162,PS51737,IPR011109,PTHR30461, PS00397,PF00239,G3DSA:1.10.10.2600,IPR006119,SSF53041, SM00857,IPR025827,IPR038109,PS51736,cd03768, IPR006118,PF13408,G3DSA:3.40.50.1390,PF07508,Coil
MIRKVAIYARVSTTNQAEEGYSIDGQIDSLEKYCEAMGWDVYNKYIDAGFSGGSLKRPEMANLINDVKKGLFDTVLVYKLDRLSRNVRDTLYLIKDVFNINKIDFVSIQENIDTSSAMGTLFLTLLSAIAEFEREQIKERMQLGKLGRAKSGKSMMWSKTSYGYDYVKETGTLSVNQYQALIVRKMFKWYLSGMSITKLRDALNEQYGQDKEWSYRTVRAILSNPVYCGYNQFKGQIFPGTHDPIISEEDFNKTQEEIKIMQRTAAQRFNPRPFQAKYMLSGIAQCGYCSAPLAVKLGMKRKDGTRLVKYECKQRHPRKTKGVTVYNNNEKCDSGFYFKDDIEHFVLTEISKLQTDSDYIDKLFSNTDKETIDRDSYQKQIDNLTAKISRLNDLYIDDRISLEELQKRSSDFIAERSALEKELDADSSSKTVERKKDIKRVLDTKDVLTLDYEQQKAIARALISKVRVTSESIVILWKL

SEQ ID NO: 7100 - protein, 479 aa, Unknown
  Description of Unknown: Integrase B7101 sequence
  PTHR30461:SF3,SM00857,G3DSA:1.10.10.2600,IPR036162,PF13408, IPR025827,PS51737,G3DSA:3.40.50.1390,IPR006119,IPR038109, PF07508,SSF53041,IPR011109,PF00239,PTHR30461, PS51736,Coil,cd00338
MSNAVIYARYSSDKQSEESIEAQLRACRQYAATRGYNIVAVYADEAISGKGSMTASRAQYQKMLRDCNKGTFDTILIHKYDRVARSLGEHVNLDTRLQKMGITLIAVGQDFGFGPESKIMRALMWSMSEYYIDNLANETKKGEREIALKGLHNGGYPPFGYDIVDQKYVINPYEAEYVRKIFAAVKNHEGTKDIIAEMAAVGIVGKRGKPLKYSAVYEILRNEKYTGTYIYCVDEEKDRSKRRSKPNAIRIENALPMIIDKATFDEVQKIMDSRKQSGPKTSYLCSGLVYCSCGAKMHAHISTKKGHVYHYYRCSKKCGAPMISMDIVDDAAKTYLRTLLNEENQKAIAKAMRKYKCGEPERAADFKKIVASKISEKQKQYDTLMTNMSSGVLPADVIEDIGAKMNQLRSEIEALKKTEMPKDYTTDQISLWLKALHDSPDDKAIRLLISRIDIKNTTEINIQSTLTSVVGTIGCGSWI

SEQ ID NO: 7101 - protein, 479 aa, Unknown
  Description of Unknown: Integrase B7102 sequence
  IPR036162,PS51737,IPR011109,PTHR30461,PS00397, PF00239,G3DSA:1.10.10.2600,IPR006119,SSF53041,SM00857, IPR025827,IPR038109,PS51736,cd03768,IPR006118, PF13408,G3DSA:3.40.50.1390,PF07508,Coil
MPKVAIYARVSTLNQAEEGYSIEGQLASLRKYCSALDWQIYQEYVDPGFSGGSLNRPAIQKLIEDAKSCRFDIVLIYKLDRLSRSVQDTLYLVKDIFDKNKISFVSLNEKIDTSSPMGNLFLTLLASIAEFEREQIKERMMMGKVGRAKSGKAMGWSKVPFGYTYDKQTGIYQINTLQAQIVKRIYRDYLDGVSITKLVDLLNAEGHITKDRPWTYRTVRQALDNVVYTGRQFYQGNVYPGQHEAIISIEDYDKTQAELKRRQLTNAQKFNPRPFRAKYMLSGLLHCSVCGSSMMVQTRYLKYADDYHYYRCVSSIRKRIRFSYRQDTELCQNRSNYLKDDLESAIIKTIRHLQLHPDQMPVDTVKFDDKPLKDELNRINDKLNKLVDLYLNSNGISIGIINQKREELLQQKEALENKLQERKPKQPELDPKKALLLLSKKNILELPYEEQVKLVKSLISKIEVSPSKMKIHWRFNAEK

SEQ ID NO: 7102 - protein, 479 aa, Unknown
  Description of Unknown: Integrase B7103 sequence
  PTHR30461:SF3,cd00338,SM00857,IPR006118,G3DSA:1.10.10.2600, IPR036162,PS51737,G3DSA:3.40.50.1390,IPR006119,IPR038109, PF07508,IPR011109,SSF53041,PTHR30461,PS00397, PS51736,Coil,PF00239
MEKELKTAAAYIRVSTDRQTELSPDSQLRIIKEYAKQNGYNIPSEYIFREDGLSGKYVKKRPQFIEMIGLAKQKPAPFSAILVWKFSRFARNQEESIVYKSMLKKNDVSVISCSETLDEENPFSSLIERIIEWMDEYYSIRLSGEVLRGMSEKVKRGQPVTIPSFGYDIVDKQYVINEEKAAIVRKIFTDYIDGKNSMQIASELNEIGVKTTRGNPFENRTIDYILKNPVYIGKIRWNQNGKTDYRYSSNKDIVYTQGVHKSIVSDEIFYKVQNLIETNGRKQRKGIHNNIKQEYMLHGLIKCSNCGSALAYSNKGLQCIKYSKSICKQSHYISLTNINNLVILGLEQVFENKDFKLSVKSLSQTVADCIDYTNLIEKENQKIQRIKNAYLEGIYTVEEVKEYKKSVEDKIKNLSSRQVQLKQEKTKPRKENVKEKKNFLATLKSPAISEKEKNEILKGFVDCIVFNRSTSLVDIFLYI

SEQ ID NO: 7103 - protein, 479 aa, Unknown
  Description of Unknown: Integrase B7104 sequence
  SM00857,G3DSA:1.10.10.2600,IPR036162,PF13408,IPR025827, PS51737,G3DSA:3.40.50.1390,IPR006119,IPR038109,PF07508, SSF53041,IPR011109,PTHR30461,Coil,PS51736, cd00338,PF00239
MRGVIYARYSPGPHQTEQSIEGQVADCQQYAEEHGIDIIEIYADRHVSGKSVVGRDEFQRMLRDAEKGRFDCVLVWKIDRFGRDRQDIAMGKMTLKRAGVKLMYARESVPDGPEGIILESVLEGLAEYYSADLRQKVIRGMKETAKKGQYCGQPLPIGYKVDAERHVVIDEREAAAVRDAFKMHIAGAQLRDIVQMFADHGVMGRRGKPVSNAVVYRMLRNEKYLGEFYIQDVKLNVEPIIDQATFLEAARHFKTSRNNAAGRAKVNYLLSCKMFCGYCGSMISAEAGTGKLGKVYRYYKCGDKKRGKKCELKPFPKDHLEDAIILATVNDMLTDEMIEKLTVRILEVQEQENADDPVVGLRRRLDSNKKRQRNLLDAIEEGGARGLVSRLAALEEEEDQLVLEIQRAEIKRPRLTHEVVEAWLRSFRVGDVTDDDFRARLVDTFIARVELRNDEALIFYNIREKGPHSRVRVRPEWWS

SEQ ID NO: 7104 - protein, 479 aa, Unknown
  Description of Unknown: Integrase B7105 sequence
  PTHR30461:SF3,IPR036162,PS51737,IPR011109,PTHR30461, PS00397,PF00239,G3DSA:1.10.10.2600,IPR006119,SSF53041, cd00338,SM00857,IPR025827,IPR038109,PS51736, IPR006118,PF13408,G3DSA:3.40.50.1390,PF07508,Coil
MKVAVYIRVSTLEQAEEGYSIGEQKDKLRKYCEIKDWTVVKEYVDPGRSGSNLNRPSMQQLIKDAPKGLYDAVLVYKLDRLSRSQKDTLYLIEDVFQKNDIHFVSLSENFDTSTAFGKAMIGILSVFAQLEREQIKERMTMGRIGRVKSGKIMEFNNPPFGYEVEDDNYKVKPLQGAIVKKIYDMYLSGKSISKIKETLNEEGHVGNPYPWSDTRVRYILSNPTYIGKIPYRGKLYDGRFTPLVNDATFSKVQQELKERQVSTAKRFNMQLRPFQSKYMLSGILKCGYCGATLFVNSYVQPNGHRRLRYNCPSTYASMRKAKKYAVKDPNCPFKLVYAEKLEPVVINEVKKLALHPESIHKPKVAHHKGINVDAVKKELASIKKQQQKLIDLYVISDDINIENISKKSADLKIQEEALTKKLSQAVEPDNGKLINFQNLLAKSSDIDQLSYDEQKFIVKKLIKSIDVYNNDRIKIHWNI

SEQ ID NO: 7105 - protein, 479 aa, Unknown
  Description of Unknown: Integrase B7106 sequence
  PTHR30461:SF3,SM00857,IPR006118,G3DSA:1.10.10.2600,IPR036162, PS51737,G3DSA:3.40.50.1390,Coil,IPR006119,IPR038109, PF07508,IPR011109,SSF53041,PTHR30461,PS00397, PS51736,cd00338,PF00239
MDDLKIAAAYIRVSTDDQTELSPDSQIKVVREFAKQKGYLIPKEYIFRDDGISGRKASKRPEFNHMIAVAKQTPSPFSAIMVWKFSRFARNQEEAIFYKGMLKKRGIDVISTSEPIIDGPFGSLIERIIEWFDEYYSINLSTEVKRGMTEKVSRGGAVSIPAFGYDIVDKKYQVNPINAPIVQRIFIKYLNGVGCRAIANELNDLGIKTTRGNNWENRTIEYILRNPVYIGKIRWNPKRRTRRNYDDKDIMIVDGIHQPIIDTDLFDKVQKKLDENKSKYRPYITDRQNGKEYMLKGLVKCSNCGATMSMTCNGLQCIKYTHGTCNVSHYIQLNKLNEVVINAIDDTLKSGDFQLKPKEQPHEEPQELNIDFMIEKENTKLRRIKEAYEEGVYNLAEFKQRKELIESKIHSLQKQNKPPEPKPDHLLAKKKLMSRRKEIISTLKSKSTSEVEKNALLCTFIDKIIFNRSLSSVELFFCF

SEQ ID NO: 7106 - protein, 479 aa, Unknown
  Description of Unknown: Integrase B7107 sequence
  PTHR30461:SF3,SM00857,IPR006118,G3DSA:1.10.10.2600,IPR036162, PS51737,G3DSA:3.40.50.1390,Coil,IPR006119,IPR038109, PF07508,IPR011109,SSF53041,PTHR30461,PS00397, PS51736,cd00338,PF00239
MDDLKIAAAYIRVSTDDQTELSPDSQIKVVREFAKQKGYLIPKEYIFRDDGISGRKASKRPEFNHMIAVAKQTPSPFSAIMVWKFSRFARNQEEAIFYKGMLKKRGIDVISTSEPIIDGPFGSLIERIIEWFDEYYSINLSTEVKRGMTEKVSRGGAVAIPAFGYDIVDKKYQVNPINAPIVQRIFIKYLNGVGCRAIANELNDLGIKTTRGNNWENRTIEYILRNPVYIGKIRWNPKRRTRRNYDDKDIMIVDGIHQPIIDTDLFDKVQKKLDENKAKYRPYITDRRNGKEYMLKGLVKCSNCGATMSMSCNGLQCIKYTHGTCKVSHYIQLNKLNEVVINAIDDTLKSGDFQLKPKEQPHEEPQELNIDFMIEKENTKLRRIKEAYEEGVYNLAEFKQRKELIESKIHSLQKQNKPPEPKSDHLLAKKKLMSRRKEIISTLKSKSTPEVEKNALLCTFIDKIVFNRSLSSVELFFCF

SEQ ID NO: 7107 - protein, 479 aa, Unknown
  Description of Unknown: Integrase B7108 sequence
  PTHR30461:SF3,SM00857,G3DSA:1.10.10.2600,IPR036162,PF13408, PS51737,G3DSA:3.40.50.1390,IPR025827,IPR006119,IPR038109, PF07508,IPR011109,SSF53041,PF00239,PTHR30461, PS51736,Coil,cd00338
MKKVTKIDGVQKNTAINSKLRVAAYCRVSTGSDAQLESLETQKSHYEQYINSREDWQFAGLYFDEGITGTKAEKRPELLRLITDCEAKRIDFVITKSISRFSRNTTDCLALVRKLQSLDIPIYFEKENINTGSMESELFLAILSSMAEGESASISENAKWSVKRRFQNGTYKLGYTPYGYDWDGKNMIINPDQAAVVKRIFADILSGKSTNAIADELNAEKVPSKKNNHWTSSTIRGILANEKYTGDVIFQKTYTDENFNRHTNYGEVDQYMAPDHHEAIISHSDFDAANALVNQRAAEKGIDKGSDKYQQRYAFSGKIICGECGDTFKRRIHSCTTYKYVAWACNTHLKNKESCHMKYVRDDEIKTAFITMLNKLIYGYRLILTPYLKVLENSSGDEAIQRIQHLEQLIAQNSEQREALTKLMAQGYIDQILYNQETNALLLQAETYRSDIEAITIGMTGDATKVTETNLLLHFFNPV

SEQ ID NO: 7108 - protein, 479 aa, Unknown
  Description of Unknown: Integrase B7109 sequence
  PTHR30461:SF3,SM00857,IPR006118,G3DSA:1.10.10.2600,IPR036162, PS51737,G3DSA:3.40.50.1390,Coil,IPR006119,IPR038109, PF07508,IPR011109,SSF53041,PTHR30461,PS00397, PS51736,cd00338,PF00239
MDDLKIAAAYIRVSTDDQTELSPDSQIKVVREFAKQKGYLIPKEYIFRDDGISGRKASKRPEFNHMIAVAKQTPSPFSAIMVWKFSRFARNQEEAIFYKGMLKKRGIDVISTSEPIIDGPFGSLIERIIEWFDEYYSINLSTEVKRGMTEKVSRGGAVSIPAFGYDIVDKKYQVNPINAPIVQRIFIKYLNGVGCRTIANELNDLGIKTTRGNNWENRTIEYILRNPVYIGKIRWNPKRRTKRNYDDKDIMIVDGIHQPIIDTDLFDKVQKKLDENKAKYRPYITDRQNGKEYMLKGLVKCSNCGATLSLACNSLQCIKYAHGTCNVSHSIQVNRLNEVVINAIDDTLKSGDFQLKPKEQPHEEPQELNIDFMIEKENTKLRRIKEAYEEGVYNLAEFKQRKELIESKIHSLQKQNKPPEPKPDHLLAKKKLMSRRKEIISTLKSKSTPEVEKNALLCTFIDKIIFNRSLSSVELFFCF

SEQ ID NO: 7109 - protein, 478 aa, Unknown
  Description of Unknown: Integrase B7110 sequence
  PTHR30461:SF3,IPR036162,PS51737,IPR011109,PTHR30461, PS00397,PF00239,G3DSA:1.10.10.2600,IPR006119,SSF53041, cd00338,SM00857,IPR025827,IPR038109,PS51736, IPR006118,PF13408,G3DSA:3.40.50.1390,PF07508,Coil
MLIGAAYIRVSTDDQLDLSPDSQLDEIKKYAAANDIVLSPDYIFMEQEGRSGKKAENRPEFQRMISTAKVKPKPFDCILVWKFSRFARNQDESTFYKGMLRKKLGIDVVSVSEPIMEGMYGRLIEMIIEWQDEFYSYNLGVEVKRGMTKKAELKGYQIVPCLGYAAVGNGKPFVIVENEYKIVEDIFRMYALENLDRTAIARRLNAQGKKAKRGNPFEQRTITRILTNPFYNGTVSWNGISFQGSHETRQSVTGLYDICQERLKQEFRPVKRRSISTCRHWLSGILKCSVCGATMSYNGGGKSRPDAVFACWKYAKGLHKESCSVTVAKAERIVIRSLEKILETGNFEYDRIPRPASEQDSSQKAAIGVKLERLALKEERIRAAYENGIDSLEEYRARKEQLLKERTELEAELASLEPADCSPAPSHEELMERVKTVHDLLCSPDVDFETKGTALRSILKFIVFDRKADRFEFHYYIS

SEQ ID NO: 7110 - protein, 478 aa, Unknown
  Description of Unknown: Integrase B7111 sequence
  IPR036162,PS51737,IPR011109,PTHR30461,PS00397, PF00239,G3DSA:1.10.10.2600,IPR006119,SSF53041,cd00338, SM00857,IPR025827,IPR038109,PS51736,IPR006118, PF13408,G3DSA:3.40.50.1390,PF07508,Coil
MKTVCAYIRVSTDSQEEYSPDAQIRLLKEYAASHDMTIIDIYQDLGISGRNADKRPQFQDMIAMAKSKEHPYDAILVWKFSRFARNQEESIVYKSLLKKNHVDVVSVSEPLPDGVIGELVERIFEWMDEYYSIRLSGEVRRGMTQKALAGGYNSNVPIGYTKERGPDTIPQIDEYYGPMVQRCFHMFAIEHIPMTKIAATINNLGYRTRTGKRWETRNITDMFQNPFYIGKIRWNSASSRRTTPRVGEEIIRDGKHQPLIDQELWDATQERYAKITARMGHGKRPDIYKHWLSGLLKCPNCGGTLAYQNGLDTKTGKHYPYFVCWKNVKGMCATRNSISAGKAAQYVLDGLLNIVENKDIKTIAPIVQFNQDEAAIAKQIASVKAKLGRVKEAYVNGIDTLKEYKATKEKLEAEIAHLKELVVPEVKPKAVTVDVIRTVHDTIMNAQSDSEKATAINSIVDHIIYDKEADTMEFFFIP

SEQ ID NO: 7111 - protein, 478 aa, Unknown
  Description of Unknown: Integrase B7112 sequence
  PTHR30461:SF3,IPR036162,PS51737,IPR011109,PTHR30461, PS00397,PF00239,G3DSA:1.10.10.2600,IPR006119,SSF53041, cd00338,SM00857,IPR025827,IPR038109,PS51736, IPR006118,PF13408,G3DSA:3.40.50.1390,PF07508,Coil
MLIGAAYIRVSTDDQLDLSPDSQLDEIKKYAAANDIVLSPDYIFMEQEGRSGKKAENRPEFQRMISTAKVKPKPFDCILVWKFSRFARNQDESTFYKGMLRKKLGIDVVSVSEPIMEGMYGRLIEMIIEWQDEFYSYNLGVEVKRGMTKKAELKGYQIVPCLGYAAVGNGKPFVIVEDEYKIVEDIFRMYALENLDRTAIARRLNAQGKKAKRGNPFEQRTITRILTNPFYNGTVSWNGISFQGSHETRQSVTGLYDICQERLKQEFRPVKRRSISTCRHWLSGILKCSVCGATMSYNGGGKSRPDAVFACWKYAKGLHKESCSVTVAKAERIVIRSLEKILETGNFEYDRIPRPASEQDSSQKAAIEVKLERLALKEERIRSAYENGIDSLEEYRTRKEQLLKERAELEAELASLEPADCSPALSREELLERVKTVHDLLCSPDVDFETKGTALRSILKFIVFDRKADRFEFHYYIS

SEQ ID NO: 7112 - protein, 478 aa, Unknown
  Description of Unknown: Integrase B7113 sequence
  IPR036162,PS51737,IPR011109,PTHR30461,PS00397, PF00239,G3DSA:1.10.10.2600,IPR006119,SSF53041,cd00338, SM00857,IPR025827,IPR038109,PS51736,IPR006118, PF13408,G3DSA:3.40.50.1390,PF07508,Coil
MKTVCAYIRVSTDSQEEYSPDAQIRLLKEYAASHDMTIIDIYQDLGISGRNADKRPQFQDMIAMAKSKEHPYDAILVWKFSRFARNQEESIVYKSLLKKNHVDVVSVSEPLPDGVIGELVERIFEWMDEYYSIRLSGEVRRGMTQKALAGGYNSNVPIGYTKERGPDAIPQIDEYYGPMVQRCFHMFAIEHIPMTKIAATINNLGYRTRTGKRWETRNITDMFQNPFYIGKIRWNSASSRRTTPRVGEEIIRDGKHQPLIDQELWDATQERYAKITARMGHGKRPDIYKHWLSGLLKCPNCGGTLAYQNGLDTKTGKHYPYFVCWKNVKGMCATRNSISAGKAAQYVLDGLLNIVEDKDIKTIAPIVQFNQDEAAIAKQIASVKAKLGRVKEAYVNGIDTLEEYKANKEKLEAEIAHLKELVVPEVKPKTVTVDVIRTVHDTIMNAQSDSEKATAINSIVDHIIYDKEADTMEFFFIP

SEQ ID NO: 7113 - protein, 478 aa, Unknown
  Description of Unknown: Integrase B7114 sequence
  PTHR30461:SF3,IPR036162,PS51737,IPR011109,PTHR30461, PS00397,PF00239,G3DSA:1.10.10.2600,IPR006119,SSF53041, cd00338,SM00857,IPR025827,IPR038109,PS51736, IPR006118,PF13408,G3DSA:3.40.50.1390,PF07508,Coil
MLIGAAYIRVSTDDQLDLSPDSQLDEIKKYAAANDIVLSPDYIFMEQEGRSGKKAENRPEFQRMISTAKVKPKPFDCILVWKFSRFARNQDESTFYKGMLRKKLGIDVISVSEPIMEGMYGRLIEMIIEWQDEFYSYNLGVEVKRGMTKKAELKGYQMVPCLGYAAVGNGKPFVIMEDEYKIVEDIFRMYALENLDRTAIARRLNAQGKTAKRGNPFEQRTVTRILTNPFYNGIVNWNGISFQGSHETRRSVTDLYDICQERLKQEFRPVKRRSISTCRHWLSGLLKCSVCGATMSYNGGGKSRPDAVFACWKYAKGLHKESCSVTVAKAERVVIRSLEKILETGNFEYDRIPRPASEQDSSQKAAIEVKLERLALKEERIRSAYENGIDSLEEYKTRKEQLLKERAELEAELASLEPADCSPAPSLEELLERVKTVHDLLCSPDVDFETKGTALRSILKFIVFDRKADRFEFHYYIS

SEQ ID NO: 7114 - protein, 478 aa, Unknown
  Description of Unknown: Integrase B7115 sequence
  PTHR30461:SF3,SM00857,G3DSA:1.10.10.2600,IPR036162,PF13408, IPR025827,G3DSA:3.40.50.1390,PS51737,IPR006119,IPR038109, PF07508,SSF53041,IPR011109,PF00239,PTHR30461, PS51736,Coil,cd00338
MKNGFTIINEYCDRALSGKTDNRPMFQKLIRDSEKRQFDAVVMYTLDRFARNRYDSAIYKAKLKKNGVKVFYAKQPMPDTPEGIILESVLEGYAEYYSENLARNIRRGLKENALQGIAVGGANLALGYTVGPDRKYVVEPIGAKIVQEIFQMYADGHSASQIIDYCNEKGYKTARGNPFNKNSLKTILRNEKYIGTYKYMDVVIPHGVPAIIEDTLFEKVQAMLKHNSTARAKSKAHEDYLLTSKVFCGHCGSPMIGESGTSKTGRVYYYYKCAARKRSLACRKAPERKDWLEEVVVRFTVQKVLTDENIARIAKKAMELIEGESADNSYLMALQGELKGIHIKINNLVSAIEQGIITPSTKNRLTELEGEKNEVEGKIAAEEMKKPLLTRERIEYWLTSFNSGDIDDVEYRRRVIDMLVNSIYVYDEDDGSKTIVFTFNLSGQNTATLKSSDFGCFAPPKNRLNKRLFIFCVAFRVV

SEQ ID NO: 7115 - protein, 478 aa, Unknown
  Description of Unknown: Integrase B7116 sequence
  PTHR30461:SF3,IPR036162,PS51737,IPR011109,PTHR30461, PS00397,PF00239,G3DSA:1.10.10.2600,IPR006119,SSF53041, SM00857,IPR025827,IPR038109,PS51736,cd03768, IPR006118,PF13408,G3DSA:3.40.50.1390,PF07508,Coil
MHKVAIYVRVSTTSQVDEGYSIDEQKAKLTSYCEIKDWNIYDIYTDGGFSGSNTERPALEQLIRDAKRKLFDTVLVYKLDRLSRSQKDTLYLIEDVFLENDIEFVSLLENFDTSTPFGKAMIGLLSVFAQLEREQIKERMQLGKLGRAKSGKSMQWAKTSFGYDYIKGTGTLSINPYQALIVRKMFEWYLSGMSITKLRDTLNEQYGQDKEWNYRTVRVILSNPVYCGYNQFKGQIFPGTHEAIISEEDFNKTQEEIKTRQRTAAQRFNPRPFQAKYMLSGIAQCGYCSAPLAIKLGMIRKDGTRLVKYECKQRHPRKTKGVTVYNNNAKCDSGFYFKDDIEHFVLTEISKLQTDSDYIDKLFSNTNQETIDRASYQKQIDKLTAKISRLNDLYIDDRISLEELQKRSSDFMAERTALEKELDADSSLKAVERKEDVRRVLDTKDIFTLDYEQQKAIARALISKVRVTSESIVILWKL

SEQ ID NO: 7116 - protein, 478 aa, Unknown
  Description of Unknown: Integrase B7117 sequence
  PTHR30461:SF3,IPR036162,PS51737,IPR011109,PTHR30461, PS00397,PF00239,G3DSA:1.10.10.2600,IPR006119,SSF53041, cd00338,SM00857,IPR025827,IPR038109,PS51736, IPR006118,PF13408,G3DSA:3.40.50.1390,PF07508,Coil
MKTVCAYIRVSTDSQEEYSPDAQIRLLKEYAASNDMIVVDIYQDLGMSGKFVKIRPKFKEMIAMAKSKDHPYDAILVWKFSRFARNQEESIVYKSLLKKNQVDVISVSEPLPDGPIGRLIERIFEWMDEYYSIRLSEEVRRGMTQKALAGGYNSNVPIGYTKERGPDTIPQIDEYYGPMVQRCFHMFAIEHIPMAKIAATINNLGYRTRTGKRWETRNITDMFQNPFYIGKIRWNSASSRRTTPRVGEEIIRDGKHQPLIDQELWDATQERYAKITARMGHGKRPDIYKHWLSGLLKCPNCGGTLAYQNGLDTKTGKHYPYFVCWKNVKGMCATRNSISAGKAAQYVLDGLLNIVEDKDIKTIAPIVQFNQDEAAIAKQIASVKAKLGRVKEAYVNGIDTLEEYKANKEKLEAEIAHLKELVVPEVKPKTVTVDVIRTVHDTIMNAQSDSEKATAINSIVDHIIYDKEADTMEFFFIP

SEQ ID NO: 7117 - protein, 478 aa, Unknown
  Description of Unknown: Integrase B7118 sequence
  PTHR30461:SF3,cd00338,SM00857,IPR006118,IPR036162, PF13408,IPR025827,G3DSA:3.40.50.1390,IPR006119,SSF53041, PTHR30461,PS00397,PS51736,Coil,PF00239
MTNQAEKTSYIENVAAYIRVSTQEQKLHGISIEAQEEKLNEYADSHGMKIVKFYKDEGVSGRKLIRKRPALQAMIQDAEKGNFRRIIFIKLDRFFRSVAEYHECMKRLAAGGVIWTATEEKYDLSTPSGEAFVNMKLTMAQFEADQVGERIRMINEYKVKSGQPLYGSQALPFCYQVKQSGDGDRRKYIAKRDEIIMEDLIDHFCKNRSVRAALHYINAKYSRAFSYSTIKNALTSELICGTYRGNPAYCEGYMTPAAFETMQKYIQHNPRTSQREHTYIFGGLIRCPCCGNMLVGSPTVLNRIGKSGQKLSYKYYGYRCYRGNLEKKCDFRTMAFEHRLEAIMLSEVEAVMRGKQMYLLRLQNAPQRVAQHDLVELQQELARLNYAWQKGRIKTAADYDRQYDDLMARIDAANAERQELAANPDYRKISRILSDGWKQLYISLDNDHKRAFWRAFIEEIQLEWTKDVKRIRDITFFT

SEQ ID NO: 7118 - protein, 478 aa, Unknown
  Description of Unknown: Integrase B7119 sequence
  PTHR30461:SF3,IPR036162,PS51737,IPR011109,PTHR30461, PS00397,PF00239,G3DSA:1.10.10.2600,IPR006119,SSF53041, cd00338,SM00857,IPR025827,IPR038109, PS51736,IPR006118,PF13408,G3DSA:3.40.50.1390,PF07508,Coil
MLIGAAYIRVSTDDQLDLSPDSQLDEIKKYAAANDIVLSPDYIFMEQEGRSGKKAENRPEFQRMISTAKVKPKPFDCILVWKFSRFARNQDESTFYKGMLRKKLGIDVVSVSEPIMEGMYGRLIEMIIEWQDEFYSYNLGVEVKRGMTKKAELKGYQIVPCLGYAAVGNGKPFVIVEDEYKIVEDIFRMYALENLDRTSIARRLNAQGKKAKRGNPFEQRTITRILTNPFYNGTVSWNGISFQGSHETRQSVTGLYDICQERLKQEFRPVKRRSISTCRHWLSGILKCSVCGATMSYNGGGKSRPDAVFACWKYAKGLHKESCSVTVAKAERIVIRSLEKILETGNFEYDRIPRPASEQDSSQKAAIEVKLERLALKEERIRSAYENGIDSLEEYRTRKEQLLKERAELEAELASLEPADCYPVLSREELLERVKTVHDLLCSPDVDFETKGTALRSILKFIVFDRKADRFEFHYYIS

SEQ ID NO: 7119 - protein, 478 aa, Unknown
  Description of Unknown: Integrase B7120 sequence
  PTHR30461:SF3,SM00857,G3DSA:1.10.10.2600,IPR036162,PS51737, G3DSA:3.40.50.1390,IPR006119,IPR038109,PF07508,IPR011109, SSF53041,PTHR30461,Coil,PS51736,cd00338, PF00239
MKYAAAYIRVSDDRQDEYSPCSQLKLIRQYAKNNDYIVPDEYVFYDDGISGRSVKKRKAFNSMIGYAKSKEHPFDAILVWKFSRFARNQEESIVYKSMLRKINVAVISVSETIDDSPFAPLIERIIEFMDEYYSTRLSQEVTRGMTEKASRGEVMTIAPFGYDLKNKTYIPNDNAKTVNYIYDSYLAGKGYRAIAQELAAMGIRTKRGNIPDNRFVEYILQNPVYIGKIRWSPEGKQSKQRYKGDNSNVMIIDGKHEAIIDTDKFERVQDMIADQKKRYGKYQRREQPVQFMLKGLMRCGNCGATLVYVGTQSPAMQCHQYARGVCKVSHSLSIAKANRVVIDKIEETLKTLDFNIIYKTQNNPQENIDYDKLIKQEKEKIRRASEAYDAGFDTLEEYGVKKRTYQSRIDEYEKAKSKVPPKESKAVPKEFVDKVASVLKTIKSPETDEAVKNEALRSIIDHITYEKEANNLAIYFYL

SEQ ID NO: 7120 - protein, 478 aa, Unknown
  Description of Unknown: Integrase B7121 sequence
  PTHR30461:SF3,SM00857,IPR006118,G3DSA:1.10.10.2600,IPR036162, PS51737,G3DSA:3.40.50.1390,IPR006119,IPR038109,PF07508, IPR011109,SSF53041,PF00239,PTHR30461,PS00397, PS51736,Coil,cd00338
MSKELKNAAAYIRVSTDRQTELSPDSQLKVIRQYAKQNGYIIPKEYVFRDDGISGRSAEKRPSFNQMIATAKQNPSPFSAIMVWKFSRFARNQEEAIVYKSMLKKNGVTVISCSETLDDGPYSSLIERIIEWMDEYYSIRLSGEVKRGMTEKVQRGQPVSISAFGYDIADKKYVINEQSAPIVRKIFLDYLNGKGTRKIASELNSLGIKTSRGNNWESRTIEYILQNPVYTGKIRWNTNGRTDRNYDDDNIIITQGEHEPIIEQNAFDEVQELIAYNHKCHSKYTHSTVKTEFMLHGLVKCSSCGASMAMTAKGQGLQCIKYAKGACKDSHYISMDKINAIVLSGIEKVFENENINLNIKGNDSKDDFIDYNALIKKEYKKLSRIKTAYAEGLYTIDELKEYRQVIEQQINTLINRCKSSVFNESDSDVKVISKNKNLLNHLRNPNISEQEKNVMLRGFVDKIVFDRSIPKVDIFFYI

SEQ ID NO: 7121 - protein, 478 aa, Unknown
  Description of Unknown: Integrase B7122 sequence
  PTHR30461:SF3,cd00338,SM00857,IPR006118,IPR036162, PF13408,IPR025827,G3DSA:3.40.50.1390,IPR006119,SSF53041, PTHR30461,PS00397,PS51736,Coil,PF00239
MTNQAEKTSYIENVAAYIRVSTQEQKLHGISIEAQEEKLTEYADSHGMKIVKFYKDEGVSGRKLIRKRPALQAMIQDAEKGNFRRIIFIKLDRFFRSVAEYHECMKRLAAGGVIWTATEEKYDLSTPSGEAFVNMKLTMAQFEADQVGERIRMINEYKVKSGQPLYGSQALPFCYQVKQSGDGDRRKYIAKRDEIIMEDLIDHFCKNRSVRAALHYINAKYSRAFSYSTIKNALTSELICGTYRGNPAYCEGYMTPAAFETMQKYIQHNPRTSQREHSYIFGGLIRCPCCGNMLVGSPTVLNRIGKSGQKLSYKYYGYRCYRGNLEKKCDFRTMAFEHRLEAIMLSEVEAVMRGKQMYLLRLQNAPQRVAQHDLAELQQELARLNYAWQKGRIKTAADYDRQYDDLMTRIDAANAERQELAANPDYRKISRILSDGWKQLYISLDNDHKRAFWRAFIEEIQLEWTKGVKRIRDITFFT

SEQ ID NO: 7122 - protein, 478 aa, Unknown
  Description of Unknown: Integrase B7123 sequence
  IPR036162,PS51737,IPR011109,PTHR30461, PS00397,PF00239,G3DSA:1.10.10.2600,IPR006119, SSF53041,cd00338,SM00857,IPR025827,IPR038109,PS51736 ,IPR006118,PF13408,G3DSA:3.40.50.1390,PF07508,Coil
MKTVCAYIRVSTDSQEEYSPDAQIRLLKEYAASNDMIVVDIYQDLGMSGKFVKIRPKFKEMIAMAKSKDHPYDAILVWKFSRFARNQEESIVYKSLLKKNQVDVISVSEPLPDGPIGRLIERIFEWMDEYYSIRLSEEVRRGMTQKALAGGYNSNVPIGYTKERGPDTIPQIDEYYGPMVQRCFHMFAIEHIPMTKIAATINNLGYRTRTGKRWETRNITDMFQNPFYIGKIRWNSASSRRTTQRVGEEIIRDGKHQPLIDQELWDATQERYAKITARMGHGKRPDIYKHWLSGLLKCPNCGGTLAYQNGLDTKTGKHYPYFVCWKNVKGMCATRNSISAGKAAQYVLDGLLDIVENKDIKTITPIIPFNQDEATIAKQIASVKAKLGRVKESYINGIDTLEEYKANKEKLEAEIAHLKELVVPEVKTKTVTVDVIRTVHDTITNAQSDLEKATAINSIVDHIVYDKEADTMEFFFIP

SEQ ID NO: 7123 - protein, 478 aa, Unknown
  Description of Unknown: Integrase B7124 sequence
  PTHR30461:SF3,IPR036162,PS51737,IPR011109,PTHR30461, PS00397,PF00239,G3DSA:1.10.10.2600,IPR006119,SSF53041, SM00857,IPR025827,IPR038109,PS51736,cd03768, IPR006118,PF13408,G3DSA:3.40.50.1390,PF07508,Coil
MNKVALYVRVSTTSQLEEGYSIEEQKAKLESYCDIKDWHVYKVYTDGGFSGSTTERPALEQLIKDAQSKLFDTVLVYKLDRLSRSQKDTLYLIEDIFLKNNIEFVSLLENFDTSTPFGRAVIGLLSVFAQLEREQIKERMQLGKLGRAKSGKSMMWAKTSYGYNYNKDTGTMTVNEYEALAVKEIYSSYLAGMSITKLRDKINEEYPKQPAWSYRTIRGILANPVYCGLNQYKGQTFQGTHKAIISLDDFEQTQRELAKRQQTAKELSNPRPFQAKYMLSGLTQCGYCHAPLKVILGQKRKDGTRFKRYECYQRHPRKTRGVTVYNDNKKCESGYYDMELLEHYVLTRISQLQNDPEKIQELFSDDTSPAVDRQAIQKQIDSLTLKLSKLNDLYLDDRITLDELRTKSSDFIKQRTALEEEIKKASTDKQAGQRKKIEKLLDASSVLGMSYDNQKVIVRELIDKVQVTSDKIVIRWKI

SEQ ID NO: 7124 - protein, 478 aa, Unknown
  Description of Unknown: Integrase B7125 sequence
  PTHR30461:SF3,SM00857,G3DSA:1.10.10.2600,IPR036162,PF13408, PS51737,IPR025827,G3DSA:3.40.50.1390,IPR006119,IPR038109, PF07508,IPR011109,SSF53041,PTHR30461,Coil, PS51736,cd00338,PF00239
MKYAAAYIRVSDDRQDEYSPDSQLKLIRQYAKNNDYIVPDEYVFYDDGISGRSVKKRKAFNSMIGYAKSKEHPFDAILVWKFSRFARNQEESIVYKSMLRKINVAVISVSETIDDSPFAPLIERIIEFMDEYYSTRLSQEVTRGMTEKASRGEVMTIAPFGYDLKNKTYIPNDNAKTVNYIYDSYLAGKGYRAIAQELATMGIRTKRGNIPDNRFVEYILQNPVYIGKIRWSPEGKQSKQRYKGDNSNVMIIDGKHEAIIDTDKFERVQDMIADQKKRYGKYQRREQPVQFMLKGLMRCGNCGATLVYVGTQSPAMQCHQYARGVCKVSHSLSVAKANRVVIDKIEETLKTLDFNIIYKTQNNPQENIDYDKLIKQEKEKIRRASEAYDAGFDTLEEYGVKKRTYQSRIDEYEKAKSKVPPKESKAVPKEFVDKVASVLKTIKSPETDEAVKNEALRSIIDHITYEKEANNLAIYFYL

SEQ ID NO: 7125 - protein, 478 aa, Unknown
  Description of Unknown: Integrase B7126 sequence
  PTHR30461:SF3,SM00857,G3DSA:1.10.10.2600,IPR036162,PF13408, PS51737,IPR025827,G3DSA:3.40.50.1390,IPR006119,IPR038109, PF07508,IPR011109,SSF53041,PTHR30461,Coil, PS51736,cd00338,PF00239
MKYAAAYIRVSDDRQDEYSPDSQLKLIRQYAKNNDYIVPDEYVFYDDGISGRSVKKRKAFNSMIGYAKSKEHPFDAILVWKFSRFARNQEESIVYKSMLRKINVAVISVSETIDDSPFAPLIERIIEFMDEYYSTRLSQEVTRGMTEKASRGEVMTIAPFGYDLKNKTYIPNDNAKTVNYIYDSYLAGKGYRAIAQELATMGIRTKRGNIPDNRFVEYILQNPVYIGKIRWSPEGKQSKQRYKGDNSNVMIIDGKHEAIIDTDKFERVQDMIADQKKRYGKYQRREQPVQFMLKGLMRCGNCGATLVYVGTQSPAMQCHQYARGVCKVSHSLSVAKANRVVIDKIEETLKTLDFNIIYKTQNNPQENIDYDKLIKQEKEKIRRASEAYDAGFDTLEEYGVKKRTYQSRIDEYEKAKSKVPPKESKAVPKEFVDKVASVLKTIKSPETDEAIKNEALRSIIDHITYEKEANNLAIYFYL

SEQ ID NO: 7126 - protein, 478 aa, Unknown
  Description of Unknown: Integrase B7127 sequence
  PTHR30461:SF3,IPR036162,PS51737,IPR011109,PTHR30461, PS00397,PF00239,G3DSA:1.10.10.2600,IPR006119,SSF53041, cd00338,SM00857,IPR025827,IPR038109,PS51736, IPR006118,PF13408,G3DSA:3.40.50.1390,PF07508,Coil
MLIGAAYIRVSTDDQLDLSPDSQLDEIKKYAAANDIVLSPDYIFMEQEGRSGKKAENRPEFQRMISTAKVKPKPFDCILVWKFSRFARNQDESTFYKGMLRKKLGIDVISVSEPIMEGMYGRLIEMIIEWQDEFYSYNLGVEVKRGMTKKAELKGYQMVPCLGYAAVGNGKPFVIVEDEYKIVEDIFRMYALENLDRTAIARRLNAQGKTAKRGNPFEQRTVTRILTNPFYNGIVNWNGISFRGSHETRRAVTDLYDICQERLKREFRPVKRRSVSTCRHWLSGLLKCSVCGATMSYNGGGKSRPDAVFACWKYAKGLHKESCSVTVAKAERVVIRSLEKILETGNFEYDRIPRPASEQDSIQKAAIEVKLERLALKEERIRSAYENGIDSLEEYRTRKEQLLKERAELEAELVSLEPASSSPAPSREELLKRVKTVHDLLCSPDVDFETKGNALRSILKFVVFDRKSDRFEFHYYIS

SEQ ID NO: 7127 - protein, 478 aa, Unknown
  Description of Unknown: Integrase B7128 sequence
  PTHR30461:SF3,SM00857,G3DSA:1.10.10.2600,IPR036162,PS51737, G3DSA:3.40.50.1390,IPR006119,IPR038109,PF07508,SSF53041, IPR011109,PTHR30461,Coil,PS51736,cd00338, PF00239
MKYAAAYIRVSDDRQDEYSPDSQLKLIRQYAKNNDYIVPDEYVFYDDGISGRSVKKRKAFNSMIGYAKSKEHPFDAILVWKFSRFARNQEESIVYKSMLRKINVAVISVSETIDDSPFAPLIERIIEFMDEYYSTRLSQEVTRGMTEKASRGEVMTIAPFGYDLKNKTYIPNDNAKTVNYIYDSYLAGKGYRAIAQELATMGIRTKRGNIPDNRFVEYILQNPVYIGKIRWSPEGKQSKQRYKGDNSNVMIIDGKHEAIIDTDKFERVQDMIADQKKRYGKYQRREQPVQFMLKGLMRCGNCSATLVYVGTQSPAMQCHQYARGVCKISHSLSIAKANRVVIDKIEETLKTLDFNIIYKTQNNPQENIDYDKLIKQEKEKIRRASEAYDAGFDTLEEYGIKKRTYQSRIDEYEKAKSKVPPKESKAVPKEFVDKVASVLKTIKSPETDEAVKNEALRSIIDHITYEKEANNLAIYFYL

SEQ ID NO: 7128 - protein, 478 aa, Unknown
  Description of Unknown: Integrase B7129 sequence
  PTHR30461:SF3,SM00857,G3DSA:1.10.10.2600,IPR036162,PF13408, IPR025827,PS51737,G3DSA:3.40.50.1390,IPR006119,IPR038109, PF07508,SSF53041,IPR011109,PTHR30461,PS51736, cd00338,PF00239
MKYAAAYIRVSDDRQDEYSPDSQLKLIRQYAKNNDYIVPDEYVFYDDGISGRSVKKRKAFNSMIGYAKSKEHPFDAILVWKFSRFARNQEESIVYKSMLRKINVAVISVSETIDDSPFAPLIERIIEFMDEYYSTRLSQEVTRGMTEKASRGEAMSTAPFGYDSQGKSFIPNDDAKIVNYIYDSYLSGKGYRAIAQELGTMGIRTKRGNIPDNRFVEYILQNPVYIGKIRWSPECKGSKSRYKGDNSSVMIVDGKHEAIIDTAKFEQVQDMIADQKKRYGKYQRKEQPVQFMLKGLVRCGNCGATLVYVGTKYPALQCHQYARGVCKVSHSLSIAKANRVVIDKIEETLKTLDFNIIYKTQNNPQENIDYDKLIKQEKEKIRRASEAYDAGFDTLEEYGIKKRTYQSRISEYESAKIQQPKKKNDTIPNEFLEKCQNVLKIIKSPEADEAAKNEALRTIIDHITYEKEDNNLAIYFYL

SEQ ID NO: 7129 - protein, 478 aa, Unknown
  Description of Unknown: Integrase B7130 sequence
  PTHR30461:SF3,IPR036162,PS51737,IPR011109,PTHR30461, PS00397,PF00239,G3DSA:1.10.10.2600,IPR006119,SSF53041, cd00338,SM00857,IPR025827,IPR038109,PS51736, IPR006118,PF13408,G3DSA:3.40.50.1390,PF07508,Coil
MQTAAAYIRVSTDDQIEYSPDSQIKAIRKYAKDHDMILPEEFIFVDEGISGRKADKRPSFQRMIGTAKIKPKPFDVILLWKFSRFARNRQDSIVYKSMLRKQCGIDVVSISEQLGDDNTSILIEALIEAMDEYYSLNLAEEVKRGMTEKFSRGGVVSQPPYGYMMKDGIFAPDPETAPIVQKIFADFIAGKGTREIARELNDLGLRTAKGNFFENRAIEYIITNPVYIGKLRRSKEKNISDHYHQDAENTLIVNGNHVPIIDTETFEQAQRKRSELKQRYPKHARQTPSEFMLKGIVRCSACGATLVNQSAAKSLQCHNYARGVCKTSHSITVKKINAAVLEKLRSDAKSQNFEVAVEPTGASSSSAPDFSSLIAREKKKLARVREAYEAGVDTLAEYKTAKQKIQDHIAELEAKASKVLPKSDKDIKEIISRKIMASLKILESDETSEALKNYTLRGLVDRITYIKPKGIIEILYKM

SEQ ID NO: 7130 - protein, 478 aa, Unknown
  Description of Unknown: Integrase B7131 sequence
  PTHR30461:SF3,SM00857,G3DSA:1.10.10.2600,IPR036162,PS51737, G3DSA:3.40.50.1390,IPR006119,IPR038109,PF07508,SSF53041, IPR011109,PTHR30461,Coil,PS51736,cd00338, PF00239
MKYAAAYIRVSDDRQDEYSPDSQLKLIRQYAKNNDYIVPDEYVFYDDGISGRSVKKRKAFNNMIGYAKSKEHPFDAILVWKFSRFARNQEESIVYKSMLRKINVAVISVSETIDDSPFAPLIERIIEFMDEYYSTRLSQEVTRGMTEKASRGEVMTIAPFGYDLKNKTYIPNDNAKTVNYIYDSYLAGKGYRAIAQELATMGIRTKRGNIPDNRFVEYILQNPVYIGKIRWSPEGKQSKQRYKGDNSNVMIIDGKHEAIIDTDKFERVQDMIADQKKRYGKYQRREQPVQFMLKGLMRCGNCGATLVYVGTQSPAMQCHQYARGVCKISHSLSIAKANRVVIDKIEETLKTLDFNIIYKTQNNPQENIDYDKLIKQEKEKIRRASEAYDAGFDTLEEYGIKKRTYQSRIDEYEKAKSKVSPKENKAVPKEFVDKVASVLKTIKSPETDEAVKNEALRSVIDHITYEKEANNLAIYFYL

SEQ ID NO: 7131 - protein, 478 aa, Unknown
  Description of Unknown: Integrase B7132 sequence
  PTHR30461:SF3,SM00857,G3DSA:1.10.10.2600,IPR036162,PS51737, G3DSA:3.40.50.1390,IPR006119,IPR038109,PF07508,IPR011109, SSF53041,PTHR30461,Coil,PS51736,cd00338, PF00239
MKYAAAYIRVSDDRQDEYSPNSQLKLIRQYAKNNDYIVPDEYVFYDDGISGRSVKKRKAFNSMIGYAKSKEHPFDAILVWKFSRFARNQEESIVYKSMLRKINVAVISVSETIDDSPFAPLIERIIEFMDEYYSTRLSQEVTRGMTEKASRGEVMTIAPFGYDLKNKTYIPNDNAKTVNYIYDSYLAGKGYRSIAQELATMGIRTKRGNIPDNRFVEYILQNPVYIGKIRWSPEGKQSKQRYKGDNSNVMIIDGKHEAIIDTDKFERVQDMIADQKKRYGKYQRREQPVQFMLKGLMRCGNCGATLVYVGTQSPAMQCHQYARGVCKVSHSLSIAKANRVVIDKIEETLKTLDFNIIYKTQNNPQENIDYDKLIKQEKEKIRRASEAYDAGFDTLEEYGVKKRTYQSRIDEYEKAKSKVPPKESKAVPKEFVDKVASVLKTIKSPETDEAVKNEALRSVIDHITYEKEANNLAIYFYL

SEQ ID NO: 7132 - protein, 478 aa, Unknown
  Description of Unknown: Integrase B7133 sequence
  PTHR30461:SF3,IPR036162,PS51737,IPR011109,PTHR30461, PS00397,PF00239,G3DSA:1.10.10.2600,IPR006119,SSF53041, cd00338,SM00857,IPR025827,IPR038109,PS51736, IPR006118,PF13408,G3DSA:3.40.50.1390,PF07508,Coil
MQTAAAYIRVSTDDQIEYSPDSQIKAIRKYAKDHDMILPEEFIFVDEGISGRKADKRPSFQRMIGTAKIKPKPFDVILLWKFSRFARNRQDSIVYKSMLRKQCGIDVVSISEQLGDDNTSILIEALIEAMDEYYSLNLAEEVKRGMTEKFSRGGVVSQPPYGYMMKDGIFAPDPETAPIVQKIFADFIAGKGTREIARELNDLGLRTAKGNFFENRAIEYIITNPVYIGKLRRSKEKNISDHYHQDAENTLIVNGNHVPIIDTETFEQAQRKRSELKQRYPKHARQTPSEFMLKGIVRCSACGATLVNQSAAKSLQCHNYAKGVCKTSHSITVKKINAAVLEKLRSDAKSQDFEVAVEPTGSSSSSAPDFSSLIAREKKKLARVREAYEAGVDTLAEYKTAKQKIQDHIAELEAKAAKVLPKSDKDIKEIISRKIMASLEILESDETSEALKNYTLRGLVDRITYIKPKGIIEILYKM

SEQ ID NO: 7133 - protein, 478 aa, Unknown
  Description of Unknown: Integrase B7134 sequence
  PTHR30461:SF3,SM00857,G3DSA:1.10.10.2600,IPR036162,PF13408, PS51737,G3DSA:3.40.50.1390,IPR025827,IPR006119,IPR038109, PF07508,IPR011109,SSF53041,PTHR30461,PS51736, cd00338,PF00239
MKYAAAYIRVSDDRQDEYSPDSQLKLIRQYAKNNDYIVPDEYVFYDDGISGRSVKKRKAFNSMIGYAKSKEHPFDAILVWKFSRFARNQEESIVYKSMLRKINVTVISVSETIDDSPFAPLIERIIEFMDEYYSTRLSQEVTRGMTEKASRGEAMSAAPFGYDSQGKSFIPNDDAKIVNYIYDSYLSGKGYRAIAQELGTMGIRTKRGNIPDNRFVEYVLQNPVYIGKIRWSPECKGSKSRYKGDNSSVMIVDGKHEAIIDTAKFEQVQDMIADQKKRYGKYQRKEQPVQFMLKGLVRCGNCGATLVYVGTKYPALQCHQYARGVCKVSHSLSIAKANRVVIDKIEETLKTLDFNIIYKTQSDLQENIDYDKLIKQEKEKIRRASEAYDAGFDTLEEYGIKKRTYQSRISEYESAKIQQPQKKNDTIPNEFLEKCQNVLKIIKSPEADEAAKNEALRTIIDHITYEKEDNNLAIYFYL

SEQ ID NO: 7134 - protein, 478 aa, Unknown
  Description of Unknown: Integrase B7135 sequence
  PTHR30461:SF3,SM00857,G3DSA:1.10.10.2600,IPR036162,PF13408, PS51737,IPR025827,G3DSA:3.40.50.1390,IPR006119,IPR038109, PF07508,IPR011109,SSF53041,PTHR30461,Coil, PS51736,cd00338,PF00239
MKYAAAYIRVSDDRQDEYSPDSQLKLIRQYAKSNDYIVPDEYVFYDDGISGRSVKKRKAFNSMIGYAKSKEHPFDAILVWKFSRFARNQEESIVYKSMLRKINVTVISVSETIDDSPFAPLIERIIEFMDEYYSTRLSQEVTRGMTEKASRGEAMSAAPFGYDLQAKTFIPNDDAKIVNYIYDSYLSGKGYRAIAQELGSMGIRTKRGNIPDNRFVEYILQNPVYIGKIRWSPECKGSKSRYKGDNSSVMIVDGKHKAIIDTAKFEQVQDMIADQKKRYGKYQRREQPVQFMLKGLMRCGNCGATLVYVGTKYPAMQCHQYARGICKVSHSLSISKANRVVIDKIEETLKTLDFNIIYKTQNNPQENIDYDKLIKQEKEKIRRASEAYDAGFDTLEEYGIKKRTYQSRISEYERAKIQQPKKKNDTIPNEFLEKCQNVLKIIKSPEADEAAKNEALRTIIDHITYEKEDNNLAIYFYL

SEQ ID NO: 7135 - protein, 478 aa, Unknown
  Description of Unknown: Integrase B7136 sequence
  PTHR30461:SF3,cd00338,SM00857,IPR006118,IPR036162, PF13408,IPR025827,G3DSA:3.40.50.1390,IPR006119,SSF53041, PTHR30461,PS00397,PS51736,Coil,PF00239
MTNQAEKTSYIENVAAYIRVSTQEQKLHGISIEAQEEKLNEYADSHGMKIVKFYKDEGVSGRKLIRKRPALQAMIQDAEKGNFRRIIFIKLDRFFRSVAEYHECMKRLAAGGVIWTATEEKYDLSTPSGEAFVNMKLTMAQFEADQVGERIRMINEYKVKSGQPLYGSQALPFCYQVKQSGDGDRRKYIAKRDEIIMEDLIDHFCKNRSVRAALHYINAKYSRAFSYSTIKNALTSELICGTYRGNPAYCEGYMTPAAFETMQKYIQHNPRTSQREHSYIFGGLIRCPCCGNMLVGSPTVLNRIGKSGQKLSYKYYGYRCYRGNLEKKCDFRTMAFEHRLEAIMLSEVEAVMRGKQMYLLRLQNAPQRVAQHDLAELQQELARLNYAWQKGRIKTAADYDRQYDDLMMRIDAANAERQELAANPDYRKISRILSDGWKQLYISLDNDHKRAFWRAFIEEIQLEWTKDVKRIRDITFFT

SEQ ID NO: 7136 - protein, 478 aa, Unknown
  Description of Unknown: Integrase B7137 sequence
  PTHR30461:SF3,IPR036162,PS51737,IPR011109,PTHR30461, PS00397,PF00239,G3DSA:1.10.10.2600,IPR006119,SSF53041, SM00857,IPR025827,IPR038109,PS51736, cd03768,IPR006118,PF13408,G3DSA:3.40.50.1390,PF07508,Coil
MPKIKVGIYIRVSTQEQANEGYSIDAQTDRLTSYCKSRDWAIYNTYIDGGFSGSNTNRPALHQLMQDIQDKKLNCVLVYKLDRLSRSQKDTLYLIEDVFLKNKIDFVSLNENFDTSSPFGRAMIGILSVFAQLEREQIKERSLMGRIERAKNGLWHGGGFEPFGYNYINGQLIVNEYEANIVREAFELFLQKLPIHRINRIISEKYGKEFHETVLRSILSTRLYTGKISYLGGIYDGQHQAIITEDTFKAAETLLAYRKKKFSNSNPFKATRLLGGILYCAHCGARYLAKGNYSGHGNKKVYRPYYTCYSRAKCTKKYILDPNCKNPSYAVVVLDEIIINEIRKLFINKEYLYSAKNATAATNTVNKQKSILKQIDSIQSQMSRLLDLYQIEGISIDDIQDRIKKLQHEKDVLEETLSNLKTNQKKKLTTTEVLSMEASFNEIMENGTDMEKQAIVRTLIDKIIVHEELNSFEIIWNF

SEQ ID NO: 7137 - protein, 478 aa, Unknown
  Description of Unknown: Integrase B7138 sequence
  PTHR30461:SF3,SM00857,G3DSA:1.10.10.2600,IPR036162,PS51737, G3DSA:3.40.50.1390,IPR006119,IPR038109,PF07508,IPR011109, SSF53041,PTHR30461,Coil,PS51736,cd00338, PF00239
MKYAAAYIRVSDDRQDEYSPYSQLKLIRQYAKNNDYIVPDEYVFYDDGISGRSVKKRKAFNSMIGYAKSKEHPFDAILVWKFSRFARNQEESIVYKSMLRKINVAVISVSETIDDSPFAPLIERIIEFMDEYYSTRLSQEVTRGMTEKASRGEVMTIAPFGYDLKNKTYIPNDNAKTVNYIYDSYLAGKGYRAIAQELAAMGIRTKRGNIPDNRFVEYILQNPVYIGKIRWSPEGKQSKQRYKGDNSNVMIIDGKHEAIIDTDKFERVQDMIADQKKRYGKYQRREQPVQFMLKGLMRCGNCGATLVYVGTQSPAMQCHQYARGVCKVSHSLSIAKANRVVIDKIEETLKTLDFNIIYKTQNNPQENIDYDKLIKQEKEKIRRASEAYDAGFDTLEEYGVKKRTYQSRIDEYEKAKSKVPPKESKAVPKEFVDKVASVLKTIKSPETDEAVKNEALRSIIDHITYEKEANNLAIYFYL

SEQ ID NO: 7138 - protein, 478 aa, Unknown
  Description of Unknown: Integrase B7139 sequence
  PTHR30461:SF3,IPR036162,PS51737,IPR011109,PTHR30461, PS00397,PF00239,G3DSA:1.10.10.2600,IPR006119,SSF53041, SM00857,IPR025827,IPR038109,PS51736,cd03768, IPR006118,PF13408,G3DSA:3.40.50.1390,PF07508,Coil
MHKVAIYVRVSTTSQVDEGYSIDEQKAKLTSYCEIKDWNIYDIYTDGGFSGSNTERPALERLIRDAKRKLFDTVLVYKLDRLSRSQKDTLYLIEDVFLENDIEFVSLLENLDTSTPFGKAMIGLLSVFAQLEREQIKERMQLGKLGRAKSGKSMQWAKTSFGYDYIKETGTLSINPYQALIVRKMFEWYLSGMSITKLRDTLNEQYGQDKEWNYRTVRVILSNPVYCGYNQFKGQIFPGTHEPIVSEEDFNKTQEEIKTRQRAAAERFNPRPFQAKYMLSGIAQCGYCSAPLAIKMGMRRKDGTRLVKYECKQRHPRKTKGVTVYNNNEKCDSGFYFKDDIEHFVLTEISKLQTDSDYIDKLFSNTDKETIDRDSYQKQIDNLTAKISRLNDLYIDDRISLEELQKRSSDFMAERAALEKELDADSSLKAVERKKDIRRVLDTKDIFMLDYEQQKAVVRALISKVRVTSDSIVILWKL

SEQ ID NO: 7139 - protein, 478 aa, Unknown
  Description of Unknown: Integrase B7140 sequence
  PTHR30461:SF3,SM00857,G3DSA:1.10.10.2600,IPR036162,PF13408, PS51737,G3DSA:3.40.50.1390,IPR025827,IPR006119,IPR038109, PF07508,IPR011109,SSF53041,PTHR30461,Coil, PS51736,cd00338,PF00239
MKYAAAYIRVSDDRQDEYSPDSQLKLIRQYAKSNDYIVPDEYVFYDDGISGRSVKKRKAFNSMIGYAKSKEHPFDAILVWKFSRFARNQEESIVYKSMLRKINVAVISVSETIDDSPFAPLIERIIEFMDEYYSTRLSQEVTRGMTEKASRGEVMTIAPFGYDLKNKTYIPNDNAKTVNYIYDSYLAGKGYRAIAQELATMGIRTKRGNIPDNRFVEYILQNPVYIGKIRWSPEGKQSKQRYKGDNSNVMIIDGKHEAIIDTDKFERVQDMIADQKKRYGKYQRREQPVQFMLKGLMRCGNCGATLVYVGTQSPAMQCHQYARGVCKVSHSLSVAKANRVVIDKIEETLKTLDFNIIYKTQNNPQENIDYDKLIKQEKEKIRRASEAYDAGFDTLEEYGVKKRTYQSRIDEYEKAKSKVPPKESKAVPKKFVDKVANVLKTIKSPETDEAVKNEALRSVIDHITYEKEANNLAIYFYL

SEQ ID NO: 7140 - protein, 478 aa, Unknown
  Description of Unknown: Integrase B7141 sequence
  PTHR30461:SF3,SM00857,IPR006118,IPR036162,PF13408, IPR025827,G3DSA:3.40.50.1390,IPR006119,SSF53041,PF00239, PTHR30461,PS00397,PS51736,Coil,cd00338
MTNQAEKTSYIENVAAYIRVSTQEQKLHGISIEAQEEKLTEYADSHGMKIVKFYKDEGVSGRKLIRKRPALQAMIQDAEKGNFRRIIFIKLDRFFRSVAEYHECMKRLAAGGVIWTATEEKYDLSTPSGEAFVNMKLTMAQFEADQVGERIRMINEYKVKSGQPLYGSQALPFCYQVKQSDDGDRRKYIAKRDEIIMEDLIAHFCKNRSVRAALHYINAKYSRAFSYSTIKNALTSELICGTYRGNPAYCEGYMTPAAFETMQKYIQHNPRTSQREHTYIFGGLIRCPCCGNMLVGSPTVLNRIGKSGQKLSYKYYGYRCYRGNLEKKCDFRTMAFEHRLEAIMLSEVEAVMREKHMYLLRLQSAPQRVAQHDLAELQQELARLNYAWQKGRIKTAADYDRQYDDLMARIDAANAERQELTAKPDYHKISRILSDGWKQLYISLDNDHKRAFWRAFIEEIQLEWTKDVKRIRDITFFT

SEQ ID NO: 7141 - protein, 478 aa, Unknown
  Description of Unknown: Integrase B7142 sequence
  PTHR30461:SF3,SM00857,IPR006118,G3DSA:1.10.10.2600,IPR036162, PS51737,G3DSA:3.40.50.1390,Coil,IPR006119,IPR038109, PF07508,IPR011109,SSF53041,PTHR30461, PS00397,PS51736,cd00338,PF00239
MKIAAAYVRVSTDDQLEYSPDSQLQAIRDYAKSHDLILAEEYIFREEDGRSGRQAEKRPEFMRMISTAKQQPPPFEVILCWKYSRFARNQEESIVYKSMLKKDGIEVLSISEPLIDGPFGSLIERIIEWMDEYYSIRLSGEVKRGMTEKVSRGEPVTIPPLGYLMENKQLVPDPEMAPVISMLFDEFAAGVPMLQLAKKLNEIGIRTRRGNKIENRTVNYILQNPIYIGKIRWTPTGRASNNRYRDAQDTVIVNGNHQPIVTIEQWEKAQAKIAENKQKFARYQRNTVSKVMLRGLVRCSNCGSTLVYLPPSSMQCHLYSKGVCTVSHCISVTRLESAVLQGLEHDALDMGGNLKIEYRTQPAPVATTTIKAQIKKEQNKLQRCKEAYQGGVDTLAEYRNNKEAILSTIADLENQLNTVPTATPAPDPQALRDKIIAAIPVLKDPNVTPTAKNDLLRCFISKIIYTKSGEEIEIYYYM

SEQ ID NO: 7142 - protein, 478 aa, Unknown
  Description of Unknown: Integrase B7143 sequence
  PTHR30461:SF3,SM00857,G3DSA:1.10.10.2600,IPR036162,PS51737, G3DSA:3.40.50.1390,IPR006119,IPR038109,PF07508,SSF53041, IPR011109,PTHR30461,Coil,PS51736,cd00338, PF00239
MKYAAAYIRVSDDRQDEYSPDSQLKLIRQYAKNNDYIVPDEYVFYDDGISGRSVKKRKAFNSMIGYAKSKEHPFDAILVWKFSRFARNQEESIVYKSMLRKINVAVISVSETIDDSPFAPLIERIIEFMDEYYSTRLSQEVTRGMTEKASRGEVMTIAPFGYDLKNKTYIPNDNAKTVNYIYDSYLAGKGYRAIAQELATMGIRTKRGNIPDNRFVEYILQNPVYIGKIRWSPEGKQSKQRYKGDNSNVMIIDGKHEAIIDTDKFERVQDMIADQKKRYGKYQRREQPVQFMLKGLMRCGSCGATLVYVGTQSPAMQCHQYARGVCKVSHSLSIAKANRVVIDKIEETLKTLDFNIIYKTQNNPQENIDYDKLIKQEKEKIRRASEAYDAGFDTLEEYGVKKRTYQSRIDEYENAKSKVPPKESKAVPKKFVDKVASVLKTIKSPETDEAVKNEALRSIIDHITYEKEANNLAIYFYL

SEQ ID NO: 7143 - protein, 478 aa, Unknown
  Description of Unknown: Integrase B7144 sequence
  PTHR30461:SF3,SM00857,G3DSA:1.10.10.2600,IPR036162,PF13408, PS51737,G3DSA:3.40.50.1390,IPR025827,IPR006119,IPR038109, PF07508,IPR011109,SSF53041,PTHR30461,Coil, PS51736,cd00338,PF00239
MKYAAAYIRVSDDRQDEYSPDSQLKLIRQYAKNNDYIVPDEYVFYDDGISGRSVKKRKAFNSMIGYAKSKEHPFDAILVWKFSRFARNQEESIVYKSMLRKINVTVISVSETIDDSPFAPLIERIIEFMDEYYSTRLSQEVTRGMTEKASRGEAMSAAPFGYDSQAKTFIPNDDAKIVNYIYDSYLSGKGYRAIAQELGTMGIRTKRGNIPDNRFVEYVLQNPVYIGKIRWSPECKGSKSRYKGDNSSVMIVDGKHEAIIDTAKFEQVQDMIADQKKRYGKYQRKEQPVQFMLKGLVRCGNCGATLVYVGTKYPALQCHQYARGVCKVSHSLSIAKANRVVIDKIEETLKTLDFNIIYKTQNNPQENIDYDKLIKQEKEKIRRASEAYDAGFDTLEEYGIKKRTYQSRISEYERAKIQQPKKKNDTIPNEFLEKCQNVLKIIKSPEADEAAKNEALRTIIDHITYEKEDNNLAIYFYL

SEQ ID NO: 7144 - protein, 478 aa, Unknown
  Description of Unknown: Integrase B7145 sequence
  IPR036162,PS51737,IPR011109,PTHR30461,PS00397, PF00239,G3DSA:1.10.10.2600,IPR006119,SSF53041,cd00338, SM00857,IPR025827,IPR038109,PS51736,IPR006118, PF13408,G3DSA:3.40.50.1390,PF07508,Coil
MKTVCAYIRVSTDSQEEYSPDAQIRLLKEYAASHDMTIIDIYQDLGISGRNADKRPQFQDMIAMAKSKEHPYDAILVWKFSRFARNQEESIVYKSLLKKNHVDVVSVSEPLPDGVIGELVERIFEWMDEYYSIRLSGEVRRGMTQKALAGGYNSNVPIGYTKERGPDTIPQIDEYYGPMVQRCFHMFAIEHIPMTKIAATINNLGYRTRTGKRWETRNITDMFQNPFYIGKIRWNSASSRRTTPRVGEEIIRDGKHQPLIDQELWDATQERYAKITARMGHGKRPDIYKHWLSGLLKCPNCGGTLAYQNGLDTKTGKHYPYFVCWKNVKGMCATRNSISAGKAAQYVLDGLLNIVEDKDIKTIAPIVQFNQDEAAIAKQIASVKAKLGRVKEAYVNGIDTLEEYKANKEKLEAEIAHLKELVVPEVKPKTVTVDVIRTVHDTITNAQSDSEKATAINSIVDHIVYNKESDTMEFFFVS

SEQ ID NO: 7145 - protein, 478 aa, Unknown
  Description of Unknown: Integrase B7146 sequence
  PTHR30461:SF3,IPR036162,PS51737,IPR011109,PTHR30461, PS00397,PF00239,G3DSA:1.10.10.2600,IPR006119,SSF53041, cd00338,SM00857,IPR025827,IPR038109,PS51736, IPR006118,PF13408,G3DSA:3.40.50.1390,PF07508,Coil
MLIGAAYIRVSTDDQLDLSPDSQLDEIKKYAAANDIVLSPDYIFMEQEGRSGKKAENRPEFQRMISTAKVKPKPFDCILVWKFSRFARNQDESTFYKGMLRKKLGIDVVSVSEPIMEGMYGRLIEMIIEWQDEFYSYNLGVEVKRGMTKKAELKGYQIVPCLGYAAVGNGKPFVIMEDEYKIVEDIFRMYALENLDRTAIARRLNAQGKTAKRGNPFEQRTVTRILTNPFYNGIVNWNGISFQGSHETRRSVTDLYDICQERLKQEFRPVKRRSISTCRHWLSGLLKCSVCGATMSYNGGGKSRPDAVFACWKYAKGLHKESCSVTVAKAEQVVIRSLEKILETGNFEYDRIPRPASEQDSSQKAAIEVKLERLALKEERIRSAYENGIDSLEEYKTRKEQLLKERAELEAELASLEPADCSPAPSLEELLERVKTVHDLLCSPDVDFETKGTALRSILKFIVFDRKADRFEFHYYIS

SEQ ID NO: 7146 - protein, 478 aa, Unknown
  Description of Unknown: Integrase B7147 sequence
  PTHR30461:SF3,IPR036162,PS51737,IPR011109,PTHR30461, PS00397,PF00239,G3DSA:1.10.10.2600,IPR006119,SSF53041, SM00857,IPR025827,IPR038109,PS51736,cd03768, IPR006118,PF13408,G3DSA:3.40.50.1390,PF07508,Coil
MPKVKVGIYIRVSTQEQATEGYSIDAQTDRLTNYCKSRDWSIYNTYIDGGFSGSNTNRPALHQLMQDIKDKKLNCVLVYKLDRLSRSQKDTLYLIEDVFLKNKIDFVSLNENFDTSSPFGRAMIGILSVFAQLEREQIKERSLMGRIERAKNGLWHGGGFEPFGYNYINGQLIVNEYEANIVQEAFELFLQKLPIHRINRIISEKYGKDFHETVLRSILSTRLYTGKISYLGGIYDGQHQAIISEDTFKAAEMLLAYRKKKFSNSNPFKATKLLGGILYCAHCGARYLAKGNYSGHGDKKVYRPYYTCYSRAKSTKKYIVDPNCKNPSYAVVVLDEIIINEIRKLFIDKEYLYSAKNATATSNTVNKQKSILKQIDSIQSQISRLLDLYQIDGISIDDIQDRIKKLQHEKDVLEETLSNLKTSQKKKLTTNEVLSMEASFNEIMENGTDMEKQTIVRTLIDKIIVHEELNSFEIIWNF

SEQ ID NO: 7147 - protein, 478 aa, Unknown
  Description of Unknown: Integrase B7148 sequence
  PTHR30461:SF3,SM00857,G3DSA:1.10.10.2600,IPR036162,PF13408, PS51737,G3DSA:3.40.50.1390,IPR025827,IPR006119,IPR038109, PF07508,IPR011109,SSF53041,PTHR30461,PS51736, cd00338,PF00239
MKYAAAYIRVSDDRQDEYSPDSQLKLIRQYAKNNDYIVPDEYVFYDDGISGRSVKKRKAFNGMIGYAKSKEHPFDAILVWKFSRFARNQEESIVYKSMLRKINVAVISVSETIDDSPFAPLIERIIEFMDEYYSTRLSQEVTRGMTEKASRGEAMSAAPFGYDSQGKSFIPNDDAKIVNYIYDSYLSGKGYRAIAQELGTMGIRTKRGNIPDNRFVEYILRNPVYIGKIRWSPECKGSKSRYKGDNSSVMIVDGKHEAVIDTDKFERVQDMIADQKKRYGKYQRKEQPVQFMLKGLVRCGNCGATLVYVGTKYPAMQCHQYARGVCKVSHSLSIAKANRVVIDKIEETLKTLDFNIIYKTQNNPQENIDYDKLIKQEKEKIRRASEAYDAGFDTLEEYGIKKRTYQSRISEYESAKIQQPKKKNDTIPNEFLEKCQNVLKIIKSPEADEAAKNEALRTIIDHITYEKEDNNLAIYFYL

SEQ ID NO: 7148 - protein, 478 aa, Unknown
  Description of Unknown: Integrase B7149 sequence
  IPR036162,PS51737,IPR011109,PTHR30461,PS00397, PF00239,G3DSA:1.10.10.2600,IPR006119,SSF53041,cd00338, SM00857,IPR025827,IPR038109,PS51736,IPR006118, PF13408,G3DSA:3.40.50.1390,PF07508,Coil
MKTVCAYIRVSTDSQEEYSPDAQIRLLKEYAASHDMTIIDIYQDLGISGRNADKRPQFQDMIAMAKSKEHPYDAILVWKFSRFARNQEESIVYKSLLKKNHVDVVSVSEPLPDGVIGELVERIFEWMDEYYSIRLSGEVRRGMTQKALAGGYNSNVPIGYTKERGPDTIPQIDEYYGPMVQRCFHMFAIEHIPMTKIAATINNLGYRTRTGKRWETRNITDMFQNPFYIGKIRWNSASSRRTTPRVGEEIIRDGKHQPLIDQELWDATQERYAKITARMGHGKRPDIYKHWLSGLLKCPNCGGTLAYQNGLDTKTGKHYPYFVCWKNVKGMCATRNSISAGKAAQYVLDGLLDIVENKDIKTITPIIPFNQDEATVTKQIASVKAKLGRVKESYINGIDTLEEYKANKEKLEAEIAHLKELVVPEVKPKTVTVDVIRTVHDTIMNAQSDSEKATAINSIVDHIIYDKEADTMEFFFIP

SEQ ID NO: 7149 - protein, 478 aa, Unknown
  Description of Unknown: Integrase B7150 sequence
  PTHR30461:SF3,IPR036162,PS51737,IPR011109,PTHR30461, PS00397,PF00239,G3DSA:1.10.10.2600,IPR006119,SSF53041, cd00338,SM00857,IPR025827,IPR038109,PS51736, IPR006118,PF13408,G3DSA:3.40.50.1390,PF07508,Coil
MLIGAAYIRVSTDDQLDLSPDSQLDEIKKYAAANDIVLSPDYIFMEQEGRSGKKAENRPEFQRMISTAKVKPKPFDCILVWKFSRFARNQDESTFYKGMLRKKLGIDVISVSEPIMEGMYGRLIEMIIEWQDEFYSYNLGVEVKRGMTKKAELKGYQIVPCLGYAAVGNGKPFVIVEDEYKIVEDIFRMYALENLDRTAIARRLNAQGKTAKRGNPFEQRTITRILTNPFYNGTVSWNGISFQGSHETRQSVTDLYDICQERLKQEFRPVKRRSISTCRHWLSGILKCSVCGATMSYNGGGKSRPDAVFACWKYAKGLHKESCSVTVAKAERVVIHSLEKILETGNFKYDRIPQPVSEQAAGQKAAVEEKLERLSLKEERIRAAYENGIDSLEEYRERKERLAAERKELEEELASLEPASCSPALSREELLERVKTVHDLLCSPDVDFETKGTALRSILKFIVFDRKADRFEFHYYIS

SEQ ID NO: 7150 - protein, 478 aa, Unknown
  Description of Unknown: Integrase B7151 sequence
  PTHR30461:SF3,SM00857,G3DSA:1.10.10.2600,IPR036162,PS51737, G3DSA:3.40.50.1390,IPR006119,IPR038109,PF07508,SSF53041, IPR011109,PTHR30461,Coil,PS51736,cd00338, PF00239
MKYAAAYIRVSDDRQDEYSPDSQLKLIRQYAKNNDYIVPDEYVFYDDGISGRSVKKRKAFNSMIGYAKSKEHPFDAILVWKFSRFARNQEESIVYKSMLRKINVAVISVSETIDDSPFAPLIERIIEFMDEYYSTRLSQEVTRGMTEKASRGEVMTIAPFGYDLKNKTYIPNDNAKTVNYIYDSYLAGKGYRAIAQELSAMGIRTKRGNIPDNRFVEYVLQNPVYIGKIRWSPEGKQSKQRYKGDNSNVMIIDGKHEAIIDTDKFERVQDMIADQKKRYGKYQRREQPVQFMLKGLMRCGNCGATLVYVGTQSPAMQCHQYARGVCKVSHSLSIAKANRVVIDKIEETLKTLDFNIIYKTQNNPQENIDYDKLIKQEKEKIRRASEAYDAGFDTLEEYGVKKRTYQSRIDEYEKAKSKVPQKENKAVPKEFVDKVASVLKTIKSPETDEAVKNEALRSVIDHITYEKEDNNLAIYFYL

SEQ ID NO: 7151 - protein, 478 aa, Unknown
  Description of Unknown: Integrase B7152 sequence
  PTHR30461:SF3,IPR036162,PS51737,IPR011109,PTHR30461, PS00397,PF00239,G3DSA:1.10.10.2600,IPR006119,SSF53041, cd00338,SM00857,IPR025827,IPR038109,PS51736, IPR006118,PF13408,G3DSA:3.40.50.1390,PF07508,Coil
MLIGAAYIRVSTDDQLDLSPDSQLDEIKKYAAANDIVLSPDYIFMEQEGRSGKKAENRPEFQRMISTAKVKPKPFDCILVWKFSRFARNQDESTFYKGMLRKKLGIDVVSVSEPIMEGMYGRLIEMIIEWQDEFYSYNLGVEVKRGMTKKAELKGYQIVPCLGYAAVGNGKPFVIVEDEYKIVEDIFRMYALENLDRTAIARRLNAQGKKAKRGNPFEQRTITRILTNPFYNGTVSWNGISFQGSHETRQSVTGLYDICQERLKQEFRPVKRRSISTCRHWLSGILKCSVCGATMSYNGGGKSRPDAVFACWKYAKGLHKESCSVTVAKAERIVIRSLEKILETGNFEYDRIPRPASEQDSSQKATIEVKLERLALKEERIRAAYENGIDSLEEYRTRKEQLLKERTELEAELASLEPADCSPALSREELLERVKTVHDLLCSPDVDFETKGTALRSILKFIVFDRKADRFEFHYYIS

SEQ ID NO: 7152 - protein, 478 aa, Unknown
  Description of Unknown: Integrase B7153 sequence
  PTHR30461:SF3,IPR036162,PS51737,IPR011109,PTHR30461, PS00397,PF00239,G3DSA:1.10.10.2600,IPR006119,SSF53041, SM00857,IPR025827,IPR038109,PS51736,cd03768, IPR006118,PF13408,G3DSA:3.40.50.1390,PF07508,Coil
MPKIKVGIYIRVSTQEQANEGYSIDAQTDRLTSYCKSRDWAIYNTYIDGGFSGSNTNRPALHQLMQDIQDKKLNCVLVYKLDRLSRSQKDTLYLIEDVFLKNKIDFVSLNENFDTSSPFGRAMIGILSVFAQLEREQIKERSLMGRIERAKNGLWHGGGFEPFGYNYINGQLIVNEYEANIVREAFELFLQKLPIHRINRIISEKYGKEFHETVLRSILSTRLYTGKISYLGGIYDGQHQAIITEDTFKAAETLLAYRKKKFSNSNPFKATRLLGGILYCAHCGARYLAKGNYSGHGNKKVYRPYYTCYSRAKCTKKYILDPNCKNPSYAVVVLDEIIINEIRKLFINKEYLYSAKNATAATNTINKQKSILKQIDSIQSQISRLLDLYQIEGISIDDIQDRIKKLQHEKDVLEETFSNLKTNQKKKLTTTEVLSMEASFNEIMENGTDMEKQAIVRTLIDKIIVHEELNSFEIIWNF

SEQ ID NO: 7153 - protein, 478 aa, Unknown
  Description of Unknown: Integrase B7154 sequence
  PTHR30461:SF3,SM00857,IPR006118,G3DSA:1.10.10.2600,IPR036162, PS51737,G3DSA:3.40.50.1390,Coil,IPR006119,IPR038109, PF07508,IPR011109,SSF53041,PTHR30461,PS00397, PS51736,cd00338,PF00239
MKIAAAYVRVSTDDQLEYSPDSQLQAIRDYAKSHDLILSEEYIFREEDGRSGRQAEKRPEFMRMISTAKQQPPPFEVILCWKYSRFARNQEESIVYKSMLKKDGIEVLSISEPLIDGPFGSLIERIIEWMDEYYSIRLSGEVKRGMTEKVSRGEPVTIPPLGYLMENKQLVPDPEMAPVISMLFDEFAAGTPMLQLARRLNEMGIRTRRGNKIENRTINYILQNPIYIGKIRWTPTGRASNNRYRDAQDTVIVNGNHQPIVTIEQWEKAQAKIADNKQKFARYQRNTVSKVMLRGLVRCSNCGSTLVFLPPSSMQCHLYSKGVCTVSHCISVTRLESAVLQGLEHDALDMGGNLKIEYRTQPAPVATVTIKAQIKKEQNKLQRCKEAYQGGVDTLAEYRNNKEAILSTIADLENQLNTAPTATPAPDPQALRDKIIAAIPVLKDPSVTPTAKNDLLRCFISKIIYTKSGEEIEIYYYM

SEQ ID NO: 7154 - protein, 478 aa, Unknown
  Description of Unknown: Integrase B7155 sequence
  PTHR30461:SF3,SM00857,G3DSA:1.10.10.2600,IPR036162,PF13408, IPR025827,PS51737,G3DSA:3.40.50.1390,IPR006119,IPR038109, PF07508,IPR011109,SSF53041,PTHR30461,Coil, PS51736,cd00338,PF00239
MKYAAAYIRVSDDRQDEYSPYSQLKLIRQYAKNNDYIVPDEYVFYDDGISGRSVKKRKAFNSMIGYAKSKEHPFDAILVWKFSRFARNQEESIVYKSMLRKINVAVISVSETIDDSPFAPLIERIIEFMDEYYSTRLSQEVTRGMTEKASRGEVMTIAPFGYDLKNKTYIPNDNAKTVNYIYDSYLAGKGYRAIAQELAAMGIRTKRGNIPDNRFVEYILQNPVYIGKIRWSPEGKQSKQRYKGDNSNVMIIDGKHEAIIDTDKFERVQDMIADQKKRYGKYQRREQPVQFMLKGLMRCGNCGATLVYVGTQSPAMQCHQYARGVCKVSHSLSVAKANRVVIDKIEETLKTLDFNIIYKTQNNPQENIDYDKLIKQEKEKIRRASEAYDAGFDTLEEYGVKKRTYQSRIDEYEKAKSKVPPKESKAVPKEFVDKVASVLKTIKSPETDEAVKNEALRSIIDHITYEKEANNLAIYFYL

SEQ ID NO: 7155 - protein, 478 aa, Unknown
  Description of Unknown: Integrase B7156 sequence
  PTHR30461:SF3,IPR036162,PS51737,IPR011109,PTHR30461, PS00397,PF00239,G3DSA:1.10.10.2600,IPR006119,SSF53041, SM00857,IPR025827,IPR038109,PS51736,cd03768, IPR006118,PF13408,G3DSA:3.40.50.1390,PF07508,Coil
MNKVALYVRVSTTSQLEEGYSIEEQKAKLESYCDIKDWHIYKVYTDGGFSGSTTERPALEQLIKDAQSKLFDTVLVYKLDRLSRSQKDTLYLIEDIFLKNNIEFVSLLENFDTSTPFGRAVIGLLSVFAQLEREQIKERMQLGKLGRAKSGKSMMWAKTSYGYNYDKETGSMTVNEYEALAVKEIFTSYLAGMSITKLRDKINEEYPKQPAWSYRTIRGILANPVYCGLNQYKGQTFQGTHKPIISLDDFEQTQRELAKRQQTAKELSNPRPFQAKYMLSGLAQCGYCHAPLKVILGQKRKDGSRFKRYECYQRHPRKTRGVTVYNDNKKCESGYYDMELLEHYVLTRIAQLQNDPDKIQELFSDDTSPAVDKQAIQKQIDSLTLKLSKLNDLYLDDRITLDELRTKSADFIKQRNALEDEIKKASNDKQAGKREKIEKMLDASSVLEMSYDNQKVIVRELIDKVQVTSDKIVIRWKI

SEQ ID NO: 7156 - protein, 478 aa, Unknown
  Description of Unknown: Integrase B7157 sequence
  IPR036162,PS51737,IPR011109,PTHR30461,PS00397, PF00239,G3DSA:1.10.10.2600,IPR006119,SSF53041,cd00338, SM00857,IPR025827,IPR038109,PS51736,IPR006118, PF13408,G3DSA:3.40.50.1390,PF07508,Coil
MKTVCAYIRVSTDSQEEYSPDAQIRLLKEYAASHDMTIIDIYQDLGISGRNADKRPQFQDMIAMAKSKEHPYDAILVWKFSRFARNQEESIVYKSLLKKNHVDVVSVSEPLPDGVIGELVERIFEWMDEYYSIRLSGEVRRGMTQKALAGGYNSNVPIGYTKERGPDTIPQIDEYYGPMVQRCFHMFAIEHIPMTKIAATINNLGYRTRTGKRWETRNITDMFQNPFYIGKIRWNSASSRRTTPRVGEEIIRDGKHQPLIDQELWDATQERYAKITARMGHGKRQDIYKHWLSGLLKCPNCGGTLAYQNGLDTKTGKHYPYFVCWKNVKGMCATRNSISAGKAAQYVLDGLLNIVEDKDIKTIAPIVQFNQDEAAIAKQIASVKAKLGRVKEAYVNGIDTLEEYKANKEKLEAEIAHLKELVVPEVKPKTVTVDVIRTVHDTIMNAQSDSEKATAINSIVDHIIYDKEADTMEFFFIP

SEQ ID NO: 7157 - protein, 478 aa, Unknown
  Description of Unknown: Integrase B7158 sequence
  PTHR30461:SF3,IPR036162,PS51737,IPR011109,PTHR30461, PS00397,PF00239,G3DSA:1.10.10.2600,IPR006119,SSF53041, SM00857,IPR025827,IPR038109,PS51736,cd03768, IPR006118,PF13408,G3DSA:3.40.50.1390,PF07508,Coil
MHKVAIYVRVSTTSQVDEGYSIDEQKAKLTSYCDIKDWNIYEIYTDGGFSGSNTERPALEQLIRDAKRKLFDTVLVYKLDRLSRSQKDTLYLIEDVFLENDIEFVSLLENFDTSTPFGKAMIGLLSVFAQLEREQIKERMQLGKLGRAKSGKSMQWAKTSFGYDYIKETGTLSINPYQALIVRKMFEWYLSGMSITKLRDTLNEQYGQDKEWNYRTVRVILSNPVYCGYNQFKGQIFPGTHEPIISEEDFNKTQEEIKTRQRTAAQRFNPRPFQAKYMLSGIAQCGYCSAPLAIKLGMKRKDGTRLVKYECKQRHPRKTKGVTVYNNNEKCDSGFYFKDDIEHFVLTEISKLQTDSDYIDKLFSNTGKETIDRDSYQKQIDNLTAKISRLNDLYIDDRISLEELQKRSSDFMAERTALEKELDADSSVKAVERKEDIKRVLDTKDVFSLDYDQQKAIARALISKVRVTSETIVILWKL

SEQ ID NO: 7158 - protein, 478 aa, Unknown
  Description of Unknown: Integrase B7159 sequence
  PTHR30461:SF3,IPR036162,PS51737,IPR011109,PTHR30461, PS00397,PF00239,G3DSA:1.10.10.2600,IPR006119,SSF53041, cd00338,SM00857,IPR025827,IPR038109,PS51736, IPR006118,PF13408,G3DSA:3.40.50.1390,PF07508,Coil
MKRKMVVAIYIRVSTQEQALEGYSIDEQQKRLLSFCEAKNWTVYKIYVDPGYSGSNLDRPAVQQLIKDAERHCFDMVLIYKLDRLSRSQKDTMHLLEDVFLVNNVDLVAMNESFDTSTPFGRAMIGILSVFAQLERENIKERTSMGRKARISKGYFHGSHPPLGYQFKPGGNDLEINQYESVIVREIFDKFLSGATIYSIAEDMEKTYGNNVRGWNNTMIRRILRNPVYFGKVRYGGETFDGLHEPLISEKDFAKVQAVLTRNKELDRRTYDYRTSTGKTADHLLTGLLYCGDCGARMAYNKVSKNVSRYSCYSVSRKNKVLIRSDYCTNRLNPYSAHELEELILGEIAKLAKDPNHVVETIETTLPDDKSTPIRNRLDEVNTQVSKLLDLYQLGFTDLSQISEKLEALKDEKNKLENQLENLKVIPTIDVNAVYETLEDFDDLLEYGTPQEIHAVVHTLIDKIVILNDDIKIYWSFC

SEQ ID NO: 7159 - protein, 478 aa, Unknown
  Description of Unknown: Integrase B7160 sequence
  PTHR30461:SF3,SM00857,G3DSA:1.10.10.2600,IPR036162,PF13408, PS51737,G3DSA:3.40.50.1390,IPR025827,IPR006119,IPR038109, PF07508,IPR011109,SSF53041,PTHR30461,PS51736, cd00338,PF00239
MKYAAAYIRVSDDRQDEYSPDSQLKLIRQYAKNNDYIVPDEYVFYDDGISGRSVKKRKAFNSMIGYAKSKEHPFDAILVWKFSRFARNQEESIVYKSMLRKINVTVISVSETIDDSPFAPLIERIIEFMDEYYSTRLSQEVTRGMTEKASRGEAMSAAPFGYDSQGKSFIPNDDAKIVNYIYDSYLSGKGYRAIAQELGTMGIRTKRGNIPDNRFVEYILRNPVYIGKIRWSPECKGSKSRYKGDNSSVMIVDGKHEAIIDTAKFEQVQDMIADQKKRYGKYQRKEQPVQFMLKGLVRCGNCGATLVYVGTKYPALQCHQYARGVCKVSHSLSIAKANRVVIDKIEETLKTLDFNIIYKTQSDLQENIDYDKLIKQEKEKIRRASEAYDAGFDTLEEYGIKKRTYQSRISEYESAKIQQPKKKNDTIPNEFLEKCQNVLKIIKSPEADEAAKSEALRTIIDHITYEKEDNNLAIYFYL

SEQ ID NO: 7160 - protein, 478 aa, Unknown
  Description of Unknown: Integrase B7161 sequence
  PTHR30461:SF3,IPR036162,PS51737,IPR011109,PTHR30461, PS00397,PF00239,G3DSA:1.10.10.2600,IPR006119,SSF53041, cd00338,SM00857,IPR025827,IPR038109,PS51736, IPR006118,PF13408,G3DSA:3.40.50.1390,PF07508,Coil
MLIGAAYVRVSTDDQLDLSPDSQLDEIKKYAAANDIVLSPDYIFMEQEGRSGKKAENRPEFQRMISTAKVKPKPFDCILVWKFSRFARNQDESTFYKGMLRKKLGIDVISVSEPIMEGMYGRLIEMIIEWQDEFYSYNLGVEVKRGMTKKAELQGYQIVPCLGYAAVGNGKPFVIVEDEYKIVEDIFRMYALENLDRTAIARRLNAQGKKAKRGNPFEQRTITRILTNPFYNGTVSWNGISFQGSHETRQSVTDLYDICQERLKQEFRPVKRRSISTCRHWLSGILKCSVCGATMSYNGGGKSRPDAVFACWKYAKGLHKESCSVTVAKAERIVIRSLEKILETGNFEYDRIPRPASEQDSSQKVAIEVKLERLALKEERIRSAYENGIDSLEEYRTRKEQLLKERAELEAELASLEPADCSPALSREELLERVKTVHDLLCSPDVDFETKGTALRSILKFIVFDRKADRFEFHYYIS

SEQ ID NO: 7161 - protein, 478 aa, Unknown
  Description of Unknown: Integrase B7162 sequence
  PTHR30461:SF3,cd00338,SM00857,IPR006118,IPR036162, PF13408,IPR025827,G3DSA:3.40.50.1390,IPR006119,SSF53041, PTHR30461,PS00397,PS51736,Coil,PF00239
MTNQAERTSYIENVAAYIRVSTQEQKLHGISIEAQEEKLNEYADSHGMKIVKFYKDEGVSGRKLIRKRPALQAMIQDAEKGNFRRIIFIKLDRFFRSVAEYHECMKRLAAGGVIWTATEEKYDLSTPSGEAFVNMKLTMAQFEADQVGERIRMINEYKVKSGQPLYGSQALPFCYQVKQSGDGDRRKYIAKRDEIIMEDLIDHFCKNRSVRAALHYINAKYSRAFSYSTIKNALTSELICGTYRGNPAYCEGYMTPAAFETMQKYIQHNPRTSQREHSYIFGGLIRCPCCGNMLVGSPTVLNRIGKSGQKLSYKYYGYRCYRGNLEKKCDFRTMAFEHRLEAIMLSEVEAVMRGKQMYLLRLQNAPQRVAQHDLAELQQELARLNYAWQKGRIKTAADYDRQYDDLMTRIDAANAERQELAANPDYRKISRILSDGWKQLYISLDNDHKRAFWRAFIEEIQLEWTKDVKRIRDITFFT

SEQ ID NO: 7162 - protein, 478 aa, Unknown
  Description of Unknown: Integrase B7163 sequence
  PTHR30461:SF3,cd00338,SM00857,IPR006118,IPR036162, PF13408,IPR025827,G3DSA:3.40.50.1390,IPR006119,SSF53041, PTHR30461,PS00397,PS51736,Coil, PF00239
MTNQAEKTSYIENVAAYIRVSTQEQKLHGISIEAQEEKLTEYADSHGMKIVKFYKDEGVSGRKLIRKRPALQAMIQDAEKGNFRRIIFIKLDRFFRSVAEYHECMKRLAAGSVIWTATEEKYDLSTPSGEAFVNMKLTMAQFEADQVGERIRMINEYKVKSGQPLYGSQALPFCYQVKQSGDGDRRKYIAKRDEIIMEDLIDHFCKNRSVRAALHYINAKYSRAFSYSTIKNALTSELICGTYRGNPAYCEGYMTPAAFETMQKYIQHNPRTSQREHSYIFGGLIRCPCCGNMLVGSPTVLNRIGKSGQKLSYKYYGYRCYRGNLEKKCDFRTMAFEHRLEAIMLSEVEAVMRGKQMYLLRLQNAPQRVAQHDLAELQQELARLNYAWQKGRIKTAADYDRQYDDLMARIDAANAERQELAANPDYRKISRILSDGWKQLYISLDNDHKRAFWRAFIEEIQLEWTKDVKRIRDITFFT

SEQ ID NO: 7163 - protein, 478 aa, Unknown
  Description of Unknown: Integrase B7164 sequence
  PTHR30461:SF3,IPR036162,PS51737,IPR011109,PTHR30461, PS00397,PF00239,G3DSA:1.10.10.2600,IPR006119,SSF53041, SM00857,IPR025827,IPR038109,PS51736,cd03768, IPR006118,PF13408,G3DSA:3.40.50.1390,PF07508,Coil
MNKVAIYVRVSTQEQANEGYSIQEQTERLTKYCEAHGWIVAKVYSDPGFSGANRNRPALQLLCSDITKSVFDTVLVYKLDRLSRSQKDTLYMIEDIFLKNNIAFISMSENFDTGTPFGRAMIGILSVFAQLERDQIRERMQMGLDARAKDGYFHGGGYAPVGYDYDNGLLTVNEYEATIVRKAYDLFLGGMPIHSTWVSLCREYPAGTRFGQLTYSTVASMLTSILYAGFISWKGETYPGKHEAIIPYERFQEAQRLIQRRRIEEPQRLSAFLHTSILGGLIFCGYCGARYYCKTNTASKKSHIIQRYYTCYSRGKSNARMIRDPNCKNKSWNTKKLDSIILAEISKLELSRDFDSYNIAPDNSGRIASLTAALANTDKKLEKLIDLYAADTIPVNLLNTRIAKLNAEKEALEAELTSLQTAPEPDLSVEKANEILDGFQTVLDSGDDNLLRDLVRSLIDSIVIRSEEIEIHWKFSAF

SEQ ID NO: 7164 - protein, 478 aa, Unknown
  Description of Unknown: Integrase B7165 sequence
  PTHR30461:SF3,cd00338,SM00857,IPR006118,IPR036162, PF13408,IPR025827,G3DSA:3.40.50.1390,IPR006119,SSF53041, PTHR30461,PS00397,PS51736,Coil,PF00239
MTNQAEKTSYIENVAAYIRVSTQEQKLHGISIEAQEEKLNEYADSHGMKIVKFYKDEGVSGRKLIRKRPALQAMIQDAEKGNFRRIIFIKLDRFFRSVAEYHECMKRLAAGGVIWTATEEKYDLSTPSGEAFVNMKLTMAQFEADQVGERIRMINEYKVKSGQPLYGSQALPFCYQVKQSGDGDRRKYIAKRDEIIMEDLIDHFCKNRSVRAALHYINAKYSRAFSYSTIKNALTSELICGTYRGNPAYCEGYMTPAAFETMQKYIQHNPRTSQREHTYIFGGLIRCPCCGNMLVGSPTVLNRIGKSGQKLSYKYYGYRCYRGNLEKKCDFRTMAFEHRLEAIMLSEVEAVMREKHMYLLRLQSAPQRVAQHDLAELQQELARLNYAWQKGRIKTAADYDRQYDDLMARIDAANAERQELNAKPDYRKISRILSEGWKQLYISLDNDHKRAFWRAFIEEIQLEWTKDVKRIRDITFFT

SEQ ID NO: 7165 - protein, 478 aa, Unknown
  Description of Unknown: Integrase B7166 sequence
  PTHR30461:SF3,SM00857,G3DSA:1.10.10.2600,IPR036162,PF13408, PS51737,IPR025827,G3DSA:3.40.50.1390,IPR006119,IPR038109, PF07508,IPR011109,SSF53041,PTHR30461, PS51736,cd00338,PF00239
MKYAAAYIRVSDDRQDEYSPDSQLKLIRQYAKNNDYIVPDEYVFYDDGISGRSVKKRKAFNSMIGYAKSKEHPFDAILVWKFSRFARNQEESIVYKSMLRKINVAVISVSETIDDSPFAPLIERIIEFMDEYYSTRLSQEVTRGMTEKASRGEAMSAAPFGYDSQGKSFIPNDDAKIVNYIYDSYLSGKGYRAIAQELGTMGIRTKRGNIPDNRFVEYILQNPVYIGKIRWSPECKGSKSRYKGDNSSVMIVDGKHEAIIDTAKFEQVQDMIADQKKRYGKYQRKEQPVQFMLKGLVRCGNCGATLVYVGTKYPAMQCHQYARGVCKVSHSLSIAKANRVVIDKIEETLKTLDFNIIYKTQNNPQENIDYDKLIKQEKEKIRRASEAYDAGFDTLEEYGIKKRTYQSRISEYESAKIQQPKKKNDTIPNEFLEKCQNVLKIIKSPEADEAAKNEALRTIIDHITYEKEDNNLAIYFYL

SEQ ID NO: 7166 - protein, 478 aa, Unknown
  Description of Unknown: Integrase B7167 sequence
  PTHR30461:SF3,SM00857,G3DSA:1.10.10.2600,IPR036162,PS51737, G3DSA:3.40.50.1390,IPR006119,IPR038109,PF07508,IPR011109, SSF53041,PTHR30461,Coil,PS51736,cd00338, PF00239
MKYAAAYIRVSDDRQDEYSPYSQLKLIRQYAKNNDYIVPDEYVFYDDGISGRSVKKRKAFNSMIGYAKSKEHPFDAILVWKFSRFARNQEESIVYKSMLRKINVAVISVSETIDDSPFAPLIERIIEFMDEYYSTRLSQEVTRGMTEKASRGEVMTIAPFGYDLKNKTYIPNDNAKTVNYIYDSYLAGKGYRAIAQELAAMGIRTKRGNIPDNRFVEYILQNPVYIGKIRWSPEGKQSKQRYKGDNSNVMIIDGKHEAIIDTDKFERVQDMIADQKKRYGKYQRREQPVQFMLKGLMRCGNCGATLVYVGTQSPAMQCHQYARGVCKVSHSLSIAKANRVVIDKIEETLKTLDFNIIYKTQNNPQENIDYDKLIKQEKEKIRRASEAYDAGFDTLEEYGVKKRTYQSRIDEYEKAKSKVPPKESKAVPKEFVDKVASVLKTIKSPETDEAVKNEALRSVIDHITYEKEANNLAIYFYL

SEQ ID NO: 7167 - protein, 478 aa, Unknown
  Description of Unknown: Integrase B7168 sequence
  PTHR30461:SF3,SM00857,G3DSA:1.10.10.2600,IPR036162,PF13408, PS51737,IPR025827,G3DSA:3.40.50.1390,IPR006119,IPR038109, PF07508,IPR011109,SSF53041,PTHR30461,Coil, PS51736,cd00338,PF00239
MKYAAAYIRVSDDRQDEYSPDSQLKLIRQYAKNNDYIVPDEYVFYDDGISGRSVKKRKAFNNMIGYAKSKEHPFNAILVWKFSRFARNQEESIVYKSMLRKINVAVISVSETIDDSPFAPLIERIIEFMDEYYSTRLSQEVTRGMTEKASRGEAMSAAPFGYDSQGKSFIPNDDAKIVNYIYDSYLSGKGYRAIAQELGTMGIRTKRGNIPDNRFIEYILQNPVYIGKIRWSPECKGSKSRYKGDNSSVMIVDGKHEAIIDTAKFEQVQDMIADQKKRYGKYQRKEQPVQFMLKGLVRCGNCGATLVYVGTKYPALQCHQYARGVCKVSHSLSIAKANRVVIDKIEETLKTLDFNIIYKTQSDLQENIDYDKLIKQEKEKIRRASEAYDAGFDTLEEYGIKKRTYQSRISEYESAKIQQPQKKNDTIPNEFLEKCQNVLKIIKSPEADEAAKNEALRTIIDHITYEKEDNNLAIYFYL

SEQ ID NO: 7168 - protein, 478 aa, Unknown
  Description of Unknown: Integrase B7169 sequence
  PTHR30461:SF3,IPR036162,PS51737,IPR011109,PTHR30461, PS00397,PF00239,PS50942,IPR013809,G3DSA:1.10.10.2600, IPR006119,SSF53041,SM00857,IPR025827,IPR038109,PS51736 ,cd03768,IPR006118,PF13408,G3DSA:3.40.50.1390,PF07508,Coil
MNKVALYVRVSTTSQLEEGYSIEEQKAKLESYCDIKDWHVYKVYTDGGFSGSTTERPALEQLIKDAQSKLFDTVLVYKLDRLSRSQKDTLYLIEDIFLKNNIEFVSLLENFDTSTPFGRAVIGLLSVFAQLEREQIKERMQLGKLGRAKSGKSMMWAKTSYGYNYNKDTGTMTVNEYEALAVKEIFTSYLAGMSITKLRDKINGEYPKQPAWSYRTIRGILANPVYCGLNQYKGQTFQGTHKAIISLDDFEQTQRELAKRQQTAKELSNPRPFQAKYMLSGLAQCGYCHAPLKVILGAVRKDGTRFKRYECYQRHPRKTRGVTVYNDNKKCESGYYDMELLEHYVLTRIAQLQNDPDKIKELFSDDASPAVDRQAIQKQIDSLTLKLSKLNDLYLDDRITLDELRTKSADFIKQRSSLEAEIKKASNDEQAGQREKIEKLLDASSVLDMSYDNQKVIVRELIDKVQVTSDKIVIRWKI

SEQ ID NO: 7169 - protein, 478 aa, Unknown
  Description of Unknown: Integrase B7170 sequence
  PTHR30461:SF3,SM00857,G3DSA:1.10.10.2600,IPR036162,PF13408, IPR025827,G3DSA:3.40.50.1390,PS51737,IPR006119,IPR038109, PF07508,IPR011109,SSF53041,PTHR30461,Coil, PS51736,cd00338,PF00239
MKYAAAYIRVSDDRQDEYSPDSQLKLIRQYAKSNDYIVPDEYVFYDDGISGRSVKKRKAFNSMIGYAKSKEHPFDAILVWKFSRFARNQEESIVYKSMLRKINVAVISVSETIDDSPFAPLIERIIEFMDEYYSTRLSQEVTRGMTEKASRGEVMTIAPFGYDLKNKTYVPNDNAKNVNYIYDSYLAGKGYRAIAQELAAMGIRTKRGNIPDNRFVEYILQNPVYIGKIRWSPEGKQSKQRYKGDNSNVMIIDGKHEAIIDTDKFERVQDMIADQKKRYGKYQRREQPVQFMLKGLMRCGNCGATLVYVGTQSPAMQCHQYARGVCKVSHSLSVAKANRVVIDKIEETLKTLDFNIIYKTQNNPQENIDYDKLIKQEKEKIRRASEAYDAGFDTLEEYGVKKRTYQSRIDEYENAKSKVPPKESKAVPKKFVDKVASVLKTIKSPETDETVKNEALRSVIDHITYEKEANNLAIYFYL

SEQ ID NO: 7170 - protein, 478 aa, Unknown
  Description of Unknown: Integrase B7171 sequence
  PTHR30461:SF3,IPR036162,PS51737,IPR011109,PTHR30461, PS00397,PF00239,G3DSA:1.10.10.2600,IPR006119,SSF53041, cd00338,SM00857,IPR025827,IPR038109,PS51736, IPR006118,PF13408,G3DSA:3.40.50.1390,PF07508,Coil
MLIGAAYIRVSTDDQLDLSPDSQLDEIKKYAAANDIVLSPDYIFMEQDGRSGKKAENRPEFQRMISTAKVKPKPFDCILVWKFSRFARNQDESTFYKGMLRKKLGIDVVSVSEPIMEGMYGRLIEMIIEWQDEFYSYNLGVEVKRGMTKKAELKGYQIVPCLGYAAVGNGKPFVIVEDEYKIVEDIFRMYALENLDRTAIARRLNAQGKKAKRGNPFEQRTITRILTNPFYNGTVSWNGISFQGSHETRQSVTDLYDICQERLKQEFRPVKRRSISTCRHWLSGILKCSVCGATMSYNGGGKSRPDAVFACWKYAKGLHKESCSVTVAKAERIVIRSLEKILETGNFEYDLIPRPASEQDSSQKVAIGVKLERLALKEERIRAAYENGIDSLEEYRTRKEQLLKERAELEAELASLEPADCSPALSREELLERVKTVHDLLCSPDVDFETKGTALRSILKFIVFDRKADRFEFHYYIS

SEQ ID NO: 7171 - protein, 478 aa, Unknown
  Description of Unknown: Integrase B7172 sequence
  PTHR30461:SF3,SM00857,G3DSA:1.10.10.2600,IPR036162,PF13408, PS51737,G3DSA:3.40.50.1390,IPR025827,IPR006119,IPR038109, PF07508,IPR011109,SSF53041,PF00239,PTHR30461, PS51736,Coil,cd00338
MTIIGEYCDRAISGKTDNRPNFQRLIKDSEKGQFEAVIMYTLDRFARNRYDSAIYKAKLKKNGVRVYYAKQPMPDTPEGIILESVLEGYAEYYSENLSRNIKRGMKENALQCLANGGAGMPLGYIVGEDRKYKIDPVGAKIVQEIFQMYADGMSATQIINECNKRGYKTSRGNAFNKNSLRTMLKNDRYIGIYRFADVIVENGIPPIISRELFDKVQAMLKHNYSARARKKAKDDYLLTTKLFCGHCGSAMVGESGTSKSGKLHHYYKCIDRKRNRKCKKAVEKKDWIEELVVRFTVQKVLTDENIERISARAMEIIEKESTDTTYIDGLQNELKDIKKKIKNLMNAIEQGIITSTTKERMNELELEKNEVEGKIAREEMKKPLLTKERIMYWLYSFKSGDIDDIEYRRRVIDTLVNSVYVYDDGEKGRRIVFTFNISGQNTATLSCSDIACAAPPRKAVKFHISQLFATIWRDFRGY

SEQ ID NO: 7172 - protein, 478 aa, Unknown
  Description of Unknown: Integrase B7173 sequence
  PTHR30461:SF3,IPR036162,PS51737,IPR011109,PTHR30461, PS00397,PF00239,G3DSA:1.10.10.2600,IPR006119,SSF53041, SM00857,IPR025827,IPR038109,PS51736,cd03768, IPR006118,PF13408,G3DSA:3.40.50.1390,PF07508
MQKRCFIYIRVSTQRQAEEGYSIPEQKERLEKYADAMDWKIMHTYIDGGYSGGNTDRPALQDMLREVERGNTDIILVDKIDRFARNLVDTVNILENVLNPHGVAFVSRAEAFDSSSQIGKFCLYILAMFAEMERTRIKERMADGKTGRAKEGKYKGGGHIPIGYDYDQESGALVPNEYEAAQVREIFDLFNSRTAIHTIMVQMNKKGYRTKYGEWGEGTIRYMVSNRVYLGEISHKGEWYAGLHKPIIERAVFDHAQQVLKEREKTWERYRPGKRYRSPLGGLIWCERCMAKYQLRNNGHNKDGAMRAYYMCYSRAKSDPKMVKDPNCKNKTYRDRDLEKIVYEEIRKLKTDPSYYPTITQSRDNAPQRKMLEKRVAQIDGQISRLMDLYMLGTIDVQAIQSKTTPLNNEKNALLAQIENLKDAAPKMSLERVLELVNMFETELAANDRTSGKLHDTIAEIIEHIGIDGEEVHIHWAF

SEQ ID NO: 7173 - protein, 478 aa, Unknown
  Description of Unknown: Integrase B7174 sequence
  PTHR30461:SF3,SM00857,G3DSA:1.10.10.2600,IPR036162,PS51737, G3DSA:3.40.50.1390,IPR006119,IPR038109,PF07508,IPR011109, SSF53041,PTHR30461,Coil,PS51736,cd00338, PF00239
MKYAAAYIRVSDDRQDEYSPDSQLKLIRQYAKNNDYIVPDEYVFYDDGISGRSVKKRKAFNNMIGYAKSKEHPFDAILVWKFSRFARNQEESIVYKSMLRKINVAVISVSETIDDSPFAPLIERIIEFMDEYYSTRLSQEVTRGMTEKASRGEVMTIAPFGYDLKNKTYIPNDNAKTVNYIYDSYLAGKGYRAIAQELATMGIRTKRGNIPDNRFVEYVLQNPVYIGKIRWSPEGKQSKQRYKGDNSNVMIIDGKHEAIIDTDKFERVQDMIADQKKRYGKYQRREQPVQFMLKGLMRCGNCGATLVYVGTKSPAMQCHQYARGVCKVSHSLSIAKANRVVIDKIEETLKTLDFNIIYKTQNNPQENIDYDKLIKQEKEKIRRASEAYDAGFDTLEEYGVKKRTYQSRIDEYEKAKSKVPSKENKAVPKEFVDKVASVLKTIKSPETDEAVKNEALRSVIDHITYEKEDNNLAIYFYL

SEQ ID NO: 7174 - protein, 478 aa, Unknown
  Description of Unknown: Integrase B7175 sequence
  PTHR30461:SF3,IPR036162,PS51737,IPR011109,PTHR30461, PS00397,PF00239,G3DSA:1.10.10.2600,IPR006119,SSF53041, SM00857,IPR025827,IPR038109,PS51736,cd03768, IPR006118,PF13408,G3DSA:3.40.50.1390,PF07508,Coil
MNKVAIYVRVSTTNQAEEGYSIEEQIDKLKAYCMIKDWSVYDVYVDAGFSGSNIKRPAIQKLIKDTKRKVFDTVLVYKLDRLSRSQKDTLYLIEDVFLENKIDFVSLLENFDTSTAFGKAMVGILSVFAQLDREQIKERMQLGKLGRAKSGKPMMWAKVAYGYTYHIGTGKMTVNQSEAIIVKEVFSSYLNGRSITKLRDDLNEKYPKTPAWSYRTIRQMLDNPVYCGYNKYKGQVYPGNHAPIISKEIYNQVQDELKIRQQKAYEHNNNYRPFQSKYMLSGIAQCGYCKAPLKITLGTIRKDGTRFKRYQCVQRTPRKTKGATIYNNNEKCNSGFYEKDDIEAYVLESISKLQTDSNCIDDLFNDEPEKLDRDALNKEIEALSNKISRLNDLYINNLIALDDLKTKTDTLQSKIDILKERLEKDPALERQKNKQKMLKTLDTKDIFKMDYEEQKMLVRALINKVQVTADSIKILWKI

SEQ ID NO: 7175 - protein, 478 aa, Unknown
  Description of Unknown: Integrase B7176 sequence
  IPR036162,PS51737,IPR011109,PTHR30461,PS00397, PF00239,G3DSA:1.10.10.2600,IPR006119,SSF53041,cd00338, SM00857,IPR025827,IPR038109,PS51736,IPR006118, PF13408,G3DSA:3.40.50.1390,PF07508,Coil
MKTVCAYIRVSTDSQEEYSPDAQIRLLKEYAASHDMTIIDIYQDLGISGRNADKRPQFQDMIAMAKSKEHPYDAILVWKFSRFARNQEESIVYKSLLKKNHVDVVSVSEPLPDGVIGELVERIFEWMDEYYSIRLSGEVRRGMTQKALAGGYNSNVPIGYTKERGPDAIPQIDEYYGPMVQRCFHMFAIEHIPMTKIAATINNLGYRTRTGKRWETRNITDMFQNPFYIGKIRWNSASSRRTTPRVGKEIIRDGKHQPLIDQELWDATQERYAKITARMGHGKRPDIYKHWLSGLLKCPNCGGTLAYQNGLDTKTGKHYPYFVCWKNVKGMCATRNSISAGKAAQYVLDGLLNIVEDKDIKTIAPIVQFNQDEAAIAKQIASVKAKLGRVKEAYVNGIDTLEEYKANKEKLEAEIAHLKELVVPEVKPKTVTVDVIRTVHDTIMNAQSDSEKATAINSIVDHIIYDKEADTMEFFFIP

SEQ ID NO: 7176 - protein, 478 aa, Unknown
  Description of Unknown: Integrase B7177 sequence
  PTHR30461:SF3,IPR036162,PS51737,IPR011109,PTHR30461, PS00397,PF00239,G3DSA:1.10.10.2600,IPR006119,SSF53041, SM00857,IPR025827,IPR038109,PS51736,cd03768, IPR006118,PF13408,G3DSA:3.40.50.1390,PF07508,Coil
MKKAAIYVRVSTQEQATEGYSIQEQTERLTKYCEAHGWIVAKVYTDPGFSGANRNRPALQLLCSDVTKSVFDTVLVYKLDRLSRSQKDTLYIIEDVFLKNNISFVSMNENFDTGTPFGRAMIGILSVFAQLERDQIRERMQMGHDARAKEGYFHGGGYAPIGYDYNNGLLTINEYEATIVRRAYDLYLGDMPVHSIYLTLSKEFPAGSRFGPITYSTVESMLKTILYAGFISWKGNIYPGKHEAIIPYERFQEVQNIIKRRRIEEPQRLSAFLHTTILSGIVFCGYCGARYYCKNNSPSRKSRIVQKYYTCYSRGKSNKLMIRDPNCRNKSWNVKKLDAIILEEISKLDLSRDFESYNTAPDYSARIESLSAALDATDKKLEKLIDLYTSDAIPVHVLNERITKLNAEKETLETELASLLEVPEPDLSIEKANEILDGFQTVLASGDHDLIRGLVRSLIDSIIIRDEEIEIHWKFTVF

SEQ ID NO: 7177 - protein, 478 aa, Unknown
  Description of Unknown: Integrase B7178 sequence
  PTHR30461:SF3,IPR036162,PS51737,IPR011109,PTHR30461, PS00397,PF00239,G3DSA:1.10.10.2600,IPR006119,SSF53041, cd00338,SM00857,IPR025827,IPR038109,PS51736, IPR006118,PF13408,G3DSA:3.40.50.1390,PF07508,Coil
MLIGAAYIRVSTDDQLDLSPDSQLDEIKKYAAANDIVLSPDYIFMEQEGRSGKKAENRPEFQRMISTAKVKPKPFDCILVWKFSRFARNQDESTFYKGMLRKKLGIDVVSVSEPIMEGMYGRLIEMIIEWQDEFYSYNLGVEVKRGMTKKAELKGYQIVPCLGYAAVGNGKPFVIVEDEYKIVEDIFRMYALENLDRTSIARRLNAQGKKAKRGNPFEQRTITRILTNPFYNGTVSWNGISFQGSHETRQSVTGLYDICQERLKQEFRPVKRRSISTCRHWLSGILKCSVCGATMSYNGGGKSRPDAVFACWKYAKGLHKESCSVTVAKAERIVIRSLEKILETGNFEYDRIPRPASEQDSSQKAAIEVKLERLALKEERIRSAYENGIDSLEEYRTRKEQLLKERAELEAELASLEPADCSPVLSREELLERVKTVHDLLCSPDVDFETKGTALRSILKFIVFDRKADRFEFHYYIS

SEQ ID NO: 7178 - protein, 478 aa, Unknown
  Description of Unknown: Integrase B7179 sequence
  PTHR30461:SF3,IPR036162,PS51737,IPR011109,PTHR30461, PS00397,PF00239,G3DSA:1.10.10.2600,IPR006119,SSF53041, SM00857,IPR025827,IPR038109,PS51736,cd03768, IPR006118,PF13408,G3DSA:3.40.50.1390,PF07508,Coil
MKKVAIYVRVSSQEQANEGYSIQEQTERLTKYCEAHGWILVKTYTDPGFTGANRNRPALQMLCADVTKSLFDTVLVYKLDRLSRSQKDTLYIIEDIFLKNGISFVSMNENFDTGTPFGRAMIGILSVFAQLERDQIRERVQMGLDARAKEGYFHGGGYAPIGYDYNNGILTVNEYEASLVRKAYSLFLDGLPIHSIYFILEKEYPAGTRFGAVTYSSVKSMLTTILYAGYIRWKGALYPGKHEAIIPYEQFQEVQRLIKRRQIDEPQRLTAFQHTTILGGIMFCGYCGARYYCKNNTASRVSRITQRYYTCYSRGKTSKRMIRDPNCKNKSWNVHKLDAIVLDEIAKLEFSRDFASYDTAPDQSGRIQSIKAALTAANKKLEKLIDLYTDDTIPVHILSERISRLNAEKETLESELSELQEAPEPDLSFDQANKILDSFKDIIATGDNDLIRNMVCSLIDSIIIRGEDIEIHWKFTSF

SEQ ID NO: 7179 - protein, 478 aa, Unknown
  Description of Unknown: Integrase B7180 sequence
  PTHR30461:SF3,IPR036162,PS51737,IPR011109,PTHR30461, PS00397,PF00239,G3DSA:1.10.10.2600,IPR006119,SSF53041, SM00857,IPR025827,IPR038109,PS51736,cd03768, IPR006118,PF13408,G3DSA:3.40.50.1390,PF07508,Coil
MNKVAVYVRVSTTSQLEEGYSIEEQKAKLESYCDIKDWNIYKIYTDGGFSGSTTDRPALEQLVQDAQSKLFDTVLVYKLDRLSRSQKDTLYLIEDIFLKNDIEFVSLLENFDTSTPFGRAVIGLLSVFAQLEREQIKERMQLGKLGRAKSGKSMMWAKTSYGYDYDKETGSMTVNEFEALAVKEIYASYLSGISITKLRDKMNAEYPKKPAWSYRTIRGILANPVYCGLNQYKGQTFQGTHKAIISLDDFEETQRELKKRQQTAQERLNPRPFQAKYMLSGLAQCGYCHAPLKVVLGQKRKDGTRTKRYECYQRHPRTTRGVTVYNDNKKCNSGYYYMDILEHYVLTRIAMLQNDPDKIQEIFSGGTSPVIDKQAIQKQIDSLSLKLSKLNDLYLDDRITLDELRSKSSDFIKQRAILEEEIKKASTDKQVGRRKKIEKLLDASSVFEMSYDNQKVIVRELIEKVQVTSDKIVIRWKI

SEQ ID NO: 7180 - protein, 478 aa, Unknown
  Description of Unknown: Integrase B7181 sequence
  IPR036162,PS51737,IPR011109,PTHR30461,PS00397, PF00239,G3DSA:1.10.10.2600,IPR006119,SSF53041,cd00338, SM00857,IPR025827,IPR038109,PS51736,IPR006118, PF13408,G3DSA:3.40.50.1390,PF07508,Coil
MKTAIYVRVSTNEQAEEGYSIDEQIDKLKKFCEVKDWQVANIYKDPGFTGSNIDRPGLKKLINDVENKKIETVLVYKLDRLSRSQKDTLFLIEDVFGINNTNFVSLNENFDTSTPFGKAMIGILAVFAQLEREQIKERMTMGKIGRAKAGKAMSWHWAPFGYTHKDDSYEVVDLEAQIVKQIFHDYLSGISITKLRDKMNDEGHIGKDIAWSYRTIRQTLDNPTYAGYTKYKDQIFPGNHEAIVSKEVYDEVQKQLEIRQKEAYKKNNNPRPFQAKYLVSGLVRCGHCGAALGLHQYAKKKDGTRTKIYKCHSRTGKKKNVTMVKADNCPSCDYPKEELENVVLSEIEKIRINPQLIQKSSHSAQEIDDTPLIKRLEELDRKLEKLVSLYLDETLSLEMLNDKKELIQKEKTAIEGKLNKTNKQKPELKISEAADILKNLKGSILKLDYEKQKIIVRKLIKQITLKDDEMVIQWRFAV

SEQ ID NO: 7181 - protein, 478 aa, Unknown
  Description of Unknown: Integrase B7182 sequence
  PTHR30461:SF3,SM00857,IPR006118,G3DSA:1.10.10.2600,IPR036162, PS51737,G3DSA:3.40.50.1390,Coil,IPR006119,IPR038109, PF07508,IPR011109,SSF53041,PTHR30461,PS00397, PS51736,cd00338,PF00239
MKIAAAYIRVSTEDQVEYSPASQLEKIQEYAKRNGYILPAEFVYTDEGISGRTAEKRPAFNAMIGVAKTKPKPFDAILLWKFSRFARNREDSIVYKSMLRKQCGIDVISISENIGDDKMSVLIEAMIEAMDEYYSINLAEEVKRGMTEKVNRGEAVTIPSFGYDIKDGIYIPNPKTAPIVKEIFSKYLSGIPMRTISIELNEQGIKTRRGNMFENRNIEYILNNPVYIGKIRWTPTGKVRRDYHNPNTVIIDGHHEPIIDIETWNAVQKKLHESNKKTKYMRDGASKRPFMLQGLVRCNACGATLCMASLTLKSLQCCGYSHGKCNISHSITIKKLDKMVLESIEQSIIMDTFKLNMRNKSDDSNKDNAISSKIAKEVKKLERAKEAYEDGVYTLEEYKASKISITAQIEKLKSQLSVVKTTNPEEKREALRNKVLNILPALRSPATPETEKNQLIKSFLERVIFYKPSGDIDLFFYI

SEQ ID NO: 7182 - protein, 478 aa, Unknown
  Description of Unknown: Integrase B7183 sequence
  PTHR30461:SF3,IPR036162,PS51737,IPR011109,PTHR30461, PS00397,PF00239,G3DSA:1.10.10.2600,IPR006119,SSF53041, SM00857,IPR025827,IPR038109,PS51736,cd03768, IPR006118,PF13408,G3DSA:3.40.50.1390,PF07508,Coil
MKKVAIYVRVSTQEQAAEGYSIQEQTERLTKYCEAHGWVIVKVYTDPGFSGANRDRPALQMLCSDVKKSMFDTVLVYKLDRLSRSQKDTLYIIEDVFEKNHIAFVSMLENFDTGTPFGRAMIGILSVFAQLERDQIRERSQMGHDARAKEGYFHGGGYAPIGYNYENGLLSINEYEATIVRRAYELFLDGLPVHSIYLTMEKEFPAGTRFGRITYSSVESMLKTILYAGFITWKGNIYPGKHEALIPYETFQEVQAIMKRRQIEEPQRLTAFQHTTILGGIVFCGYCGARYFCKTNTASKKSRIVQKYYTCYSRGKCNKKMIRDPNCQNKSWNSKKLDAVILEEISKLNLSRDFASYENAPDNSDRIASITAALSATDKKLEKLVDLYASDTIPVQILNERVAKLNAEKETLEAELDALQNAPVPDLSTEKANEILDGFQAVLASGDRDMLRNFIRSLIDSIIIRGNDIEIHWKFTVF

SEQ ID NO: 7183 - protein, 478 aa, Unknown
  Description of Unknown: Integrase B7184 sequence
  PTHR30461:SF3,IPR036162,PS51737,IPR011109,PTHR30461, PS00397,PF00239,G3DSA:1.10.10.2600,IPR006119,SSF53041, SM00857,IPR025827,IPR038109,PS51736,cd03768, IPR006118,PF13408,G3DSA:3.40.50.1390,PF07508,Coil
MKKVAIYVRVSSQEQANEGYSIQEQTERLTKYCEAHGWILAKTYTDPGFTGANRNRPALQMLCADVTKSLFDTVLVYKLDRLSRSQKDTLYIIEDIFLKNGISFVSMNENFDTGTPFGRAMIGILSVFAQLERDQIRERVQMGLDARAKEGYFHGGGYAPIGYDYNNGILTVNEYEASLVRKAYSLFLDGLPIHSIYLILEKEYPAGTRFGAVTYSSVKSMLTTILYAGYIRWKGALYPGKHEAIIPYEQFQEVQRLIKRRQIDEPQRLTAFQHTTILGGIMFCGYCGARYYCKNNTASRVSRITQRYYTCYSRGKTSKRMIRDPNCKNKSWNVHKLDAIVLDEIAKLEFSRDFASYDTAPDQSGRIQSIKAALTAANKKLEKLIDLYTDDTIPVHILSERISRLNAEKETLESELSELQEAPEPDLSFDQANKILDSFKDIIATGDNDLIRNMVRSLIDSIIIRGEDIEIHWKFTSF

SEQ ID NO: 7184 - protein, 478 aa, Unknown
  Description of Unknown: Integrase B7185 sequence
  PTHR30461:SF3,SM00857,G3DSA:1.10.10.2600,IPR036162,PF13408, IPR025827,G3DSA:3.40.50.1390,PS51737,IPR006119,IPR038109, PF07508,IPR011109,SSF53041,PTHR30461,PS51736, cd00338,PF00239
MKYAAAYIRVSDDRQDEYSPDSQLKLIRQYAKSNDYIVPDEYVFYDDGISGRSVKKRKAFNNMIGYAKSKEHPFDAILVWKFSRFARNQEESIVYKSMLRKINVAVISVSETIDDSPFAPLIERIIEFMDEYYSTRLSQEVTRGMTEKASRGEAMSAAPFGYDLQAKTFIPNDDAKIVNYIYDSYLSGKGYRAIAQELGSMGIRTKRGNIPDNRFVEYILQNPVYIGKIRWSPECKGSKSRYKGDNSSVMIVDGKHEAIIDTAKFEQVQDMIADQKKRYGKYQRKEQPVQFMLKGLVRCGNCGATLVYVGTKYPALQCHQYARGVCKVSHSLSISKANRVVIDTIEETLKTLDFNIIYKTQNNPQENIDYDKLIKQEKEKIRRASEAYDAGFDTLEEYGIKKRTYQSRISEYESAKIQQPKKKNDTIPNEFLEKCQNVLKIIKSPEADEAAKNEALRTIIDHITYEKEDNNLAIYFYL

SEQ ID NO: 7185 - protein, 478 aa, Unknown
  Description of Unknown: Integrase B7186 sequence
  PTHR30461:SF3,SM00857,G3DSA:1.10.10.2600,IPR036162,PS51737, G3DSA:3.40.50.1390,IPR006119,IPR038109,PF07508,IPR011109, SSF53041,PTHR30461,Coil,PS51736,cd00338, PF00239
MKYAAAYIRVSDDRQDEYSPDSQLKLIRQYAKNNDYIVPDEYVFYDDGISGRSVKKRKAFNNMIGYAKSKEHPFDAILVWKFSRFARNQEESIVYKSMLRKINVAVISVSETIDDSPFAPLIERIIEFMDEYYSTRLSQEVTRGMTEKASRGEVMTIAPFGYDLKNKTYIPNDNAKTVNYIYDSYLAGKGYRAIAQELAAMGIRTKRGNIPDNRFVEYILQNPVYIGKIRWSPEGKQSKQRYKGDNSNVMIIDGKHEAIIDTDKFERVQDMIADQKKRYGKYQRREQPVQFMLKGLMRCGNCGATLVYVGTQSPAMQCHQYARGVCKISHSLSIAKANRVVIDKIEETLKTLDFNIIYKTQNNPQENIDYDKLIKQEKEKIRRASEAYDAGFDTLEEYGIKKRTYQSRIDEYEKAKSKVTPKESKAVPKEFVDKVASVLKTIKSPETDEAVKNEALRSIIDHITYEKEANNLAIYFYL

SEQ ID NO: 7186 - protein, 478 aa, Unknown
  Description of Unknown: Integrase B7187 sequence
  IPR036162,PS51737,IPR011109,PTHR30461,PS00397, PF00239,G3DSA:1.10.10.2600,IPR006119,SSF53041,cd00338, SM00857,IPR025827,IPR038109,PS51736,IPR006118, PF13408,G3DSA:3.40.50.1390,PF07508,Coil
MKTVCAYIRVSTDSQEEYSPDAQIRLLKEYAASHDMTIIDIYQDLGISGRNADKRPQFQDMIAMAKSKEHPYDAILVWKFSRFARNQEESIVYKSLLKKNHVDVVSVSEPLPDGVIGELVERIFEWMDEYYSIRLSGEVRRGMTQKALAGGYNSNVPIGYTKERGPDTIPQIDEYYGPMVQRCFHMFAIEHIPMTKIAATINNLGYRTRTGKRWETRNITDMFQNPFYIGKIRWNSASSRRTTPRVGEEIIRDGKHQPLIDQELWDATQERYAKITARMGHGKRPDIYKHWLSGLLKCPNCGGTLAYQNGLDTKTGKHYPYFVCWKNVKGMCATRNSISAGKAAQYVLDGLLNIVEDKDIKTIAPIVQFNQDEAAIAKQIASVKAKLGRVKEAYVNGIDTLEEYKANKEKLEAEIAHLKELVVPEVKPKTVTVDVIRTVHDTIMNAQSDSEKATAINSIVDHIIYDKEADTMEFFFIP

SEQ ID NO: 7187 - protein, 478 aa, Unknown
  Description of Unknown: Integrase B7188 sequence
  PTHR30461:SF3,IPR036162,PS51737,IPR011109,PTHR30461, PS00397,PF00239,G3DSA:1.10.10.2600,IPR006119,SSF53041, cd00338,SM00857,IPR025827,IPR038109,PS51736, IPR006118,PF13408,G3DSA:3.40.50.1390,PF07508,Coil
MLIGAAYIRVSTDDQLDLSPDSQLDEIKKYATANDIVLSPDYIFMEQEGRSGKKAENRPEFQRMISTAKVKPKPFDCILVWKFSRFARNQDESTFYKGMLRKKLGIDVISVSEPIMEGMYGRLIEMIIEWQDEFYSYNLGVEVKRGMTKKAQLNGYQIVPCLGYAAVGNGRPFVIVEDEYKIVEDIFRMYALENLDRTAIARRLNAQGKTAKRGNPFEQRTITRILTNPFYNGTVSWNGISFQGSHETRRSVTDLYDICQERLKREFRPVKRRSVSACRHWLSGLLKCSVCGATMSYNGGGKSRPDAVFACWKYAKGLHKESCSVTVAKAERIVIRSLEKILETGNFKYDRIPQPVSEQAAGQKAAVEEKLERLSLKEERIRAAYENGIDSLEEYRERKERLAAERKELEEELASLEPASCSPAPSREELLKRVKTVHDLLCSPDVDFETKGTALRSILKFIVFDRKAERFEFHYYIS

SEQ ID NO: 7188 - protein, 478 aa, Unknown
  Description of Unknown: Integrase B7189 sequence
  PTHR30461:SF3,IPR036162,PS51737,IPR011109,PTHR30461, PS00397,PF00239,G3DSA:1.10.10.2600,IPR006119,SSF53041, SM00857,IPR025827,IPR038109,PS51736,cd03768, IPR006118,PF13408,G3DSA:3.40.50.1390,PF07508,Coil
MNKVALYVRVSTTSQLEEGYSIEEQKAKLESYCDIKDWHVYKVYTDGGFSGSTTERPALEQLIKDAQSKLFDTVLVYKLDRLSRSQKDTLYLIEDIFLKNNIEFVSLLENFDTSTPFGRAVIGLLSVFAQLEREQIKERMQLGKLGRAKSGKSMMWAKTSYGYNYDKETGSMTVNEYEALAVKEIFTSYLAGMSITKLRDKINGEYPKQPAWSYRTIRGILANPVYCGLNQYKGQTFQGTHKAIISLDDFEQTQRELAKRQQTAKELSNPRPFQAKYMLSGLAQCGYCHAPLKVILGAVRKDGTRFKRYECYQRHPRKTRGVTVYNDNKKCESGYYDMDLLEHYVLTRIAQLQNDPDKIKELFSDDTSPAVDKQAIQKQIDSLTLKLSKLNDLYLDDRITLDELRSKSADFIKQRATLEEEIKKAVTDKQAGKREKIEKLLDASSVLDMSYDNQKVIVRELIEKVQVTSDKVVIRWKI

SEQ ID NO: 7189 - protein, 477 aa, Unknown
  Description of Unknown: Integrase B7190 sequence
  PTHR30461:SF3,IPR036162,PS51737,IPR022019,IPR011109,PTHR30461 ,PS00397,PF00239,PF12207,G3DSA:1.10.10.2600,IPR006119,SSF53041 ,cd00338,SM00857,IPR038267,IPR025827,IPR038109,PS51736, IPR006118,PF13408,G3DSA:3.40.50.1390,G3DSA:1.10.3950.10,Coil
MSIIEEQVKRNQYIEEVAAYIRVSTQEQKLHGISIEAQIEKLTEYAEKHGMKIVEWYKDEGVSGRKLIKKRPELQRMIQDAEKGKFKRIIFIKLDRFFRSVAEYHECMKRLAVGGVIWTATEEKYDLSTPSGEAFVNMKLTMAQFEADQAGERIRMVNEYKIKSGQPLFGAQCLPFGYTVSAPENGERHKYIAKEHEEIAMDLINHALTHGAIRGAMSYVNNKYGMNLSYNACINMLKNEMICGEYKGNPNYCEPYISREEFDRLQKLISRTPRDTGEKRTYIFSGLILCPNCGRRLTGGTHSPNKGIRNVTYKTYRCNSKLRDKKCDYGNTVFEETLEKVLLDKIESIVDRKMIEINAIEAESEKTGKYNVAELQAELDRLNYSWQKNRIKSAEEYDRKYDAIVEKIEAAQAEQQQMGHVDYERIQCLFQSGWRDLYNSLDDEHKRSFWRSFIEEIEIDWGKGRYGKRDIKDITFF

SEQ ID NO: 7190 - protein, 477 aa, Unknown
  Description of Unknown: Integrase B7191 sequence
  PTHR30461:SF3,cd00338,SM00857,G3DSA:1.10.10.2600,IPR036162, PF13408,IPR025827,G3DSA:3.40.50.1390,PS51737,IPR006119, IPR038109,PF07508,IPR011109,SSF53041,PTHR30461, PS51736,Coil,PF00239
MKYAAAYIRVSDDRQDEYSPDSQLKLIREYAGRNGYCVPDEYVFYDDGISGRSVKKRKAFNDMIAFAKSKEHPFQAILVWKFSRFARNQEESIVYKSMLRRIGVSVISISETIDDSPFAPLIERIIEFMDEYYSPRLSQEVTRGMTEKASRGEAMSAGAFGYDLQNKVFTPNEDAPTVRYIFNAFLSGKGYRKIAMELDAMGVKTYRGNPPDNRFVEYVLMNPVYAGKIRWSTDGRASRDRYKGDNSKVMYVDGKHQPIIDQDTFDQVQEKIMEQKRRYGKWQRKEQPVTFMLKGLLRCDTCGATLTYIAARDPAVQCHNYARGKCKVSHYLSIRKANAAVIAAIEKSLETLEFNVLPKEQLQNEVVDYSLLIRKEEEKIKRASDAYDAGYDTLEEYGRKKRAFQNKIEALKAEQTKTEEAQSSEIPPQFVQQASFVLNLIKSPDTAESVKNEALRSIVDHITFKKPDNTLEIFYYI

SEQ ID NO: 7191 - protein, 477 aa, Unknown
  Description of Unknown: Integrase B7192 sequence
  PTHR30461:SF3,SM00857,IPR006118,G3DSA:1.10.10.2600,IPR036162, PS51737,G3DSA:3.40.50.1390,Coil,IPR006119,IPR038109, PF07508,SSF53041,IPR011109,PTHR30461,PS00397, PS51736,cd00338,PF00239
MKIAAAYIRVSTDDQIEYSPDSQRKAILDYAKRNDYIVPQEYIFVDEGISGRSTKRPAFQQMIGTAKQKSHPFDAILVWKFSRFARNREDSVVYKSMLRKQCGVEVVSISEQIGEDKTSILIEALLEAMDEYYSINLSEEVVRGMSEKARRGGTLGRAPFGYTAKNGELLPNEDAKTVQWIFNAFLNGTGMRTIATQLNSSGIRTAYGKPWENRTVEYVLRNITYAGHQHWTPGGTKDMKHAEKIKRNTIVKNNAHTAIVSEEQFAAVQEKIAENKRKYKKHEQPEVGIPFLGKGLLRCSDCGGALCMLGRGNGIQCHNYAHGKCNVSHYIKLEYIDKMIVDKIKSDVEAQNFRTILIPENAAESQEMQDNKRALERARKKLARVREAYENGIDTIEEYRQNKARIQKEIEELEAKPAPPKETQESAAEKLRQRILSNVTLLESDAPAGLKNDMLHTFVSRIVFDRKSTRVKVEYHG

SEQ ID NO: 7192 - protein, 477 aa, Unknown
  Description of Unknown: Integrase B7193 sequence
  PTHR30461:SF3,SM00857,IPR006118,G3DSA:1.10.10.2600,IPR036162, PS51737,G3DSA:3.40.50.1390,Coil,IPR006119,IPR038109, PF07508,IPR011109,SSF53041,PTHR30461,PS00397, PS51736,cd00338,PF00239
MKIAAAYIRVSTDDQIEYSPDSQRKAILDYAKRNDYIVPQEYIFVDEGISGRSTKRPAFQQMIGTAKQKSHPFDAILVWKFSRFARNREDSVVYKSMLRKQCGVEVVSISEQIGEDKTSILIEALLEAMDEYYSINLSEEVVRGMSEKARRGGTLGRAPFGYTAKNGELLPNDDAKTVQWIFNAFLNGTGMRTIATQLNSSGIRTAYGKPWENRTVEYVLRNITYAGHQHWTPGGTKDMKHAEKIKGNTIVKNNAHTAIVSEEQFAAVQEKIAENKRKYKKHEQPEVGIPFLGKGLLRCSDCGGALCMLGRGNGIQCHNYAHGKCNVSHYIKLEYIDKMIVDKIKSDVEAQNFRTILIPENAAESQEMQDNKRALERARKKLARVKEAYENGIDTIEEYRQNKARIQKEIEELEAKPAPPKETQESAAEKLRQRILSNVTLLESDAPAGLKNDMLHTFVSRIVFDRKNTRVEVEYHG

SEQ ID NO: 7193 - protein, 477 aa, Unknown
  Description of Unknown: Integrase B7194 sequence
  PTHR30461:SF3,SM00857,G3DSA:1.10.10.2600,IPR036162,PF13408, IPR025827,G3DSA:3.40.50.1390,PS51737,IPR006119,IPR038109, PF07508,IPR011109,SSF53041,PTHR30461,Coil, PS51736,cd00338,PF00239
MKDSKSKTVIIYNRVSTIMQDKNESLTEQTDECIRYCKTNGYEIYKILKDVKSGTKDDRAGYLELKKHIKRRDFDILVVLETSRIARKMKELVLFFSLLNENNIEYISIREPNYNTTTPDGKFAMNIRLGLIQFERDNTAERVTDRLYFKASKGQWVNGKPPIGYKLVNKRLEIDEEKAEIVRNIYDDFLNGYSLNQINNKLQFSWGSKQVKRILTNPTYKGYIRYGARSNRKKNNREAFIVKGWHEAIIPEDKWEKVQEMYKSLNRKASNTKPTLLSGLLKCKECGNNYIRKRGGSYDKNLYYGCNLNNLRYSDKFFYKDIPECSSATIKGDLLEKAVIDTLKKQINDLNFNDIEIDKKRQVNIKQIDNSINKFKNRLNKIYELYIEDEIPKDKYLKDKKDIEARIISLEKQKKSFGEIEVEKSNNEMIQEYFSKIDLSNIEEANRILKIIVNKIVVYKKKKTPKDDFEVEIYLNI

SEQ ID NO: 7194 - protein, 477 aa, Unknown
  Description of Unknown: Integrase B7195 sequence
  PTHR30461:SF3,SM00857,G3DSA:1.10.10.2600,IPR036162,PF13408, PS51737,IPR025827,G3DSA:3.40.50.1390,IPR006119,IPR038109, PF07508,IPR011109,SSF53041,PTHR30461,Coil, PS51736,cd00338,PF00239
MKDSKSKTVIIYNRVSTIMQDKNESLTEQTDECIRYCKTNGYEIYKILKDVKSGTKDDRAGYLELKKHIKRKDFDILVVLETSRIARKMKELVLFFSLLNENNIEYISIREPNYNTTTPDGKFAMNIRLGLIQFERDNTAERVTDRLYFKASKGQWVNGKPPIGYKLVNKRLEIDEEKAEIVRNIYEDFLNGYSLNQINNKLQFSWGSKQVKRILTNPTYKGYIRYGTRSNRKKNNREAFIVKGWHEAIIPEEKWEKVQEMYKSLNRKASNTKPTLLSGLLKCKECGNNYIRKRGGSYDKNLYYGCNLNNLRYSDKFFYKDIPECSSATIKGDLLEKAVIDTLKKQINDLNFNDIEVDKKRQVNIKQIDSSINKFKNRLNKIYELYIEDEIPKDKYLKDKKDIEARIISLEKQKKSFGEIEVEKSNNEMIQEYFSKIDLSNIEEANRILKIIVNKIVVYKKKKTPKDDFEVEIYLNI

SEQ ID NO: 7195 - protein, 477 aa, Unknown
  Description of Unknown: Integrase B7196 sequence
  PTHR30461:SF3,cd00338,SM00857,G3DSA:1.10.10.2600,IPR036162, PF13408,IPR025827,G3DSA:3.40.50.1390,PS51737,IPR006119, IPR038109,PF07508,IPR011109,SSF53041,PTHR30461, PS51736,Coil,PF00239
MKYAAAYIRVSDDRQDEYSPDSQLKLIREYAGRNGYCVPDEYVFYDDGISGRSVKKRKAFNDMIAFAKSKEHPFQAILVWKFSRFARNQEESIVYKSMLRRIGVSVISISETIDDSPFAPLIERIIEFMDEYYSTRLSQEVTRGMTEKASRGEAMSAGAFGYDLQNKVFTPNEDAPTVRYIFNAFLSGKGYRKIAMELDAMGVKTYRGNPPDNRFVEYILMNPVYAGKIRWSTDGRASRDRYKGDNSKVMYVDGKHQPIIDQDTFDQVQEKIMEQKRRYGKWQRKEQPVTFMLKGLLRCDTCGATLTYIAARDPAVQCHNYARGKCKVSHYLSIRKANAAVIAAIEKSLETLEFNVLPKEQLQNEVVDYSLLIRKEEEKIKRASDAYDAGYDTLEEYGRKKRAFQNKIEALKAEQAKVEKSQSGEIPPQFVQQASFVLDLIKSPDTAESVKNEALRSIVDHITFKKPDNTLEIFYYI

SEQ ID NO: 7196 - protein, 477 aa, Unknown
  Description of Unknown: Integrase B7197 sequence
  PTHR30461:SF3,IPR036162,PS51737,IPR022019,IPR011109,PTHR30461 ,PS00397,PF00239,PF12207,G3DSA:1.10.10.2600,IPR006119,SSF53041 ,cd00338,SM00857,IPR038267,IPR025827,IPR038109,PS51736, IPR006118,PF13408,G3DSA:3.40.50.1390,G3DSA:1.10.3950.10,Coil
MSIIEEQVKRNQYIEEVAAYIRVSTQEQKLHGISIEAQIEKLTEYAEKHGMKIVEWYKDEGVSGRKLIKKRPELQRMIQDAEKGKFKRIIFIKLDRFFRSVAEYHECMKRLAVGGVIWTATEEKYDLSTPSGEAFVNMKLTMAQFEADQAGERIRMVNEYKIKSGQPLFGAQCLPFGYTVSAPENGERHKYIAKEHEEIAMDLINHALTHGAIRGAMSYVNNKYGMSLSYNACINMLKNEMICGEYKGNPNYCEPYISREEFDRLQKLISRTPRDTGEKRTYIFSGLILCPNCGRRLTGGTHSPNKGIRNVTYKTYRCNAKLRDKKCDYGNTVFEETLEKVLLDKIESIVDRKMIEVNAIEAESEKTSKYNVAELQAELDRLNYSWQKNRIKSAEEYDRKYDAIVEKIEAAQAEQQQMGHVDYERIQCLFQSGWRDLYNSLDDEHKRSFWRSFIEEIEIDWGKGRYGKRDIKDITFF

SEQ ID NO: 7197 - protein, 477 aa, Unknown
  Description of Unknown: Integrase B7198 sequence
  cd00338,SM00857,IPR006118,G3DSA:1.10.10.2600,IPR036162, PS51737,G3DSA:3.40.50.1390,IPR006119,IPR038109,PF07508, IPR011109,SSF53041,PTHR30461,PS00397,PS51736, Coil,PF00239
MENLKIAAAYIRVSTHDQEEYSPESQIKLIRDYAKNNGFILPEEFIFRDDGISGRRADKRPEFQRMISKAKETPAPFQVILVWKYSRFARNQEESIVYKALLKKENKIDVVSISEPLVEGPFGSLIERIIEWTDEYYSIRLSGEVKRGMTEKASRGEPVSIPAFGYDIKNKQYIPNEKEAPFVQMIFDDFISGMGTREIAMKLNTMEVRTHRGNFFENRNIDYILNNPVYIGKIRWTPTGRMKRNYDLEDSMIVDGEHQPLISNETWEQAQALLKKRKKMYAKYARKSNPKKPFMLQGIVRCSNCGSTLCMGVSGSLQCHSYAHGQCNKSHSITLNKINTLVISALETDLESGDITLIKKSGSRENQQEFIKRQIQAEKIKLRRVKEAYENGVDTLEEYKSNKRKIMERLEELQAKQEPVQDLEKEKKEFCMKHKEAPAYLQNASISIEDKNHYIRTFIDHIVFNRASGTVDVIYYN

SEQ ID NO: 7198 - protein, 477 aa, Unknown
  Description of Unknown: Integrase B7199 sequence
  PTHR30461:SF3,SM00857,G3DSA:1.10.10.2600,IPR036162,PF13408, IPR025827,G3DSA:3.40.50.1390,PS51737,IPR006119,IPR038109, PF07508,IPR011109,SSF53041,PTHR30461,Coil, PS51736,cd00338,PF00239
MRDSKSKTVIIYNRVSTIMQDKNESLTEQTDECIRYCKTNGYEIYKILKDVKSGTKDDRAGYLELKKHIKRKDFGILVVLETSRIARKMKELVLFFSLLNENNIEYISIREPNYNTTTPDGKFAMNIRLGLIQFERDNTAERVTDRLYFKASKGQWVNGKPPIGYKLVNKRLEIDEEKAEIVRNIYEDFLNGYSLNQINNKLQFSWGSKQVKRILTNPTYKGYIRYGTRSNRKKNNREAFIVKGWHEAIIPEEKWEKVQEMYKNLNRKASNTKPTLLSGLLKCKECGNNYIRKRGGSYDKNLYYGCNLNNLRYSDKFFYKDIPECSSATIKGDLLEKAVIDTLKKQINDLNFNDIEIDKKRQVNIKQIDSSINKFKNRLNKIYELYIEDEIPKDKYLKDKKDIEARIISLEKQKKSFGEIEVEKSNNEMIQEYFSKIDLSNIEEANRILKIIVNKIVVYKKKKTPKDDFEVEIYLNI

SEQ ID NO: 7199 - protein, 477 aa, Unknown
  Description of Unknown: Integrase B7200 sequence
  PTHR30461:SF3,cd00338,SM00857,G3DSA:1.10.10.2600,IPR036162, PF13408,PS51737,G3DSA:3.40.50.1390,IPR025827,IPR006119, IPR038109,PF07508,IPR011109,SSF53041,PTHR30461, PS51736,Coil,PF00239
MKYAAAYIRVSDDRQDEYSPDSQLKLIREYAVRNGYCVPDEYVFYDDGISGRSVKKRKAFNDMIAFAKSKEHPFQAILVWKFSRFARNQEESIVYKSMLRRIGVSVISISETIDDSPFAPLIERIIEFMDEYYSTRLSQEVTRGMTEKASRGEAMSAGAFGYDLQNKVFTPNEDAPTVRYIFNAFLSGKGYRKIAMELNAMGVKTYRGNPPDNRFVEYILMNPVYAGKIRWSTDGRASRDRYKGDNSKVMYVDGKHQPIIDQDTFDQVQEKIMEQKRRYGKWQRKEQPVTFMLKGLLRCDTCGATLTYIAARDPAVQCHNYARGKCKVSHYLSIRKANAAVIAAIEKSLETLEFNVLPKEQLQNEVVDYSLLIRKEEEKIKRASDAYDAGYDTLEEYGRKKRAFQNKIEALKAEQAKVEKSQSGEIPPQFVQQASFVLDLIKSPDTAESVKNEALRSIVDHITFKKPDNTLEIFYYI

SEQ ID NO: 7200 - protein, 477 aa, Unknown
  Description of Unknown: Integrase B7201 sequence
  PTHR30461:SF3,cd00338,SM00857,G3DSA:1.10.10.2600,IPR036162, PF13408,IPR025827,G3DSA:3.40.50.1390,PS51737,IPR006119, IPR038109,PF07508,IPR011109,SSF53041,PTHR30461, PS51736,Coil,PF00239
MKYAAAYIRVSDDRQDEYSPDSQLKLIREYAGRNGYCVPDEYVFYDDGISGRSVKKRKAFNDMIAFAKSKEHPFQAILVWKFSRFARNQEESIVYKSMLRRIGVSVISISETIDDSPFAPLIERIIEFMDEYYSTRLSQEVTRGMTEKASRGEAMSAGAFGYDLQNKVFTPNEDAPTVRYIFNAFLSGKGYRKIAMELDAMGIKTYRGNPPDNRFVEYILMNPVYAGKIRWSTDGRASRDRYKGDNSKVMYVDGKHQPIIDQDTFDQVQEKIMEQKRRYGKWQRKEQPVAFMLKGLLRCDTCGATLTYIAARDPAVQCHNYARGKCKVSHYLSIRKANAAVIAAIEKSLETLEFNVLPKEQLQNEVVDYSLLIRKEEDKIKRASDAYDAGYDTLEEYGRKKRAFQNKIEALKAEQAKVEAQQSSEIPPRFVQQASFVLDLIKSPDTAESVKNEALRSIVDHITFKKPDNTLEIFYYI

SEQ ID NO: 7201 - protein, 477 aa, Unknown
  Description of Unknown: Integrase B7202 sequence
  PTHR30461:SF3,cd00338,SM00857,G3DSA:1.10.10.2600,IPR036162, PF13408,PS51737,G3DSA:3.40.50.1390,IPR025827,IPR006119, IPR038109,PF07508,IPR011109,SSF53041,PTHR30461, PS51736,Coil,PF00239
MSKSKIYCLKYLYTITFSKGVIIMEIIVKKAACYCRVSHEEQKLHGLSIEAQKEDLKQYCKRNNYKIYKFYIDEGLTAKNTKRQGLQNLLSDLDKFDIVLFTKLDRLSRNIIDANLLDQQFKSNNVCMKAIFEDDIDTSTADGKFTFNLKLSLAERELDKTSERIKDIFRYKIERNEVISGSVPKGYKIVDKKLAIDENTAWIVKKSFDLVEELMSARAAFIQINTVYNQPTSLRSFSKLLKNVIYTGTYKSKNYYKENYCEPIISLEQFNNVQRILKNNKQYTSNNRKETYIFSGLLRCSHCGYKIVGHYSNRSGKNVIKTYRCNRYSIYKDCDQKKSINEKKLEKVLLSCIVEEYKNYLYSFDVSSKKSSSTDISQNKAKIQKKIDKLRELYLNDLISLEDYKKDYAIFNQALEEIKNKEVAKVAPKDADKLLSILDNIEDIYYNLDATERKRFWTSFIDVITIDGNYNIDIKFL

SEQ ID NO: 7202 - protein, 477 aa, Unknown
  Description of Unknown: Integrase B7203 sequence
  PTHR30461:SF3,IPR036162,PS51737,IPR011109,PTHR30461, PS00397,PF00239,G3DSA:1.10.10.2600,IPR006119,SSF53041, SM00857,IPR025827,IPR038109,PS51736,cd03768, IPR006118,PF13408,G3DSA:3.40.50.1390,PF07508,Coil
MNRVAIYVRVSTNEQAAEGYSIAEQTERCRKYCEAMKYTVSRIYTDPGFSGASLDRPAMQQMIEDAKEGRFDTVLVYKLDRLSRSQKDTLYLIEDVLLAHNVSFISMSENFDTSSPFGRAMIGILSVFAQLEREQIKERMEMGRIGAAKEGRWRGGSGVPIGYTYTAGDEGILKIDPYEAMQIKELYDLWLQGISTNEICKRFRAKGYTTKYGGWSYAGSIPCIITNPVYIGMQRYDGKVFPGLQEPIITQEVYDAAVADLERRRSQMSDNQRIAWRGKSLLSGLIFCGQCGARYFVSTCVRTNRQTHEKKTYRYYICYSRDGNSSMKKSDNCTNKRWGKEELEHVVLDQILKMSYDVDKIKPRKPKTDGQKAIASRIKVIDKQISSLLDLYQVGGIPIDQIGTRVKALTDEKDRLELSTAKETGKPVSLSEARKILSAAPQIIECGSDDDRRFLVSKLISKITIDGDDIAITWTFT

SEQ ID NO: 7203 - protein, 477 aa, Unknown
  Description of Unknown: Integrase B7204 sequence
  IPR036162,PS51737,IPR011109,PTHR30461,PS00397, PF00239,G3DSA:1.10.10.2600,IPR006119,SSF53041,cd00338, SM00857,IPR025827,IPR038109,PS51736,IPR006118, PF13408,G3DSA:3.40.50.1390,PF07508,Coil
MQQAAAYVRVSTDDQTEYSPESQLKELKDYAARHDLMIDPEHIYIDAGISGRKAAKRPQFQKMIAAAKAKPSAFGTILVWKFSRFARNQEESILYKSLLRRECDVEVISVTEETGDSMFGSLIERIIEWMDEFYSIRLGQEVRSKMTFVAEKGLPQTVAPFGYSKKPDEAIMIVQKEADWVRFMAENLLRGRSLRWISNQLNDHGIRTHRGNKFEPRTIEYILRNVTNAGAVHWTPNQDDHDNRIPYSENTIIVRDVCPAIYSYEYYESLVAELDRRAKTHKKHQKSDTVKRHWLSGFLKCSNCGSSMVYQRANNGFQCYKYGKSLCNVSHFISAPKIENAIIDAISHVTITDDFIRSITRPVTSKNSNYKKDIKRLEKMLDRAKLAYVEGIDTVEEYAENKKRIISEIEILKSKEKEQAEAITYKTKEEVCRQFKSAQELIASDADNDTKRAAFGSIVEKVVYSKPDDSVSIFFYL

SEQ ID NO: 7204 - protein, 477 aa, Unknown
  Description of Unknown: Integrase B7205 sequence
  PTHR30461:SF3,cd00338,SM00857,G3DSA:1.10.10.2600,IPR036162, PF13408,PS51737,G3DSA:3.40.50.1390,IPR025827,IPR006119, IPR038109,PF07508,IPR011109,SSF53041,PTHR30461, PS51736,Coil,PF00239
MSKSKIYCLKYLYTITFSKGVIIMETIVKKAACYCRVSHEEQKLHGLSIEAQKEDLKQYCKRNNYKIYKFYIDEGLTAKNTKRQGLQNLLSDLDKFDIVLFTKLDRLSRNIIDANLLDEKFKNNNVCMKAIFEDDIDTSTADGKFTFNLKLSLAERELDKTSERIKDIFRYKIERNEVISGSVPKGYKIVDKKLAIDENTAWVVKKSFDLVEELMSARAAFIQINTVYNQPTSLRSFSKLLKNVIYTGTYKSKNYYKENYCEPIISLEQFNNVQRILKNNKQYTSNNRKETYIFSGLLRCSHCGYKIVGHYSNRSGKNVIKTYRCNRYSIYKDCDQKKSINEKKLEKMLLSCIVEEYKNYLYSFDVSSKKTNSIDVSQNKSKIQKKIDKLRELYLNDLISLEDYKKDYAIFTQALKEIESKEVTKVAPKDADKVLSILDNIETIYYNLDATERKRFWSSFIDVITIDGNYNIDIKFL

SEQ ID NO: 7205 - protein, 477 aa, Unknown
  Description of Unknown: Integrase B7206 sequence
  PTHR30461:SF3,SM00857,G3DSA:1.10.10.2600,IPR036162,PF13408, IPR025827,G3DSA:3.40.50.1390,PS51737,IPR006119,IPR038109, PF07508,IPR011109,SSF53041,PF00239,PTHR30461, PS51736,Coil,cd00338
MKYAAAYIRVSDDRQDEYSPDSQLKLIREYASRNGYCVPDEYVFYDDGISGRSVKKRKAFNDMIAFAKSKEHPFQAILVWKFSRFARNQEESIVYKSMLRRIGVSVISISETIDDSPFAPLIERIIEFMDEYYSTRLSQEVTRGMTEKASRGEAMSAGAFGYDLQNKVFTPNEDAPTVRYIFNAFLSGKGYRKIAMELDAMGVKTYRGNPPDNRFVEYVLMNPVYAGKIRWSTDGRASRDRYKGDNSKVMYVDGKHQPIIDQDTFDQVQEKIMEQKRRYGKWQRKEQPVTFMLKGLLRCDTCGATLTYIAARDPAVQCHNYARGKCKVSHYLSIRKANTAVIAAIEKSLETLEFNVLPKEQLQNEVVDYSLLIRKEEDKIKRASDAYDAGYDTLEEYGRKKRAFQNKIETLKAEQAKVEKSQSGEIPPQFVQQASFVLDLIKSPETAESVKNEALRSIVDHITFKKPDNTLEIFYYI

SEQ ID NO: 7206 - protein, 477 aa, Unknown
  Description of Unknown: Integrase B7207 sequence
  PTHR30461:SF3,IPR036162,PS51737,IPR011109,PTHR30461, PS00397,PF00239,G3DSA:1.10.10.2600,IPR006119,SSF53041, cd00338,SM00857,IPR025827,IPR038109,PS51736, IPR006118,PF13408,G3DSA:3.40.50.1390,PF07508,Coil
MSIIKAALYVRVSTMEQVTDGYSIGEQKDKLLHYASAQGYAVVDTYSDEGFSGKDLLRPNMERMLNDIQHGRINTVLVYKLDRLSRHVKDVLELVETFDKCNVTLYSLSENFDLASPFGRAALKMMATFAELERETIVERMEMGKIARAKEGKYTCPGTRCPFGYRHDKKNDRLLIEESEAEIIRKIFDLYVNHGYTFRKLYDYCREAYPDVKYFNNQMCCKPIIERPLYAGYFRYRGGELTKGTNFEAIISYELFLQAQAQVDRNRTKRLSDSSPYLLTGLLICGRCGNRYVGKMYERYTKKPDGTHTKHYRYRDYGCAARLKRDKNYHPAKCDNDIYRAEELEKIVEDYVLNLNIDDYNKADFSPGLIDKMMSEIGAIKRSQSKLLDLYLSGDIDKDTFLIRKIEYDSKIAELQNLIEKETESVQSAPTNAEAIKKSIAEYSMLNRRQKRTLLEYLIKNIIVDGSRITVNLRLKK

SEQ ID NO: 7207 - protein, 477 aa, Unknown
  Description of Unknown: Integrase B7208 sequence
  cd00338,SM00857,IPR006118,G3DSA:1.10.10.2600,IPR036162, PS51737,G3DSA:3.40.50.1390,IPR006119,IPR038109,PF07508, IPR011109,SSF53041,PTHR30461,PS00397,PS51736, Coil,PF00239
MENLKIAAAYIRVSTHDQEEYSPESQIKLIRDYAKNNGFILPEEFIFRDDGISGRRADKRPEFQRMISKAKETPAPFQVILVWKYSRFARNQEESIVYKALLKKENKIDVVSISEPLVEGPFGSLIERIIEWTDEYYSIRLSGEVKRGMTEKASRGEPVSIPAFGYDIKNKQYIPNEKEAPFVQMIFDDFISGMGTREIAMKLNTMEVRTHRGNFFENRNIDYILNNPVYIGKIRWTPTGRMKRNYDLEDSMIVDGEHQPLISNETWEQAQALLKKRKKMYAKYARKSNPKKPFMLQGIVRCSNCGSTLCMGVSGSLQCHSYAHGQCNKSHSITLNKINTLVISALETDLESGDITLIKKSGSRENQQEFIKRQIQAEKIKLRRVKEAYENGVDTLEEYKSNKQKIMERLEELQAKQEPVQDLEKEKKEFCMKHKEAPAYLQNASISIEDKNHYIRTFIDHIVFNRASGTVDVIYYN

SEQ ID NO: 7208 - protein, 477 aa, Unknown
  Description of Unknown: Integrase B7209 sequence
  PTHR30461:SF3,IPR036162,PS51737,IPR022019,IPR011109,PTHR30461 ,PS00397,PF00239,PF12207,G3DSA:1.10.10.2600,IPR006119,SSF53041, cd00338,SM00857,IPR038267,IPR025827,IPR038109,PS51736,IPR006118 ,PF13408,G3DSA:3.40.50.1390,G3DSA:1.10.3950.10,Coil
MSIIEEQVKRNQYIEEVAAYIRVSTQEQKLHGISIEAQIEKLTEYAEKHGMKIVEWYKDEGVSGRKLIKKRPELQRMIQDAEKGKFKRIIFIKLDRFFRSVAEYHECMKRLAVGGVIWTATEEKYDLSTPSGEAFVNMKLTMAQFEADQAGERIRMVNEYKIKSGQPLFGAQCLPFGYTVSAPENGERHKYIAKEHEEIAMDLINHALTHGAIRGAMSYVNNKYGMSLSYNACINMLKNEMICGEYKGNPNYCEPYISREEFDRLQKLISRTPRDTGEKRTYIFSGLILCPNCGRRLTGGTHSPNKGIRNVTYKTYRCNSKLRDKKCDYGNTVFEETLEKVLLDKIESIVDRKMIEVNAIEAESEKTSKYNVAELQAELDRLNYSWQKNRIKSAEEYDRKYDAIVEKIEAAQAEQQQMGHVDYERIQCLFQSGWRDLYNSLDDEHKRSFWRSFIEEIEIDWGKGRYGKRDIKDITFF

SEQ ID NO: 7209 - protein, 477 aa, Unknown
  Description of Unknown: Integrase B7210 sequence
  cd00338,SM00857,IPR006118,G3DSA:1.10.10.2600,IPR036162, PS51737,G3DSA:3.40.50.1390,IPR006119,IPR038109,PF07508, IPR011109,SSF53041,PTHR30461,PS00397,PS51736, Coil,PF00239
MENLKIAAAYIRVSTHDQEEYSPESQIKLIRDYAKNNGFILPEEFIFRDDGISGRRADKRPEFQRMISKAKETPAPFQVILVWKYSRFARNQEESIVYKALLKKENKIDVVSISEPLVEGPFGSLIERIIEWTDEYYSIRLSGEVKRGMTEKASRGEPVSIPAFGYDIKNKQYIPNEKEAPFVQMIFDDFISGMGTREIAIKLNTMEVRTHRGNFFENRNIDYILNNPVYIGKIRWTPTGRMKRNYDLEDSMIVDGEHQPLISNETWEQAQALLKKRKKMYAKYARKSNPKKPFMLQGMVRCSNCGSTLCMGVSGSLQCHSYAHGQCNKSHSITLNKINTLVISALETDLESGDITLIKKSGSRENQQEFIKRQIQAEKIKLRRVKEAYENGVDTLEEYKSNKQKIMERLEELQAKQEPVQDLEKEKKEFCMKHKEAPAYLQNASISIEDKNHYIRTFIDHIVFNRASGTVDVIYYN

SEQ ID NO: 7210 - protein, 477 aa, Unknown
  Description of Unknown: Integrase B7211 sequence
  cd00338,SM00857,G3DSA:1.10.10.2600,IPR036162,PS51737, G3DSA:3.40.50.1390,IPR006119,IPR038109,PF07508,IPR011109, SSF53041,PTHR30461,PS51736,Coil,PF00239
MSNSSSFPAKISAIYCRESTEKQNIQSLIDMCKKAAKKINLQNIKVYYDVASGYNKDREQYSKLKEDIQNNLVDTLVLYESSRLTRDELEHHIFYGLLRVHNVKVYTVTHGWLDLQDADDTFLTNLLNLLDSREGRKTAKRSKDRMTELAEQGRWTGGPAPLGYKLVNKELVIVPEDAEKVKTIFKLFLDGKTRQSIANFFGYEVKKVRRLLENSVYIGKLKFHSVEIINKKKILHKDYKVLNGIHEPIIDESTFSLVQGKLKNIKVERNTDVYIFKDLIKCTCGRKMYRVVNKYNYLKKSTNEISRKTENLYYCRTSDKYKSLGCGAIGIHEEELFEEVMASLKKIIFSLEVENIDTKFDDYQSQLVLYKKELASLSRKEELLARQLLNSLISEEVFEKLMKELKEKKAFLEEKIKNLTTLITNKKNTNKNSEILKKYFFKLEKEKAPEKINNFLKLIIDEIEMVNDYRFYIHLKF

SEQ ID NO: 7211 - protein, 477 aa, Unknown
  Description of Unknown: Integrase B7212 sequence
  PTHR30461:SF3,IPR036162,PS51737,IPR011109,PTHR30461, PS00397,PF00239,G3DSA:1.10.10.2600,IPR006119,SSF53041, cd00338,SM00857,IPR025827,IPR038109, PS51736,IPR006118,PF13408,G3DSA:3.40.50.1390,PF07508
MKSVAIYCRVSTQEQAAEGYSIGEQQSRLTKFCEAHDWKVAHIYSDPGYSGAKLQRPAIQQLIRDCSYGLFDAVLVYKLDRLSRSQKDTLYLIEDVFNASHIGLVSMCENFDTQSPFGRAMIGILSVFAQLERDQITERMTMGRIGRAKAGYFSGGSRPPIGYTYAKAPGSDKQILIVDDYEAAQVRKIFSMFLDGSTLKEICHYMHDHYKTRYGDWSHVSTISRILRDRIYIGEVSFSGKWYRGAHEAIIDHDTFDRVQRKYDLYLGTVAGTFSQNFKGSQLLTGMVFCGQCGARCHTKSWRNHGKHSAPDAPMKRVYRCSHGDGVRVPVQELDQLVTAEVRKLSVDPELIRRAAPAAASASSSEDAEAIRSRLADLRRQESKLVDLYQIGGIDLQMVKSRMDDLHQEQEKLSASLAEESPSRAALSADDAIDALASFPSVFSSGTLQEKRQILRTLIDRIVIYPDHIDIHWTFTA

SEQ ID NO: 7212 - protein, 477 aa, Unknown
  Description of Unknown: Integrase B7213 sequence
  PTHR30461:SF3,cd00338,SM00857,G3DSA:1.10.10.2600,IPR036162, PF13408,IPR025827,G3DSA:3.40.50.1390,PS51737,IPR006119, IPR038109,PF07508,IPR011109,SSF53041,PTHR30461, PS51736,Coil,PF00239
MKYAAAYIRVSDDRQDEYSPDSQLKLIREYASRNGYCVPDEYVFYDDGISGRSVKKRKAFNDMIAFAKSKEHPFQAILVWKFSRFARNQEESIVYKSMLRRIGVSVISISETIDDSPFAPLIERIIEFMDEYYSTRLSQEVTRGMTEKASRGEAMSAGAFGYDLQNKVFTPNKDAPTVRYIFNAFLSGKGYRKIAMELDAMGVKTYRGNPPDNRFVEYVLMNPVYAGKIRWSTDGRASRDRYKGDNSKVMYVDGKHQPIIDQDTFDQVQEKIMEQKRRYGKWQRKEQPVTFMLKGLLRCDTCGATLTYIAARDPAVQCHNYARGKCKVSHYLSIRKANAAVIAAIEKSLETLEFNVLPKEQLQNEVVDYSLLIRKEEEKIKRASDAYDAGYDTLEEYGRKKRAFQNKIEALKAEQAKVEKSQSGEIPPQFVQQASFVLDLIKSPDTAESVKNEALRSIVDHITFKKPDNTLEIFYYI

SEQ ID NO: 7213 - protein, 477 aa, Unknown
  Description of Unknown: Integrase B7214 sequence
  PTHR30461:SF3,cd00338,SM00857,G3DSA:1.10.10.2600,IPR036162, PF13408,IPR025827,PS51737,G3DSA:3.40.50.1390,IPR006119, IPR038109,PF07508,IPR011109,SSF53041,PTHR30461, PS51736,Coil,PF00239
MKYAAAYIRVSDDRQDEYSPDSQIKLIREYAGRNGYCVPDEYVFYDDGISGRSVKKRKAFNDMIAFAKSKEHPFQAILVWKFSRFARNQEESIVYKSMLRRIGVSVISISETIDDSPFAPLIERIIEFMDEYYSTRLSQEVTRGMTEKASRGEAMSAGAFGYDLQNKVFTPNEDAPTVRYIFNAFLSGKGYRKIAMELNAMGVKTYRGNPPDNRFVEYVLMNPVYAGKIRWSTDGRASRDRYKGDNSKVMYVDGKHQPIIDQDTFDQVQEKIMEQKRRYGKWQRKEQPVTFMLKGLLRCDTCGATLTYIAARDPAVQCHNYARGKCKVSHYLSIRKANAAVIAAIEKSLETLEFNVLPKEQLQNEVVDYSLLIRKEEEKIKRASDAYDAGYDTLEEYGRKKRAFQNKIEALKAEQVKVEKSQSGEIPPQFVQQASFVLNLIKSPDTAESVKNEALRSIVDHITFKKPDNTLEIFYYI

SEQ ID NO: 7214 - protein, 477 aa, Unknown
  Description of Unknown: Integrase B7215 sequence
  PTHR30461:SF3,cd00338,SM00857,G3DSA:1.10.10.2600,IPR036162, PF13408,IPR025827,G3DSA:3.40.50.1390,PS51737,IPR006119, IPR038109,PF07508,IPR011109,SSF53041,PTHR30461, PS51736,Coil,PF00239
MKYAAAYIRVSDDRQDEYSPDSQLKLIREYAGRNGYCVPDEYVFYDDGISGRSVKKRKAFNDMIAFAKSKEHPFQAILVWKFSRFARNQEESIVYKSMLRRIGVSVISISETIDDSPFAPLIERIIEFMDEYYSTRLSQEVTRGMTEKASRGEAMSAGAFGYDLQNKVFTPNEDAPTVRYIFNAFLSGKGYRKIAMELNAMGVKTYRGNPPDNRFVEYVLMNPVYAGKIRWSTDGRASRDRYKGDNSKVMYVDGKHQPIIDQDTFDQVQEKIMEQKRRYGKWQRKEQPVTFMLKGLLRCDTCGATLTYIAARDPAVQCHNYARGKCKVSHYLSIRKANAAVIAAIEKSLETLEFNVLPKEQLQNEVVDYSLLIRKEEEKIKRASDAYDAGYDTLEEYGRKKRAFQNKIETLKAEQTKTEEAQSSEIPPQFVQQASFVLNLIKSPDTAESVKNEALRSIVDHITFKKPDNTLEIFYYI

SEQ ID NO: 7215 - protein, 477 aa, Unknown
  Description of Unknown: Integrase B7216 sequence
  IPR036162,PS51737,IPR011109,PTHR30461,PS00397, PF00239,G3DSA:1.10.10.2600,IPR006119,SSF53041,cd00338, SM00857,IPR025827,IPR038109,PS51736,IPR006118, PF13408,G3DSA:3.40.50.1390,PF07508,Coil
MPENYRDGALYIRVSTDKQEELSPDAQKRLLLDYAKKNKILVNPDYIFIENGISGRKAQKRPEFQKMISLAKSTPSPFQVILVWKFSRFARNQEESIVYKSMLKKQCGIDVISTSEPLIDGPFGSLIERIIEWMDEYYSINLSGEVIRGMTEKALRGGYQSTPPLGYKAIGEGKPFVVVPEEAKLVTYIFQQYCQYHREPTAIARQINDMGIHTKRGGLFENRTISYILQNKFYIGDLEWNGISTKGQHETFISPELFEKAQQITAATYKPKKRRSVSTCKHWLSGLVKCSICGASLSYNTGKYPYFVCWRYAKGFHKGSSSISENRLIKAVIEYLEQILDGMDFSISYVEKDTPELTEQEQWEKDLENLSVREKRIRTAYETGVDSLEEYKENKERLKKEREELEAKKVNLIKTAAAPGTKEQFLDKVQTVFDILKNDEISNETKGVFIRSIVEEIIYDKENDTLIFHLYTPRKAA

SEQ ID NO: 7216 - protein, 477 aa, Unknown
  Description of Unknown: Integrase B7217 sequence
  PTHR30461:SF3,IPR036162,PS51737,IPR022019,IPR011109,PTHR30461 ,PS00397,PF00239,PF12207,G3DSA:1.10.10.2600,IPR006119,SSF53041 ,cd00338,SM00857,IPR038267,IPR025827,IPR038109,PS51736,IPR006118 ,PF13408,G3DSA:3.40.50.1390,G3DSA:1.10.3950.10,Coil
MSIIEEQVKRNQYIEEVAAYIRVSTQEQKLHGISIEAQIEKLTEYAEKHGMKIVEWYKDEGVSGRKLIKKRPELQRMIQDAEKGKFKRIIFIKLDRFFRSVAEYHECMKRLAIGGVIWTATEEKYDLSTPSGEAFVNMKLTMAQFEADQAGERIRMVNEYKIKSGQPLFGAQCLPFGYTVSAPENGERHKYIAKEHEEIAMDLINHALTHGAIRGAMSYVNNKYGMSLSYNACINMLKNEMICGEYKGNPNYCEPYISREEFDRLQKLISRTPRDTGEKRTYIFSGLILCPICGRRLTGGTHSPNKGIRNVTYKTYRCNSKLRDKKCDYGNTVFEETLEKVLLDKIESIVDRKMIEVNAIEAESEKTSKYNVAELQAELDRLNYSWQKNRIKSAEEYDRKYDAIVEKIEAAQAEQQQMGHVDYERIQCLFQSGWRDLYNSLDDEHKRSFWRSFIEEIEIDWGKGRYGKRDIKDITFF

SEQ ID NO: 7217 - protein, 477 aa, Unknown
  Description of Unknown: Integrase B7218 sequence
  PTHR30461:SF3,IPR036162,PS51737,IPR011109,PTHR30461, PS00397,PF00239,G3DSA:1.10.10.2600,IPR006119,SSF53041, SM00857,IPR025827,IPR038109,PS51736,cd03768, IPR006118,PF13408,G3DSA:3.40.50.1390,PF07508,Coil
MIRAGIYARVSTREQAEEGYSIGSQIDKLTAYCQLHDYELVDQYIDPGFSGASLERPAMQRLLKNVKEKKLDVVIVRKLDRLSRSQKDILTLIEDVFLPNNCNFVSTTESFDTQTPMGRAMIGILSVFAQLERETIRERNQDGKNERAKTGKAMAWSNPPLGYNYVDKHYEVSEYEAAIVRTAYNLCLQGLSMNKIKKYIDEKFDYSLTKYKTKDGKIHLATIKRILRNPLYYGVITWKGNLYLGEHEALITEEMFNAVQKQLQLNAKNALGHSKNPFRSTRLLTGLLWCGDCGARMHAQSRKRVNNDRWYYMCYSVSKKSAKYITGECHSGNFDGETLDQIVYDQIRALSDNTKLLEQTMLSKESSVSEEFFEAKLTSIESKQQKLVDLYLDDKLDKAMLESKNKALEEEKQKILDTMERNKQNQNKPTKREVRKNLKQFIDIYETGELDTKKAILRTLIDRITVTGDDVRIDWTF

SEQ ID NO: 7218 - protein, 477 aa, Unknown
  Description of Unknown: Integrase B7219 sequence
  PTHR30461:SF3,cd00338,SM00857,G3DSA:1.10.10.2600,IPR036162, PF13408,IPR025827,G3DSA:3.40.50.1390,PS51737,IPR006119, IPR038109,PF07508,IPR011109,SSF53041,PTHR30461, PS51736,Coil,PF00239
MKYAAAYIRVSDDRQDEYSPDSQLKLIREYAGRNGYCVPDEYVFYDDGISGRSVKKRKAFNDMIAFAKSKEHPFQAILVWKFSRFARNQEESIVYKSMLRRIGVSVISISETIDDSPFAPLIERIIEFMDEYYSTRLSQEVTRGMTEKASRGEAMSAGAFGYDLQNKVFTPNEDAPTVRYIFNAFLSGKGYRKIAMELDAMGVKTYRGNPPDNRFVEYILMNPVYAGKIRWSTDGRASRDRYKGDNSKVMYVDGKHQPIIDQDTFDQVQEKIMEQKRRYGKWQRKEQPVAFMLKGLLRCDTCGATLTYIAARDPAVQCHNYARGKCKVSHYLSIRKANAAVIAAIEKSLETLEFNVLPKEQLQNEVVDYSLLIRKEEEKIKRASDAYDAGYDTLEEYGRKKRAFQNKIEALKAEQAKVEKSQSNEIPPQFVQQASFVLDLIKSPDTAESVKNEALRSIVDHITFKKPDNTLEIFYYI

SEQ ID NO: 7219 - protein, 477 aa, Unknown
  Description of Unknown: Integrase B7220 sequence
  cd00338,SM00857,G3DSA:1.10.10.2600,IPR036162,PS51737, G3DSA:3.40.50.1390,IPR006119,IPR038109,PF07508,IPR011109, SSF53041,PTHR30461,PS51736,Coil,PF00239
MSNSSSFPAKISAIYCRESTEKQNIQSLIDMCKKAAKKINLQNIKVYYDVASGYNKDREQYSKLKEDIQNNLVDTLVLYESSRLTRDELEHHIFYGLLRVHNVKVYTVTHGWLDLQDADDTFLTNLLNLLDAREGRKTAKRSKDRMTELAEQGRWTGGPAPLGYKLVNKELVIVPEDAEKVKTIFKLFLDGKTRQSIANFFGYEVKKVRRLLENPVYIGKLKFHSVEIINKKKILHKDYKVLNGIHEPIIDESTFSLVQGKLKNIKVERNTDVYIFKDLIKCTCGRKMYRVVNKYNYLKKSTNEISRKTENLYYCRTSDKYKSLGCGAIGIHEEELFEEVMASLKKIIFSLEVENIDTKFDDYQSQLVLYKKELASLSGKEELLARQLLNSLISEEVFEKLMKELKEKKAFLEEKIKNLTTLITNKKNTNKNSEILKKYFFKLEKEKAPEKINNFLKLIIDEIEMVNDYRFYIHLKF

SEQ ID NO: 7220 - protein, 477 aa, Unknown
  Description of Unknown: Integrase B7221 sequence
  PTHR30461:SF3,IPR036162,PS51737,IPR022019,IPR011109, PTHR30461,PS00397,PF00239,PF12207,G3DSA:1.10.10.2600, IPR006119,SSF53041,cd00338,SM00857, IPR038267,IPR025827,IPR038109,PS51736,IPR006118,PF13408,
  CONT. FROM ABOVE: G3DSA:3.40.50.1390,G3DSA:1.10.3950.10,Coil
MSIIEEQVKRNQYIEEVAAYIRVSTQEQKLHGISIEAQIEKLTEYAEKHGMKIVEWYKDEGVSGRKLIKKRPELQRMIQDAEKGKFKRIIFIKLDRFFRSVAEYHACMKRLAVGGVIWTATEEKYDLSTPSGEAFVNMKLTMAQFEADQAGERIRMVNEYKIKSGQPLFGAQCLPFGYTVSAPENGERHKYIAKEHEEIAMDLINHALTHGAIRGAMSYVNNKYGMSLSYNACINMLKNEMICGEYKGNPNYCEPYISREEFDRLQKLISRTPRDTGEKRTYIFSGLILCPNCGRRLTGGTHSPNKGIRNVTYKTYRCNSKLRDKKCDYGNTVFEETLEKVLLDKIESIVDRKMIEVNAIEAESEKTSKYNVAELQAELDRLNYSWQKNRIKSAEEYDRKYDAIVEKIEAAQAEQQQMGHVDYERIQCLFQSGWRDLYNSLDDEHKRSFWRSFIEEIEIDWGKGRYGKRDIKDITFF

SEQ ID NO: 7221 - protein, 477 aa, Unknown
  Description of Unknown: Integrase B7222 sequence
  PTHR30461:SF3,cd00338,SM00857,G3DSA:1.10.10.2600,IPR036162, PF13408,IPR025827,G3DSA:3.40.50.1390,PS51737,IPR006119, IPR038109,PF07508,IPR011109,SSF53041,PTHR30461, PS51736,Coil,PF00239
MKYAAAYIRVSDDRQDEYSPDSQLKLIREYAGRNGYCVPDEYVFYDDGISGRSVKKRKAFNDMIAFAKSKEHPFQAILVWKFSRFARNQEESIVYKSMLRRIGVSVISISETIDDSPFAPLIERIIEFMDEYYSTRLSQEVTRGMTEKASRGEAMSAGAFGYDLQNKVFTPNEDAPTVRYIFNAFLSGKGYRKIAMELDAMGVKTYRGNPPDNRFVEYVLMNPVYAGKIRWSTDGRASRDRYKGDNSKVMYVDGKHQPIIDQDTFDQVQEKIMEQKRRYGKWQRKEQPVTFMLKGLLRCDACGATLTYIAARDPAVQCHNYARGKCKVSHYLSIRKANAAVIAAIEKSLETLEFNVLPKEQLQNEVVDYSLLIRKEEEKIKRASDAYDAGYDTLEEYGRKKRAFQNKIETLKAEQAKAEKQQSSEIPPQFVQQASFVLDLIKSPDTAESVKNEALRSIVDHITFKKPDNTLEIFYYI

SEQ ID NO: 7222 - protein, 477 aa, Unknown
  Description of Unknown: Integrase B7223 sequence
  IPR036162,PS51737,IPR011109,PTHR30461,PS00397, PF00239,G3DSA:1.10.10.2600,IPR006119,SSF53041,cd00338, SM00857,IPR025827,IPR038109,PS51736,IPR006118, PF13408,G3DSA:3.40.50.1390,PF07508,Coil
MPKDYRDGALYIRVSTDKQEELSPDAQKRLLLDYAKKNKILVNPEHIFMENGISGRKAQKRPEFQKMISLAKAKPAPFQVILVWKFSRFARNQEESIVYKSMLKKQCGIDVVSTSEPLIDGPFGSLIERIIEWMDEYYSINLSGEVVRGMTEKALRGGYQCTPPLGYKAVGEGKPFVVVPEEAKLVAYIFQQYCQYHKEPTAIARQINEMGIRTKRGGLFEKRTVSYILQNKFYIGDLEWNGITSKGQHETFISPELFEQARQIAAATFKPKKRRCVSSCKHWLSGLVKCSICGASLSYNTGKYPYFVCWRYAKGFHKVNSSISENRLIKAVLEYLEGLLNGMDFTVSYVEKDAPEITEHEQWEKDFQNLAVREQRIKIAYETGVDTLEEYKENKARLKQEREELERKKEQFIDVPAASDAKEQFLRKVRNVFDILKSDEVGNDTKGVFIRSIVEEIIYDKESDTLTFRLYSPKKAA

SEQ ID NO: 7223 - protein, 477 aa, Unknown
  Description of Unknown: Integrase B7224 sequence
  PTHR30461:SF3,SM00857,G3DSA:1.10.10.2600,IPR036162,PF13408, IPR025827,PS51737,G3DSA:3.40.50.1390,IPR006119,IPR038109, PF07508,SSF53041,IPR011109,PTHR30461,Coil, PS51736,cd00338,PF00239
MRDSKSKTVIIYNRVSTIMQDKNESLTEQTDECIRYCKTNGYEIYKILKDVKSGTKDDRAGYLELKKHIKRKDFDILVVLETSRIARKMKELVLFFSLLNENNIEYISIREPNYNTTTPDGKFAMNIRLGLIQFERDNTAERVTDRLYFKASKGQWVNGKPPIGYKLVNKRLEIDEEKAEIVRNIYEDFLNGYSLNQINNKLQFSWGSKQVKRILTNPTYKGYIRYGTRSNRKKNNREAFIVKGWHEAIIPEEKWEKVQEMYKNLNRKASNTKPTLLSGLLKCKECGNNYIRKRGGSYDKNLYYGCNLNNLRYSDKFFYKDIPECSSATIKGDLLEKAVIDTLKKQINDLNFNDIEIDKKRQVNIKQIDSSINKFKNRLNKIYELYIEDEIPKDKYLKDKKDIEARIISLEKQKKSFGEIEVEKSNNEMIQEYFSKIDLSNIEEANRILKIIVNKIVVYKKKKTPKDDFEVEIYLNI

SEQ ID NO: 7224 - protein, 477 aa, Unknown
  Description of Unknown: Integrase B7225 sequence
  PTHR30461:SF3,SM00857,IPR006118,G3DSA:1.10.10.2600,IPR036162, PS51737,G3DSA:3.40.50.1390,PS00397,IPR006119,IPR038109, PF07508,SSF53041,IPR011109,PTHR30461,Coil, PS51736,cd00338,PF00239
MKIAAAYLRVSTEEQDEYSLDSQLKLIREYAKNNDFLVPDEFVFTDDGVSGRNARKRESFQRMIALAKQKEPPFDSILLWKFSRFARNQEEAIVYKSLLKKAGIGVISISEPLPDGPFASLIERIIEWMDEYYSIRLAGEVKRGMIEKVSRGEPVCHPAFGYDLKEKRYYPNSDADWVRWVFSSFSSGMGMRQIAAHLADHGVRTGRGGLPDNRFVEYMLNNPLYIGKIRWSPEGRKASRRKYDDPSNMIVDGLHDAIIDMETWEKTQGRLKQLKAAYRKHQRPGQPVQFMLKGLVHCSSCGATLVYQSLACPSLQCHNYNRGKCKTSHSLSVSKANAAVISALEYSVDNLDFALDPDENTTKRASERDYKKLISAEQTKLGRVQQAYEAGIDTLEEYAEKKRRILEEIESLRQQANEEKNVQKFDPIEYAKKVSAVLELIKNPTVAENAKNEALRSILSRIVYEKKKQNLALYFYI

SEQ ID NO: 7225 - protein, 477 aa, Unknown
  Description of Unknown: Integrase B7226 sequence
  SM00857,IPR006118,G3DSA:1.10.10.2600,IPR036162,PF13408, IPR025827,PS51737,G3DSA:3.40.50.1390,IPR006119,IPR038109, PF07508,IPR011109,SSF53041,PF00239,PTHR30461, PS00397,Coil,cd00338
MRIGAAYIRVSTDDQLDISPESQLDEIQRYAKSHDILIPEEYIFMERTGRSGKRADNRPEFQRMIATAKEKPQPFEVILVWKFSRFARNQDESTFYKGMLRKKLKIDIESVSEPIMEGMYGRLIEMIIEWQDEFYSYNLGVEVKRGMAKKAELKGYQLVPPLGYAAVGNGKPYVIREDEYKIVEMIFRKYAVDRIDMTAIARQLNASGYLTRRGNPFEKRTIDRIIQNRFYVGTVEWNGFSFEGTHETRASVTDLFEQCQERRKAEFRPMRHRNVSTCKHWLSGLMRCSVCGATLSYTGSGAVPYFTCWKYSKGLHPESCSISVKKMERIVLRSLDGILESGHFEYTPAAASASGSPTDPSNEIQSIHTQLDRLRHQEERARIAYENEVYTLDEYKESKARLRSEIQRLSDELQRLLEQPAESAPPQKELLDRVRNVRDLLASPSVGFETKGNALRSILKCIVFDRKTEHFDFQYYA

SEQ ID NO: 7226 - protein, 477 aa, Unknown
  Description of Unknown: Integrase B7227 sequence
  PTHR30461:SF3,cd00338,SM00857,G3DSA:1.10.10.2600,IPR036162, PF13408,PS51737,G3DSA:3.40.50.1390,IPR025827,IPR006119, IPR038109,PF07508,IPR011109,SSF53041,PTHR30461, PS51736,Coil,PF00239
MKYAAAYIRVSDDRQDEYSPDSQLKLIREYAGRNGYCVPDEYVFYDDGISGRSVKKRKAFNDMIAFAKSKEHPFQAILVWKFSRFARNQEESIVYKSMLRRIGVSVISISETIDDSPFAPLIERIIEFMDEYYSTRLSQEVTRGMTEKASRGEAMSAGAFGYDLQNKVFTPNEDAPTVRYIFNAFLSGKGYRKIAMELNAMGVKTYRGNPPDNRFVEYILMNPVYAGKIRWSTDGRASRDRYKGDNSKVMYVDGKHQPIIDQDTFDQVQEKIMEQKRRYGKWQRKEQPVTFMLKGLVRCDTCGATLTYIAARDPAVQCHNYARGKCKVSHYLSIRKANAAVIAAIEKSLETLEFNVLPKEQLQNEAVDYSLLIRKEEEKIKRASDAYDAGYDTLEEYGRKKRAFQNKIEALKAEQAKVEKSQSGEIPPQFVQQASFVLDLIKSPDTAESVKNEALRSIVDHITFKKPDNTLEIFYYI

SEQ ID NO: 7227 - protein, 477 aa, Unknown
  Description of Unknown: Integrase B7228 sequence
  PTHR30461:SF3,SM00857,IPR006118,IPR036162,PF13408, PS51737,IPR025827,G3DSA:3.40.50.1390,PS00397,IPR006119, IPR011109,SSF53041,PTHR30461,Coil,PS51736, cd00338,PF00239
MKTALYCRVSTEEQARTGESILDQRQALERWARDHGHEIIGVYEDEGFSAHKSYKSRPGLSRLLDDVRAGKVELIAFTKFDRWTRRAADYYELQEVLDQNHVPWTAILEDYETVTADGRFKVGIMLSVNQHEAERTSERIKFTFAEKRRRGEIISGNMPKGYKLVDKKPVKDPETETGMNAFWRIYLSGAGLKPSIMAAESRGVRFSTSTGSFILRNAEAYTGKIQGVSCEPYITEEEAARVLATRKIKAKASGYTYLFTGLLYCGECAHRMGGHRNFWEHKDGSRGFQVYYNCSHRYRTNQRECSNSVNIYESDIERALVFGLSDAIEAEAVKMEAQIAEMRRQREAAQDVQPVREKLERRKRRAWEAYLDEIIDKKAYQREAEKIDAELAKIVQVPQIDEDAPRKIRETMPEGWRELYFKLDAQHRREFWLQTLQRIDVYPDRSISIAVKPGENPFITRIQRPDGYWIEIVKEKE

SEQ ID NO: 7228 - protein, 477 aa, Unknown
  Description of Unknown: Integrase B7229 sequence
  PTHR30461:SF3,SM00857,IPR006118,G3DSA:1.10.10.2600,IPR036162, PS51737,G3DSA:3.40.50.1390,PS00397,IPR006119,IPR038109, PF07508,IPR011109,SSF53041,PTHR30461,Coil, PS51736,cd00338,PF00239
MKIAAAYIRVSTDDQIEYSPDSQRKAILDYAKRNDYIVPQEYIFVDEGISGRSTKRPAFQQMIGTAKQKSHPFDAILVWKFSRFARNREDSVVYKSMLRKQCGVEVVSISEQIGEDKTSILIEALLEAMDEYYSINLSEEVVRGMSEKARRGGTLGRAPFGYTAKDGELLPNDDAKTVQWIFNAFLSGTGMRTIATQLNNNGIRTAYGKPWENRTVEYVLRNITYAGHQHWTPGGTKDMKHAEKIKGNTIVKNNAHTAIVSEEQFAAVQEKIAENKRKYKKHEQPEVGIPFLGKGLLRCSDCGGALCMLGRGNGIQCHNYAHGKCNVSHYIKLEYIDKMIVDKIKSDVEAQNFRTILIPENAAEGQEMQDNQKALERARKKLARVREAYENGIDTIEEYRQNKARIQKEIEELEAKPAPPKETQESVAEKLRQRILSNVTLLESDAPAGLKNDMLHTFVSKIVFDRKNTRVEVEYHG

SEQ ID NO: 7229 - protein, 477 aa, Unknown
  Description of Unknown: Integrase B7230 sequence
  PTHR30461:SF3,SM00857,G3DSA:1.10.10.2600,IPR036162,PF13408, PS51737,IPR025827,G3DSA:3.40.50.1390,IPR006119,IPR038109, PF07508,IPR011109,SSF53041,PF00239,PTHR30461, PS51736,Coil,cd00338
MRIALYPRVSTQEQALNGHSIDEQIERMNKYCEAMGWQVYKTYTDAGYSGANTDRPALKRMIKDIEAGKIDKVLVYKLDRLSRSQLDTLYLIEKVFLANNTDFVSMSENFDTSTPFGRAMIGILAVFAQLEREQIKERMMMGKEARAKKGLYHGSNCYPIGYDYIDGHLVPLEFEAIQIKMIFEMYAEGKAPLTIAEYLNNNGYKTRYGRWNDITVRKILRRKTYLGYIKYHDDWYKGEHEALISEDLFNTVQKIFDQRTEDYSYYKRREGRVNSYLGGMLFCDCCGGKYSKIISNSTKNGKKYRNTYYKCNSRTFKKRTLVRDPNCKNKTWKMDVLDNLVFDEIKKLALDPDYLKKIKTPQENDNRQSVIENQIESIKIQINKLMDLYTIGGMPVDLLQEKIHDLNNQQKKLEAEIEKIEDEKKEKITNADAMKMITSFSDVLERGDYSEIRASLTALIEKIVIKGEDIKIYWRFV

SEQ ID NO: 7230 - protein, 477 aa, Unknown
  Description of Unknown: Integrase B7231 sequence
  IPR036162,PS51737,IPR011109,PTHR30461,PS00397, PF00239,G3DSA:1.10.10.2600,IPR006119,SSF53041,cd00338, SM00857,IPR025827,IPR038109,PS51736,IPR006118, PF13408,G3DSA:3.40.50.1390,PF07508,Coil
MEMKVGAAYIRVSTDGQLDLSPDAQKREILKYAKANGIIIPEEFIFVENSGISGKKASRRPEFQRMIATARQRPTPFEAVLVWKFSRFARNQDESTFYKSMLRKKCGVDVISVTEPIMEGMYGRLIETIIEWSDEFYSYNLAQEVRRGMTEKAMRGGYQCKPPIGYAPTPDGVPVIVPDRAAIVQRIFQEFDQGYDRTGIARRLNADGFRTDRGNTFENRVVTYILQNPFYIGKIRWNYAAHGSRIANPEEEIILVNGQHEPIIDADLFDRVQKRLAAVPHVTRSRAPSTCSHWLSGVVRCSSCGSTLALGGPAGGRYFQCHAYAKGKCSVSHSIMAKKLEASLLDELQSTLQSGDFDFRMQPPKTPDRDVRTALKRIEQKEKKAREAYMAGIDTLDEYREIRNALRAEREALDVKPEIISREEARRILLGRIRELAQMLQSGDFTDEQKGMAVRSVFEKIVFDRPHNALHYFYRYS

SEQ ID NO: 7231 - protein, 477 aa, Unknown
  Description of Unknown: Integrase B7232 sequence
  PTHR30461:SF3,SM00857,G3DSA:1.10.10.2600,IPR036162,PF13408, PS51737,G3DSA:3.40.50.1390,IPR025827,IPR006119,IPR038109, PF07508,IPR011109,SSF53041,PF00239,PTHR30461, PS51736,Coil,cd00338
MKYAAAYIRVSDDRQDEYSPDSQLKLIREYAGRNGYCVPDEYVFYDDGISGRSVKKRKAFNDMIAFAKSKEHPFQAILVWKFSRFARNQEESIVYKSMLRRIGVSVISISETIDDSPFAPLIERIIEFMDEYYSTRLSQEVTRGMTEKASRGEAMSAGAFGYDLQNKVFTPNEDAPTVRYIFNAFLSGKGYRKIAMELNAMGVKTYRGNPPDNRFVEYILMNPVYAGKIRWSTDGRASRDRYKGDNSKVMYVDGKHQPIIDQDTFDQVQEKIMEQKRRYGKWQRKEQPVTFMLKGLLRCDTCGATLTYIAARDPAVQCHNYARGKCKVSHYLSIRKANAAVIAAIEKSLKTLEFNVLPKEQLQNEVVDYSLLIRKEEEKIKRASDAYDAGYDTLEEYGRKKRAFQNKIEALKAEQVKVEKSQSGEIPPQFVQQASFVLNLIKSPDTAESVKNEALRSIVDHITFKKPDNTLEIFYYI

SEQ ID NO: 7232 - protein, 477 aa, Unknown
  Description of Unknown: Integrase B7233 sequence
  PTHR30461:SF3,cd00338,SM00857,G3DSA:1.10.10.2600,IPR036162, PF13408,IPR025827,G3DSA:3.40.50.1390,PS51737,IPR006119, IPR038109,PF07508,IPR011109,SSF53041,PTHR30461, PS51736,Coil,PF00239
MKYAAAYIRVSDDRQDEYSPDSQLKLIREYAGKNGYCVPDEYVFYDDGISGRSVKKRKAFNDMIAFAKSKEHPFQAILVWKFSRFARNQEESIVYKSMLRRIGVSVISISETIDDSPFAPLIERIIEFMDEYYSTRLSQEVTRGMTEKASRGEAMSAGAFGYDLQNKVFTPNEDAPTVRYIFNAFLSGKGYRKIAMELDAMGVKTYRGNPPDNRFVEYILMNPVYAGKIRWSTDGRASRDRYKGDNSKVMYVDGKHQPIIDQDTFDQVQEKIMEQKRRYGKWQRKEQPVTFMLKGLLRCDTCGATLTYIAARDPAVQCHNYARGKCKVSHYLSIRKANAAVIAAIEKSLETLEFNVLPKEQLQNEVVDYSLLIRKEEEKIKRASDAYDAGYDTLEEYGRKKRAFQNKIEALKAEQAKVEKSQSGEIPPQFVQQASFVLDLIKSPDTAESVKNEALRSIVDHITFKKPDNTLEIFYYI

SEQ ID NO: 7233 - protein, 477 aa, Unknown
  Description of Unknown: Integrase B7234 sequence
  PTHR30461:SF3,SM00857,G3DSA:1.10.10.2600,IPR036162,PF13408, PS51737,IPR025827,G3DSA:3.40.50.1390,IPR006119,IPR038109, PF07508,IPR011109,SSF53041,PF00239,PTHR30461, PS51736,Coil,cd00338
MKYAAAYIRVSDDRQDEYSPDSQLKLIREYAGRNGYCVPDEYVFYDDGISGRSVKKRKAFNDMIAFAKSKEHPFQAILVWKFSRFARNQEESIVYKSMLRRIGVSVISISETIDDSPFAPLIERIIEFMDEYYSTRLSQEVTRGMTEKASRGEAMSAGAFGYDLQNKVFTPNEDAPTVRYIFNAFLSGKGYRKIAMELDAMGIKTYRGNPPDNRFVEYILMNPVYAGKIRWSTDGRASRDRYKGDNSKVMYVDGKHQPIIDQDTFDQVQEKIMEQKRRYGKWQRKEQPVAFMLKGLLRCDTCGATLTYIAARDPAVQCHNYARGKCKVSHYLSIRKANAAVIAAIEKSLETLEFNVLPKEQLQNEVVDYSLLIRKEEDKIKRASDAYDAGYDTLEEYGRKKRAFQNKIEALKAEQAKVEAQQSSEIPPRFVQQASFVLDLIKSPETAESVKNEALRSIVDHITFKKPDNTLEIFYYI

SEQ ID NO: 7234 - protein, 477 aa, Unknown
  Description of Unknown: Integrase B7235 sequence
  SM00857,G3DSA:1.10.10.2600,IPR036162,PS51737,G3DSA:3.40.50.1390, IPR006119,IPR038109,PF07508,IPR011109,SSF53041, PF00239,PTHR30461,PS51736,Coil,cd00338
MSNSSSFPAKISAIYCRESTEKQNIQSLIDMCKKAAKKINLQNIKVYYDVASGYNKDREQYSKLKEDIQNNLVDTLVLYESSRLTRDELEHHIFYGLLRVHNVKVYTVTHGWLDLQDADDTFLTNLLNLLDAREGRKTAKRSKDRMTELAEQGRWTGGPAPLGYKLVNKELVIVPEDAEKVKTIFKLFLDGKTRQSIANFFGYEVKKVRRLLENPVYIGKLKFHSVEIINKKKIHHKDYKVLDGIHEPIIDESTFSLVQGKLKNIKVERNTDVYIFKDLIKCTCGRKMYRVVNKYNYLKKSTNEISQKTENLYYCRTSDKYKSIGCGAIGIHEEELFEEVMASLQKIIFSLEVENIDTKFDDYQSQLALYKKELASLSRKEELLARQLLNSLISEEVFEKLMKELKEKKAFLEEKIKNLTTLITNKKNTNKNSEILKKYFFKLEKEKAPEKINNFLKLIIDEIEMVNDYRFYIHLKF

SEQ ID NO: 7235 - protein, 477 aa, Unknown
  Description of Unknown: Integrase B7236 sequence
  SM00857,IPR006118,G3DSA:1.10.10.2600,IPR036162, PS51737,G3DSA:3.40.50.1390,IPR006119,IPR038109, PF07508,SSF53041,IPR011109,PF00239, PTHR30461,PS00397,PS51736,Coil,cd00338
MENLKIAAAYIRVSTHDQEEYSPESQIKLIRDYAKNNGFILPEEFIFRDDGISGRRADIRPEFQRMISKAKETPAPFQVILVWKYSRFARNQEESIVYKALLKKENKIDVVSISEPLVEGPFGSLIERIIEWTDEYYSIRLSGEVKRGMTEKASRGEPVSIPAFGYDIKNKQYIPNEKEAPFVQMIFDDFISGMGTREIAIKLNTMEVRTHRGNFFENRNIDYILNNPVYIGKIRWTPTGRMKRNYDLEDSMIVDGEHQPLISNETWEQAQALLKKRKKMYAKYARKSNPKKPFMLQGIVRCSNCGSTLCMGVSGSLQCHSYAHGQCNKSHSITLNKINTLVISALETDLESGDITLIKKSGSRENQQEFIKRQIQAEKIKLRRVKEAYENGVDTLEEYKSNKQKIMERLGELQAKQEPVQDLEKEKKEFCMKHKEAPAYLQNASISIEDKNHYIRTFIDHIVFNRASGTVDVIYYN

SEQ ID NO: 7236 - protein, 477 aa, Unknown
  Description of Unknown: Integrase B7237 sequence
  PTHR30461:SF3,cd00338,SM00857,G3DSA:1.10.10.2600,IPR036162, PF13408,IPR025827,G3DSA:3.40.50.1390,PS51737,IPR006119, IPR038109,PF07508,IPR011109,SSF53041,PTHR30461, PS51736,Coil,PF00239
MKYAAAYIRVSDDRQDEYSPDSQLKLIREYAVRNGYCVPDEYVFYDDGISGRSVKKRKAFNDMIAFAKSKEHPFQAILVWKFSRFARNQEESIVYKSMLRRIGVSVISISETIDDSPFAPLIERIIEFMDEYYSTRLSQEVTRGMTEKASRGEAMSAGAFGYDLQNKVFTPNEDAPTVRYIFNAFLSGKGYRKIAMELDAMGVKTYRGNPPDNRFVEYILMNPVYAGKIRWSTDGRASRDRYKGDNSKVMYVDGKHQPIIDQDTFDQVQEKIMEQKRRYGKWQRKEQPVTFMLKGLLRCDTCGATLTYIAARDPAVQCHNYARGKCKVSHYLSIRKANAAVIAAIEKSLETLEFNVLPKEQLQNEVVDYSLLIRKEEEKIKRASDAYDAGYDTLEEYGRKKRAFQNKIETLKAEQAKVEKSQSGEIPPQFVQQASFVLNLIKSPDTAESVKNEALRSIVDHITFKKPDNTLEIFYYI

SEQ ID NO: 7237 - protein, 477 aa, Unknown
  Description of Unknown: Integrase B7238 sequence
  PTHR30461:SF3,IPR036162,PS51737,IPR011109,cd16903, PTHR30461,PS00397,PF00239,G3DSA:1.10.10.2600,IPR006119, SSF53041,cd00338,SM00857,IPR025827,IPR038109, PS51736,IPR006118,PF13408,G3DSA:3.40.50.1390,PF07508,Coil
MRCAIYARVSTEEQAVEGYSISAQKKKLTAYCEAQDWNVVGYYVDEGISAKNTNRPELIRMIDHIKKGLIDCVLVYRLDRLTRSVLDLYNLLDVFEKYDCKFKSATEVYDTTTAIGRLFITIIAALAQWERENIGERVRVGQQEKVRQGKYTSGRKPYGYDADHKEGVLTVIEEEAKVVRSIFNDYLKGHSAQRICKKLNTIGTPGRNYWNEKAILYILENPLYVGTLRWRKETEHYFEIPNSVPPIIDKELFDNVQKLRESRRESHPRSAYGNYIFSGIIKCPRCGRSLVGNYVTSKKKDGTVTKYKQYFCRGRKLNVCNMGSMSERKLEKVIIPYILSLHIHATDEDVSTGQSNTEDEIIQIKNELKVIEKRRKKWQYAWANEHLKDEEFTELMQEESDREKVLTEELYKLKPAENKKLKNDELKEILNDMKLNWNNLNDEEKKMLMQIILKRIVVERSDEWQAYELKIVEMEFN

SEQ ID NO: 7238 - protein, 477 aa, Unknown
  Description of Unknown: Integrase B7239 sequence
  cd00338,SM00857,IPR006118,G3DSA:1.10.10.2600,IPR036162, PS51737,G3DSA:3.40.50.1390,IPR006119,IPR038109,PF07508, IPR011109,SSF53041,PTHR30461,PS00397,PS51736, Coil,PF00239
MENLKIAAAYIRVSTHDQEEYSPESQIKLIRDYAKNNGFILPEEFIFRDDGISGRRADKRPEFQRMISKAKETPAPFQVILVWKYSRFARNQEESIVYKALLKKENKIDVVSISEPLVEGPFGSLIERIIEWTDEYYSIRLSGEVKRGMTEKASRGEPVSIPAFGYDIKNKQYIPNEKEAPFVQMIFDDFISGMGTREIAIKLNTMEVRTHRGNFFENRNIDYILNNPVYIGKIRWTPTGRMKRNYDLEDSMIVDGEHQPLISNETWEQAQALLKKRKKMYAKYARKSNPKKPFMLQGIVRCSNCGSTLCMGVSGSLQCHSYAHGQCNKSHSITLNKINTLVISALETDLESGDITLIKKSGSRENQQEFIKRQIQAEKIKLRRVKEAYENGVDTLEEYKSNKQKIMERLEELQAKQEPVQDLEKEKKEFCMKHKEAPAYLQNASISIEDKNHYIRTFIDHIVFNRASGTVDVIYYN

SEQ ID NO: 7239 - protein, 477 aa, Unknown
  Description of Unknown: Integrase B7240 sequence
  PTHR30461:SF3,cd00338,SM00857,G3DSA:1.10.10.2600,IPR036162, PF13408,PS51737,G3DSA:3.40.50.1390,IPR025827,IPR006119, IPR038109,PF07508,IPR011109,SSF53041,PTHR30461, PS51736,Coil,PF00239
MKYAAAYIRVSDDRQDEYSPDSQLKLIREYAGRNGYCVPDEYVFYDDGISGRSVKKRKAFNDMIAFAKSKEHPFQAILVWKFSRFARNQEESIVYKSMLRRIGVSVISISETIDDSPFAPLIERIIEFMDEYYSTRLSQEVTRGMTEKASRGEAMSAGAFGYDLQNKVFTPNEDAPTVRYIFNAFLSGKGYRKIAMELDAMGVKTYRGNPPDNRFVEYVLMNPVYAGKIRWSTDGRASKDRYKGDNSKVMYVDGKHQPIIDQDTFDQVQEKIMEQKRRYGKWQRKEQPVTFMLKGLLRCDTCGATLTYIAARDPAVQCHNYARGKCKVSHYLSIRKANAAVIAAIEKSLETLEFNVLPKEQLQNEVVDYSLLIRKEEEKIKRASDAYDAGYDTLEEYGRKKRAFQNKIEALKAEQAKVEKSQSGEIPPQFVQQASFVLDLIKSPDTAESVKNEALRSIVDHITFKKPDNTLEIFYYI

SEQ ID NO: 7240 - protein, 477 aa, Unknown
  Description of Unknown: Integrase B7241 sequence
  IPR036162,PS51737,IPR011109,PTHR30461,PS00397, PF00239,G3DSA:1.10.10.2600,IPR006119,SSF53041,cd00338, SM00857,IPR025827,IPR038109,PS51736,IPR006118, PF13408,G3DSA:3.40.50.1390,PF07508,Coil
MPKDYRDGALYIRVSTDKQEELSPDAQKRLLLDYAKKNKILVNPEHIFMENGISGRKAQKRPEFQKMISLAKAKPAPFQVILVWKFSRFARNQEESIVYKSMLKKQCGIDVVSTSEPLIDGPFGSLIERIIEWMDEYYSINLSGEVVRGMTEKALRGGYQCTPPLGYKAVGEGKPFVVVPEEAKLVAYIFQQYCQCHKEPTAIARQINEMGIRTKRGGLFEKRTVSYILQNKFYIGDLEWNGITSKGQHETFISPELFEQARQIAAATFKPKKRRCVSSCKHWLSGLVKCSICGASLSYNTGKYPYFVCWRYAKGFHKVNSSISENRLIKAVLEYLEGLLNGMDFTVSYVEKDAPEITEHEQWEKDFQNLAVREQRIKIAYETGVDTLEEYKENKARLKQEREELERKKEQFIDVPAASDAKEQFLRKVRNVFDILKSDEVGNDTKGVFIRSIVEEIIYDKESDTLTFRLYSPKKAA

SEQ ID NO: 7241 - protein, 477 aa, Unknown
  Description of Unknown: Integrase B7242 sequence
  PTHR30461:SF3,SM00857,G3DSA:1.10.10.2600,IPR036162,PF13408, PS51737,G3DSA:3.40.50.1390,IPR025827,IPR006119,IPR038109, PF07508,IPR011109,SSF53041,PTHR30461,Coil, PS51736,cd00338,PF00239
MRDSKSKTVIIYNRVSTIMQDKNESLTEQTDECIRYCKTNGYEIYKILKDVKSGTKDDRAGYLELKKHIRRRDFDILVVLETSRIARKMKELVLFFSLLNENNIEYISIREPNYNTTTPDGKFAMNIRLGLIQFERDNTAERVTDRLYFKASKGQWVNGKPPIGYKLVNKRLEIDEEKAEIVKNIYEDFLNGYSLNQINNKLQFSWGSKQVKRILTNPTYKGYIRYGTRSNRKKNNREAFIVKGWHEAIIPEDKWEKVQEMYKSLNRKASNTKPTLLGGLLKCKECGNNYIRKRGGSYDKNLYYGCNLNNLRYSDKFFYKDILECSSATIKGDLLEKAVIDTLKKQINNLNFNDIEIEKKRQVNIKQIDSSINRFKNRLNKIYELYIEDEIPKDKYLKDKKDIEARIISLEKQKKSFGEIEVEKSNNEMIQEYFSKIDLSNIEEANRILKIIVNKIVVYKKKKTPKDDFEVEIYLNI

SEQ ID NO: 7242 - protein, 477 aa, Unknown
  Description of Unknown: Integrase B7243 sequence
  PTHR30461:SF3,SM00857,G3DSA:1.10.10.2600,IPR036162,PF13408, IPR025827,G3DSA:3.40.50.1390,PS51737,IPR006119,IPR038109, PF07508,IPR011109,SSF53041,PTHR30461,Coil, PS51736,cd00338,PF00239
MRDSKSKTVIIYNRVSTIMQDKNESLTEQTDECIRYCKTNGYEIYKILKDVKSGTKDDRAGYLELKKHIRRRDFDILVVLETSRIARKMKELVLFFSLLNENNIEYISIREPNYNTTTPDGKFAMNIRLGLIQFERDNTAERVTDRLYFKASKGQWVNGKPPIGYKLVNKRLEIDEEKAEIVRNIYEDFLNGYSLNQINNKLQFSWGSKQVKRILTNPTYKGYIRYGTRSNRKKNNREAFIVKGWHEAIIPEDKWEKVQEMYKSLNRKASNTKPTLLSGLLKCKECGNNYIRKRGGSYDKNLYYGCNLNNLRYSDKFFYKDIPECSSATIKGDLLEKAVIDTLKKQINDLNFNDIEIDKKRQVNIKQIDSSINKFKNRLNKIYELYIEDEIPKDKYLKDKKDIEARIISLEKQKKSFGEIEVEKSNNEMIQEYFSKIDLSNIEEANRILKIIVNKIVVYKKKKTPKDDFEVEIYLNI

SEQ ID NO: 7243 - protein, 477 aa, Unknown
  Description of Unknown: Integrase B7244 sequence
  cd03768,PTHR30461:SF3,SM00857,IPR006118,G3DSA:1.10.10.2600, IPR036162,PS51737,G3DSA:3.40.50.1390,IPR006119,IPR038109, PF07508,IPR011109,SSF53041,PTHR30461,PS00397, PS51736,Coil,PF00239
MISYFRRGEAGRLENMAVACYVRVSTENQLENYSIEEQTERLKLYCKSKDYEIYDMYIDGGYSGGNMERPALQKLLSDVQGGRIHAVLVYKLDRLSRSQKDTLNIIEDHFLKNGVDFISLNENFDTSTPFGKAMIGILSVFAQLEKDQITERFTMGRIGRSKAGYYHGGSTAPTGYDYKDGKLIVNPVTSQQVQEVYREFLNGKSINSIQRQMHEKYGGWSSAALVLNVLKNSVYIGMVKFKGVAYPGLHTPIISREQFERVQQYLNSEERESRKTTAQKTPFKAGFTLSGLVFCKRCGAKFSAEHGNYTCYSRSKSSPKRVVDPNCKNDKWKIADLDELIFDEIEHMSIDDDRLNQVVSSVKQPSAVDEASFQAEIEKTDQQIKRLLDLYQIGTLPISEISERVHSLQAEKEKLENQAKENRRQMSVKERIERFKQLVSQIQYMRTQSVEKKRIYVAELIETIYIDGKEVSINWRI

SEQ ID NO: 7244 - protein, 477 aa, Unknown
  Description of Unknown: Integrase B7245 sequence
  PTHR30461:SF3,SM00857,G3DSA:1.10.10.2600,IPR036162,PF13408, PS51737,G3DSA:3.40.50.1390,IPR025827,IPR006119,IPR038109, PF07508,IPR011109,SSF53041,PTHR30461,Coil, PS51736,cd00338,PF00239
MRDSKSKTVIIYNRVSTIMQDKNESLTEQTDECIRYCKTNGYEIYKILKDVKSGTKDDRAGYLELKKHIRRRDFDILVVLETSRIARKMKELVLFFSLLNENNIEYISIREPNYNTTTPDGKFAMNIRLGLIQFERDNTAERVTDRLYFKASKGQWVNGKPPIGYKLVNKRLEIDEEKAEIVKNIYEDFLNGYSLNQINNKLQFSWGSKQVKRILTNPTYKGYIRYGTRSNRKKNNREAFIVKGWHEAIIPEDKWEKVQEMYKSLNRKASNTKPTLLGGLLKCKECGNNYIRKRGGSYDKNLYYGCNFNNLRYSDKFFYKDILECSSATIKGDLLEKAVIDTLKKQINDLNFNDIEIEKKRQVNIKQIDSSINRFKNRLNKIYELYIEDEIPKDKYLKDKKDIEARIISLEKQKKSFGEIEVEKSNNEMIQEYFSKIDLSNIEEANRILKIIVNKIVVYKKKKTPKDDFEVEIYLNI

SEQ ID NO: 7245 - protein, 477 aa, Unknown
  Description of Unknown: Integrase B7246 sequence
  PTHR30461:SF3,IPR036162,PS51737,IPR011109,PTHR30461, PS00397,PF00239,G3DSA:1.10.10.2600,IPR006119,SSF53041, cd00338,SM00857,IPR025827,IPR038109,PS51736, IPR006118,PF13408,G3DSA:3.40.50.1390,PF07508,Coil
MSALKNGALYIRVSTADQTELSPDAQQRLLLDYAKKNGIVIAKEFIFEESVSGRHADRRPKFQEMIALAKQDSHPIDVILVWKYSRFARNQEESIVYKSLLKKNNIDVISISEPLIDGPFGTLIERIIEWMDEYYSIRLSGEVMRGMKEKALKHGYQATPSLGYRAVGGGKPFVIDEAEYQIVKYIMDQYDLENHDPTAIARSCNELGYHTKRGNLMERRSVERILRNPFYAGTVIWNGISFEGAHEARLDRERFNNRIKRMDARRRTPKSRNPSACKHWLSGLLKCPVCGATLTVTAGNTSCPYFQCWKYAKGLHKVSNSITVAKAERTVFRYFDEIILAGADFSYTVRNKTLDVEKDDTVARLQQALDHLSMRESRIKLAFENGIDTLEEYGANKKRLAEERQSLQEELDRVLTPAAPPETISKEDFRKEIKNINDILKNPEEPAEKKGLLLRSIVDRIVYEKASGTMYFDFFVS

SEQ ID NO: 7246 - protein, 477 aa, Unknown
  Description of Unknown: Integrase B7247 sequence
  PTHR30461:SF3,cd00338,SM00857,G3DSA:1.10.10.2600,IPR036162, PF13408,PS51737,IPR025827,G3DSA:3.40.50.1390,IPR006119, IPR038109,PF07508,SSF53041,IPR011109,PTHR30461, PS51736,Coil,PF00239
MKYAAAYIRVSDDRQDEYSPDSQLKLIREYAGRNGYCVPDEYVFYDDGISGRSVKKRKAFNDMIAFAKSKEHPFQAILVWKFSRFARNQEESIVYKSMLRRIGVSVISISETIDDSPFAPLIERIIEFMDEYYSTRLSQEVTRGMTEKASRGEAMSAGAFGYDLQNKVFTPNEDAPTVRYIFNAFLSGKGYRKIAMELDAMGVKTYRGNPPDNRFVEYILMNPVYAGKIRWSTDGRASRDRYKGDNSKVMYVDGKHQPIIDQDTFDQVQEKIMEQKRRYGKWQRKEQPVTFMLKGLVRCDTCGATLTYIAARDPAVQCHNYARGKCKVSHYLSIRKANAAVIAAIEKSLETLEFNVLPKEQLQNEVVDYSLLIRKEEEKIKRASDAYDAGYDTLEEYGRKKRAFQNKIEVLKAEQAKVEKSQSGEIPPQFVQQASFVLDLIKSPDTAESVKNEALRSIVDHITFKKPDNTLEIFYYI

SEQ ID NO: 7247 - protein, 477 aa, Unknown
  Description of Unknown: Integrase B7248 sequence
  SM00857,G3DSA:1.10.10.2600,IPR036162,PS51737,G3DSA:3.40.50.1390, IPR006119,IPR038109,PF07508,IPR011109,SSF53041, PF00239,PTHR30461,PS51736,Coil,cd00338
MSNSSSFPAKISAIYCRESTEKQNIQSLIDMCKKAAKKINLQNIKVYYDVASGYNKDREQYSKLKEDIQNNLVDTLVLYESSRLTRDELEHHIFYGLLRVHNVKVYTVTHGWLDLQDADDTFLTNLLNLLDAREGRKTAKRSKDRMTELAEQGRWTGGPAPLGYKLVNKELVIVPEDAEKVKTIFKLFLDGKTRQSIANFFGYEVKKVRRLLENSVYIGKLKFHSVEIINKKKILHKDYKVLNGIHEPIIDESTFSLVQGKLKNIKVERNTDVYIFKDLIKCTCGRKMYRVVNKYNYLKKSTNEISRKTENLYYCRTSDKYKSLGCGAIGIHEEELFEEVMASLKKIIFSLEVENIDTKFDDYQSQLVLYKKELASLSRKEELLARQLLNSLISEEVFEKLMKELKEKKAFLEEKIKNLTTLITNKKNTNKNSEILKKYFFKLEKEKAPEKINNFLKLIIDEIEMVNDYRFYIHLKF

SEQ ID NO: 7248 - protein, 477 aa, Unknown
  Description of Unknown: Integrase B7249 sequence
  IPR036162,PS51737,IPR011109,PTHR30461, PS00397,PF00239,G3DSA:1.10.10.2600,IPR006119, SSF53041,cd00338,SM00857,IPR025827,IPR038109,PS51736 ,IPR006118,PF13408,G3DSA:3.40.50.1390,PF07508,Coil
MEMKIGAAYVRVSTDGQLDLSPDAQKREILKYAKANGIIVPEEFIFIENSGISGKKASRRPEFQRMIATARQRPAPFEAVLVWKFSRFARNQDESTFYKSMLRKKCGVDVISVTEPIMEGMYGRLIETIIEWSDEFYSYNLAQEVRRGMTEKAMRGGYQCKPPIGYAPTPDSVPVIVPDRAAIVQRIFQEFDQGYDRTGIARRLNADGFRTDRGNTFENRVVTYILQNPFYIGKIRWNHAAHGSRIANPEEDIILVNGRHEPIIDTDLFDRVQKRLAAVPHVTRSRAPSTCSHWLSGVVRCSSCGSTLALGGPADGRYFQCHAYAKGKCSVSHSIMAKKLEASLLDELQSTLQTGDFDFRMQPPKTPDRDVRTALKRIEQKEKKAREAYMAGIDTLDEYREIRNALRAEREALDVKPETISREEARRILLGRIRELAQMLQSGDFTDEQKGMAVRSVFEKIVFDRPHNALHYFYHYS

SEQ ID NO: 7249 - protein, 477 aa, Unknown
  Description of Unknown: Integrase B7250 sequence
  PTHR30461:SF3,SM00857,G3DSA:1.10.10.2600,IPR036162,PS51737, G3DSA:3.40.50.1390,IPR006119,IPR038109,PF07508,SSF53041, IPR011109,PF00239,PTHR30461,PS51736,Coil, cd00338
MAGVKNITVIPAKKRVGNTVTAEDKPKLKVVAYCRVGTDSEEQATSHDAQVTHYTEFIRKNPEWEFAGIYADDGISGTNTKKREEFNRMIEDTMAGKIDMIITKSISRFARNTLDCLKCIRQLKEKNVPVFFEKENINTMDSKGEVLLTIMASLAQQESESLSKNVKMGIQFRYQNGEVQVNHNWFLGYTKDENGHLIIDEDQTIIVRRIFREYLQGASLKTIADGLMADGIPTATGNKKWRGDGIRKILTNEKYMGDALLQKTYTVDVLTKKRVSNNGIVPQYYVENNHEAIIPRQLFMQVQEELFRRAHLKTEGGKTKRVYSSKYALSSIVYCGKFGDLFRRVAWKARGASYNKWRCASRIEKGPKEGCDADAISETEILNAVVRAINKTLGGREQFLVQLQHNIEDVLNGDSTATLEYIDKRMAELQEKLVMCVNKNAEYDVIANEIDALREKKAAVVTRDGEQEMLRKRIDEM

SEQ ID NO: 7250 - protein, 477 aa, Unknown
  Description of Unknown: Integrase B7251 sequence
  PTHR30461:SF3,SM00857,G3DSA:1.10.10.2600,IPR036162,PF13408, IPR025827,G3DSA:3.40.50.1390,PS51737,IPR006119,IPR038109, PF07508,IPR011109,SSF53041,PTHR30461,Coil, PS51736,cd00338,PF00239
MKYAAAYIRVSDDRQDEYSPDSQLKLIREYAGRNGYCVPDEYVFYDDGISGRSVKKRKAFNDMIAFAKSKEHPFQAILVWKFSRFARNQEESIVYKSMLRRIGVSVISISETIDDSPFAPLIERIIEFMDEYYSTRLSQEVTRGMTEKASRGEAMSAGAFGYDLQNKVFTPNEDAPTVRYIFNAFLSGKGYRKIAMELNAMGVKTYRGNPPDNRFVEYILMNPVYAGKIRWSTDGRASRDRYKGDNSKVMYVDGKHQPIIDQDTFDQVQEKIMEQKRRYGKWQCKEQPVTFMLKGLLRCDTCGATLTYIAARDPAVQCHNYARGKCKVSHYLSIRKANAAVIAAIEKSLKTLEFNVLPKEQLQNEVVDYSLLIRKEEEKIKRASDAYDAGYDTLEEYGRKKRAFQNKIEALKAEQVKVEKSQSGEIPPQFVQQASFVLNLIKSPDTAESVKNEALRSIVDHITFKKPDNTLEIFYYI

SEQ ID NO: 7251 - protein, 477 aa, Unknown
  Description of Unknown: Integrase B7252 sequence
  PTHR30461:SF3,IPR036162,PS51737,IPR022019,IPR011109,PTHR30461 ,PS00397,PF00239,PF12207,G3DSA:1.10.10.2600,IPR006119,SSF53041 ,cd00338,SM00857,IPR038267,IPR025827,IPR038109,PS51736, IPR006118,PF13408,G3DSA:3.40.50.1390,G3DSA:1.10.3950.10,Coil
MSIIEEQVKRNQYIEEVAAYIRVSTQEQKLHGISIEAQIEKLTEYAEKHGMKIVEWYKDEGVSGRKLIKKRPELQRMIQDAEKGKFKRIIFIKLDRFFRSVAEYHECMKRLAIGGVIWTATEEKYDLSTPSGEAFVNMKLTMAQFEADQAGERIRMVNEYKIKSGQPLFGAQCLPFGYTVSAPENGERHKYIAKEHEEIAMDLINHALTHGAIRGAMSYVNNKYGMSLSYNACINMLKNEMICGEYKGNPNYCEPYISREEFDRLQKLISRTPRDTGEKRTYIFSGLILCPNCGRRLTGGTHSPNKGIRNVTYKTYRCNSKLRDKKCDYGNTVFEETLEKVLLDKIESIVDRKMIEVNAIEAESEKTSKYNVAELQAELDRLNYSWQKNRIKSAEEYDRKYDAIVEKIEAAQAEQQQMGHVDYERIQCLFQSGWRDLYNSLDDEHKRSFWRSFIEEIEIDWGKGRYGKRDIKDITFF

SEQ ID NO: 7252 - protein, 477 aa, Unknown
  Description of Unknown: Integrase B7253 sequence
  PTHR30461:SF3,SM00857,IPR006118,G3DSA:1.10.10.2600,IPR036162, PS51737,G3DSA:3.40.50.1390,PS00397,IPR006119,IPR038109, PF07508,IPR011109,SSF53041,PTHR30461,Coil, PS51736,cd00338,PF00239
MKIAAAYIRVSTDDQIEYSPDSQRKAILDYAKRNDYIVPQEYIFVDEGISGRSTKRPAFQQMIGTAKQKSHPFDAILVWKFSRFARNREDSVVYKSMLRKQCGVEVVSISEQIGEDKTSILIEALLEAMDEYYSINLSEEVVRGMSEKARRGGTLGRAPFGYTAKNGELLPNDDAKTVQWIFNAFLNGTGMRTIATQLNSSGIRTAYGKPWENRTVEYVLRNITYAGHQHWTPGGTKDMKHAEKIKGNTIVKNNAHTAIVSEEQFAAVQEKIAENKRKYKKHEQPEVGIPFLGKGLLRCSDCGGALCMLGRGNGIQCHNYAHGKCNVSHYIKLEYIDKMIVDKIKSDVEAQNFRTILIPENAAESQEMQDNKRTLERARKKLARVREAYENGIDTIEEYRQNKARIQKEIEELEAKPAPPKETQESAAEKLRQRILSNVTLLESDAPAGLKNDMLHTFVSRIVFDRKNTRVEVEYHG

SEQ ID NO: 7253 - protein, 477 aa, Unknown
  Description of Unknown: Integrase B7254 sequence
  cd00338,SM00857,G3DSA:1.10.10.2600,IPR036162,PF13408, PS51737,G3DSA:3.40.50.1390,IPR025827,IPR006119,IPR038109, PF07508,IPR011109,SSF53041,PTHR30461,PS51736, Coil,PF00239
MKRQVLYEMIKKIAVLYMRMSTDMQEHSIESQERVLMEYAKRNGYIVIRKYIDRGISGQHASKRPDFMKMIDDSETGEFQYVLIYDSSRFARNLVESLTYKSILKENCVRLISMTEPNLEDDEMSLYIDAMQGAANEIYVRKLSKSTKRGHNERALRGDLPGNAHFGVKLLPDKSIVLDEVKAPIMRWMYEAIYHDDATYYSISETLAAKGIKSQRGNIIDSRQVKRMLMNIKNKAYHWAERDGKPVLIKGNYPAVIEEELFDAVQEIIAERAKHYKKHEKPAEFRKHWLSGLLVCPYCGGGYSYNTRKPPQHDAFRCGNQTRGACKKGSQILVDAAVEMVLDKMSEVYTGPLAPYVKNITVSQPEPQIDYDKEIRLLEAQLKRAKQAYLAEIDTIEEYAQNKRRISSNIKELQEAKCQAQEGATLNEPQFKVKLLNVITLLKSDCPMSEKIPAARSIIEKILVDPRNKTMDIYFFA

SEQ ID NO: 7254 - protein, 476 aa, Unknown
  Description of Unknown: Integrase B7255 sequence
  PTHR30461:SF3,SM00857,IPR006118,G3DSA:1.10.10.2600,IPR036162, PS51737,G3DSA:3.40.50.1390,PS00397,IPR006119,IPR038109, PF07508,IPR011109,SSF53041,PTHR30461,Coil, PS51736,cd00338,PF00239
MKIAAAYVRVSTDDQLEYSPDSQLQAIRDYAKSHDLILAEEYIFREEDGRSGRQAEKRPEFMRMISTAKQQPPPFEVILCWKYSRFARNQEESIVYKSMLKKDGIEVVSISEPLIDGPFGSLIERIIEWMDEYYSIRLSGEVKRGMTEKVSRGEPVTIPPLGYLMENKQLVPDPEMAPVISMLFDEFAAGTPMLQLARRLNEMGIRTRRGCKIEYRTLNYIMQNPVYIGKIRWTPTGRANRYYKTDDTLIVDGNHQPIITTEQWEKAQAKIAENKQKFPRYQRDTASKFMLRGLVHCSNCGATLVTSTPGSLQCNHYAKGLCSISHSITITKLDKAVMQGLEHDALDMGGNLKIEYRTQSAPVATATIKAQIKKEQNKLQRCKEAYQGGVDTLAEYRSNKEAILSTIADLEKQLNTAPTAIPAPDPQALRDKIIAAIPTLKDPDVTPTVKNNLLRCFISKIVYTKSNEEIEMYYYM

SEQ ID NO: 7255 - protein, 476 aa, Unknown
  Description of Unknown: Integrase B7256 sequence
  PTHR30461:SF3,SM00857,IPR006118,IPR036162,PF13408, IPR025827,G3DSA:3.40.50.1390,Coil,IPR006119,SSF53041, PTHR30461,PS00397,PS51736,cd00338,PF00239
MKIALYCRVSTEEQARTGESILDQRQALERWARDRGHEIIGVYEDEGFSAHKSYKSRPGLSRLLDDVRDGKVELIAFTKFDRWTRRAADYYELQEVLDRHHVPWTAILEDYETVTADGRFKVGIMLSVNQHEAERTSERIKFTFAEKRRRGEIISGNMPKGYKLVDKKPAKDPETEDGMNVFWRTYLSGAGLKPAIMAAESRGVRLSTSTGSFILRNAEAYTGKIQGVSCEAYITEEEAARVLATRKIKAKASGYTYLFTGLLYCGECAHRMGGHRNFWEHKDGSRGFQVFYNCSHRYRTNQRECSNSVNIYESDIERALVFGLSDAIEAEAVKMEAQIAEMRRQREAAQDVQPVREKLERRKRRAWEAYLDEIIDKKAYQREAAKIDAELAKIVQVPQIDEDAPRKIRETMPEGWRELYFKLDAQHRREFWMQTLQRIDVYPDRSISITVKPGENPFITRIQQPDGYWIEIVPEK

SEQ ID NO: 7256 - protein, 476 aa, Unknown
  Description of Unknown: Integrase B7257 sequence
  PTHR30461:SF3,cd00338,SM00857,G3DSA:1.10.10.2600,IPR036162, PF13408,PS51737,G3DSA:3.40.50.1390,IPR025827,IPR006119, IPR038109,PF07508,IPR011109,SSF53041, PTHR30461,PS51736,Coil,PF00239
MKRAVFYGRYSSDRQTEQSIEGQRRVCEEFAKAEQIQIVGEYIDRATSGTSTEHREQFQKMLKDSKNGGWNYVLVYKLDRFARSRYDSAISKQQLKKNGVKVLSATERITDSPEGILIEGLLESMDEYFSRELSRKCKRGIRESIIKGHNFGGRVLYGYDRKDKRFVVNEEQAVNVRRIFKSYLSGCTIQSIADQLNADGYRTNYGNEFKRYTVSDILHNDKYTGIHYIDGIEEPETCPAIISQTTFERVKEKLNQSAHRSREHTTGHTYALSGLLQCGVCGRYVCGSSVERKYFYYACRSREHAENSVHIHADKLEQVVIDALQTFFTEEQVSTLAERLYQIYTTDMDGKPDRSKRLNEIEKQIQGTVNALIACPSSKALQEKLTQLEEQKAEIEKMPILQPQLKKEHFENYFHWLALRLEHIEDRQTFFHTVIHKVLVYPEKAVIILNMTDEMADPPKREQVEAFMSNVGEVSL

SEQ ID NO: 7257 - protein, 476 aa, Unknown
  Description of Unknown: Integrase B7258 sequence
  SM00857,IPR006118,G3DSA:1.10.10.2600,IPR036162,PF13408, IPR025827,PS51737,G3DSA:3.40.50.1390,IPR006119,IPR038109, PF07508,IPR011109,SSF53041,PF00239,PTHR30461, PS00397,Coil,cd00338
MRIGAAYIRVSTDDQLDISPESQLDEIQRYAKSHDILIPEEYIFMERTGRSGKRADNRPEFQRMIATAKEKPQPFEVILVWKFSRFARNQDESTFYKGMLRKKLKIDIESVSEPIMEGMYGRLIEMIIEWQDEFYSYNLGVEVKRGMAKKAELKGYQLVPPLGYAAVGNGKPYVIREDEYKIVEMIFHMYAVDRLDMTAIARQLNASGYLTRRGNPFEKRSIDRIIQNRFYVGTVEWNGFSFEGTHKTRASVTELFEQCQERRKAEFRPMRHRNVSTCKHWLSGLMRCSVCGATLSYTGSGAVPYFTCWKYSKGLHPESCSISVKKMERIVLRSLDGILESGHFEYTPAASASGSPADPSNEIQSIHTQLDRLRHQEERARIAYENEVYTLDEYKESKARLRSEIQRLSDELQRLLEQPAESAPPQKELLDRVRNVRDLLASPSVGFETKGNALRSILKCIIFDRKTEHFDFQYYA

SEQ ID NO: 7258 - protein, 476 aa, Unknown
  Description of Unknown: Integrase B7259 sequence
  PTHR30461:SF3,IPR036162,PS51737,IPR011109,PTHR30461, PS00397,PF00239,G3DSA:1.10.10.2600,IPR006119,SSF53041, SM00857,IPR025827,IPR038109,PS51736,cd03768, IPR006118,PF13408,G3DSA:3.40.50.1390,PF07508,Coil
MKVALYVRVSTLEQAEEGYSIGEQKDKLKKYCEIKDWTITKIYSDPGFSGSNINRPSIQQLIKDAGTGLYDAVLVYKLDRLSRSQKDTLYLIEDVFQKNNIHFISLSENFDTSTAFGKAMIGILSVFAQLEREQIKERMMMGKTGRAKAGKITAWSNIPFGYIKDNDTYKIDPLRADVVKDIYKRYLSGQSITRIYQQLNEEGHIGKDTKWSYRTVRQTLDNATYTGMVNYRGKTYQGKHKAIITKETFDTVQQQLKLRQIEAEKKFYAHPFQSKYMLSGLLKCGYCGSTLAINKSHRKNKAPRWRYNCPVTHSRNHSKTYARRADNCQFKFIYRDVVENIVIDEIRKLSLNPKSVLVRPKQNDKTETVNVEAIKKELSGIKKKQDRLVDLYLIADSLSLEELNKRSKELKRQQEALESKLKPVQNESSNIVEFEELLLKAKNIEELNYQQQTHLVRQLIKSIDVTNEELTINWNI

SEQ ID NO: 7259 - protein, 476 aa, Unknown
  Description of Unknown: Integrase B7260 sequence
  SM00857,IPR006118,G3DSA:1.10.10.2600,IPR036162,PF13408, IPR025827,G3DSA:3.40.50.1390,IPR006119,IPR038109,PF07508, SSF53041,IPR011109,PF00239,PTHR30461,PS00397, PS51736,Coil,cd00338
MAKLRNGALYIRVSTADQTELSPDAQQRLLLDYAKKNGIIISKDYVFEESVSGRHADKRPKFQEMIGIAKQESHPIDVILVWKYSRFARNQEESIVYKSLLKKSDVDVISISEPLIDGPFGTLIERIIEWMDEYYSIRLSGEVIRGMKEKALKHGYQSTPCLGYDAVGGGRPFVINESEYRIVQYIMDQYDLYDQDETAIARKCNDLGFRSKRGNLFEQRNVDLILKNPFYTGTVVWNGISFEGSHETRLSKERFEKRIALMRARRRPAKARNISTCKHWLSGLLRCSVCGATLSLAGSGSYRYFQCWKYSKGFHKGSQSLSAAKAEAAVCDYFDRILAGADFTYTVRNIPDQKESDELDLLRQELDQIAVKEARVKLAYENGIDTLEEYKENRRRLKESREELQEKIDVATATTQPDDSDSHARETLLKEIRSVSEILKDPAESYERKGLLLRSIVDGITYDKEKKRLYFNFFIS

SEQ ID NO: 7260 - protein, 476 aa, Unknown
  Description of Unknown: Integrase B7261 sequence
  PTHR30461:SF3,SM00857,G3DSA:1.10.10.2600,IPR036162,PS51737, G3DSA:3.40.50.1390,IPR006119,IPR038109,PF07508,SSF53041, IPR011109,PTHR30461,Coil,PS51736,cd00338, PF00239
MNIAAAYIRVSDDRQDEYSPDSQLKLVREFAKKNDFYVPDEFVFYDDGISAKTAKRRPEFNKMISIAKQKNPPFSKIYVWKFSRFARNQEESIVFKSLLRKNGVEVVSISEPLIDGVFGSLVERIIEWMDEYYLIRLSGEVKRGMTEKASRGEAMCGQVFGYDYINKTYQPNSESQYVVKMFEDYANGKKERQIARELALMGIKTKRGNAPDNRFVNYILHNPVYVGKIRWSTDGRAASKRDYDNDNIMVVQGSHKPLIDEELWNKVQKMLKENERKYKKYQRPSQSVEFMLKGLLRCDNCGSTLVMQSTKCPSVQCHKYAKGSCGISHSISIAKANRIVIEALENAVGTLNFNIETEKTKNETKIDFDKFISAEKNKLEKAKEAYLNGVDTVEEYAKNKKEILANIEDLEKQKNKVNTSATDFDKQQYAKKVADVLEIINSPDTSEQVKNDVLRTVISKIVFNKAKNSLDLFFYL

SEQ ID NO: 7261 - protein, 476 aa, Unknown
  Description of Unknown: Integrase B7262 sequence
  PTHR30461:SF3,cd00338,SM00857,G3DSA:1.10.10.2600,IPR036162, PF13408,PS51737,G3DSA:3.40.50.1390,IPR025827,IPR006119, IPR038109,PF07508,IPR011109,SSF53041,PTHR30461, PS51736,Coil,PF00239
MKRAVFYGRYSSDRQTEQSIEGQRRVCEEFAKAEQIQIVGEYIDRATSGTSTEHREQFQKMLKDSKNGGWDYVLVYKLDRFARSRYDSAISKQQLKKNGVKVLSATERITDSPEGILIEGLLESMDEYFSRELSRKCKRGIRESIIKGHNFGGRVLYGYDRKDKRFVINEEQAVNVRRIFKSYLSGCTIQSIADQLNADGYRTNYGNEFKRYTVSDILHNDKYTGIHYIDGIEEPETCPAIISQTTFERVKEKLNQSAHRSREHATGHTYALSGLLQCGVCGRYVCGSSVERKYFYYACRSREHAENSVHIHADKLEQVVIDALQTFFTEEQVSTLAERLYQIYTTDMDGKPDRSKRLNEIEKQIQGTVNALIACPSSKALQEKLTQLEEQKAEIEKMPILQPQLKKEHFENYFRWLALRLEHIEDRQTFFHTVIHKVLVYPEKAVIILNMTDEMADPPKREQVEAFMSNVGEVSL

SEQ ID NO: 7262 - protein, 476 aa, Unknown
  Description of Unknown: Integrase B7263 sequence
  PTHR30461:SF3,IPR036162,PS51737,IPR011109,PTHR30461, PS00397,PF00239,G3DSA:1.10.10.2600,IPR006119,SSF53041, cd00338,SM00857,IPR025827,IPR038109,PS51736, IPR006118,PF13408,G3DSA:3.40.50.1390,PF07508,Coil
MSALKNGALYIRVSTADQTELSPDAQQRLLLDYAKKNGIVIAKEFIFEESVSGRHADRRPKFQEMIALAKQESHPIDVILVWKYSRFARNQEESIVYKSLLKKSNVDVISISEPLIDGPFGTLIERIIEWMDEYYSIRLSGEVLRGMKEKALQHGYQTTPCLGYQAAGGGKPFVIDEAEYQIVKYIMDQYDLEHLDPTAIARKCNDLGYRTRRGNRMERRSIERVLRNPFYAGTVIWNGISFDGTHETRLDPARYQERIKRMDARRRSPKSRNPSTCRHWLSGLLKCPICGATMTVTAGNTSCPYFQCWKYAKGFHKGSNSITVAKAERTVYRYFDDILAGADFSFTVRDRKQEQEDDETIQRLQHALDHLAVREARVKMAYENGIDTLEEYGANKKRLAEERQSLQEELDRMLTPAAPLETISKEDFRKEIKNINDILKNPEEPAEKKGLLLRSIVDRIVYEKASGTMYFDFFVS

SEQ ID NO: 7263 - protein, 476 aa, Unknown
  Description of Unknown: Integrase B7264 sequence
  PTHR30461:SF3,IPR036162,PS51737,IPR011109,PTHR30461, PS00397,PF00239,G3DSA:1.10.10.2600,IPR006119,SSF53041, cd00338,SM00857,IPR025827,IPR038109,IPR006118, PF13408,G3DSA:3.40.50.1390,PF07508,Coil
MRIGAAYIRVSTDDQLDISPESQLDEIQRYAKSHDILIPEEYIFMERTGRSGKRADNRPEFQRMIATAKEKPQPFEVILVWKFSRFARNQDESTFYKGMLRKKLGIDIESVSEPIMEGMYGRLIEMIIEWQDEFYSYNLGVEVKRGMAKKAELKGYQLVPPLGYAAVGNGKPYVIREDEYKIVEMIFHMYAVDRLDMTAIARQLNASGYLTRRGNPFEKRSIDRIIQNRFYLGTVEWNGFSFEGTHETRASVTELFEQCQERRKAEFRPMRHRNVSTCKHWLSGLMRCSVCGATLSYTGSGAVPYFTCWKYSKGLHPESCSISVKKMERIVLRSLDGILESGHFEYTPAASASGSPADLSNEIQSIHTQLDRLRHQEERARIAYENEVYTLDEYKESKARLRSEIQRLSDELQHLLEQPAESAPPQKELLDRVRNVRDLLASPSVGFETKGNALRSILKCIVFDRKTEHFDFQYYA

SEQ ID NO: 7264 - protein, 476 aa, Unknown
  Description of Unknown: Integrase B7265 sequence
  IPR036162,PS51737,IPR011109,PTHR30461,PS00397, PF00239,G3DSA:1.10.10.2600,IPR006119,SSF53041,cd00338, SM00857,IPR025827,IPR038109,PS51736,IPR006118, PF13408,G3DSA:3.40.50.1390,PF07508,Coil
MSALKNGALYIRVSTADQTELSPDAQQRLLLDYAKKNGIVIAEDFIFEESVSGRHADRRPKFQEMIAIAKQESHPIDVILVWKYSRFARNQEESIVYKSLLKKSGVDVISISEPLIDGPFGTLIERIIEWMDEYYSIRLSGEVIRGMKEKALKHGYQTSPCLGYDAAGSGKPFVINEAEYSIVKFIMDQYDLENHDPTAIARSCNELGYHTKRGNLMERRSVERILRNPFYAGTVIWNGISFEGAHETRLDRERFNNRIKRMDARRKTPKSRNPSACKHWLSGLLKCPVCGATLTVTAGNTSCPYFQCWKYAKGFHKGSNSITVAKAERTVFRYFDEILAGADFSYTVRNTTLDVEKDDTVARIRQALDHLSMRESRIKLAFENGIDTLEEYGANKKRLLEERQHLQQELDRTLAPAALPVEMSKEDFRKEICNVNDVLKDPNESSETKGLLLRSIVDSIVYNKDSGTMFFDFFVS

SEQ ID NO: 7265 - protein, 476 aa, Unknown
  Description of Unknown: Integrase B7266 sequence
  cd00338,SM00857,IPR006118,G3DSA:1.10.10.2600,IPR036162, PF13408,IPR025827,PS51737,G3DSA:3.40.50.1390,IPR006119, IPR038109,PF07508,IPR011109,SSF53041,PTHR30461, PS00397,Coil,PF00239
MRIGAAYIRVSTDDQLDISPESQLDEIQRYAKAHDILIPEEYIFMERTGRSGKRADNRPEFQRMIATAKEKPQPFEVILVWKFSRFARNQDESTFYKGMLRKKLKIDIESVSEPIMEGMYGRLIEMIIEWQDEFYSYNLGVEVKRGMAKKAELKGYQLVPPLGYAAVGNGKPYVIREDEYKIVEMIFHMYAVDRLDMTAIARQLNASGYLTRRGNPFEKRSIDRIIQNHFYVGTVEWNGFSFEGTHETKASVTELFEQCQERRKAEFRPMRHRNVSTCKHWLSGLMRCSVCGATLSYTGSGAVPYFTCWKYSKGLHPESCSISVKKMERIVLRSLDGILESGHFEYTPAASASGSPANLSNEIQSIHTQLDRLRHQEERARIAYENEVYTLDEYKESKARLRSEIQRLSDELQRLLEQPAESAPPQKELLDRVRNVRDLLASPSVGFETKGNALRSILKCIVFDRKTEHFDFQYYA

SEQ ID NO: 7266 - protein, 476 aa, Unknown
  Description of Unknown: Integrase B7267 sequence
  PTHR30461:SF3,SM00857,G3DSA:1.10.10.2600,IPR036162,PF13408, PS51737,G3DSA:3.40.50.1390,IPR025827,IPR006119,IPR038109, PF07508,SSF53041,IPR011109,PF00239,PTHR30461, PS51736,Coil,cd00338
MKRAVFYGRYSSDRQTEQSIEGQRRVCEEFAKAEQIQIVSEYIDRATSGTSTEHREQFQKMLKDSKYGGWDYVLVYKLDRFARSRYDSAISKQQLKKNGVKVLSATERITDSPEGILIEGLLESMDEYFSRELSRKCKRGIRESIIKGHNFGGRVLYGYDRKDKRFVINEEQAVNVRRIFKSYLSGCTIQSIADQLNADGYRTNYGNEFKRYTVSDILHNDKYTGIHYIDGIEEPETCPAIISQTTFERVKEKLNQSAHRSREHTTGHTYALSGLLQCGVCGRYVCGSSVERKYFYYACRSREHAENSVHIHADKLEQVVIDALQTFFTEEQVSTLAERLYQIYTTDMDGKPDRSKRLNEIEKQIQGTVNALIACPSSKALQEKLTQLEEQKAEIEKMPILQPQLKKEHFENYFRWLALRLEHIEDRQTFFHTVIHKVLVYPEKAVIILNMTDEMADPPKREQVEAFMSNVGEVSL

SEQ ID NO: 7267 - protein, 476 aa, Unknown
  Description of Unknown: Integrase B7268 sequence
  PTHR30461:SF3,SM00857,G3DSA:1.10.10.2600,IPR036162,PF13408, PS51737,IPR025827,G3DSA:3.40.50.1390,IPR006119,IPR038109, PF07508,IPR011109,SSF53041,PTHR30461,Coil, cd00338,PF00239
MTIIGEYCDRAISGKTDNRPNFQRLIKDSEKGQFEAVIMYTLDRFARNRYDSAIYKAKLKKNGVKVYYAKQPMPDTPEGIILESVLEGYAEYYSENLSRNIKRGLKENALQCLAVGGAGMPLGYTVGEDRKYKIDPVGAKIVQEIFQMYADGMSATQIINECNRRGYKTSRGNAFNKNSLRTMLKNDRYIGVYRFADVVVEDGVPPIISRELFEKVQTTLRHNYSARARNKAKDDYLLTTKLFCGHCGSSMVGESGTSRSGKLHHYYKCIDRKRNRKCKKAVEKKDWIEELVVRFTVQNVLNDETIERIARKTMEIIEKESADTSYLNGLQNELKGIKKKIKNLMNAIEQGIITPTTKERMDELEAEKNDLEGKIAREEMKKPLLTKERIMHWLNSFKSGNVNDIEYRRRVIDTLVNSVYIYDDGDKGRRIVFTFNMSGQNTATLSCSDIACVAPPDGYYTNTYFFKGGFAVRVWL

SEQ ID NO: 7268 - protein, 476 aa, Unknown
  Description of Unknown: Integrase B7269 sequence
  PTHR30461:SF3,IPR036162,PS51737,IPR011109,PTHR30461, PS00397,PF00239,G3DSA:1.10.10.2600,IPR006119,SSF53041, cd00338,SM00857,IPR025827,IPR038109,PS51736, IPR006118,PF13408,G3DSA:3.40.50.1390,PF07508,Coil
MSALKNGALYIRVSTADQTELSPDAQQRLLLDYAKKNGIVIAKEFIFEESVSGRHADRRPKFQEMIALAKQESHPIDVILVWKYSRFARNQEESIVYKSLLKKSNVDVISISEPLIDGPFGTLIERIIEWMDEYYSIRLSGEVLRGMKEKALQHGYQTTPCLGYQAAGGGKPFVIDEAEYQIVKYIMDQYDLEHLDPTAIARKCNDLGYRTRRGNRMERRSIERVLRNPFYAGTVIWNGISFDGTHETRLDPARYQERIKRMDARRRSPKSRNPSTCRHWLSGLLKCPICGATMTVTAGNTSCPYFQCWKYAKGFHKGSNSITVAKAERTVYRYFDDILAGADFSFTVRDRKQEQEDDETIQRLQHALDHLAVREARVKMAYENGIDTLEEYGANKKRLAEERQSLQKELDRVLTPAAPPETISKEDFRKEIKNINDILKNPEEPAEKKGLLLRSIVDRIVYEKASGTMYFDFFVS

SEQ ID NO: 7269 - protein, 476 aa, Unknown
  Description of Unknown: Integrase B7270 sequence
  PTHR30461:SF3,IPR036162,PS51737,IPR011109,PTHR30461, PS00397,PF00239,G3DSA:1.10.10.2600,IPR006119,SSF53041, cd00338,SM00857,IPR025827,IPR038109,PS51736, IPR006118,PF13408,G3DSA:3.40.50.1390,PF07508,Coil
MSALKNGALYIRVSTADQTELSPDAQQRLLLDYAKKNGIVIAKEFIFEESVSGRHADRRPKFQEMIALAKQDSHPIDVILVWKYSRFARNQEESIVYKSLLKKSNVDVISISEPLIDGPFGTLIERIIEWMDEYYSIRLSGEVLRGMKEKALQHGYQATPCLGYRAVSGGKPFVIDETEYQIVKYIMDQYDFEHLDPTAIARRCNDLGYRTRRGNLMERRSIERVLRNPFYAGTVVWNGISFDGTHETRLDPARYQERIKRMDARRRSPKSRNPSTCRHWLSGLLKCPICGATMTVTAGNTSCPYFQCWKYAKGFHKGSNSITVAKAERTVYRYFDDILAGADFSFAVRDRKQEQEDDETIQRLQQALEHLAARESRVKMAFENGIDTLEEYGANKKRLAEERQSLQEELDRVLTPAAPPETISKEDFRKEIKNINDILKNPEEPAEKKGLLLRSIVDRIVYEKASGTMYFDFFVS

SEQ ID NO: 7270 - protein, 476 aa, Unknown
  Description of Unknown: Integrase B7271 sequence
  IPR036162,PS51737,IPR011109,PTHR30461,PS00397, PF00239,G3DSA:1.10.10.2600,IPR006119,SSF53041,cd00338, SM00857,IPR025827,IPR038109,PS51736,IPR006118, PF13408,G3DSA:3.40.50.1390,PF07508,Coil
MAKLRNGALYIRVSTADQTELSPDAQQRLLLDYAKKNGIIISKDFIFEESVSGRHADKRPKFQEMIGIAKQESHPLDVILVWKYSRFARNQEESILYKSLLKKSNVDVISISEPLIDGPFGTLIERIIEWMDEYYSIRLSGEVIRGMKEKALKHGYQTTPCLGYDAVGGGKPFVINQEEYKIVQYIMDQYDLYDQDATAIARKCNDLGFRSKRGNLFEQRNVDLILKNPFYAGTVVWNGISFEGSHETRLSKERFEKRRALMRARRRPAKARNISTCKHWLSGLLRCSVCGATLSLAGSGSYRYFQCWKYSKGFHKGSQSLSAAKAEAAVCDYFDRILAGADFTYTVRNIPDQKESDELDLLRQELDQIAVKEARVKLAYENGIDTLEEYKENRRRLKESREELQEKIDDATAATQPEDSDSVAREALLKEIRSVSEILKDPAESYERKGLLLRSIVDGITYDKEKNRLYFNFFIS

SEQ ID NO: 7271 - protein, 476 aa, Unknown
  Description of Unknown: Integrase B7272 sequence
  IPR036162,PS51737,IPR011109,PTHR30461,PS00397, PF00239,G3DSA:1.10.10.2600,IPR006119,SSF53041,cd00338, SM00857,IPR025827,IPR038109,PS51736,IPR006118, PF13408,G3DSA:3.40.50.1390,PF07508,Coil
MAKLRNGALYIRVSTADQTELSPDAQQRLLLDYAKKNGIIISKDFIFEESVSGRHADKRPKFQEMIGIAKQESHPLDVILVWKYSRFARNQEESIVYKSLLKKSNVDVISISEPLIDGPFGTLIERIIEWMDEYYSIRLSGEVIRGMKEKALKHGYQTTPCLGYDAVGGGKPFVINEEEYKIVQYIMDQYDLYDQDATAIARKCNDLGFRSKRGNLFEQRNVDLILKNPFYAGTVVWNGISFEGSHETRLSKERFEKRRALMRARRRPAKARNISTCKHWLSGLLRCSVCGATLSLAGSGSYRYFQCWKYSKGFHKGSQSLSAAKAEAAVCDYFDRILAGADFTYTVRNIPDQKESDELDLLRQELDQIAVKEARVKLAYENGIDTLEEYKENRRRLKESREELQEKIDDATAATQPEDSDSVAREALLKEIRSVSEILKDPAESYERKGLLLRSIVDGITYDKEKNRLYFNFFIS

SEQ ID NO: 7272 - protein, 476 aa, Unknown
  Description of Unknown: Integrase B7273 sequence
  SM00857,IPR006118,G3DSA:1.10.10.2600,IPR036162,PF13408, IPR025827,G3DSA:3.40.50.1390,PS51737,IPR006119,IPR038109, PF07508,IPR011109,SSF53041,PF00239,PTHR30461, PS00397,Coil,cd00338
MRIGAAYIRVSTDDQLDISPESQLDEIQRYAKSHDILIPEEYIFMERTGRSGKRADNRPEFQRMIATAKEKPQPFEVILVWKFSRFARNQDESTFYKGMLRKKLKIDIESVSEPIMEGMYGRLIEMIIEWQDEFYSYNLGVEVKRGMAKKAELKGYQLVPPLGYAAVGNGKPYVIREDEYKIVEMIFHMYAVDRLDMTAIARQLNASGYLTRRGNPFEKRSIDRIIQNRFYVGTVEWNGFSFEGTHKTRASVTELFEQCQERRKAEFRPMRHRNVSTCKHWLSGLMRCSVCGATLSYTGSGAVPYFTCWKYSKGLHPESCSISVKKMERIVLRSLDGILESGHFEYTPAASASGSPADPPNEIQSIHTQLDRLRHQEERARIAYENEVYTLDEYKESKARLRSEIQRLSDELQRLLEQPAESAPPQKELLDRVRNVRDLLASPSVSFETKGNALRSILKCIVFDRKTEHFDFQYYA

SEQ ID NO: 7273 - protein, 476 aa, Unknown
  Description of Unknown: Integrase B7274 sequence
  SM00857,IPR006118,G3DSA:1.10.10.2600,IPR036162,PF13408, PS51737,IPR025827,G3DSA:3.40.50.1390,IPR006119,IPR038109, PF07508,IPR011109,SSF53041,PF00239,PTHR30461, PS00397,Coil,cd00338
MRIGAAYIRVSTDDQLDISPESQLDEIQRYAKAHDILIPEEYIFMERTGRSGKRADNRPEFQRMIATAKEKPQPFEVILVWKFSRFARNQDESTFYKGMLRKKLKIDIESVSEPIMEGMYGRLIEMIIEWQDEFYSYNLGVEVKRGMAKKAELKGYQLVPPLGYAAVGNGKPYVIREDEYKIVEMIFHMYAVDRLDMTAIARQLNASGYLTRRGNPFEKRSIDRIIQNRFYVGTVEWNGYSFEGTHKTRASVTDLFEQCQERRKAEFRPMRHRNVSTCKHWLSGLMRCSVCGATLSYTGSGAVPYFTCWKYSKGLHPESCSISVKKMERIVLRSLDGILESGHFEYTPAASASGSPADPSNEIQSIHTQLDRLRHQEERARIAYENEVYTLDEYKESKARLRSEIQRLSDELQRLLEQPAESAPPQKELLDRVRNVRDLLASPSVGFETKGNALRSILKCIVFDRKTEHFDFQYYA

SEQ ID NO: 7274 - protein, 476 aa, Unknown
  Description of Unknown: Integrase B7275 sequence
  IPR036162,PS51737,IPR011109,PTHR30461,PS00397, PF00239,G3DSA:1.10.10.2600,IPR006119,SSF53041,cd00338, SM00857,IPR025827,IPR038109,PS51736,IPR006118, PF13408,G3DSA:3.40.50.1390,PF07508,Coil
MAKLRNGALYIRVSTADQTELSPDAQQRLLLDYAKKNGIIISKDYVFEESVSGRHADKRPKFQEMIGIAKQESHPIDVILVWKYSRFARNQEESIVYKSLLKKSDVDVISISEPLIDGPFGTLIERIIEWMDEYYSIRLSGEVIRGMKEKALKQGYQTTPCLGYDAVGGGKPFVINEEEYKIVQYIMDQYDLYDQDATAIARKCNDLGFRSKRGNLFEQRNVDLILKNPFYAGTVVWNGISFEGSHETRLSKERFEKRIALMRARRRPAKARNISTCKHWLSGLLRCSVCGATLSLAGSGSYRYFQCWKYSKGFHKGSQSLSAAKAEAAVCDYFDRILTGADFTYTVRNIPDQKESDELDLLRQELDQIAVKEARVKLAYENGIDTLEEYKENRRRLKESREELLEKIDVATAATQPDDSDSHAKETLLKEIRSVSEILKDPAESYERKGLLLRSIVDGITYDKEKNRLYFNFFIS

SEQ ID NO: 7275 - protein, 476 aa, Unknown
  Description of Unknown: Integrase B7276 sequence
  PTHR30461:SF3,IPR036162,PS51737,IPR011109,PTHR30461, PS00397,PF00239,G3DSA:1.10.10.2600,IPR006119,SSF53041, cd00338,SM00857,IPR025827,IPR038109,PS51736, IPR006118,PF13408,G3DSA:3.40.50.1390,PF07508,Coil
MSALKNGALYIRVSTADQTELSPDAQQRLLLDYAKKNGIVIAKEFIFEESVSGRHADRRPKFQEMIALAKQDSHPIDVILVWKYSRFARNQEESIVYKSLLKKNNIDVISISEPLIDGPFGTLIERIIEWMDEYYSIRLSGEVLRGMKEKALQHGYQTTPCLGYQAAGGGKPFVIDEAEYQIVKYIMDQYDFEHLDPTAIARRCNDLGYRTRRGNLMERRSIERVLRNPFYAGTVVWNGISFDGTHETRLDPARYRERIKRMDARRRSPKSRNPSTCHHWLSGLLKCPICGATMTVTAGNTSCPYFQCWKYAKGFHKGSNSITVAKAERTVYRYFDDILAGANFSFTVRDRKQEQEDDETIQRLQQALAHLSVRESRVKMAFENGIDTLEEYGANKKRLAEERQSLQEELDRVLTPAAPPETISKEDFRKEIKNINDILKNPEEPAEKKGLLLRSIVDRIVYEKASGTMYFDFFVS

SEQ ID NO: 7276 - protein, 476 aa, Unknown
  Description of Unknown: Integrase B7277 sequence
  PTHR30461:SF3,SM00857,IPR036162,G3DSA:3.40.50.1390,IPR006119, SSF53041,PF00239,PTHR30461,Coil,cd00338
MQALQVKIAVKYSRVSTNKQDLRGSKDGQEAEVDKFAITNGFTIIDSFTDTDHGDIAKRKGLTSMKEYLRLNQAVKYVLVYHSDRFTRNFQDGMRDLFFLEDLGIKLISVLEGEILADGTFNSLPSLVRLIGAQEDKAKIIKKTTDASYKYAKTNRYLGGNILPWFKLESGYVYGKKCKVIVKNETTWEYYRGFFLTIIKYKNILRAAKEYNLNRFTAAEWLAKQELIGYRTYGKKGKIDQYHNKGRRKNYQTTEEKVFPAILTEDEFLILNEMRKHNRVKYNKDIYTYLYSIISYHSCGGKLEGERIKKKDSFIYYYKCSCCKKRFNQKKLELAIAENILSNPGLQIINDINFRLADIYDEIKNINNTIEEENSSEKRILSLVSKNVVGIDSAEEELLKIKKQKNFLKKLLEEKMKLIEEENKKEITEDHISLLKNLLEYSQEEDDDFREKLKEIINLIIKKIEVFSLDKINIIF

SEQ ID NO: 7277 - protein, 476 aa, Unknown
  Description of Unknown: Integrase B7278 sequence
  cd00338,SM00857,IPR006118,G3DSA:1.10.10.2600, IPR036162,PF13408,PS51737,IPR025827, G3DSA:3.40.50.1390,IPR006119,IPR038109,PF07508, IPR011109,SSF53041,PTHR30461,PS00397,Coil,PF00239
MRIGAAYIRVSTDDQLDISPESQLDEIQRYAKSHDILIPEEYIFMERTGRSGKRADNRPEFQRMIATAKEKPQPFEVILVWKFSRFARNQDESTFYKGMLRKKLKIDIESVSEPIMEGMYGRLIEMIIEWQDEFYSYNLGVEVKRGMAKKAELKGYQLVPPLGYAAVGNGKPYVIREDEYKIVEMIFHMYAVDRLDMTAIARQLNASGYLTRRGNPFEKRSIDRIIQNRFYVGTVEWNGFSFEGTHKTRASVTELFEQCQERRKAEFRPMRHRNVSTCKHWLSGLMRCSVCGATLSYTGSGAAPYFTCWKYSKGLHPESCSISVKKMERIVLRSLDGILESGHFEYTPAASASGSPADPSNEIQSIHTQLDRLRHQEERARIAYENEVYTLDEYKESKARLRSEIQRLSDELQRLLEQPAESAPPQKELLDRVRNVRDLLASPSVGFETKGNALRSILKCIVFDRKTEHFDFQYYA

SEQ ID NO: 7278 - protein, 476 aa, Unknown
  Description of Unknown: Integrase B7279 sequence
  PTHR30461:SF3,IPR036162,PS51737,IPR011109,PTHR30461, PS00397,PF00239,G3DSA:1.10.10.2600,IPR006119,SSF53041, cd00338,SM00857,IPR025827,IPR038109,PS51736, IPR006118,PF13408,G3DSA:3.40.50.1390,PF07508,Coil
MSALKNGALYIRVSTADQTELSPDAQQRLLLDYAKKNGIVIAKEFIFEESVSGRHADRRPKFQEMIALAKQESHPIDVILVWKYSRFARNQEESIVYKSLLKKSNVDVISISEPLIDGPFGTLIERIIEWMDEYYSIRLSGEVLRGMKEKALQHGYQTTPCLGYQAAGGGKPFVIDEAEYQIVKYIMDQYDLEHLDPTAIARKCNDLGYRTRRGNRMERRSIERVLRNPFYAGTVIWNGISFDGTHETRLDPARYQERIKRMDARRRSPKSRNPSTCRHWLSGLLKCPICGATMTVTAGNTSCPYFQCWKYAKGFHKGSNSITVAKAERTVYRYFDDILAGADFSFTVRDRKQEQEDDETIQRLQHALDHLAVREARVKMAYENGIDTLEEYGANKKRLAEERQSLQEELNRVLTPAAPPETISKEDFRKEIKNINDILKNPEEPTEKKGLLLRSIVDRIVYEKSSGTMYFDFFVS

SEQ ID NO: 7279 - protein, 476 aa, Unknown
  Description of Unknown: Integrase B7280 sequence
  PTHR30461:SF3,cd00338,SM00857,G3DSA:1.10.10.2600,IPR036162, PF13408,PS51737,G3DSA:3.40.50.1390,IPR025827,IPR006119, IPR038109,PF07508,SSF53041,IPR011109,PTHR30461, PS51736,Coil,PF00239
MKRAVFYGRYSSDRQTEQSIEGQRRVCEEFAKAEQIQIVGEYIDWATSGTSTEHREQFQKMLKDSKNGGWDYVLVYKLDRFARSRYDSAISKQQLKKNGVKVLSATERITDSPEGILIEGLLESMDEYFSRELSRKCKRGIRESIIKGHNFGGRVLYGYDRKDKRFVINEEQAVNVRRIFKSYLSGCTIQSIADQLNADGYRTNYGNEFKRYTVSDILHNDKYTGIHYIDGIEEPETCPAIISQTTFERVKEKLNQSAHRSREHATGHTYALSGLLQCGVCGRYVCGSSVERKYFYYACRSREHAENSVHIHADKLEQVVIDALQTFFTEEQVSTLAERLYQIYTTDMDGKPDRSKRLNEIEKQIQGTVNALIACPSSKALQEKLTQLEEQKAEIEKMPILQPQLKKEHFENYFRWLALRLEHIEDRQTFFHTVIHKVLVYPEKAVIILNMTDEMADPPKREQVEAFMSNVGEVSL

SEQ ID NO: 7280 - protein, 476 aa, Unknown
  Description of Unknown: Integrase B7281 sequence
  PTHR30461:SF3,cd00338,SM00857,IPR036162,G3DSA:3.40.50.1390, IPR006119,SSF53041,PTHR30461,Coil,PF00239
MQALPVKIAVKYSRVSTNKQDLRGSKDGQEAEIDKFASTNGFTIIDSFTDTDHGDIAKRKGLTSMKEYLRLNQAVKYVLVYHSDRFTRNFQDGMRDLFFLEDLGIKLISVLEGEILADGTFNSLPSLVRLIGAQEDKAKIIKKTTDASYKYAKTNRYLGGNILPWFKLESGYVYGKKCKVIVKNETTWEYYRGFFLAIIKYKNILRAAKEYNLNRFTAAEWLVKQELIGYRTYGKKGKIDQYHNKGRRKNYQTTEEKVFPAILTEDEFLILNEMRKHNKVKYNKDIYTYLYSIISYHSCGGKLEGERIKKKDSFIYYYKCSCCKKRFNQKKLEVAIAENILSNPGLQIINDINFRLADIYDEIKNINNMIEEENSSEKRILSLVSKNVVGIESAEEELLKIKKQKNFLKKLLEEKMKLIEEENKKEITEDHISLLKNLLEYSQEEDDDFREKLKEIINLIIKKIEVSSLDKINIIF

SEQ ID NO: 7281 - protein, 476 aa, Unknown
  Description of Unknown: Integrase B7282 sequence
  SM00857,IPR006118,IPR036162,PF13408, IPR025827,G3DSA:3.40.50.1390,PS00397,IPR006119, SSF53041,PTHR30461,Coil,PS51736, cd00338,PF00239
MKTALYCRVSTEEQARTGESILDQRQALERWARDYEHEIIGVYEDEGFSAHKSYKSRPGLSRLLDDVRAGKVELIAFTKFDRWTRRAADYYELQEVLDRHHVPWTAILEDYETVTADGRFKVGIMLSVNQHEAERTSERIKFTFAEKRRRGEIISGNMPKGYKLIDKKPVKDPETEAGMNAFWRTYLSGAGLKPSILAAESRGVHLSTSTGSFILRNAEAYTGKIQGVSCEAYITEEDAARVLATRKIKAKASGYTYLFTGLLYCGECAHRMGGHRNFWEHKDGSRGFQVYYNCSHRYRTSRRECSNSVNIYESDIERALVFGLSDAIEAEAVKMEAQIAEMRRQREAAQDVQPVREKLERRKRRAWEAYLDEIIDKKAYQREAAKIDAELAKIVQVPQIDEDAPRKIRETMPEGWRELYFKLDAQHRREFWLQTLQRIDVYPDRSISITVKPGENPFITRIQRPDGYWIEIVPEK

SEQ ID NO: 7282 - protein, 476 aa, Unknown
  Description of Unknown: Integrase B7283 sequence
  SM00857,IPR006118,G3DSA:1.10.10.2600,IPR036162,PS51737, G3DSA:3.40.50.1390,Coil,IPR006119,IPR038109,PF07508, SSF53041,IPR011109,PTHR30461,PS00397,PS51736, cd00338,PF00239
MKTAAAYIRVSTDDQVEYSPDSQIKLIRDYAKRNDYILPDEFIFRDDGISGKSAKHRPEFTKMIALAKSPEHPFDAILVWKFSRFARNQEESIVFKNILRKIGVEVRSVSEPISEDPFGSLVERIIEWTDEYYIINLSGEVKRGMLEKISRGQPVVPPPVGYKMENGQYIPDENAHFIKEIFEAYAAGEGARHIAQRLAAQGCITKRGNPIDNRFVDYVLHNPVYIGKLRWSVNSHAASSRHYDSADIIVFDGTHEPLISSELWDSVQKRLHEVKTLYPKYQRREQPVSFMLKGLVRCSSCGSTLCYCRTSEPSLQCHSYARGSCRQSHSINIATANEAVIKGLQLAVDKLDFAIAPAKPHYSADAPGTNKLLAAEYKKMERIKAAYANGTDTLEEYAANKKKISAEIARLEAELQQESNVKPINKKAFAKRVSEIIKYISDPYNSEAAKNQALRTVISYIIFDRAATTFNIVFHF

SEQ ID NO: 7283 - protein, 476 aa, Unknown
  Description of Unknown: Integrase B7284 sequence
  cd00338,SM00857,G3DSA:1.10.10.2600,IPR036162,PS51737, G3DSA:3.40.50.1390,IPR006119,IPR038109,PF07508,IPR011109, SSF53041,PTHR30461,PS51736,Coil,PF00239
MPTLSLGKYIIDIGSDSMTTFDMNNVTSKALDMDVYAIYLRKSRADLEAEKLGEGETLARHRKMLEELAARKGFYIGEIYTELESGESIAGRPKIQKLLEDCYKGKYKGILIVEVTRLSRGNQGDAQTIMDCLKYSNMNNGVLVVTPTKTYDVAHSQEDEEYMEFELFMSRREYKMIHKRMDRGRRQAVVEGNYMGAYRPYGYNIVKTKTKRTLVPNEIEAPYIKKIFEWSVKDNLSTNDIAKRLTAMGAPTYRGDTDWTKDSVKTYLTNPVYMGKVRWNNRMRIKTMVNGELKITRPRYHSDQYMLYDGKHMNDALVDEETFREAQKKFYKDRTRSGLQLKNPLAGLVYCKKCGKSMHLQPYKENRNNRIVHKSNTTGCKVKSAIASDVIAAVTQALRTYVDDFEVKIENSPDIDENDIQKQIDRLVKEKRKIEKKKSKLFDSWENDDITNNEFVERKAIHNQRLEVLEKQIEDL

SEQ ID NO: 7284 - protein, 476 aa, Unknown
  Description of Unknown: Integrase B7285 sequence
  PTHR30461:SF3,cd00338,SM00857,G3DSA:1.10.10.2600,IPR036162, PF13408,PS51737,G3DSA:3.40.50.1390,IPR025827,IPR006119, IPR038109,PF07508,IPR011109,SSF53041, PTHR30461,PS51736,Coil,PF00239
MKRAVFYGRYSSDRQTEQSIEGQRRVCEEFAKAEQIQIVGEYIDRATSGTSTEHREQFQKMLKDSKNGGWDYVLVYKLDRFARSRYDSAISKQQLKKNGVKVLSATERITDSPEGILIEGLLESMDEYFSRELSRKCKRGIRESIIKGHNFGGRVLYGYDRKDKRFVINEEQAVNVRRIFKSYLSGCTIQSIADQLNADGYRTNYGNEFKRYTVSDILHNDKYTGIHYIDGIEEPETCPAIISQTTFERVKEKLNQSAHRSREHATGHTYALSGLLQCGVCGRYVCGSSVERKYFYYACRSREHAENSVHIHADKLEQVVIDALQTFFTEEQVSTLAERLYQIYTTDMDGKPDRSKRLNEIEKQIQGTVNALIACPSSKALQEKLTQLEEQKAEIEKMPILQPQLKKEHFENYFHWLALRLEHIEDRQTFFHTVIHKVLVYPEKAVIILNMMDEMADPPKREQVEAFMSNVGEVSL

SEQ ID NO: 7285 - protein, 476 aa, Unknown
  Description of Unknown: Integrase B7286 sequence
  PTHR30461:SF3,IPR036162,PS51737,IPR011109,PTHR30461, PS00397,PF00239,G3DSA:1.10.10.2600,IPR006119,SSF53041, cd00338,SM00857,IPR025827,IPR038109,PS51736, IPR006118,PF13408,G3DSA:3.40.50.1390,PF07508,Coil
MSALKNGALYIRVSTADQTELSPDAQQRLLLDYAKKNGIVIAKEFIFEESVSGRHADRRPKFQEMIALAKQDSHPIDVILVWKYSRFARNQEESIVYKSLLKKSNVDVISISEPLIDGPFGTLIERIIEWMDEYYSIRLSGEVLRGMKEKALQHGYQTTPCLGYQAAGDGKPFVIDEAEYRIVKYIMDQYDFEHLDPTAIARRCNDLGYRTRRGNLMERRSIERVLRNPFYAGTVIWNGISFDGTHETRLDPARYQDRIKRMDARRRSPKSRNPSTCRHWLSGLLKCPICGATMTVTAGNTSCPYFQCWKYAKGFHKGSNSITVAKAERTVYRYFDDILAGADFSFAVRDRKQEQEDDETIQRLQQALEHLAARESRVKMAFENGIDTLEEYGANKKRLAEERQSLQEELDRVLTPAAPPETISKEDFRKEIKNINDILKNPEEPAEKKGLLLRSIVDRIVYEKASGTMYFDFFVS

SEQ ID NO: 7286 - protein, 476 aa, Unknown
  Description of Unknown: Integrase B7287 sequence
  PTHR30461:SF3,cd00338,SM00857,G3DSA:1.10.10.2600,IPR036162, PF13408,PS51737,G3DSA:3.40.50.1390,IPR025827,IPR006119, IPR038109,PF07508,IPR011109,SSF53041,PTHR30461, PS51736,Coil,PF00239
MKRAVFYGRYSSDRQTEQSIEGQRRVCEEFAKAEQIQIVGEYIDRATSGTSTDHREQFQKMLKDSKNGGWDYVLVYKLDRFARSRYDSAISKQQLKKNGVKVLSATERITDSPEGILIEGLLESMDEYFSRELSRKCKRGIRESIIKGHNFGGRVLYGYDRKDKRFVINEEQAVNVRRIFKSYLSGCTIQSIADQLNADGYRTNYGNEFKRYTVSDILHNDKYTGIHYIDGIEEPETCPAIISQTTFERVKEKLNQSAHRSREHATGHVYALSGLLQCGVCGRYVCGSSVERKYFYYACRSREHAENSIHIHADKLEQVVIDALQTFFTEEQVSTLAERLYQIYTTDMDGKPDRSKRLNEIEKQIQGTVNALIACPSSKALQEKLTQLEEQKAEIEKMPILQPQLKKEHFENYFRWLALRLEHIEDRQTFFHTVIHKVLVYPEKAVIILNMTDEMADPPKREQVEAFMSNVGEVSL

SEQ ID NO: 7287 - protein, 476 aa, Unknown
  Description of Unknown: Integrase B7288 sequence
  PTHR30461:SF3,IPR036162,PS51737,IPR011109,PTHR30461, PS00397,PF00239,G3DSA:1.10.10.2600,IPR006119,SSF53041, cd00338,SM00857,IPR025827,IPR038109,PS51736, IPR006118,PF13408,G3DSA:3.40.50.1390,PF07508,Coil
MSALKNGALYIRVSTADQTELSPDAQQRLLLDYAKKNGIVIAKEFIFEESVSGRHADRRPKFQEMIALAKQDSHPIDVILVWKYSRFARNQEESIVYKSLLKKSNVDVVSISEPLIDGPFGTLIERIIEWMDEYYSIRLSGEVLRGMKEKALQNGYQATPCLGYRAVGGGKPFVIDEAEYQIVKYIMDQYDFEHLDPTAIARKCNELGYRTRRGNLMERRSIERVLRNPFYAGTVVWNGISFDGTHETRLDSARYQERIKRMDARRRSPKSRNPSTCRHWLSGLLKCPICGATMTVTAGNTSCPYFQCWKYAKGFHNGSNSITVAKAERTVYRYFDDILAGADFSFTVRDRKQDQEVDETIQRLQQALDHLAVRESRVKMAFENGIDTLEEYGANKKRLAEERQSLQEELDRVLTPAALPETISKEDFREEIKNINDILKNPEEPAEKKGLLLRSIVDRIVYEKSSGTMYFDFFVS

SEQ ID NO: 7288 - protein, 476 aa, Unknown
  Description of Unknown: Integrase B7289 sequence
  cd00338,SM00857,IPR006118,G3DSA:1.10.10.2600,IPR036162, PF13408,IPR025827,PS51737,G3DSA:3.40.50.1390,IPR006119, IPR038109,PF07508,IPR011109,SSF53041,PTHR30461, PS00397,Coil,PF00239
MRIGAAYIRVSTDDQLDISPESQLDEIQRYAKSHDILIPEEYIFMERTGRSGKRADNRPEFQRMIATAKEKPQPFEVILVWKFSRFARNQDESTFYKGMLRKKLKIDIESVSEPIMEGMYGRLIEMIIEWQDEFYSYNLGVEVKRGMAKKAELKGYQLVPPLGYAAVGNGKPYVIREDEYKIVEMIFHMYAVDRLDMTAIARQLNASGYLTRRGNPFEKRSIDRIIQNRFYVGTVEWNGFSFEGTHKTRASVTELFEQCQERRKAEFRPMRHRNVSTCKHWLSGLMRCSVCGATLSYTGSGAVPYFTCWKYSKGLHPESCSISVKKMERIVLRSLDGILESGHFEYTPAASASGSPADPSNEIQSIHTQLDRLRHQEERARIAYENEVYTLDEYKESKARLRSEIQRLSDELQRLLEQPAESAPPQKELLDRVRNVRDLLASPSVGFETKGNALRSILKCIVFDRKTEHFDFQYYA

SEQ ID NO: 7289 - protein, 476 aa, Unknown
  Description of Unknown: Integrase B7290 sequence
  SM00857,IPR006118,G3DSA:1.10.10.2600,IPR036162,PS51737, G3DSA:3.40.50.1390,Coil,IPR006119,IPR038109,PF07508, SSF53041,IPR011109,PTHR30461,PS00397,PS51736, cd00338,PF00239
MKTAAAYIRVSTDDQVEYSPDSQIKLIRDYAKRNDYILPDEFIFRDDGISGKSAKHRPEFTKMIALAKSSEHPFDAILVWKFSRFARNQEESIVFKNILRKIGIEVRSVSEPISEDPFGSLVERIIEWTDEYYIINLSGEVKRGMLEKISRGQPVVPPPVGYKMENGQYIPDENAHFIKEIFEAYAAGEGARHIAQRLAAQGCITKRGNPIDNRFVDYVLHNPVYIGKLRWSVNSHAASSRHYDSADIIVFDGTHEPLISSELWDSVQKRLHEVKTLYPKYQRREQPVSFMLKGLVRCSSCGSTLCYCRTSEPSLQCHSYARGSCRRSHSINIATANEAVIKGLQLAVDKLDFAIAPAKPHYSADAPGTNKLLAAEYKKMERIKAAYANGTDTLEEYAANKKKISAEIARLEAELQQESNVKPINKKAFAKRVSEIIKYISDPHNSEAAKNQALRTVISYIIFDRAATTFNIVFHF

SEQ ID NO: 7290 - protein, 476 aa, Unknown
  Description of Unknown: Integrase B7291 sequence
  PTHR30461:SF3,IPR036162,PS51737,IPR011109,PTHR30461, PS00397,PF00239,G3DSA:1.10.10.2600,IPR006119,SSF53041, cd00338,SM00857,IPR025827,IPR038109,PS51736, IPR006118,PF13408,G3DSA:3.40.50.1390,PF07508,Coil
MSALKNGALYIRVSTADQTELSPDAQQRLLLDYAKKNGIVIAKEFIFEESVSGRHADRRPKFQEMIALAKQDSHPIDVILVWKYSRFARNQEESIVYKSLLKKNNIDVISISEPLIDGPFGTLIERIIEWMDEYYSIRLSGEVMRGMKEKALKHGYQTTPCLGYQAAGGGKPFVIDEAEYQIVKYIMDQYDLEHLDPTAIARKCNDLGYRTRRGNRMERRSIERVLRNPFYAGTVVWNGISFDGTHETRLDPARYQERIKRMDARRRSPKSRNPSTCRHWLSGLLKCPICGATMTVTAGNTSCPYFQCWKYAKGFHKGSNSITVAKAERTVYHYFDDILAGADFSFAVRDRKQEQEDDETIQRLQQALDHLAAREARVKMAYENGIDTLEEYGANKKRLAEERQSLQEELDRVLTPAAPPETISKEDFRKEIKNINDILKNPEEPAEKKGLLLRSIVDRIVYEKSSGTMYFDFFVS

SEQ ID NO: 7291 - protein, 476 aa, Unknown
  Description of Unknown: Integrase B7292 sequence
  PTHR30461:SF3,cd00338,SM00857,G3DSA:1.10.10.2600,IPR036162, PF13408,PS51737,G3DSA:3.40.50.1390,IPR025827,IPR006119, IPR038109,PF07508,IPR011109,SSF53041,PTHR30461, PS51736,Coil,PF00239
MKRAVFYGRYSSDRQTEQSIEGQRRVCEEFAKAEQIQIVGEYIDRATSGTSTEHREQFQKMLKDSKNGGWDYVLVYKLDRFARSRYDSAISKQQLKKNGVKVLSATERITDSPEGILIEGLLESMDEYFSRELSRKCKRGIRESIIKGHNFGGRVLYGYDRKDKRFVINEEQAVNVQRIFKSYLSGCTIQSIADQLNADGYRTNYGNEFKRYTVSDILHNDKYTGIHYIDGIEEPETCPAIISQTTFERVKEKLNQSAHRSREHATGHTYALSGLLQCGVCGRYVCGSSVERKYFYYACRSREHAENSVHIHADKLEQVVIDALQTFFTEEQVSTLAERLYQIYTTDMDGKPDRSKRLNEIEKQIQGTVNALIACPSSKALQEKLTQLEEQKAEIEKMPILQPQLKKEHFENYFRWLALRLEHIEDRQTFFHTVIHKVLVYPEKAVIILNMTDEMADPPKREQVEAFMSNVGEVSL

SEQ ID NO: 7292 - protein, 476 aa, Unknown
  Description of Unknown: Integrase B7293 sequence
  cd00338,SM00857,IPR006118,G3DSA:1.10.10.2600,IPR036162, PF13408,IPR025827,PS51737,G3DSA:3.40.50.1390,IPR006119, IPR038109,PF07508,IPR011109,SSF53041,PTHR30461, PS00397,Coil,PF00239
MRIGAAYIRVSTDDQLDISPESQLDEIQRYAKSHDILIPEEYIFMERTGRSGKRADNRPEFQRMIATAKEKPQPFEVILVWKFSRFARNQDESTFYKGMLRKKLKIDIESVSEPIMEGMYGRLIEMIIEWQDEFYSYNLGVEVKRGMAKKAELKGYQLVPPLGYAAVGNGKPYVIREDEYKIVEMIFHMYAVDRLDMTAIARQLNASGYLTRRGNPFEKRSIDRIIQNHFYVGTVEWNGFSFEGTHETKASVTELFEQCQERRKAEFRPMRHRNVSTCKHWLSGLMRCSVCGATLSYTGSGAVPYFTCWKYSKGLHPESCSISVKKMERIVLRSLDGILESGHFEYTPAASASGSPANLSNEIQSIHTQLDRLRHQEERARIAYENEVYTLDEYKESKARLRSEIQRLSDELQHLLEQPAESAPPQKELLDRVRNVRDLLASPSVGFETKGNALRSILKCIVFDRKTEHFDFQYYA

SEQ ID NO: 7293 - protein, 476 aa, Unknown
  Description of Unknown: Integrase B7294 sequence
  PTHR30461:SF3,cd00338,SM00857,G3DSA:1.10.10.2600,IPR036162, PF13408,IPR025827,G3DSA:3.40.50.1390,PS51737,IPR006119, IPR038109,PF07508,IPR011109,SSF53041,PTHR30461, PS51736,Coil,PF00239
MKRAVFYGRYSSDRQTEQSIEGQRRVCEEFAKAEQIQIVGEYIDRATSGTSTEHREQFQKMLKDSKNGGWDYVLVYKLDRFARSRYDSAISKQQLKKNGVKVLSATERITDSPEGILIEGLLESMDEYFSRELSRKCKRGIRESIIKGHNFGGRVLYGYDRKDKRFVINEEQAVNVRRIFKSYLSGCTIQSIADQLNADGYRTNYGNEFKRYTVSDILHNDKYTGIHYIDGIEEPETCPAIISQTTFDRVKEKLNQSAHRSREHATGHTYALSGLLQCGVCGRYVCGSSVERKYFYYACRSREHAENSVHIHADKLEQVVIDALQTFFTEEQVSTLAERLYQIYTTDMDGKPDRSKRLNEIEKQVQGTVNALIACPSSKALQEKLTQLEEQKAEIEKMPILQPQLKKEHFENYFRWLALRLEHIEDRQTFFHTVIHKVLVYPEKAVIILNMTDEMADPPKREQVEAFMSNVGEVSL

SEQ ID NO: 7294 - protein, 476 aa, Unknown
  Description of Unknown: Integrase B7295 sequence
  IPR036162,PS51737,IPR011109,PTHR30461,PS00397, PF00239,G3DSA:1.10.10.2600,IPR006119,SSF53041,cd00338, SM00857,IPR025827,IPR038109,PS51736,IPR006118, PF13408,G3DSA:3.40.50.1390,PF07508,Coil
MAKLRNGALYIRVSTADQTELSPDAQQRLLLDYAKKNGIIISKDFIFEESVSGRHADKRPKFQEMIGIAKQESHPLDVILVWKYSRFARNQEESIVYKSLLKKSNVDVISISEPLIDGPFGTLIERIIEWMDEYYSIRLSGEVIRGMKEKALKHGYQTTPCLGYDAVGGGKPFVINEEEYKIVQYIMDQYDLYDQDATAIARKCNDLGFRSKRGNLFEQRNVDLILKNPFYAGTVVWNGISFEGSHETRLSKERFEKRRALMRARRRPAKARNISTCKHWLSGLLRCSVCGATLSLAGSGSYRHFQCWKYSKGFHKGSQSLSAAKAEAAVCDYFDRILAGADFTYTVRNIPDQKESDELDLLRQELDQIAVKEARVKLAYENGIDTLEEYKENRRRLKESREELQEKIDDATAATQPEDSDSVAREALLKEIRSVSEILKDPAESYERKGLLLRSIVDGITYDKEKNRLYFNFFIS

SEQ ID NO: 7295 - protein, 476 aa, Unknown
  Description of Unknown: Integrase B7296 sequence
  PTHR30461:SF3,IPR036162,PS51737,IPR011109,PTHR30461, PS00397,PF00239,G3DSA:1.10.10.2600,IPR006119,SSF53041, cd00338,SM00857,IPR025827,IPR038109,PS51736, IPR006118,PF13408,G3DSA:3.40.50.1390,PF07508,Coil
MSALKNGALYIRVSTADQTELSPDAQQRLLLDYAKKNGIVIAKEFIFEESVSGRHADRRPKFQEMIALAKQDSHPIDVILVWKYSRFARNQEESIVYKSLLKKSNVDVISISEPLIDGPFGTLIERIIEWMDEYYSIRLSGEVLRGMKEKALQHGYQTTPCLGYQAAGGGKPFVIDESEYQIVKYIMDQYDFEHLDPTAIARRCNDLGYRTRRGNRMERRSIERVLRNPFYAGTVVWNGISFDGTHETRLDPARYQDRIKRMDVRRRSPKSRNPSTCRHWLSGLLKCPICGATMTVTAGNTSCPYFQCWKYAKGFHKGSNSITVAKAERTVYRYFDDILAGADFSFAVRDRKQEQEDDETIQRLQQALEHLATRESRVKMAFENGIDTLEEYGANKKRLAEERQSLQEELDRVLTPAAPPETISKEDFRKEIKNINDILKNPEEPAEKKGLLLRSIVDRIVYEKASGTMYFDFFVS

SEQ ID NO: 7296 - protein, 476 aa, Unknown
  Description of Unknown: Integrase B7297 sequence
  cd00338,SM00857,IPR006118,G3DSA:1.10.10.2600,IPR036162, PF13408,IPR025827,PS51737,G3DSA:3.40.50.1390,IPR006119, IPR038109,PF07508,IPR011109,SSF53041,PTHR30461, PS00397,Coil,PF00239
MRIGAAYIRVSTDDQLDISPESQLDEIQRYAKSHDILIPEEYIFMERTGRSGKRADNRPEFQRMIATAKEKPQPFEVILVWKFSRFARNQDESTFYKGMLRKKLKIDIESVSEPIMEGMYGRLIEMIIEWQDEFYSYNLGVEVKRGMAKKAELKGYQLVPPLGYAAVGNGKPYVIREDEYKIVEMIFHMYAVDRLDMTAIARQLNASGYLTRRGNPFEKRSIDRIIQNRFYVGTVEWNGFSFEGTHKTRASVTELFEQCQERRKAEFRPMRHRNVSTCKHWLSGLMRCSVCGATLSYTGSGAVPYFTCWKYSKGLHPESCSISVKKMERIVLRSLDGILESGHFEYTPAASASGSPAEPSNEIQSIHTQLDRLRHQEERARIAYENEVYTLDEYKESKARLRSEIQRLSDELQHLLEQPAESAPPQKELLDRVRNVRDLLASPSVGFETKGNALRSILKCIVFDRKTEHFDFQYYA

SEQ ID NO: 7297 - protein, 476 aa, Unknown
  Description of Unknown: Integrase B7298 sequence
  cd00338,SM00857,IPR006118,G3DSA:1.10.10.2600,IPR036162, PF13408,IPR025827,PS51737,G3DSA:3.40.50.1390,IPR006119, IPR038109,PF07508,IPR011109,SSF53041,PTHR30461, PS00397,Coil,PF00239
MRIGAAYIRVSTDDQLDISPESQLDEIQRYAKSHDILIPEEYIFMERTGRSGKRADNRPEFQRMIATAKEKPQPFEVILVWKFSRFARNQDESTFYKGMLRKKLKIDIESVSEPIMEGMYGRLIEMIIEWQDEFYSYNLGVEVKRGMAKKAELKGYQLVPPLGYAAVGNGKPYVIREDEYKIVEMIFHMYAVDRLDMTAIARQLNASGYLTRRGNPFEKRSIDRIIQNRFYVGTVEWNGFSFEGTHKTRASVTELFEQCQERRKAEFRPMRHRNVSTCKHWLSGLMRCSVCGATLSYTGSGAVPYFTCWKYSKGLHPESCSISVKKMERIVLRSLDGILESGHFEYTPATSASGSPADPSNEIQSIHTQLDRLRHQEERARIAYENEVYTLDEYKESKARLRSEIQRLSDELQRLLEQPAESAPPQKELLDRVRNVRDLLASPSVGFETKGNALRSILKCIVFDRKTEHFDFQYYA

SEQ ID NO: 7298 - protein, 476 aa, Unknown
  Description of Unknown: Integrase B7299 sequence
  IPR036162,PS51737,IPR011109,PTHR30461,PS00397, PF00239,G3DSA:1.10.10.2600,IPR006119,SSF53041,cd00338, SM00857,IPR025827,IPR038109,PS51736,IPR006118, PF13408,G3DSA:3.40.50.1390,PF07508,Coil
MAKLRNGALYIRVSTADQTELSPDAQQRLLLDYAKKNGIIISKDYVFEESVSGRHADKRPKFQEMIGIAKQESHPIDVILVWKYSRFARNQEESIVYKSLLKKSDVDVISISEPLIDGPFGTLIERIIEWMDEYYSIRLSGEVIRGMKEKALKHGYQTTPCLGYDAVGGGKPFVINEEEYKIVQYIMDQYDLYDQDATAIARKCNDLGFRSKRGNLFEQRNVDLILKNPFYAGTVVWNGISFEGSHETRLSKERFEKRLALMRARKRPAKARNVSACKHWLSGLLRCSVCGATLSLAGSGSYKYFQCWKYSKGFHKGSQSLSAAKAEAAVCDYFDRILAGADFSYTVRNLPDQKESDELDLLRQELDQIAVKETRVKLAYENGIDTLEEYKENRRRLKESREELLEKIDVATTATQPDDSDSHTRETLLKEIRSVSEILKDPAESYERKGLLLRSIVDGITYDKEKNRLYFNFFIS

SEQ ID NO: 7299 - protein, 476 aa, Unknown
  Description of Unknown: Integrase B7300 sequence
  cd00338,SM00857,IPR006118,G3DSA:1.10.10.2600,IPR036162, PF13408,IPR025827,G3DSA:3.40.50.1390,IPR006119,IPR038109, PF07508,SSF53041,IPR011109,PTHR30461,PS00397, PS51736,Coil,PF00239
MAKLRNGALYIRVSTADQTELSPDAQQRLLLDYAKKNGIIISKDYVFEESVSGRHADKRPKFQEMIGIAKQESHPIDVILVWKYSRFARNQEESIVYKSLLKKSDVDVISISEPLIDGPFGTLIERIIEWMDEYYSIRLSGEVIRGMKEKALKHGYQSTPCLGYDAVGGGRPFVINESEYRIVQYIMDQYDLYDQDATAIARKCNDLGFRSKRGNLFEQRNVDLILKNPFYAGTVVWNGISFEGSHETRLSKERFEKRIALMRARRRPAKARNISTCKHWLSGLLRCSVCGATLSLAGSGSYRYFQCWKYSKGFHKGSQSLSAAKAEAAVCDYFDRILAGADFTYAVRNIPDQKESDELDLLRQELDQIAVKEARVKLAYENGIDTLEEYKENRRRLKESREELQEKIDAATAATQPDDSDSNARETLLKEIRSVSEVLKDPAESYERKGLLLRSIVDGITYDKEKNRLYFNFFIS

SEQ ID NO: 7300 - protein, 476 aa, Unknown
  Description of Unknown: Integrase B7301 sequence
  cd00338,SM00857,IPR006118,G3DSA:1.10.10.2600,IPR036162, PF13408,IPR025827,G3DSA:3.40.50.1390,IPR006119,IPR038109, PF07508,IPR011109,SSF53041,PTHR30461,PS00397, PS51736,Coil,PF00239
MAKLRNGALYIRVSTADQTELSPDAQQRLLLDYAKKNGIIISKDFIFVESVSGRHADKRPKFQEMIGIAKQDSHPIDVILVWKYSRFARNQEESIVYKSLLKKSGVDVISISEPLIDGPFGTLIERIIEWMDEYYSIRLSGEVIRGMKEKALKHGYQSTPCLGYDAVGGGRPFVINENEYRIVQYIMDQYDLYDQDETAIARKCNDLGFRSKRGNLFEQRNVDLILKNPFYTGTVVWNGISFEGSHETRLSKERFEKRIALMRARRRPAKARNISTCKHFLSGLLRCSVCGATLSLAGSGSYKYFQCWKYSKGFHKGSQTLSMTKAEAAVCDYFDRILAGANFSYTVRNLPDQKESDELDLLRQELDQIAVKEARVKLAYENGIDTLEEYKENRRRLKESREELLEKIDVATAATQPDDSDSRARETLLKEIRSVSEILKDPAESYERKGLLLRSIVDGITYDKEKNRLYFNFFIS

SEQ ID NO: 7301 - protein, 476 aa, Unknown
  Description of Unknown: Integrase B7302 sequence
  PTHR30461:SF3,cd00338,SM00857,G3DSA:1.10.10.2600,IPR036162, PF13408,IPR025827,G3DSA:3.40.50.1390,PS51737,IPR006119, IPR038109,PF07508,IPR011109,SSF53041,PTHR30461, PS51736,Coil,PF00239
MKRAVFYGRYSSDRQTEQSIEGQRRVCEEFAKAEQIQIVGEYIDRATSGTSTEHREQFQKMLKDSKNGGWDYVLVYKLDRFARSRYDSAISKQQLKKNGVKVLSATERITDSPEGILIEGLLESMDEYFSRELSRKCKRGIRESIIKGHNFGGRVLYGYDRKDKRFVINEEQAVNVRRIFKSYLSGCTIQSIADQLNADGYRTNYGNEFKRYTVSDILHNDKYTGIHYIDGIEEPETCPAIISQTTFERVKEKLNQSAHRSREHTTGHTYALSGLLQCGVCGRYVCGSSVERKYFYYACRSREHAENSVHIHADKLEQVVIDALQTFFTEEQVSTLAERLYQIYTTDMDGKPDRSKRLNEIEKQVQGTVNALIACPSSKALQEKLTQLEEQKAEIEKMPILQPQLKKEHFENYFHWLALRLEHIEDRQTFFHTVIHKVLVYPEKAVIILNMTDEMADPPKREQVEAFMSNVGEVSL

SEQ ID NO: 7302 - protein, 476 aa, Unknown
  Description of Unknown: Integrase B7303 sequence
  PTHR30461:SF3,IPR036162,PS51737,IPR011109,PTHR30461, PS00397,PF00239,G3DSA:1.10.10.2600,IPR006119,SSF53041, cd00338,SM00857,IPR025827,IPR038109,PS51736, IPR006118,PF13408,G3DSA:3.40.50.1390,PF07508,Coil
MSALKNGALYIRVSTADQTELSPDAQQRLLLDYAKKNGIVIAKEFIFEESVSGRRADRRPKFQEMIALAKQDSHPIDVILVWKYSRFARNQEESIVYKSLLKKSNVDVISISEPLIDGPFGTLIERIIEWMDEYYSIRLSGEVLRGMKEKALQHGYQTTPCLGYQAAGDGKPFVIDEAEYQIVKYIMDQYDFEHLDPTAIARRCNDLGYRTRRGNLMERRSIERVLRNPFYAGTVVWNGISFDGTHETRLDPARYQDRIKRMDARRRSPKSRNPSTCRHWLSGLLKCPICGATMTVTAGNTSCPYFQCWKYAKGFHKGSNSITVAKAERTVYRYFDDILAGADFSFSVRDRKQEQKDDETIQRLQQALDHLAVREARVKMAYENGIDTLEEYGANKKRLAEERQSLQEELDRVLTPAAPPETISKEDFRKEIKNINDILKNPEEPAEKKGLLLRSIVDRIVYEKASGTMYFDFFVS

SEQ ID NO: 7303 - protein, 476 aa, Unknown
  Description of Unknown: Integrase B7304 sequence
  PTHR30461:SF3,SM00857,IPR006118,G3DSA:1.10.10.2600,IPR036162, PS51737,G3DSA:3.40.50.1390,PS00397,IPR006119,IPR038109, PF07508,IPR011109,SSF53041,PTHR30461,Coil, PS51736,cd00338,PF00239
MKIAAAYVRVSTDDQLEYSPDSQLQAIRDYAKFHDLILAEEYIFREEDGRSGRQAEKRPEFMRMISTAKQQPPPFEVILCWKYSRFARNQEESIVYKSMLKKDGIEVVSISEPLIDGPFGSLIERIIEWMDEYYSIRLSGEVKRGMTEKVSRGEPVTIPPLGYLMENKQLVPDPEMAPVISMLFDEFAAGTPMLQLARRLNEMGIRTRRGCKIEYRTLNYIMQNPVYIGKIRWTPTGRANRYYKTDDTLIVDGNHQPIITTEQWEKAQAKIAENKQKFPRYQRDTASKFMLRGLVHCSNCGATLVTSTPGSLQCNHYAKGLCSISHSITITKLDKAVMQGLEHDALDMGGNLKIEYRTQSAPVATATIKAQIKKEQNKLQRCKEAYQGGVDTLAEYRSNKEAILSTIADLEKQLNTAPTAIPAPDPQALRDKIIAAIPTLKDPDVTPTVKNNLLRCFISKIVYTKSNEEIEMYYYM

SEQ ID NO: 7304 - protein, 476 aa, Unknown
  Description of Unknown: Integrase B7305 sequence
  PTHR30461:SF3,IPR036162,PS51737,IPR011109,PTHR30461, PS00397,PF00239,G3DSA:1.10.10.2600,IPR006119,SSF53041, cd00338,SM00857,IPR025827,IPR038109,PS51736, IPR006118,PF13408,G3DSA:3.40.50.1390,PF07508,Coil
MSALKNGALYIRVSTADQTELSPDAQQRLLLDYAKKNGIVIAKEFIFEESVSGRHADRRPKFQEMIALAKQDSHPIDVILVWKYSRFARNQEESIVYKSLLKKSNVDVISISEPLIDGPFGTLIERIIEWMDEYYSIRLSGEVMRGMKEKALKHGYQATPSLGYRAVGGGKPFVIDEAEYQIVKYIMDQYDLEHLDPTAIARKCNDLGYRTRRGNRMERRSIERVLRNPFYVGTVVWNGISFDGTHETRLDPVRYQERIKHMDARKRSPKSRNPSTCRHWLSGLLKCPICGATMTVTAGNTSCPYFQCWKYAKGFHKGSNSITVAKAERTVYRYFDDILAGADFSFTVRDRKQEQEDDETIQRLQQALAHLSVRESRVKMAFENGIDTLEEYGANKKRLAEERQSLQEELDRVLTPAAPPETISKEDFRKEIKNINDILKNPEEPAEKKGLLLRSIVDRIVYEKASGTMYFDFFVS

SEQ ID NO: 7305 - protein, 476 aa, Unknown
  Description of Unknown: Integrase B7306 sequence
  IPR036162,PS51737,IPR011109,PTHR30461,PS00397, PF00239,G3DSA:1.10.10.2600,IPR006119,SSF53041,cd00338, SM00857,IPR025827,IPR038109,PS51736,IPR006118, PF13408,G3DSA:3.40.50.1390,PF07508,Coil
MTKLRNGALYIRVSTADQTELSPDAQQRLLLDYAKKNGIIISKDYVFEESVSGRHADKRPKFQEMIGIAKQESHPLDVILVWKYSRFARNQEESIVYKSLLKKSNVDVISISEPLIDGPFGTLIERIIEWMDEYYSIRLSGEVIRGMKEKALKHGYQTTPCLGYDAVGGGKPFVINEEEYKIVQYIMDQYDLYDQDATAIARKCNDLGFRSKRGNLFEQRNVDLILKNPFYAGTVVWNGISFEGSHETRLSKERFEKRRALMGARRRPAKARNISTCKHWLSGLLRCSVCGATLSLAGSGSYRYFQCWKYSKGFHTGSQSLSAAKAEAAVCDYFDRILSGADFTYTVRNIHDQKESDELDLLRQELDQIAVKEARVKLAYENGIDTLEEYKENRRRLKESREELQEKIDDATAATQPKDSDSVAREALLKEIRSVSEILKDPAESYERKGLLLRSIVDGITYDKEKNRLYFNFFIS

SEQ ID NO: 7306 - protein, 476 aa, Unknown
  Description of Unknown: Integrase B7307 sequence
  cd00338,SM00857,G3DSA:1.10.10.2600,IPR036162,PF13408, IPR025827,G3DSA:3.40.50.1390,PS51737,IPR006119,IPR038109, PF07508,SSF53041,IPR011109,PTHR30461,PS51736, Coil,PF00239
MKRAVFYGRYSSDRQTEQSIEGQRRVCEEFAKAEQIQIVGEYIDRATSGTSTEHREQFQKMLKDSKNGGWDYVLVYKLDRFARSRYDSAISKQQLKKNSVKVLSATERITDSPEGILIEGLLESMDEYFSRELSRKCKRGIRESIIKGHNFGGRVLYGYGRKDKRFVINEEQAVNVRRIFKSYLSGCTIQSIADQLNADGYRTNYGNEFKRYTVSDILHNDKYTGIHYIDGIEEPETCPAIISQTTFDRVKEKLNQSAHRSREHATGHTYALSGLLQCGVCGRYVCGSSVERKYFYYACRSREHAENSVHIHADKLEQVVIDALQTFFTEEQVSTLAERLYQIYTTDMDGKPDRSKRLNEIEKQVQGTVNALIACPSSKALQEKLTQLEEQKAEIEKMPILQPQLKKEHFENYFHWLALRLEHIEDRQTFFHTVIHKVLVYPEKAVIILNMTDEMADPPKREQVEAFMSNVGEVSL

SEQ ID NO: 7307 - protein, 476 aa, Unknown
  Description of Unknown: Integrase B7308 sequence
  IPR036162,PS51737,IPR011109,PTHR30461,PS00397, PF00239,G3DSA:1.10.10.2600,IPR006119,SSF53041,cd00338, SM00857,IPR025827,IPR038109,PS51736,IPR006118, PF13408,G3DSA:3.40.50.1390,PF07508,Coil
MSALKNGALYIRVSTADQTELSPDAQQRLLLDYAKKNGIVIAKEFIFEESVSGRHADRRPKFQEMIALAKQDSHPIDVILVWKYSRFARNQEESIVYKSLLKKSNVDVISISEPLIDGPFGTLIERIIEWMDEYYSIRLSGEVIRGMKEKALKHGYQTSPCLGYDAAGSGKPFVINEAEYSIVKFIMDQYDLENHDPTAIARSCNELGYHTKRGNLMERRSVERILRNPFYAGTVIWNGISFEGAHETRLDRERFNSRIKRMDARRRTPKSRNPSSCKHWLSGLLKCPVCGATLTITAGNTSCPYFQCWKYAKGFHKGSNSITVAKAERTVYRYFDDILAGADFFFTVRDRKQEQEDDETIQRLQQALEHLAAREARVKMAYENGIDTLEEYGANKKRLAEERQSLQEELDRVLTPATPPETISKEDFRKEIKNINDILKNPEEPAEKKGLLLRSIVDRIVYEKASGTMYFDFFVS

SEQ ID NO: 7308 - protein, 476 aa, Unknown
  Description of Unknown: Integrase B7309 sequence
  IPR036162,PS51737,IPR011109,PTHR30461,PS00397, PF00239,G3DSA:1.10.10.2600,IPR006119,SSF53041,cd00338, SM00857,IPR025827,IPR038109,PS51736,IPR006118, PF13408,G3DSA:3.40.50.1390,PF07508,Coil
MSALKNGALYIRVSTADQTELSPDAQQRLLLDYAKKNGIVIAKEFIFEESVSGRHADRRPKFQEMIAIAKQESHPIDVILVWKYSRFARNQEESIVYKSLLKKSGVDVISISEPLIDGPFGTLIERIIEWMDEYYSIRLSGEVIRGMKEKALKHGYQTSPCLGYDAAGSGKPFVINEAEYSIVKFIMDQYDLENHDPTAIARSCNELGYHTKRGNLMERRSVERILRNPFYAGTVIWNGISFEGAHEARLDRERFNNRIKRMDARRRTPKSRNPSSCKHWLSGLLKCPVCGATMTVTAGSTSCPYFQCWKYAKGFHKGSNSITVAKAERTVYHYFDDILAGADFSFAVRDRKQEQEDDETIQRLQQALEHLAAREARVKMAYENGIDTLEEYGANKKRLAEERQSLQEELDRVLTPAAPPETISKEDFRKEIKNINDILKNPEEPAEKKGLLLRSIVDRIVYEKASGTMYFDFFVS

SEQ ID NO: 7309 - protein, 476 aa, Unknown
  Description of Unknown: Integrase B7310 sequence
  PTHR30461:SF3,IPR036162,PS51737,IPR011109,PTHR30461, PS00397,PF00239,G3DSA:1.10.10.2600,IPR006119,SSF53041, cd00338,SM00857,IPR025827,IPR038109,PS51736, IPR006118,PF13408,G3DSA:3.40.50.1390,PF07508,Coil
MSALKNGALYIRVSTADQTELSPDAQQRLLLDYAKKNGIVIAKEFIFEESVSGRHADRRPKFQEMIALAKQDSHPIDVILVWKYSRFARNQEESIVYKSLLKKNNIDVISISEPLIDGPFGTLIERIIEWMDEYYSIRLSGEVLRGMKEKALQHGYQATPCLGYQAAGGGKPFVIDEAEYQIVKYIMDQYDFEHLDPTAIARRCNDLGYRTRRGNLMERRSIERVLRNPFYAGAVVWNGISFDGTHETRLDPARYQERIKRMDARRRSPKSRNPSTCRHWLSGLLKCPICGATMTVTAGNTSCPYFQCWKYAKGFHKGSNSITVAKAERTVYRYFDDILAGADFSFTVRDRKQEQEDDETIQRLQQALEHLAVREARVKMAYENGIDTLEEYGANKKRLAEERQSLQKELDRVLTPAAPPETISKEDFRKEIKNINDILKNPEEPTEKKGLLLRSIVDRIVYEKSSGTMYFDFFVS

SEQ ID NO: 7310 - protein, 476 aa, Unknown
  Description of Unknown: Integrase B7311 sequence
  PTHR30461:SF3,SM00857,G3DSA:1.10.10.2600,IPR036162,PF13408, PS51737,G3DSA:3.40.50.1390,IPR025827,IPR006119,IPR038109, PF07508,IPR011109,SSF53041,PF00239,PTHR30461, PS51736,Coil,cd00338
MKRAVFYGRYSSDRQTEQSIEGQRRVCEEFAKAEQIQIVSEYIDRATSGTSTEHREQFQKMLKDSKYGGWDYVLVYKLDRFARSRYDSAISKQQLKKNGVKVLSATERITDSPEGILIEGLLESMDEYFSRELSRKCKRGIRESIIKGHNFGGRVLYGYDRKDKRFVINEEQAVNVRRIFKSYLSGCTIQSIADQLNADGYRTNYGNEFKRYTVSDILHNDKYTGIHYIDGIEEPETCPAIISQTTFERVKEKLNQSAHRSREHTTGHTYALSGLLQCGVCGRYVCGSSVERKYFYYACRSREHAENSVHIHADKLEQVVIDALQTFFTEEQVSTLAERLYQIYTTDMDGKPDRSKRLNEIEKQIQGTVNALIACPSSKALQEKLTQLEEQKAEIEKMPILQPQLKKEHFENYFHWLALRLEHIEDCQTFFHTVIHKVLVYPEKAVIILNMTDEMADPPKREQVEAFMSNVGEVSL

SEQ ID NO: 7311 - protein, 476 aa, Unknown
  Description of Unknown: Integrase B7312 sequence
  cd00338,SM00857,G3DSA:1.10.10.2600,IPR036162,PS51737, G3DSA:3.40.50.1390,IPR006119,IPR038109,PF07508,IPR011109, SSF53041,PTHR30461,PS51736,Coil,PF00239
MNGKLATKTAVIYARFSCSKQREASIEDQLRICREWCAREGYGIVAEYCDYAISGKTDERPEFQRMVANAGESGIVLVYMMDRFSRDEYDAPIYKRQLRKAGVEVFSATETLPDGPERILVEKIYEGLAAVESEKISVRTKRGMEGNALKCMANGVHIFGYDIDEESSRYMINEEQAALVREAFSRRIMREPYKSIADDFAERGVLSAQGRPCSYNMIRKLLTNERYTGVYIFGDVRIEGGIPAIIDRQDYVKVQNIRGTKVRSEEEWGRFRLTGRAICSECGRDLSGVSGRGRHNVKYEYYACKRCGGIKPVRRDWLEKTIAESLRDMLADDATARRVASIVAAGGDRDGETMRKQAQKALREAENGLRNIMAAIERGILMDDIQERIDQLQAQKARAEEDLAGARSGKIDEELFVKFLKSGTTLTDEDLVDAFVYQAAVSTEDVIVTLNFDNEKGEPARLDVERVLPEASWLPG

SEQ ID NO: 7312 - protein, 476 aa, Unknown
  Description of Unknown: Integrase B7313 sequence
  IPR036162,PS51737,IPR011109,PTHR30461, PS00397,PF00239,G3DSA:1.10.10.2600,IPR006119, SSF53041,cd00338,SM00857,IPR025827,IPR038109,PS51736 ,IPR006118,PF13408,G3DSA:3.40.50.1390,PF07508,Coil
MTKLRNGALYIRVSTADQTELSPDAQQRLLLDYAKKNGIIISKDYVFEESVSGRHADKRPKFQEMIGIAKQESHPLDVILVWKYSRFARNQEESIVYKSLLKKSNVDVISISEPLIDGPFGTLIERIIEWMDEYYSIRLSGEVIRGMKEKALKHGYQTTPCLGYDAVGGGKPFVINEEEYKIVQYIMDQYDLYDQDATAIARKCNDLGFRSKRGNLFEQRNVDLILKNPFYAGTVVWNGISFEGSHETRLSKERFKKRRALMRARRRPVKARNISTCKHWLSGLLRCSVCGATLSLAGSGSYRYFQCWKYSKGFHTGSQSLSAAKAEAAVCDYFDRILAGADFSYTVRNLPDQKESDELDLLRQELDQIAVKETRVKLAYENGIDTLEEYKENRRRLKESREELQKKIDAATATTQPEDSDSNARETLLKEILSVSEILKDPAESYERKGLLLRSIVDGITYDKEKNRLYFNFFIS

SEQ ID NO: 7313 - protein, 476 aa, Unknown
  Description of Unknown: Integrase B7314 sequence
  PTHR30461:SF3,cd00338,SM00857,G3DSA:1.10.10.2600,IPR036162, PF13408,PS51737,G3DSA:3.40.50.1390,IPR025827,IPR006119, IPR038109,PF07508,IPR011109,SSF53041,PTHR30461, PS51736,Coil,PF00239
MKRAVFYGRYSSDRQTEQSIEGQRRVCEEFAKAEQIQIVGEYIDRATSGTSTEHREQFQKMLKDSKNGGWNYVLVYKLDRFARSRYDSAISKQQLKKNGVKVLSATERITDSPEGILIEGLLESMDEYFSRELSRKCKRGIRESIIKGHNFGGRVLYGYDRKDKRFVVNEEQAVNVRRIFKSYLSGCTIQSIADQLNADGYRTNYGNEFKRYTVSDILHNDKYTGIHYIDGIEEPETCPAIISQTTFERVKEKLNQSAHRSREHATGHTYALSGLLQCGVCGRYVCGSSVERKYFYYACRSREHAENSVHIHADKLEQVVIDALQTFFTEEQVSTLAERLYQIYTTDMDGKPDRSKRLNEIEKQIQGTVNALIACPSSKALQEKLTQLEEQKAEIEKMPILQPQLKKEHFENYFHWLALRLEHIEDRQTFFHTVIHKVLVYPEKAVIILNMTDEMADPPKREQVEAFMSNVGEVSL

SEQ ID NO: 7314 - protein, 476 aa, Unknown
  Description of Unknown: Integrase B7315 sequence
  IPR036162,PS51737,IPR011109,PTHR30461,PS00397, PF00239,G3DSA:1.10.10.2600,IPR006119,SSF53041,cd00338, SM00857,IPR025827,IPR038109,PS51736,IPR006118, PF13408,G3DSA:3.40.50.1390,PF07508,Coil
MSALKNGALYIRVSTADQTELSPDAQQRLLLDYAKKNGIVIAKEFIFEESVSGRHADRRPKFQEMIALAKQESHPIDVILVWKYSRFARNQEESIVYKSLLKKSNVDVISISEPLIDGPFGTLIERIIEWMDEYYSIRLSGEVLRGMKEKALQHGYQTTPCLGYRAVSGGKPFVIDETEYQIVKYIMDQYDFEHLDPTAIARRCNDLGYRTRRGNLMERRSIERVLRNPFYAGTVVWNGISFDGTHETRLDPARYQERIKRMDARRRSPKSRNPSTCRHWLSGLLKCPICGATMTVTAGNTSCPYFQCWKYAKGFHKGSNSITVAKAERTVYRYFDDILAGADFSFTVRDRKQEQEDDETIQRLQKALDHLSVREARVKMAFENGIDTLEEYGANKKRLAEERQSLQEELDRVLTPAALPETISKEDFREEIKNINDILKNPEEPAEKKGLLLRSIVDRIVYEKSSGTMYFDFFVS

SEQ ID NO: 7315 - protein, 476 aa, Unknown
  Description of Unknown: Integrase B7316 sequence
  PTHR30461:SF3,IPR036162,PS51737,IPR011109,PTHR30461, PS00397,PF00239,G3DSA:1.10.10.2600,IPR006119,SSF53041, cd00338,SM00857,IPR025827,IPR038109,PS51736, IPR006118,PF13408,G3DSA:3.40.50.1390,PF07508,Coil
MSALKNGALYIRVSTADQTELSPDAQQRLLLDYAKKNGIVIAKEFIFEESVSGRHADRRPKFQEMIALAKQDSHPIDVILVWKYSRFARNQEESIVYKSLLKKNNIDVISISEPLIDGPFGTLIERIIEWMDEYYSIRLSGEVLRGMKEKALQHGYQATPCLGYQAAGGGKPFVIDEAEYQIVKYIMDQYDFEHLDPTAIARRCNDLGYRTRRGNLMERRSIERVLRNPFYAGAVVWNGISFDGTHETRLDPARYQERIKRMDARRRSPKSRNPSTCRHWLSGLLKCPICGATMTVTAGNTSCPYFQCWKYAKGFHKGSNSITVAKAERTVYRYFDDILAGADFSFTVRDRKQEQEDDETIQRLQQALEHLAVREARVKMAYENGIDTLEEYGANKKRLAEERQSLQKELDRVLTPAAPPETISKEDFRKEIKNINDILKNPEEPAEKKGLLLRSIVDRIVYEKASGTMYFDFFVS

SEQ ID NO: 7316 - protein, 476 aa, Unknown
  Description of Unknown: Integrase B7317 sequence
  PTHR30461:SF3,SM00857,IPR006118,G3DSA:1.10.10.2600,IPR036162, PS51737,G3DSA:3.40.50.1390,IPR006119,IPR038109,PF07508, IPR011109,SSF53041,PF00239,PTHR30461,PS00397, PS51736,Coil,cd00338
MKIAAAYVRVSTDDQLEYSPDSQLQAIRDYAKSHDLILAEEYIFREEDGRSGRQAEKRPEFMRMISTAKQQPPPFEVILCWKYSRFARNQEESIVYKSMLKKDGIEVVSISEPLIDGPFGSLIERIIEWMDEYYSIRLSGEVKRGMTEKVSRGEPVTIPPLGYLMENKQLVPDPEMAPVISMLFDEFAAGTPMLQLARRLNEMGIRTRRGCKIEYRTLNYIMQNPVYIGKIRWTPTGRANRYYKTDDTLIVDGNHQPIITTEQWEKAQAKIAENKQKFPRYQRDTASKFMLRGLVHCSNCGATLVTSTPGSLQCNHYAKGLCSISHSITITKLDKAVMQGLEHDALDMNGNLKIEYRTQSAPVATATIKAQIKKEQNKLQRCKEAYQGGVDTLAEYRSNKEAILSTIADLEKQLNTAPTVIPAPDPQALRDKIIAAIPTLKDPDVTPTVKNNLLRCFISKIVYTKSNEEIEMYYYM

SEQ ID NO: 7317 - protein, 476 aa, Unknown
  Description of Unknown: Integrase B7318 sequence
  PTHR30461:SF3,IPR036162,PS51737,IPR011109,PTHR30461, PS00397,PF00239,G3DSA:1.10.10.2600,IPR006119,SSF53041, cd00338,SM00857,IPR025827,IPR038109,PS51736, IPR006118,PF13408,G3DSA:3.40.50.1390,PF07508,Coil
MSALKNGALYIRVSTADQTELSPDAQQRLLLDYAKKNGIVIAKEFVFEESVSGRHADRRPKFQEMIALAKQDSHPIDVILVWKYSRFARNQEESIVYKSLLKKSNVDVISISEPLIDGPFGTLIERIIEWMDEYYSIRLSGEVLRGMKEKALQHGYQTTPCLGYQAAGGGKPFVIDEAEYQIVKYIMDQYDLEHLDPTAIARKCNDLGYRTRRGNRMERRSIERVLRNPFYAGTVVWNGISFDGTHETRLDPARYQDRIKRMDARRRSPKSRNPSTCRHWLSGLLKCPICGATMTVTAGSTSCPYFQCWKYAKGFHKGSNSITVAKAERTVYRYFDDILAGADFSFSVRDRKQEQKDDETIQRLQQALDHLAVREARVKMAYENGIDTLEEYGANKKRLAEERQSLQKELDRVLTPAAPPETISKEDFRKEIKNINDILKNPEEPSEKKGLLLRSIVDRIVYEKASGTMYFDFFVS

SEQ ID NO: 7318 - protein, 476 aa, Unknown
  Description of Unknown: Integrase B7319 sequence
  SM00857,IPR006118,G3DSA:1.10.10.2600,IPR036162,PS51737, G3DSA:3.40.50.1390,Coil,IPR006119,IPR038109,PF07508, SSF53041,IPR011109,PTHR30461,PS00397,PS51736, cd00338,PF00239
MKTAAAYIRVSTDDQVEYSPDSQIKLIRDYAKRNDYILPDEFIFRDDGISGKSAKHRPEFTKMIALAKSPEHPFDAILVWKFSRFARNQEESIVFKNILRKIGVEVRSVSEPISEDPFGSLVERIIEWTDEYYIINLSGEVKRGMLEKISRGQPVVPPPVGYKMENGQYIPDENAHFIKEIFEAYAAGEGARHIAQRLAAQGCLTKRGNPIDNRFVDYVLHNPVYIGKLRWSVNSHAASSRHYDSADIIVFDGTHEPLISSELWESVQKRLHEVKTLYPKYQRREQPVSFMLKGLVRCSSCGSTLCYCRTSEPSLQCHSYARGSCRQSHSINIATANEAVIKGLQLAVDKLDFAIAPAKPHYSADAPGTNKLLAAEYKKMERIKAAYANGTDTLEEYAANKKKISAEIARLEAELQQESNVKPINKKAFAKRVSEIIKYISDPHNSEAAKNQALRTVISYIIFDRAATTFNIIFHF

SEQ ID NO: 7319 - protein, 476 aa, Unknown
  Description of Unknown: Integrase B7320 sequence
  cd03768,SM00857,IPR006118,G3DSA:1.10.10.2600,IPR036162, PS51737,G3DSA:3.40.50.1390,IPR006119,IPR038109,PF07508, IPR011109,SSF53041,PTHR30461,PS00397,PS51736, Coil,PF00239
MIKKRVGLYIRVSTEEQAMEGYSISGQRERLKAFCVAQSWETIKFYVDEGISGRSTERPALKKMMKDIEDGLIDVLLVYRLDRLTRSVRDLHDILDFLEKHNCQFRSATEVYDTSTAMGRMFITIVAAIAEWESANLGERVRLGQIEKARQGEWSAPAPYGFRKNDQKRLEVNPDEIEAVKLMVRKVKEGYSFRQLSMYMQNTSYKPRRGYKWHIASLLDLLHNPVLYGAMQWNDEVYEGTHKGIMSKEDFMQLQNIIKSRQIQKKRETNYNFIYQTKIVCPSCGNRLSSECSRWKNKNGMERSANRYRCQSCALDGREPVSISEYKLTLQLIQHMNALTFDENDHEELEAEKDNLQLIENEMRRIEREREKYQRAWASDLISDTEFKNRMDDTRKRYSDLERQLNASQDETTFGNVNPEYIKQLSNEFNQNYEYLTDEEKRTFVQQFIESIELVEASSPTASVKKVYDVKLVRFF

SEQ ID NO: 7320 - protein, 476 aa, Unknown
  Description of Unknown: Integrase B7321 sequence
  cd00338,SM00857,G3DSA:1.10.10.2600,IPR036162,PS51737, G3DSA:3.40.50.1390,IPR006119,IPR038109,PF07508,IPR011109, SSF53041,PTHR30461,PS51736,Coil,PF00239
MNGKLATKTAVIYARFSCSKQREASIEDQLRICREWCAREGYGIVAEYCDYAISGKTDERPEFQRMVANAGESGIVLVYMMDRFSRDEYDAPIYKRQLRKAGVEVFSATETLPDGPERILVEKIYEGLAAVESEKISVRTKRGMEGNALKCMANGVHIFGYDIDEESSRYMINEEQAALVREAFSRRIMREPYKSIADDFAQRGVLSAQGRPCSYNMIRKLLTNERYTGVYIFGDVRIEGGIPAIIDRQDYVKVQNIRGTKVRSEEEWGRFRLTGRAICSECGRDLSGVSGRGRHNVKYEYYACKRCGGIKPVRRDWLEKTIAESLRDMLADDATARRVASIVAAGGDRDGETMRKQAQKALREAENGLRNIMAAIERGILMDDIQERIDQLQAQKARAEEDLASARSGKIDEELFVKFLKSGTTLTDEGLVDAFVYQAAVSTEDVIVTLNFDNEKGEPVRLDIERVLPEASWLPG

SEQ ID NO: 7321 - protein, 476 aa, Unknown
  Description of Unknown: Integrase B7322 sequence
  SM00857,IPR006118,G3DSA:1.10.10.2600,IPR036162, PF13408,IPR025827,G3DSA:3.40.50.1390,Coil, IPR006119,IPR038109,PF07508,IPR011109, SSF53041,PTHR30461,PS00397,PS51736,cd00338,PF00239
MAKLRNGALYIRVSTADQTELSPDAQQRLLLDYAKKNGIIISKDYVFEESVSGRHADKRPKFQEMIGIAKQESHPLDVILVWKYSRFARNQEESIVYKSLLKKSDVDVISISEPLIDGPFGTLIERIIEWMDEYYSIRLSGEVIRGMKEKALKHGYQSTPCLGYDAVGGGRPFVINENEYRIVQYIMDQYDLYDQDETAIARKCNDLGFRSKRGNLFEQRNVDLILKNPFYTGTVVWNGISFEGSHETRLSKERFEKRIALMRARRRPAKARNISTCKHWLSGLLRCSVCGATLSLAGSGSYRYFQCWKYSKGFHKGSQSLSAAKAEAAVCDYFDRILSGADFTYTVRNIPDQKESDELDLLRQELDQIAVKEARVKLAYENGIDTLEEYKENRRRLKESQEELLEKIDTTTAATQPEDSDSNARETLLKEIRSVSEVLKDPAESYERKGLLLRSIVDGITYDKEKNRLYFNFFIS

SEQ ID NO: 7322 - protein, 476 aa, Unknown
  Description of Unknown: Integrase B7323 sequence
  IPR036162,PS51737,IPR011109,PTHR30461,PS00397, PF00239,G3DSA:1.10.10.2600,IPR006119,SSF53041,cd00338, SM00857,IPR025827,IPR038109,PS51736,IPR006118, PF13408,G3DSA:3.40.50.1390,PF07508,Coil
MAKLRNGALYIRVSTADQTELSPDAQQRLLLDYAKKNGIIISKDYVFEESVSGRHADKRPKFQEMIGIAKQESHPLDVILVWKYSRFARNQEESIVYKSLLKKSNVDVISISEPLIDGPFGTLIERIIEWMDEYYSIRLSGEVIRGMKEKALKHGYQTTPCLGYDAVGGGKPFVINEEEYKIVQYIMDQYDLYDQDATAIARKCNDLGFRSKRGNLFEQRNVDLILKNPFYAGTVVWNGISFEGSHETRLSKERFEKRRALMRARRRPVKARNISTCKHWLSGLLRCSVCGATLSLAGSGSYRYFQCWKYSKGFHKGSQSLSAAKAEAAVCDYFDRILAGADFTYAVRNIPDQKESDELDLLRQELDQIAVKEARVKLAYENGIDTLEEYKENRRRLKESREELQEKIDAATAATQPDDSDSHARETLLKEIRSVSEVLKDPAESYERKGLLLRSIVDGITYDKEKNRLYFNFFIS

SEQ ID NO: 7323 - protein, 476 aa, Unknown
  Description of Unknown: Integrase B7324 sequence
  PTHR30461:SF3,IPR036162,PS51737,IPR011109,PTHR30461, PS00397,PF00239,G3DSA:1.10.10.2600,IPR006119,SSF53041, cd00338,SM00857,IPR025827,IPR038109,PS51736, IPR006118,PF13408,G3DSA:3.40.50.1390,PF07508,Coil
MSALKNGALYIRVSTADQTELSPDAQQRLLLDYAKKNGIVIAKEFIFEESVSGRHADRRPKFQEMIALAKQDSHPIDVILVWKYSRFARNQEESIVYKSLLKKNNIDVISISEPLIDGPFGTLIERIIEWMDEYYSIRLSGEVIRGMKEKALKHGYQTSPCLGYDAAGGGKPFVINEAEYSIVKFIMDQYDLEHHDPTAIARSCNELGYHTKRGNLMERRSVERILRNPFYAGTVIWNGISFEGAHEARLDRERFNNRIKRMDARRRTPKSRNPSSCKHWLSGLLKCPVCGATLTITAGNTSCPYFQCWKYAKGLHKVSNSITVAKAERTVFRYFDEILAGADFSYTVRNKTLDVEKDDTVARLQQALDHLSMRESRIKLAFENGIDTLEEYGANKKRLAEERQSLQEELDRVLTPAAPPETISKEDFRKEIKNINDILKNPEEPAEKKGLLLRSIVDRIVYEKASGTMYFDFFVS

SEQ ID NO: 7324 - protein, 476 aa, Unknown
  Description of Unknown: Integrase B7325 sequence
  PTHR30461:SF3,cd00338,SM00857,G3DSA:1.10.10.2600,IPR036162, PF13408,PS51737,IPR025827,G3DSA:3.40.50.1390,IPR006119, IPR038109,PF07508,IPR011109,SSF53041,PTHR30461, PS51736,Coil,PF00239
MKRAVFYGRYSSDRQTEQSIEGQRRVCEEFAKAEQIQIVGEYIDRATSGTSTEHREQFQKMLKDSKNCGWDYVLVYKLDRFARSRYDSAISKQQLKKNGVKVLSATERITDSPEGILIEGLLESMDEYFSRELSRKCKRGIRESIIKGHNFGGRVLYGYDRKDKRFVINEEQAVNVRRIFKSYLSGCTIQSIADQLNADGYRTNYGNEFKRYTVSDILHNDKYTGIHYIDGIEEPETCPAIISQTTFERVKEKLNQSAHRSREHTTGHTYALSGLLQCGVCGRYVCGSSVERKYFYYACRSREHAENSVHIHADKLEQVVIDALQTFFTEEQVSTLAERLYQIYTTDMDGKPDRSKRLNEIEKQIQGTVNALIACPSSKALQEKLTQLEEQKAEIEKMPILQPQLKKEHFENYFRWLALRLEHIEDRQTFFHTVIHKVLVYPEKAVIILNMTDEMADPPKREQVEAFMSNVGEVSL

SEQ ID NO: 7325 - protein, 476 aa, Unknown
  Description of Unknown: Integrase B7326 sequence
  PTHR30461:SF3,SM00857,G3DSA:1.10.10.2600,IPR036162,PF13408, IPR025827,PS51737,G3DSA:3.40.50.1390,IPR006119,IPR038109, PF07508,IPR011109,SSF53041,PTHR30461,Coil, PS51736,cd00338,PF00239
MTIIGEYCDKAISGKTDNRPSFQRLIKDSEKGQFEAVIMYTLDRFARNRYDSAIYKAKLKKNGVRVYYAKQPMPDTPEGIILESVLEGYAEYYSENLSRNIKRGMKENALQCIANGGAGMPLGYTVGEDRRYKIDPVGARIVQEIFQMYADGMSATQIINECNKRGYKTARGNAFNKNSLRTMLKNDRYIGVYRFADVVVEGGVPPIISRELFDKVQATLKHNYSARARNKAKDDYLLTAKLFCGHCGSSMVGESGTSKSGKLHHYYKCIERKRKHKCNKAVEKKDWMEELVVRFTVQKVLTDENIERIAVKAMEIIEKESADTTYIDGLRNELKEVKKKIKNLMTAIEQGIITPSTKERMDELELEKNEIEGRIASEEMKKPHLTKERIMYWLYSFKSGNIDDVEYKRRVIDTLVNSVYVYDEGDKGRRIVFTFNISGRNTATLSCSDIACFAPPKPRLRSRLRTEFCSILSAIQ

SEQ ID NO: 7326 - protein, 476 aa, Unknown
  Description of Unknown: Integrase B7327 sequence
  PTHR30461:SF3,IPR036162,PS51737,IPR011109,PTHR30461, PS00397,PF00239,G3DSA:1.10.10.2600,IPR006119,SSF53041, cd00338,SM00857,IPR025827,IPR038109,PS51736, IPR006118,PF13408,G3DSA:3.40.50.1390,PF07508,Coil
MSALKNGALYIRVSTADQTELSPDAQQRLLLDYAKKNGIVIAKEFIFEESVSGRHADRRPKFQEMIALAKQESHPIDVILVWKYSRFARNQEESIVYKSLLKKSNVDVISISEPLIDGPFGTLIERIIEWMDEYYSIRLSGEVLRGMKEKALQHGYQTTPCLGYQAAGGGKPFVIDEAEYQIVKYIMDQYDLEHLDPTAIARKCNDLGYRTRRGNRMERRSIERVLRNPFYAGTVIWNGISFDGTHETRLDPARYQERIKRMDARRRSPKSRNPSTCRHWLSGLLKCPICGATMTVTAGNTSCPYFQCWKYAKGFHKGSNSITVAKAERTVYRYFDDILAGADFSFTVRDRKQEQEDDETIQRLQHALDHLAVREARVKMAYENGIDTLEEYGANKKRLAEERQSLQEELDRVLTPAAPPKTISKEDFRKEIKNINDILKNPEEPAEKKGLLLRSIVDRIVYEKSSGTMYFDFFVS

SEQ ID NO: 7327 - protein, 476 aa, Unknown
  Description of Unknown: Integrase B7328 sequence
  PTHR30461:SF3,IPR036162,PS51737,IPR011109,PTHR30461, PS00397,PF00239,G3DSA:1.10.10.2600,IPR006119,SSF53041, cd00338,SM00857,IPR025827,IPR038109,PS51736, IPR006118,PF13408,G3DSA:3.40.50.1390,PF07508,Coil
MSALKNGALYIRVSTADQTELSPDAQQRLLLDYAKKNGIVIAKEFIFEESVSGRHADRRPKFQEMIALAKQDSHPIDVILVWKYSRFARNQEESIVYKSLLKKNNIDVISISEPLIDGPFGTLIERIIEWMDEYYSIRLSGEVLRGMKEKALQHGYQATPCLGYQAAGGGKPFVIDEAEYQIVKYIMDQYDFEHLDPTAIARRCNDLGYRTRRGNLMERRSIERVLRNPFYAGAVVWNGISFDGTHETRLDPARYQERIKRMDARRRSPKSRNPSTCRHWLSGLLKCPICGATMTVTAGNTSCPYFQCWKYAKGFHKGSNSITVAKAERTVYRYFDDILAGADFSFTVRDRKQEQEDDETIQRLQQALEHLAVREARVKMAYENGIDTLEEYGANKKRLAEERQSLQEELDRVLTPAAPPETISKEDFRKEIKNINDILKNPEEPAEKKGLLLRSIVDRIVYEKASGTMYFDFFVS

SEQ ID NO: 7328 - protein, 476 aa, Unknown
  Description of Unknown: Integrase B7329 sequence
  IPR036162,PS51737,IPR011109,PTHR30461,PS00397, PF00239,G3DSA:1.10.10.2600,IPR006119,SSF53041,cd00338, SM00857,IPR025827,IPR038109,PS51736,IPR006118, PF13408,G3DSA:3.40.50.1390,PF07508,Coil
MSALKNGALYIRVSTADQTELSPDAQQRLLLDYAKKNGIVIAKEFIFEESVSGRHADRRPKFQEMIALAKQDSHPIDVILVWKYSRFARNQEESIVYKSLLKKNNIDVISISEPLIDGPFGTLIERIIEWMDEYYSIRLSGEVMRGMKEKALKHGYQATPSLGYRAVGGGKPFVIDEAEYQIVKYIMDQYDLENHDPTAIARSCNELGYHTKRGNLMERRSVERILRNPFYAGTVIWNGISFEGAHEARLDRERFNNRIKRMDARRRTPKSRNPSACKHWLSGLLKCPVCGATMTVTAGSTSCPYFQCWKYAKGFHKGSNSITVAKAERTVYHYFDDILAGADFSFAVRDRKQEQEDDETIQRLQQALAHLSVRESRVKMAFENGIDTLEEYGANKKRLAEERQSLQEELDRVLTPAAQPETISKEDFRKEIKNINDILKNPEEPAEKKGLLLRSIVDRIVYEKASGTMYFDFFVS

SEQ ID NO: 7329 - protein, 476 aa, Unknown
  Description of Unknown: Integrase B7330 sequence
  PTHR30461:SF3,IPR036162,PS51737,IPR011109,PTHR30461, PS00397,PF00239,G3DSA:1.10.10.2600,IPR006119,SSF53041, cd00338,SM00857,IPR025827,IPR038109,PS51736, IPR006118,PF13408,G3DSA:3.40.50.1390,PF07508,Coil
MSALKNGALYIRVSTADQTELSPDAQQRLLLDYAKKNDIVIAKEFIFEESVSGRHADRRPKFQEMIALAKQDSHPIDVILVWKYSRFARNQEESIVYKSLLKKNNIDVISISEPLIDGPFGTLIERIIEWMDEYYSIRLSGEVLRGMKEKALQHGYQTTPCLGYQAAGGGKPFVIDEAEYQIVKYIMDQYDLEHLDPTAIARKCNDLGYRTRRGNLMERRSIERVLRNPFYAGTVVWNGISFDGTHETRLDPARYQDRIKRMDARRRSPKSRNPSTCRHWLSGLLKCPICGATMTVTAGSTSCPYFQCWKYAKGFHKGSNSITVAKAERTVYRYFDDILAGADFSFSVRDRKQEQKDDETIQRLQQALDHLAVREARVKMAYENGIDTLEEYGANKKRLAEERQSLQEELDRVLTPAALPETISKEDFRKEIKNINDILKNPEEPAEKKGLLLRSIVDRIVYEKASGTMYFDFFVS

SEQ ID NO: 7330 - protein, 476 aa, Unknown
  Description of Unknown: Integrase B7331 sequence
  PTHR30461:SF3,IPR036162,PS51737,IPR011109,PTHR30461, PS00397,PF00239,G3DSA:1.10.10.2600,IPR006119,SSF53041, cd00338,SM00857,IPR025827,IPR038109,PS51736, IPR006118,PF13408,G3DSA:3.40.50.1390,PF07508,Coil
MSALKNGALYIRVSTADQTELSPDAQQRLLLDYAKKNGIVIAKEFIFEESVSGRHADRRPKFQEMIALAKQDSHPIDVILVWKYSRFARNQEESIVYKSLLKKNNIDVISISEPLIDGPFGTLIERIIEWMDEYYSIRLSGEVMRGMKEKALKHGYQATPSLGYRAVGGGKPFVIDEAEYQIVKYIMDQYDLENHDPTAIARSCNELGYHTKRGNLMERRSVERILRNPFYAGTVIWNGISFEGAHEARLDRERFNNRIKRMDARRRTPKSRNPSACKHWLSGLLKCPVCGATLTVTAGNTSCPYFQCWKYAKGLHKVSNSITVAKAERTVFRYFDEILAGADFSYTVRNKTLDVEKDDTVARLQQALDHLSMRESRIKLAFENGIDTLEEYGANKKRLAEERQSLQEELDRVLTPAAPPETISKEDFRKEIKNINDILKNPEEPAEKKGLLLRSIVDRIVYEKASGTMYFDFFVS

SEQ ID NO: 7331 - protein, 476 aa, Unknown
  Description of Unknown: Integrase B7332 sequence
  PTHR30461:SF3,IPR036162,PS51737,IPR011109,PTHR30461, PS00397,PF00239,G3DSA:1.10.10.2600,IPR006119,SSF53041, cd00338,SM00857,IPR025827,IPR038109,PS51736, IPR006118,PF13408,G3DSA:3.40.50.1390,PF07508,Coil
MSALKNGALYIRVSTADQTELSPDAQQRLLLDYAKKNGIVIAKEFIFEESVSGRHADRRPKFQEMIALAKQDSHPIDVILVWKYSRFARNQEESIVYKSLLKKNNIDVISISEPLIDGPFGTLIERIIEWMDEYYSIRLSGEVIRGMKEKALKHGYQTSPCLGYDAAGSGKPFVINEAEYSIVKFIMDQYDLENHDPTAIARSCNELGYHTKRGNLMERRSVERILRNPFYAGTVIWNGISFEGAHETRLDRERFNNRIKRMDARRRSPKSRNPSTCRHWLSGLLKCPICGATMTVTAGNTSCPYFQCWKYAKGFHKGSNSITVAKAERTVYRYFDDILAGADFSFTVRDRKQEQEDDETIQRLQQALEHLAARKARVKMAYENGIDTLEEYGANKKRLAEERQSLQEELDRVLTPAAPPETISKEDFRKEIKNINDILKNPEEPAEKKGLLLRSIVDRIVYEKASGTMYFDFFVS

SEQ ID NO: 7332 - protein, 476 aa, Unknown
  Description of Unknown: Integrase B7333 sequence
  cd00338,SM00857,IPR006118,G3DSA:1.10.10.2600,IPR036162, PF13408,IPR025827,PS51737,G3DSA:3.40.50.1390,IPR006119, IPR038109,PF07508,IPR011109,SSF53041,PTHR30461, PS00397,Coil,PF00239
MRIGAAYIRVSTDDQLDISPESQLDEIQRYAKSHDILIPEEYIFMERTGRSGKRADNRPEFQRMIATAKEKPQPFEVILVWKFSRFARNQDESTFYKGMLRKKLKIDIESVSEPIMEGMYGRLIEMIIEWQDEFYSYNLGVEVKRGMAKKAELKGYQLVPPLGYAAVGNGKPYVIREDEYKIVEMIFHMYAVDRLDMTAIARQLNASGYLTRRGNPFEKRSIDRIIQNRFYVGTVEWNGFSFEGTHKTRASVTELFEQCQERRKAEFRPMRHRNVSTCKHWLSGLMRCSVCGATLSYTGSGAVPYFTCWKYSKGLHPESCSISVKKMERIVLRSLDGILESGHFEYTPAASASGSPADPSNEIQSIHTQLDRLRHQEERARIAYENEVYTLDEYKESKARLRSEIQRLSDELQRLLEQPAESAPPQKELLDRVRNVRDLLASPSVSFETKGNALRSILKCIVFDRKTEHFDFQYYA

SEQ ID NO: 7333 - protein, 476 aa, Unknown
  Description of Unknown: Integrase B7334 sequence
  cd00338,SM00857,IPR006118,G3DSA:1.10.10.2600,IPR036162, PF13408,IPR025827,G3DSA:3.40.50.1390,IPR006119,IPR038109, PF07508,IPR011109,SSF53041,PTHR30461,PS00397, PS51736,Coil,PF00239
MAKLRNGALYIRVSTADQTELSPDAQQRLLLDYAKKNGIIISKDFIFEESVSGRHADKRPKFQEMIGIAKQDSHPIDVILVWKYSRFARNQEESIVYKSLLKKSDVDVISISEPLIDGPFGTLIERIIEWMDEYYSIRLSGEVIRGMKEKALKHGYQSTPCLGYDAVGGGRPFVINENEYRIVQYIMDQYDLYDQDETAIARKCNDLGFRSKRGNLFEQRNVDLILKNPFYTGTVVWNGISFEGSHETRLSKERFEKRIALMRARRRPAKARNISTCKHWLSGLLRCSVCGATLSLAGSGSYRYFQCWKYSKGFHKGSQSLSAAKAEAAVCDYFDRILAGADFTYTVRNISDQKESDELDLLRQELDQIAVKEARVKLAYENGIDTLEEYKENRRRLKESREELLEKIDVATAATQSEDSDIVARETLLKEIQSVSEILKDPAESYERKGLLLRSIVDGITYDKEKNRLYFNFFIS

SEQ ID NO: 7334 - protein, 476 aa, Unknown
  Description of Unknown: Integrase B7335 sequence
  PTHR30461:SF3,IPR036162,PS51737,IPR011109,PTHR30461, PS00397,PF00239,G3DSA:1.10.10.2600,IPR006119,SSF53041, cd00338,SM00857,IPR025827,IPR038109,PS51736, IPR006118,PF13408,G3DSA:3.40.50.1390,PF07508,Coil
MSALKNGALYIRVSTADQTELSPDAQQRLLLDYAKKNGIVIAKEFIFEESVSGRYAGRRPKFQEMIALAKQDSHPIDVILVWKYSRFARNQEESIVYKSLLKKNNIDVISISEPLIDGPFGTLIERIIEWMDEYYSIRLSGEVMRGMKEKALQHGYQTTPCLGYQAAGGGKPFVIDEAEYQIVKYIMDQYDLEHLDPTAIARKCNDLGYRTRRGNRMERRSIERVLRNPFYAGTVIWNGISFDGTHETRLDPARYQERIKRMDARRRSPKSRNPSTCRHWLSGLLKCPICGATMTVTAGSTSCPYFQCWKYAKGFHKGSNSITVAKAERTVYRYFDDILAGADFSFSVRDRKQEQKDDETIQRLQQALDHLAVREARVKMAYENGIDTLEEYGANKKRLAEERQSLQEELDRVLTPAALPETISKEDFRKEIKNINDILKNPEEPAEKKGLLLRSIVDRIVYEKASGTMYFDFFVS

SEQ ID NO: 7335 - protein, 476 aa, Unknown
  Description of Unknown: Integrase B7336 sequence
  SM00857,IPR006118,G3DSA:1.10.10.2600,IPR036162,PF13408, IPR025827,PS51737,G3DSA:3.40.50.1390,IPR006119,IPR038109, PF07508,IPR011109,SSF53041,PF00239,PTHR30461, PS00397,Coil,cd00338
MRIGAAYIRVSTDDQLDISPESQLDEIQRYAKSHDILIPEEYIFMERTGRSGKRADNRPEFQRMIATAKEKPQPFEVILVWKFSRFARNQDESTFYKGMLRKKLKIDIESVSEPIMEGMYGRLIEMIIEWQDEFYSYNLGVEVKRGMAKKAELKGYQLVPPLGYAAVGNGKPYVIREDEYKIVEMIFHMYAVDRLDMTAIARQLNASGYLTRRGNPFEKRSIDRIIQNRFYVGTVEWNGFSFEGTHKTRASVTELFEQCQERRKAEFRPMRHRNVSTCKHWLSGLMRCSVCGATLSYTGSGAVPYFTCWKYSKGLHPESCSISVKKMERIVLRSLDGILESGHFEYTPAASASGSPADPSNEIQSIHTQLDRLRHQEERARIAYENEVYTLDEYKESKARLRSEIQRLSDELQHLLEQPAEPAPPQKELLDRVRNVRDLLASPSVGFETKGNALRSILKCIVFDRKTEHFDFQYYA

SEQ ID NO: 7336 - protein, 476 aa, Unknown
  Description of Unknown: Integrase B7337 sequence
  PTHR30461:SF3,SM00857,IPR006118,G3DSA:1.10.10.2600,IPR036162, PS51737,PS00397,G3DSA:3.40.50.1390,IPR006119,IPR038109, PF07508,IPR011109,SSF53041,PTHR30461,Coil, PS51736,cd00338,PF00239
MKIAAAYVRVSTDDQLEYSPDSQLQAIRDYAKSHDLILAEEYIFREEDGRSGRQAEKRPEFMRMISTAKQQPPPFEVILCWKYSRFARNQEESIVYKSMLKKDGIEVVSISEPLIDGPFGSLIERIIEWMDEYYSIRLSGEVKRGMTEKVSRGEPVTIPPLGYLMENKQLVPDPEMAPVISMLFDEFAAGTPMLQLARRLNEMGIRTRRGCKIEYRTLNYIMQNPVYIGKIRWTPTGRANRYYKTDDTLIVDGNHQPIITTEQWEKAQAKIAENKQKFPRYQRDTASKFMLRGLVHCSNCGATLVTSTPGSLQCNHYAKGLCSISHSITITKLDKAVMQGLEHDALDMGGNLKIEYRTQSAPVATATIKAQIKKEQNKLLRCKEAYQGGVDTLAEYRSNKEAILSAIADLEKQLNTAPTAIPAPDPQALRDKIIAAIPTLKNPDVTPTVKNNLLRCFISKIVYTKSNEEIEMYYYM

SEQ ID NO: 7337 - protein, 476 aa, Unknown
  Description of Unknown: Integrase B7338 sequence
  PTHR30461:SF3,IPR036162,PS51737,IPR011109,PTHR30461, PS00397,PF00239,G3DSA:1.10.10.2600,IPR006119,SSF53041, cd00338,SM00857,IPR025827,IPR038109,PS51736, IPR006118,PF13408,G3DSA:3.40.50.1390,PF07508,Coil
MSALKNGALYIRVSTADQTELSPDAQQRLLLDYAKKNGIVIAKEFIFEESVSGRHADRRPKFQEMIALAKQDSHPIDVILVWKYSRFARNQEESIVYKSLLKKSNVDVISISEPLIDGPFGTLIERIIEWMDEYYSIRLSGEVLRGMKEKALQHGYQATPCLGYRAVSGGKPFVIDETEYQIVKYIMDQYDFEHLDPTAIARRCNDLGYRTRRGNLMERRSIERVLRNPFYAGTVVWNGISFDGTHETRLDPARYQERIKRMDARRRSPKSRNPSTCRHWLSGLLKCPICGATMTVTAGNTSCPYFQCWKYAKGFHKGSNSITVAKAERTVYRYFDDILAGADFSFTVRDRKQEQEDDETIQRLQQALEHLAAREARVKMAYENGIDTLEEYGANKKRLAEERQSLQEELDRVLTPAAPPETISKEDFRKEIKNINDILKNPEEPAEKKGLLLRSIVDRIVYEKASGTMYFDFFVS

SEQ ID NO: 7338 - protein, 476 aa, Unknown
  Description of Unknown: Integrase B7339 sequence
  PTHR30461:SF3,cd00338,SM00857,IPR006118,G3DSA:1.10.10.2600, IPR036162,PS51737,G3DSA:3.40.50.1390,IPR006119,IPR038109, PF07508,IPR011109,SSF53041,PTHR30461,PS00397, PS51736,Coil,PF00239
MKIAAAYLRVSTEEQDEYSLDSQLKLIREYANKNDYIVPDELVFVDDGISGRTVRKRTAFQTMIARAKEKDRQFEAILLWKFSRFARNQEESIVYKTALRKLGVSVVSISEPLPEGPFASLIERIIEWMDEFYSIRLSGEVKRGMLEKASRGEPVSIAPFGYCLEDGKLLPSADSAVVQGVFADYATGTPMRVIAGQLADRGIRTRRGNAPDNRFVEYMLNNPAYIGKIRWSKDGRAASLRDYDNENILIYDGNHEPIIDLELWNTVQKRLEETKKKYRRYARKNEQVSYMLKGLVRCSSCGSTLVMQSTACPSLQCHSYARGVCKTSHSISVAKANNAVIAALENAVETQSFNIEAPARMTAARGTDYDKLIRAEQRKLERVKEAYENGIDTLAEYAEKKRKVLAAIARLESEAAGEQPAPVFDVAAYAKRVANVLVQVRDPSLSEQSKNDILRSILSKIVYDKAFQRLVLYFYA

SEQ ID NO: 7339 - protein, 475 aa, Unknown
  Description of Unknown: Integrase B7340 sequence
  PTHR30461:SF3,SM00857,IPR006118,G3DSA:1.10.10.2600,IPR036162, PS51737,G3DSA:3.40.50.1390,Coil,IPR006119,IPR038109, PF07508,SSF53041,IPR011109,PTHR30461,PS00397, PS51736,cd00338,PF00239
MTTAAAYIRVSSERQDEYSPDSQKKLIREYAKKNNIEVPEELIFFDDGISAKTATKRTQFNRMIALAKEKEPPFNAILVWKFSRFARNQEESIVYKNILRKKGIQVISISEPIIDSPFGDLIERIIEWMDEYYLINLSTEVKRGMTEKLSRGEALCPPAYGYDIQDGKYIINSDEAPHIIEIFNDFLSGLPMRQIALKCAAKGLRTHRGNPFEARTIRYILYNPVYVGKIRWSTDGRASSLRDFSNPSTVIVDGIHEPIISQEVWDATQAKLTKIQTMYGKNQRPDQQVEWMLKGLMRCECGATLTMLGTSCPSMQCYAYTKGTGKCVTSHCLSISKANKLVIANLERLVNNKQFNFVPAENITQTVDYDTLIKKEYARLARAKEAFLAEIDTVDEYRENKARITKAIKQLERERNSHKAEEIDVDEFSERIRQVLRTVTDASVSEKAKNETLRTVIAKIVYEKSKKRLVFFFHT

SEQ ID NO: 7340 - protein, 475 aa, Unknown
  Description of Unknown: Integrase B7341 sequence
  PTHR30461:SF3,IPR036162,PS51737,IPR011109,PTHR30461, PS00397,PF00239,G3DSA:1.10.10.2600,IPR006119,SSF53041, SM00857,IPR025827,IPR038109,PS51736,cd03768, IPR006118,PF13408,G3DSA:3.40.50.1390,PF07508,Coil
MKTTNKVAIYVRVSTSYQAEEGYSIDEQKDKLEAYCKIKDWKIYDFYIDGGFSGSNTKRPELERLIDDAKRKRFDIVLVYKLDRLSRSQKDTLFLIEDVFLKNDVAFISLQENFDTSTPFGKASIGMLSVFAQLEREQIKERMILGKEGRAKKGKTMAWTTIPFGYDYSKETGILSVNPTQALIVKRIYEEYLNGKSVVKIIRDLNAEGHVGRKRPWGETITKYLLKNETYLGIVKYRGQKYEGQHEPIISQELFDLVQLELKKRQIDALKRNNNPRPFQAKYMLSGLLKCGYCGGSLGLYVTSKNRKGKAYQRYQCRHRFDKDKSKRCNSKWYDKQELEEKVIERLSKIKLEPKYRKETLAKNDETMKVEEIKEQLKKLNNRLEKLTELYLDEIITRKELNAKNEKLKTEKAFLEEQLKSKKKNTINLRQRKLARLLKDFNPEKLSYEDASKIVKSVINEIVVTKEEMTITLDF

SEQ ID NO: 7341 - protein, 475 aa, Unknown
  Description of Unknown: Integrase B7342 sequence
  IPR036162,PS51737,IPR011109,PTHR30461,PS00397, PF00239,G3DSA:1.10.10.2600,IPR006119,SSF53041,cd00338, SM00857,IPR025827,IPR038109,PS51736,IPR006118, PF13408,G3DSA:3.40.50.1390,PF07508,Coil
MTEQKSDDLRMGALYIRVSTHEQDELSPDAQKRLLLDYAKSNGIVVQKDAVFVESVSGRNVKKRKEFQRMIAQAKSPEHPYDVILVWKFSRFARNQEESIVYKSMLKKDRVDVISVSEPVIDGPFGSLIERIIEWMDEYYSIRLSGEVLRGMGEKALKQGYQISPPLGYDAVGDGKPYKINEKEFKIVSYIMSQYDDYCQDTTAIARKCNDLGYRTKRGNLFERRNIDYILRNPFYAGIVNWNGQTFEGTHEARYTTEQLDKRIKLMDARRRPAKHRNASTCKHWLSGLIKCSICGATLSYTGSGACPYFQCWKYAKGYHKTSVAISVKKMEQLVIDYLKQLLDGADFQYVPKTTAPAQNEELEQLKQELARLSTRELRIKLAYENEIDTLEEYKENKIRLQKQRESLLENIKELEAQKPEDPSRDNVLSQIRSVYDVLLDPAAESSTKGNFIRTIVDQIVFDKEAEMVYFDIII

SEQ ID NO: 7342 - protein, 475 aa, Unknown
  Description of Unknown: Integrase B7343 sequence
  PTHR30461:SF3,SM00857,G3DSA:1.10.10.2600,IPR036162,PF13408, IPR025827,G3DSA:3.40.50.1390,PS51737,IPR006119,IPR038109, PF07508,SSF53041,IPR011109,PTHR30461,Coil, PS51736,cd00338,PF00239
MNAVIYARYSSSNQREESIEGQIRECTKYAEQQGYTIINHYIDRAITGKTDNRPAFQQMIKESNSRTFNIVLCYKVDRFARNRYASAIYKSKLKKNGITVEYAKEHIPDTPEGIILESMLEGFAEYYSANLGVNTKRGKYENALKKKSNGGVTPIGYKKIDGSLVIDETKAPVVQFAFQSYIDGISYANIIKKARERYGIKLSMSGLKLILQNEVYTGKYIYNTYDGETFVYKDNHEPIVSQETFEKANEKRLKNKRSPNAGKGKRKYALSGLIKCGECGGHIIVSHSYKNGEPAFFRLYCLNRKEHKNCNNPTRKMEIVENAVIEAIKNKILDRKTIKILAEKACSLQEDNSLDKLKELQTELKNVQKSKNNIIAAIEQGIITPTTKDRLQELEHLESDLQIKIATEKKAENGNLTAPQIEKFLKKYCSGNMQDETFRFELTHTFVKEILLFKDRFEITLKLSDMEIKETVEFE

SEQ ID NO: 7343 - protein, 475 aa, Unknown
  Description of Unknown: Integrase B7344 sequence
  IPR036162,PS51737,IPR011109,PTHR30461,PS00397, PF00239,G3DSA:1.10.10.2600,IPR006119,SSF53041,cd00338, SM00857,IPR025827,IPR038109,PS51736,IPR006118, PF13408,G3DSA:3.40.50.1390,PF07508,Coil
MEELKYAYGYIRVSTGKQDELSPESQERLLKDYAKQNNIIILDTFFEHGISGRRADKRPEFQKMIGMAKSKEHPVDLILVWKFSRFARNQEESIVYKSLLRKQHNVDVVSISEPIIDGPFGSLIERIIEWMDEYYSIRLSGEVLRGMTEKALKEGYQTAPPLGYQAAGHGAPFTIDEEKYKIVDYIFEQFDQYNIDCTKIARNLNEMGYLTQRGNPFESRSVKRILENPFYYGLVKWNDISFIGPHEARLPKEQFEKRMEKIRKNFKPARRRDVSSCKHWLSGLIKCGYCGATLAWNGGNPHSPGFQCYKYSKGLHKESCSLSASKATAAVYEYFEKILDGMEFEYRYHAPDSPQQTDKRAHLEEELKKLSTREERIKLAYENEVDTLEEYKENKKRLKAVRVDLEQQLMSLDTNTTSVAIPSKEDVLNKVRTVYDVIRDDTVDYETKGFFMRSLVEDIVYDKKNGKMIFTLYIS

SEQ ID NO: 7344 - protein, 475 aa, Unknown
  Description of Unknown: Integrase B7345 sequence
  PTHR30461:SF3,SM00857,IPR006118,G3DSA:1.10.10.2600,IPR036162, PS51737,G3DSA:3.40.50.1390,Coil,IPR006119,IPR038109, PF07508,IPR011109,SSF53041,PTHR30461,PS00397, PS51736,cd00338,PF00239
MTTAAAYIRVSSERQDEYSPDSQKKLIREYAKKNNIEVPEELIFFDDGISAKTATKRTQFNRMIALAKEKEPPFDAILVWKFSRFARNQEESIVYKNILRKKGIQVISISEPIIDSPFGDLIERIIEWMDEYYLINLSTEVKRGMTEKLSRGEALCPPAYGYDIQDGKYIINSDEAPHIIEIFNDFLSGLPMRQIALKCAAKGLRTHRGNPFEARTIRYILYNPVYVGKIRWSTDGRASSLRDFSNPSTVIVDGIHEPIISQEVWDATQAKLTKIQTMYGKNQRPDQQVEWMLKGLMRCECGATLTMLGTSCPSMQCHAYTKGTGKCVTSHCLSISKANKLVIANLEKLVNNKQFNFVPAENITQTVDYDALIKKEYARLARAKEAFLAEIDTVDEYRENKARITKAIKQLERERNSHKTEEIDVDEFSEKIRQVLRTITDASVSEKAKNETLRTVIAKIVYEKSKKRLVFFFHT

SEQ ID NO: 7345 - protein, 475 aa, Unknown
  Description of Unknown: Integrase B7346 sequence
  IPR036162,PS51737,IPR011109,PTHR30461,PS00397, PF00239,G3DSA:1.10.10.2600,IPR006119,SSF53041,cd00338, SM00857,IPR025827,IPR038109,PS51736,IPR006118, PF13408,G3DSA:3.40.50.1390,PF07508,Coil
MKVGAAYIRVSSDDQTEYSPDSQVKEIKNYAARHDIFLPPENIFIDAGISGRKANKRPEFQRMVSAAKNKPKPFDVILVWKFSRFARNQEESILYKSLLKRECGIEVTSITEETGDNMFGSLIERIIEWMDEFYSIRLGEEVRAKMTFVAEQGKMQTTASFGYSKKPDEELKILPDEANWVRFMAEQFLNKKSLRSIANHLNANGIRTHRGNKFEARTVEYILKNMTNAGAVHWTPNQAAHDSRHPYSDNTIIVKDVLPAIYSFEQYEEIMKEFDRRTKSRTKYAKSDTVKKHWLSGYLKCSNCGATLIYSKAHNGFQCYKYGKSLCSVSHYVSASKIEVAVIEALSEVTVTDTFIKAITKPTAKDSIDYTKDIERLENMLVRAKKAYVEGIDSIEEYAVNKERISKEISQLKQKESERIVEYPPKTDVVNKFKTIIDLIKSDADNDAKRAAFGEIVEKVIYSKPEESVKIFFYL

SEQ ID NO: 7346 - protein, 475 aa, Unknown
  Description of Unknown: Integrase B7347 sequence
  PTHR30461:SF3,SM00857,G3DSA:1.10.10.2600,IPR036162,PF13408, IPR025827,PS51737,G3DSA:3.40.50.1390,IPR006119,IPR038109, PF07508,IPR011109,SSF53041,PF00239,PTHR30461, Coil,cd00338
MQEELSPDAQLRLIREYCDRHNYILPEEYIFMDIGISGKKAEKRNDFMRMISLAKQKQGSPFEAILVWKFNRFARNQEESIVYKSMLRNKCNVDVISITQTITEDIYGGLIERIIEWTDEFYSIQLAEDVTRGMTENALRGNFQASPALGYRVIQKGVPPIVDEDQAAIVRTIFKLYTSSTMGFYEIARHLNSLGYKTRNKREFEARGIKYILQNPIYKGYLRWNYSDSSNKEIKPESEWIIRKGNIKPIVSEEIWTLANDRIKTEYRPRGGKPITQKRHWLSGLIKCSSCGASLSTSVHRDKRYGRIYTNFQCYRYVKGKCLVSHGISEKKLVPLVLSALEEDMNKSSIECEYIPPESVTNDLDILKSQLKKLDAKEDRIKEAYQSGIDTLEEYKENKLKLKKDREKLSVEIQKQEEQKPEVIDMPDRIRGVYNILTSDQCNKDEKYAAIRSIVKKIVFDRENKLIDIYYYTSV

SEQ ID NO: 7347 - protein, 475 aa, Unknown
  Description of Unknown: Integrase B7348 sequence
  IPR036162,PS51737,IPR011109,PTHR30461,PS00397, PF00239,G3DSA:1.10.10.2600,IPR006119,SSF53041,cd00338, SM00857,IPR025827,IPR038109,PS51736,IPR006118, PF13408,G3DSA:3.40.50.1390,PF07508,Coil
MTEQKSDDLRMGALYIRVSTHEQDELSPDAQKRLLLDYAKSNGIVVQKDAVFVESVSGRNVKKRKEFQRMIAQAKSPEHPYDVILVWKFSRFARNQEESIVYKSMLKKDRVDVISVSEPVIDGPFGSLIERIIEWMDEYYSIRLSGEVLRGMGEKALKQGYQISPPLGYDAVGDGKPYKINEKEFKIVSYIMSQYDDYCQDTTAIARKCNDLGYRTKRGNLFERRNIDYILRNPFYAGIVNWNGQTFEGTHEARYTTEQLDKRIKLMDARRRPAKHRNASTCKHWLSGLIKCSICGATLSYTGSGACPYFQCWKYAKGYHKTSVAISVKKMEQLVIDYLKQLLDGADFQYVPKTTAPVKNEELEQLKQELARLSTRELRIKLAYENEIDTLEEYKENKIRLQKQRESLLENIKELEAQKPEDPSRDNVLSQIRSVYDVLLDPAAESSTKGNFIRTIVDQIVFDKEAEMVYFDIII

SEQ ID NO: 7348 - protein, 475 aa, Unknown
  Description of Unknown: Integrase B7349 sequence
  IPR036162,PS51737,IPR011109,PTHR30461,PS00397, PF00239,G3DSA:1.10.10.2600,IPR006119,SSF53041,cd00338, SM00857,IPR025827,IPR038109,PS51736,IPR006118, PF13408,G3DSA:3.40.50.1390,PF07508,Coil
MEELKYAYGYIRVSTGKQDELSPESQERLLKDYAKQNNIIILDTFFEHGISGRRADKRPEFQKMIGMAKSKERPVDLILVWKFSRFARNQEESIVYKSLLRKQHNVDVVSISEPIIDGPFGSLIERIIEWMDEYYSIRLSGEVLRGMTEKALKEGYQTAPPLGYQAAGHGAPFTIDEEKYKIVDYIFEQFDQYNIDCTKIARNLNEMGYLTQRGNPFESRSVKRILENPFYYGLVKWNDISFIGPHEARLPKEQFEKRMEKIRKNFKPARRRDVSSCKHWLSGLIKCGYCGATLAWNGGNPHSPGFQCYKYSKGLHKESCSLSASKATAAVYEYFEKILDGMEFEYRYHAPDSPQQTDKRAHLEEELKKLSTREERIKLAYENEVDTLEEYKENKKRLKAVRVDLEQQLMSLDTNTTSVAIPSKEDVLNKVRTVYDVIRDDTVDYETKGFFMRSLVEDIVYDKKNGKMIFTLYIS

SEQ ID NO: 7349 - protein, 475 aa, Unknown
  Description of Unknown: Integrase B7350 sequence
  PTHR30461:SF3,IPR036162,PS51737,IPR011109,PTHR30461, PS00397,PF00239,G3DSA:1.10.10.2600,IPR006119,SSF53041, cd00338,SM00857,IPR025827,IPR038109,PS51736, IPR006118,PF13408,G3DSA:3.40.50.1390,PF07508,Coil
MKLAAAYIRVSTDDQIEYSPESQLKSIREYAKHHDFIVPDDYVFIDEGISGKNTKKRPEFNRMIGIAKSKPKPFDAILLWKFSRFARNREDSIVYKSMLRKQLGIEVISISEALGDDKMSVLIEALIEAMDEYYSINLAEEVKRGMTEKASRGEPLSIAPFGYRMEQKQLVVHPQESQIVQMIFQEFLNGHGMRELATTINAMGIRTHRGNLFENRTIEYILNNPVYIGKIRWNPTGKTRRDYHNENVMIVDGTHTPIISTELWENVQKYLCENKQIYRRRDRATVNNNLFQGILKCGNCGKSLSLSRKGYLQCIGYSHGQCTVSHTLKYDTAHRIILNQIQKDLISGNIHITQKRQNMSDQSMPLIYQIKNEYTKLERVKAAYENGIDTISEYQNNKQRISTTIQALEQKLASLKTQKPKETLVAELRQTYHNAIDIIQDEAVPTSEKNRLLRSFIDKIVYDKKKNQLQIFYFA

SEQ ID NO: 7350 - protein, 475 aa, Unknown
  Description of Unknown: Integrase B7351 sequence
  IPR036162,PS51737,IPR011109,PTHR30461,PS00397, PF00239,G3DSA:1.10.10.2600,IPR006119,SSF53041,cd00338, SM00857,IPR025827,IPR038109,PS51736,IPR006118, PF13408,G3DSA:3.40.50.1390,PF07508,Coil
MTEQKSDDLCMGALYIRVSTHDQDELSPDAQKRLLLDYAKSNGIVVQKDAVFVESVSGRNVKKRKEFQRMIAQAKSPEHPYDVILVWKFSRFARNQEESIVYKSMLKKDRVDVISVSEPVIDGPFGSLIERIIEWMDEYYSIRLSGEVLRGMGEKALKQGYQISPPLGYDAVGDGKPYKINEKEFKIVSYIMSQYDDYCQDTTAIARKCNDLGYRTKRGNLFERRNIDYILRNPFYAGIVNWNGQTFEGTHEARYTTEQLDKRIKLMDARRRPAKHRNASTCKHWLSGLIKCSICGATLSYTGSGACPYFQCWKYAKGYHKTSVAISVKKMEQLVIDYLKQLLDGADFQYVPKTTAPVQNGELEQLKQELARLSTRELRIKLAYENEIDTLEEYKENKIRLQKQRESLLENIKKLEAQKPEDPSRDNILSQIRSVYDVLLDPAAESSTKGNFIRTIVDQIVFDKEAEMVYFDIII

SEQ ID NO: 7351 - protein, 475 aa, Unknown
  Description of Unknown: Integrase B7352 sequence
  PTHR30461:SF3,SM00857,IPR006118,G3DSA:1.10.10.2600,IPR036162, PS51737,G3DSA:3.40.50.1390,Coil,IPR006119,IPR038109, PF07508,SSF53041,IPR011109,PTHR30461,PS00397, PS51736,cd00338,PF00239
MTTAAAYIRVSSERQDEYSPDSQKKLIREYAKKNNIEVPEELIFFDDGISAKTATKRTQFNRMIALAKEKEPPFNAILVWKFSRFARNQEESIVYKNILRKKGIQVISISEPIIDSPFGDLIERIIEWMDEYYLINLSTEVKRGMTEKLSRGEALCPPAYGYDIQDGKYIINSDEAPHIIEIFNDFLSGLPMRQIALKCAAKGLRTHRGNPFEARTVRYILYNPVYVGKIRWSTDGRASSLRDFSNPSTVIVDGIHEPIISQEVWDAAQAKLTKIQTMYGKNQRPDQQVEWMLKGLMRCECGATLTMLGTSCPSMQCYAYTKGTGKCVTSHCLSISKANKLVIANLERLVNNKQFNFVPAENIAQTVDYDTLIKKEYARLARAKEAFLAEIDTVDEYRENKARITKAIKQLESERNSQKIEEIDVDEFSEKIRQVLRTVTDASVSEKAKNETLRTVIAKIVYEKSKKRLVFFFHT

SEQ ID NO: 7352 - protein, 475 aa, Unknown
  Description of Unknown: Integrase B7353 sequence
  PTHR30461:SF3,SM00857,IPR006118,G3DSA:1.10.10.2600,IPR036162, PS51737,G3DSA:3.40.50.1390,Coil,IPR006119,IPR038109, PF07508,SSF53041,IPR011109,PTHR30461,PS00397, PS51736,cd00338,PF00239
MTTAAAYIRVSSERQDEYSPDSQKKLIREYAKKNNIEVPEELIFFDDGISAKTATKRTQFNRMIALAKEKEPPFNAILVWKFSRFARNQEESIVYKNILRKKGIQVISISEPIIDSPFGDLIERIIEWMDEYYLINLSTEVKRGMTEKLSRGEALCPPAYGYDIQDGKYIINSDEAPHIIEIFNDFLSGLPMRQIALKCAAKGLRTHRGNPFEARTVRYILYNPVYVGKIRWSTDGRASSLRDFSNPSTVIVDGIHEPIISQEVWDATQAKLTKIQTMYGKNQRPDQQVEWMLKGLMRCECGATLTMLGTSCPSMQCYAYTKGTGKCVTSHCLSISKANKLVIANLERLVNNKQFNFVHAENITQTVDYDALIKKEYARLARAKEAFLAEIDTVDEYRENKARITKAIKQLERERNSHKAEEIDVDEFSEKIRQVLRTVTDASVSEKAKNETLRTVIAKIVYEKSKKRLVFFFHT

SEQ ID NO: 7353 - protein, 475 aa, Unknown
  Description of Unknown: Integrase B7354 sequence
  PTHR30461:SF3,IPR036162,PS51737,IPR011109,PTHR30461, PS00397,PF00239,G3DSA:1.10.10.2600,IPR006119,SSF53041, SM00857,IPR025827,IPR038109,PS51736,cd03768, IPR006118,PF13408,G3DSA:3.40.50.1390,PF07508,Coil
MKVALYVRVSTLEQAEEGYSISEQKDKLKKYCEIKDWKITRIYSDPGFSGSNLNRPSMQQLIKDAGTGLYDAVLVYKLDRLSRSQKDTLHLIEDIFQKNNIHFISLSENFDTSTAFGKAMIGILSVFAQLEREQIKERMMMGKAGRAKAGKIMAWSNIPFGYVKDNDTYKIDPLRANIVKKIYSMYLAGDSITRIFNRLNEEGHVGKDIKWSYRTVRQILGNASYTGVVTYHGKSYPGKHQPIIAKDIFDEVQRQLKVRQIEAEKKFYAHPFQSKYMLSGLLKCGYCGATLVINKSHRKNKPPRWRYNCPNTLSRKHVRTYAHKDIDCLFKFIYRDEIEELVISEVKKLALNPQSITEDYEQHDEEQIDVEAIKKELASIKRKQDKLVDLYLIADTLNIDELNNRSTKLKEQQKALETKLRPTQKDDNKIIDFQKNLAKAKDIENLDYDKQKFIINQLVSSIDVTNENVTINWDF

SEQ ID NO: 7354 - protein, 475 aa, Unknown
  Description of Unknown: Integrase B7355 sequence
  cd00338,SM00857,IPR006118,G3DSA:1.10.10.2600,IPR036162, PF13408,IPR025827,G3DSA:3.40.50.1390,PS51737,IPR006119, IPR038109,PF07508,IPR011109,SSF53041,PTHR30461, PS00397,Coil,PF00239
MRIGAAYIRVSTDDQLDISPESQLDEIQRYAKSHDILIPEEYIFMERTGRSGKRADNRPEFQRMIATAKEKPQPFEVILVWKFSRFARNQDESTFYKGMLRKKLKIDIESVSEPIMEGMYGRLIEMIIEWQDEFYSYNLGVEVKRGMAKRAELKGYQLVPPLGYAAVGNGKPYVIREDEYKIVEMIFHMYAVDRLDMTAIARQLNASGYLTRRGNPFEKRSIDRIIQNRFYVGTVEWNGFSFEGTHKTRASVTELFEQCQERRKAEFRPMRHRNVSTCKHWLSGLMRCSVCGATLSYTGSGAVPYFTCWKYSKGLHPESCSISVKKMERIVLRSLDGILESGHFEYTPAASASGSPADPSNEIQSIHTQLDRLRHQEERARIAYENEVYTLDEYKESKARLRSEIQRLSDELQRLEQPAESAPPQKELLDRVRNVRDLLASPSVGFETKGNALRSILKCIVFDRKTEHFDFQYYA

SEQ ID NO: 7355 - protein, 475 aa, Unknown
  Description of Unknown: Integrase B7356 sequence
  IPR036162,PS51737,IPR011109,PTHR30461,PS00397, PF00239,G3DSA:1.10.10.2600,IPR006119,SSF53041,cd00338, SM00857,IPR025827,IPR038109,PS51736,IPR006118, PF13408,G3DSA:3.40.50.1390,PF07508,Coil
MEELKYAYGYIRVSTGKQDELSPESQERLLKDYAKQNNIIILDTFFEHGISGRRADKRPEFQKMIGMAKSKEHPVDLILVWKFSRFARNQEESIVYKSLLRKQHNVDVVSISEPIIDGPFGSLIERIIEWMDEYYSIRLSGEVLRGMTEKALKEGYQTAPPLGYQAAGHGAPFTIDEEKYKIVDYIFEQFDQHNIDCTKIARNLNKMGYLTQRGNPFESRSVKRILENPFYYGLVKWNDISFIGPHEARLPKEQFEKRMEKIRKNFKPARRRDVSSCKHWLSGLIKCGYCGATLAWNGGNPHSPGFQCYKYSKGVHKESCSLSVSKATAAVFEYFEKILAGMEFEYRYHAPETPQKIDRRAQLKEELEKLSTREARIKLAYENEVDTLEEYKENKKRLKAVRIDLEQQLMELDTSSPSATLPSKEDVLNRVRTVYDIIKDDTVDYETKGFFMRSLVEDIVYDKKNGKMIFTLYIS

SEQ ID NO: 7356 - protein, 475 aa, Unknown
  Description of Unknown: Integrase B7357 sequence
  PTHR30461:SF3,SM00857,IPR006118,G3DSA:1.10.10.2600,IPR036162, PS51737,G3DSA:3.40.50.1390,Coil,IPR006119,IPR038109, PF07508,IPR011109,SSF53041,PTHR30461,PS00397, PS51736,cd00338,PF00239
MTIAAAYIRVSSERQDEYSPDSQKKLIREYAKKNNIEVPEKLIFFDDGISAKTATKRTQFNRMIALAKEKEPPFSAILVWKFSRFARNQEESIVYKNILRKKGIQVISISEPIIDSPFGDLIERIIEWMDEYYLINLSTEVKRGMTEKLSRGEALCPPAYGYDIQDGKYIINSDEAPHIIEIFNDFLSGLPMRQIALKSAAKGLRTHRGNPFEARTVRYILYNPVYVGKIRWSTDGRASSLRDFSNPSTVIVDGIHEPIISQEVWDATQAKLTKIQTMYGKNQRPDQQVEWMLKGLMRCECGATLTMLGTSCPSMQCYAYTKGTGKCVTSHCLSISKANKLVISNLERLVNNKQFNFVPAENITQTVDYDALIKKEYARLARAKEAFLAEIDTVDEYRENKARITKTIKQLEREQNSHKVEEIDVDEFSERIRQVLRTITDASVSEKAKNETLRTVIAKIVYEKSKKRLVFFFHT

SEQ ID NO: 7357 - protein, 475 aa, Unknown
  Description of Unknown: Integrase B7358 sequence
  PTHR30461:SF3,SM00857,IPR006118,G3DSA:1.10.10.2600,IPR036162, PS51737,G3DSA:3.40.50.1390,Coil,IPR006119,IPR038109, PF07508,IPR011109,SSF53041,PTHR30461,PS00397, PS51736,cd00338,PF00239
MTTAAAYIRVSSERQDEYSPDSQKKLIREYAKKNNIEVPDELIFFDDGISAKTATKRTQFNRMIALAKEKEPPFNAILVWKFSRFARNQEESIVYKNILRKKGIQVISISEPIIDSPFGDLIERIIEWMDEYYLINLSTEVKRGMTEKLSRGEALCPPAYGYDIQDGKYIINSDEAPHIIEIFNDFLSGLPMRQIALKCAAKGLRTHRGNPFEARTIRYILYNPVYVGKIRWSTDGRASSLRDFSNPSTVIVDGIHEPIISQEVWDATQAKLTKIQTMYGKNQRPDQQVEWMLKGLMRCECGATLTMLGTSCPSMQCYAYTKGTGKCVTSHCLSISKANKLVIANLERLVNNKQFNFVPAENITQTVDYDTLIKKEYARLARAKEAFLAEIDTVDEYRENKARITKAIKQLERERNSHKAEEIDVDEFSERIRQVLRTVTDASVSEKAKNETLRTVIAKIVYEKSKKRLVFFFHT

SEQ ID NO: 7358 - protein, 475 aa, Unknown
  Description of Unknown: Integrase B7359 sequence
  PTHR30461:SF3,SM00857,IPR006118,G3DSA:1.10.10.2600,IPR036162, PS51737,G3DSA:3.40.50.1390,Coil,IPR006119,IPR038109, PF07508,IPR011109,SSF53041,PTHR30461,PS00397, PS51736,cd00338,PF00239
MTIAAAYIRVSSERQDEYSPDSQKKLIREYAKKNNIEVPEDLIFFDDGISAKTATKRTQFNRMIALAKEKEPPFNAILVWKFSRFARNQEESIVYKNILRKKGIQVISISEPIIDSPFGDLIERIIEWMDEYYLINLSTEVKRGMTEKLSRGEALCPPAYGYDIQDGKYIINSDEAPHIIEIFNDFLSGLPMRQIALKCAAKGLRTHRGNPFEARTIRYILYNPVYVGKIRWSTDGRASSLRDFSNPSTVIVDGIHEPIISQEVWDATQAKLTKIQTMYGKNQRPDQQVEWMLKGLMRCECGATLTMLGTSCPSMQCHAYTKGTGKCATSHCLSISKANKLVIANLEKLVNNRQFNFVPAENITQTVDYDALIKKEYARLARAKEAFLAEIDTVDEYRENKARITKSIKQLESERNSQKIEEIDVDEFSEKIRQVLRTITDASVSEKAKNETLRTVIAKIVYEKSKKRLVFFFHT

SEQ ID NO: 7359 - protein, 475 aa, Unknown
  Description of Unknown: Integrase B7360 sequence
  PTHR30461:SF3,SM00857,IPR006118,G3DSA:1.10.10.2600,IPR036162, PS51737,G3DSA:3.40.50.1390,Coil,IPR006119,IPR038109, PF07508,IPR011109,SSF53041,PTHR30461,PS00397, PS51736,cd00338,PF00239
MTTAAAYIRVSSERQDEYSPDSQKKLIREYAKKNNIEVPEELIFFDDGISAKTATKRTQFNRMIALAKEKEPPFSAILVWKFSRFARNQEESIVYKNILRKKGIQVISISEPIIDSPFGDLIERIIEWMDEYYLINLSTEVKRGMTEKLSRGEALCPPAYGYDIQDGKYIINSDEAPHIIEIFNDFLSGLPMRQIALKCAAKGLRTHRGNPFEARTVRYILYNPVYVGKIRWSTDGRASSLRDFSNPSTVIVDGIHEPIISQEVWEATQAKLSKIQTMYGKNQRPDQQVEWMLKGLMRCECGATLTMLGTSCPSMQCYAYTKGTGKCVTSHCLSISKANKLVIANLERLVNNKQFNFVPAENITQTVDYDTLIKKEYARLARAKEAFLAEIDTVDEYRENKARITKTIKQLEREKSSHKVEEIDVDEFSERIRQVLRTITDASVSEKAKNETLRTVIAKIVYEKSKKRLVFFFHT

SEQ ID NO: 7360 - protein, 475 aa, Unknown
  Description of Unknown: Integrase B7361 sequence
  IPR036162,PS51737,IPR011109,PTHR30461,PS00397, PF00239,G3DSA:1.10.10.2600,IPR006119,SSF53041,cd00338, SM00857,IPR025827,IPR038109,PS51736,IPR006118, PF13408,G3DSA:3.40.50.1390,PF07508,Coil
MKTGAAYIRVSSDDQTEYSPDSQVREIKNYAARHDIFLPPENIFIDAGISGRKASKRPEFQKMVSFAKSKPKPFEVILVWKFSRFARNQEESILYKSLLKRECGIEVTSITEETGDSMFGSLIERIIEWMDEFYSIRLGEEVRTKMAFVAEKGKIQTIASFGYGKKPDEDLFIIPDEARWVMFMAEQFLNKKSLRSIANHLNANGIRTHRGNKFEARTVEYILKNMTNAGAVHWTPDQAAHDSRHPYSDNTIIVKDVLPAIYSFEYYEEIMKEFERREEARSKYSKPDTVKKHWLSGFLKCGNCGATLVYSKAHDGFQCYKYGKSLCTISHYVSAPKIEAAVIEALSEVTVTDAFIKAIAKPVKKDFVNHKKEVERLENMLERAKKAYVEGIDSIEEYASNKERIGKEMSRIKKEESEQVIELPTKATVDNKFKAVTELIKSDADNDVKRAAFGEIVEKVIYSKPEESVKIFFYL

SEQ ID NO: 7361 - protein, 475 aa, Unknown
  Description of Unknown: Integrase B7362 sequence
  IPR036162,PS51737,IPR011109,PTHR30461,PS00397, PF00239,G3DSA:1.10.10.2600,IPR006119,SSF53041,cd00338, SM00857,IPR025827,IPR038109,PS51736,IPR006118, PF13408,G3DSA:3.40.50.1390,PF07508,Coil
MTEQKSDDLRMGALYIRVSTHEQDELSPDAQKRLLLDYAKSNGIVVQKDAVFVESVSGRNVKKRKEFQRMIAQAKSPEHPYDVILVWKFSRFARNQEESIVYKSMLKKDRVDVISVSEPVIDGPFGSLIERIIEWMDEYYSIRLSGEVLRGMGEKALKQGYQISPPLGYDAVGDGKPYKINEKEFKIVSYIMSQYDDYCQDTTAIARKCNDLGYRTKRGNLFERRNIDYILRNPFYAGIVNWNGQTFEGTHEARYTTKQLDKRIKLMDARRRPAKHRNASTCKHWLSGLIKCSICGATLSYTGSGACPYFQCWKYAKGYHKTSVAISVKKMEQLVIDYLKQLLDGADFQYVPKTTAPVQNGELEQLKQELARLSTRELRIKLAYENEIDTLEEYKENKIRLQKQRETLLENIKELEAQKPEDPSRDNVLSQIRSVYDVLLDPAAESSTKGNFIRTIVDQIVFDKEAEIVYFDIII

SEQ ID NO: 7362 - protein, 475 aa, Unknown
  Description of Unknown: Integrase B7363 sequence
  PTHR30461:SF3,SM00857,IPR006118,G3DSA:1.10.10.2600,IPR036162, PS51737,G3DSA:3.40.50.1390,Coil,IPR006119,IPR038109, PF07508,SSF53041,IPR011109,PTHR30461,PS00397, PS51736,cd00338,PF00239
MTTAAAYIRVSSERQDEYSPDSQKKLIREYAKKNNIEVPEELIFFDDGISAKTATKRTQFNRMIALAKEKEPPFNAILVWKFSRFARNQEESIVYKNILRKKGIQVISISEPIIDSPFGDLIERIIEWMDEYYLINLSTEVKRGMTEKLSRGEALCPPAYGYDIQGGKYIINSDEAPHIIEIFNDFLSGLPMRQIALKCAAKGLRTHRGNPFEARTIRYILYNPVYVGKIRWSTDGRASSLRDFSNPSTVIVDGIHEPIISQKVWDATQAKLTKIQTMYGKNQRPDQQVEWMLKGLMRCECGATLTMLGTSCPSMQCYAYTKGTGKCVTSHCLSINKANKLVIANLERLVNNKQFNFVPAENITQTVDYDTLIKKEYARLARAKEAFLAEIDTVDEYRENKARITKAIKQLERERNSHKAEEIDVDEFSERIRQVLRTVTDASVSEKAKNETLRTVIAKIVYEKSKKRLVFFFHT

SEQ ID NO: 7363 - protein, 475 aa, Unknown
  Description of Unknown: Integrase B7364 sequence
  SM00857,IPR006118,G3DSA:1.10.10.2600,IPR036162,PF13408, IPR025827,PS51737,G3DSA:3.40.50.1390,IPR006119,IPR038109, PF07508,IPR011109,SSF53041,PF00239,PTHR30461, PS00397,Coil,cd00338
MRIGAAYIRVSTDDQLDISPESQLDEIQRYAKSHDILIPEEYIFMERTGRSGKRADNRPEFQRMIATAKEKPQPFEVILVWKFSRFARNQDESTFYKGMLRKKLKIDIESVSEPIMEGMYGRLIEMIIEWQDEFYSYNLGVEVKRGMAKKAELKGYQLVPPLGYAAVGNGKPYVIREDEYKIVEMIFHMYAVDRLDMTAIARQLNASGYLTRRGNPFEKRSIDRIIQNHFYVGTVEWNGFSFEGTHETKASVTELFEQCQERRKAEFRPMRHRNVSTCKHWLSGLMRCSVCGATLSYTGSGAVPYFTCWKYSKGLHPESCSISVKKMERIVLRSLDGILESGHFEYTPAASASGSPADPSNEIQSIHTQLDRLRHQEERARIAYENEVYTLDEYKESKARLRSEIQRLSDELQRLEQPAESAPPQKELLDRVRNVRDLLASPSVGFETKGNALRSILKCIVFDRKTEHFDFQYYA

SEQ ID NO: 7364 - protein, 475 aa, Unknown
  Description of Unknown: Integrase B7365 sequence
  PTHR30461:SF3,SM00857,IPR006118,G3DSA:1.10.10.2600,IPR036162, PS51737,G3DSA:3.40.50.1390,PS00397,IPR006119,IPR038109, PF07508,SSF53041,IPR011109,PTHR30461,Coil, PS51736,cd00338,PF00239
MTTAAAYIRVSSERQDEYSPDSQKKLIREYAKKNNIEVPEELIFFDDGISAKTATKRTQFNRMIALAKEKEPPFNAILVWKFSRFARNQEESIVYKNILRKKGIQVISISEPIIDSPFGDLIERIIEWMDEYYLINLSTEVKRGMTEKLSRGEALCPPAYGYDIQDGKYIINSDEAPHIIEIFNDFLSGLPMRQIALKCAAKGLRTHRGNPFEARTIRYILYNPVYVGKIRWSTDGRASSLRDFSNPSTVIVDGIHEPIISQEVWDATQAKLTKIQTMYGKNQRPDQQVEWMLKGLMRCECGATLTMLGTSCPSMQCYAYTKGTGKCVTSHCLSISKANKLVIANLERLVNNKQFNFVPAENITQTVDYDTLIKKEYARLARAKEAFLAEIDTVDEYRENKARITKAIKQLESERNSHKAEEIDVDEFSERIRQVLRTVTDASVSEKAKNETLRTVIAKIVYEKSKKRLVFFFHT

SEQ ID NO: 7365 - protein, 475 aa, Unknown
  Description of Unknown: Integrase B7366 sequence
  PTHR30461:SF3,IPR036162,PS51737,IPR011109,PTHR30461, PS00397,PF00239,G3DSA:1.10.10.2600,IPR006119,SSF53041, SM00857,IPR025827,IPR038109,PS51736,cd03768, IPR006118,PF13408,G3DSA:3.40.50.1390,PF07508,Coil
MKTTNKVAIYVRVSTSYQAEEGYSIDEQKDKLEAYCKIKDWKIYDVYVDGGFSGSNTKRPELERLINDTKRKRFDIVLVYKLDRLSRSQKDTLFLIEDVFLKNDVAFISLQENFDTSTPFGKASIGMLSVFAQLEREQIKERMILGKEGRAKKGKAMSWTTIPFGYDYSKETGILSVNPTQALIVNRIFTEYLNGKSVVKIIRDLNAEGHVGRKRPWGETITKYLLKNETYLGIVKYRGRKYEGQHEPIISQELFDLVQLELKKRQIDALKRNNNPRPFQAKYMLSGLLKCGYCGGSLGLYVTSKNRKGKAYQRYQCRHRFDKDKSKRCNSKWYDKQELEEKVIERLSKIKLEPKYRKEMLAKNDETMKVEEIKEQLKKLNNRLDKLTELYLDEIITRKELNTKNEKLKVEKAFLEEQLESKKKNTINLRQRKLARLLKDFNPEKLSYEDASKIVKSVINEIVVTKEEMTITLDF

SEQ ID NO: 7366 - protein, 475 aa, Unknown
  Description of Unknown: Integrase B7367 sequence
  IPR036162,PS51737,IPR011109,PTHR30461,PS00397, PF00239,G3DSA:1.10.10.2600,IPR006119,SSF53041,cd00338, SM00857,IPR025827,IPR038109,PS51736,IPR006118, PF13408,G3DSA:3.40.50.1390,PF07508,Coil
MTEQKSDDLRMGALYIRVSTHEQDELSPDAQKRLLLDYAKSNGIVIQKDAVFVESVSGRNVKKRKEFQRMIAQAKSPEHPYDVILVWKFSRFARNQEESIVYKSMLKKDRVDVISVSEPVIDGPFGSLIERIIEWMDEYYSIRLSGEVLRGMGEKALKQGYQISPPLGYDAVGDGKPYKINEKEFKIVSYIMSQYDDYCQDTTAIARKCNDLGYRTKRGNLFERRNIDYILRNPFYAGIVNWNGQTFEGTHEARYTTEQLDKRIKLMDARRRPAKHRNASTCKHWLSGLIKCSICGATLSYTGSGACPYFQCWKYAKGYHKTSVAISVKKMEQLVIDYLKQLLDGADFQYVPKTTAPAQNEELEQLKQELARLSTRELRIKLAYENEIDTLEEYKENKIRLQKQRESLLENIKELEAQKPEDPSRDNVLSQIRSVYDVLLDPAAESSTKGNFIRTIVDQIVFDKEAEMVYFDIII

SEQ ID NO: 7367 - protein, 475 aa, Unknown
  Description of Unknown: Integrase B7368 sequence
  SM00857,G3DSA:1.10.10.2600,IPR036162,PS51737,G3DSA:3.40.50.1390, IPR006119,IPR038109,PF07508,IPR011109,SSF53041, PTHR30461,Coil,PS51736,cd00338,PF00239
MNKKIIADIYIRLSSKSQEDGMSRETQENECRKYCEANGITVRNVYYENKSAMTPYDRPVFYKMIANQQSKDRADVIISFCINRLTRNQYDFYPIEVLVDKFDTKIIFVKENMTISKPFKSHEKFLTSILIASAEFEVKHMNEIRKKGLMERAKTGIRPSRVPFGYRMRNKRIVIIPKEAEIVRKAYELYSTNEYSLSALSEKLFELGYEYKLQKSKKIQKATLSRILKNKFYTGYFDFPDIETPIKGKYKPIVSQELFDKVQKVLKTSANEKQQKHCFLYSNLLRLQETGKIMTGEIKKGRYIYYTAFDNNKIRHSVNETIVTDFVLNYLKEIRLNLIPKNIVQEVLKEELKPIKQKYSNLKRNVSRKYHKELQLNDFIEENGIDDEDFITANQEDIENKYSNLTDKISKTKQEIQYLESKCNEISQKRLYDSFINLNMENQREILKLITNKFELQGDKVKITFKPTFRKIRKR

SEQ ID NO: 7368 - protein, 475 aa, Unknown
  Description of Unknown: Integrase B7369 sequence
  IPR036162,PS51737,IPR011109,PTHR30461, PS00397,PF00239,G3DSA:1.10.10.2600,IPR006119, SSF53041,SM00857,IPR025827,IPR038109, PS51736,cd03768,IPR006118,PF13408,G3DSA:3.40.50.1390,PF07508,Coil
MKIAVYVRVSTLEQAESGYSIGEQTEKLKSYCKIKDWQVAKIYTDPGFSGSSLDRPAMQQLISDCKLGVFDAVLVYKLDRLSRSQKDTLYLIEDVFNAYNIHFMSLSENFDTSTPFGKAMIGLLSVFAQLEREQIKERMQMGKLGRVKAGKISAWSNVPFGYTKVKDSYDVDPLRAGIVKRIYADYLAGKSITKIMKELNREGHIGKGVAWSYRTVRQVLGNVTYTGRIIFKGQVYDGLHTGIISKADWDEVQRVLKIRQLDQAKKSNNPRPFQAQYMLSGLLKCHYCGATLAIAKSHTKNGPLWRYVCPTRHAGKYHRNNAARYRIPPVNCELTYKYKDDLEKEVLREVKKVALNPDAVVASQDDGQQTIDKQAIKAQLAKIKRQQAKLVDLYLLSDDLNVDQLHDRAEKLKVQADALQAQLIHDTKKADAFKKTATDAKQIDQLDYDHQTAIVRMLIDHINVSNTDLDIYWQI

SEQ ID NO: 7369 - protein, 475 aa, Unknown
  Description of Unknown: Integrase B7370 sequence
  PTHR30461:SF3,SM00857,IPR006118,G3DSA:1.10.10.2600,IPR036162, PS51737,G3DSA:3.40.50.1390,Coil,IPR006119,IPR038109, PF07508,SSF53041,IPR011109,PTHR30461,PS00397, PS51736,cd00338,PF00239
MTTAAAYIRVSSERQDEYSPDSQKKLIREYAKKNNIEVPEELIFFDDGISAKTATKRTQFNRMIALAKEKEPPFNAILVWKFSRFARNQEESIVYKNILRKKGIQVISISEPIIDSPFGDLIERIIEWMDEYYLINLSTEVKRGMTEKLSRGEALCPPAYGYDIQDGKYIINSDEAPHIIEIFNDFLSGLPMRQIALKCAAKGLRTHRGNPFEARTIRYILYNPVYVGKIRWSTDGRASSLRDFSNPSTVIVDGIHEPIISQEVWDATQAKLTKIQTMYGKNQRPDQQVEWMLKGLMRCECGATLTMLGTSCPSMQCYAYTKGTGKCVTSHCLSISKANKLVIANLERLVNNKQFNFVPAENITQTVDYDTLIKKEYARLARAKEAFLAEIDTVDEYRENKARITKAIKQLERERNSHKAEEIDVDEFSERIRQVLRTVTDASVSEKAKNETLRTVIAKIVYEKSKKRLVFFFHA

SEQ ID NO: 7370 - protein, 475 aa, Unknown
  Description of Unknown: Integrase B7371 sequence
  IPR036162,PS51737,IPR011109,PTHR30461,PS00397, PF00239,G3DSA:1.10.10.2600,IPR006119,SSF53041,cd00338, SM00857,IPR025827,IPR038109,PS51736,IPR006118, PF13408,G3DSA:3.40.50.1390,PF07508,Coil
MTEQKSDDLRMGALYIRVSTHEQDELSPDAQKRLLLDYAKSNGIVVQKDAVFVESVSGRNVKKRKEFQRMIAQAKSPEHPYDVILVWKFSRFARNQEESIVYKSMLKKDRVDVISVSEPVIDGPFGSLIERIIEWMDEYYSIRLSGEVLRGMGEKALKQGYQISPPLGYDAVGDGKPYKINEKEFKIVSYIMSQYDDYCQDTTAIARKCNDLGYRTKRGNLFERRNIDYILRNPFYAGIVNWNGQTFEGTHEARYTTEQLDKRIKLMDARRRPAKHRNASTCKHWLSGLIKCSICGATLSYTGSGACPYFQCWKYAKGFHPESVSITEKKLVKTVLDNFREILDGKDFSFQYIPSASPKSNELSLLQDELSNLKRRETRIRLAFENEIDTLEEYRENKARIQVERERIISEIDKRKTPNSIPTKEEMLLKIQHVYNIISDPDVDYQSKGVFIRSVLEDIVYDKQNDRLLFHFYCS

SEQ ID NO: 7371 - protein, 475 aa, Unknown
  Description of Unknown: Integrase B7372 sequence
  IPR036162,PS51737,IPR011109,PTHR30461,PS00397, PF00239,G3DSA:1.10.10.2600,IPR006119,SSF53041,cd00338, SM00857,IPR025827,IPR038109,PS51736,IPR006118, PF13408,G3DSA:3.40.50.1390,PF07508,Coil
MTEQKSNDLRMGALYIRVSTHEQDELSPDAQKRLLLDYAKSNGIVVQKDAVFVESVSGRNVKKRKEFQRMIAQAKSPEHPYDVILVWKFSRFARNQEESIVYKSMLKKDRVDVISVSEPVIDGPFGSLIERIIEWMDEYYSIRLSGEVLRGMGEKALKQGYQISPPLGYDAVGDGKPYKINEKEFKIVSYIMSQYDDYCQDTTAIARKCNDLGYRTKRGNLFERRNIDYILRNPFYAGIVNWNGQTFEGTHEARYTTEQLDKRIKLMDARRRPAKHRNASTCKHWLSGLIKCSICGATLSYTGSGACPYFQCWKYAKGYHKTSVAISVKKMEQLVIDYLKQLLDGADFQYVPKTTAPVQNEELEQLKQELARLSTRELRIKLAYENEIDTLEEYKENKIRLQKQRESLLENIKELEAQKPEDPSRDNVLSQIRSVYDVLLDPAAESSTKGNFIRTIVDQIVFDKEAEMVYFDIII

SEQ ID NO: 7372 - protein, 474 aa, Unknown
  Description of Unknown: Integrase B7373 sequence
  PTHR30461:SF3,SM00857,G3DSA:1.10.10.2600,IPR036162,PS51737, G3DSA:3.40.50.1390,IPR006119,IPR038109,PF07508,IPR011109, SSF53041,PTHR30461,Coil,PS51736,cd00338, PF00239
MQIAAAYVRVSDERQDEYSPDSQLKLIRAFAEKNGMVLPQEYIFYDDGISAKSAKKRTQFNNMIALAKDKQHPFDVILVWKFSRFARNQEESIVYKSLLKKVNVQVISVSEPISDDPFGSLIERIIEWMDEYYLTRLSGEVKRGMLEKASRGEPVSAPPFGYDLVNKQLVPNKDAETVRRVFAQYAAGVPVVAIARSAGASGVRTRRGNPPDNRWVDYMLNNPVYIGKIRWSKEGKQASRRNYHGDNVLIVDGSHEPIISADLWQAAQDRIKETKIRYGKYQRPDQSVDWMLKGLCRCDTCGATLVRLSTRCPSMQCHNYARAACPVSHSLSLAKANAAVIHDMQMACKTMNFNIAPTDTPSEDGVEHNKIIADIERRLAKCRDAYLAGVDTLEEYAKQKRELTRQLDKAKKDAAAAAAPSPVDPYELRDRVLAALSVVTSDKASEKSKNDALRSVIDRVIYVKSSGELAVYYR

SEQ ID NO: 7373 - protein, 474 aa, Unknown
  Description of Unknown: Integrase B7374 sequence
  PTHR30461:SF3,SM00857,G3DSA:1.10.10.2600,IPR036162,PF13408, IPR025827,PS51737,G3DSA:3.40.50.1390,IPR006119,IPR038109, PF07508,SSF53041,IPR011109,PF00239,PTHR30461, PS51736,Coil,cd00338
MKVGIYSRVSTQEQAREGYSIGEQVERLKNYCAAKGWILYKTYTDAGFSGANTDRPGMQQLISDVADGKIDMVLVYKLDRLSRSQKDTLFLIEDVFIKNNVNFASITENFDTSTPFGRAMIGILSVFAQLEREQFRERSIMGKDARAKEGLHHGGGAPTGYDYIDGQLIINKEEAELIKEAYRLFLEDDMTMMGIAAKLSVFSEKFKYDHRIRKMLTNPLYAGWTHCRDELYKGQHEAIISQEVFDKVQTKLKIRAENNPHYRNAFNRTSLLAGILWCKKCGARYFKRVRRYEKGSKVYYYNKYQCYSRSSYKNMVRDKSCKNKIWTMDVLDKAVIDEIKALVANPAEVDNIIKLNQSNNNITEKKEFYKKRIKEIEKQMNKLTDLYSIDGIDIDFVAKKITALNTDKKRIESEMNAINEHKPLISAEDAKKRLSGISNILDNGEFTEKVKVITSLINRIEVDDDDIYIYWNFV

SEQ ID NO: 7374 - protein, 474 aa, Unknown
  Description of Unknown: Integrase B7375 sequence
  PTHR30461:SF3,SM00857,G3DSA:1.10.10.2600,IPR036162,PF13408, IPR025827,PS51737,G3DSA:3.40.50.1390,IPR006119,IPR038109, PF07508,IPR011109,SSF53041,PF00239,PTHR30461, PS51736,Coil,cd00338
MKVGIYSRVSTQEQAREGYSIGEQVERLKNYCAAKGWILYKTYTDAGFSGANTDRPGMQQLISDVADGKIDMVLVYKLDRLSRSQKDTLFLIEDVFIKNNVNFASITENFDTSTPFGRAMIGILSVFAQLEREQFRERSIMGKDARAKEGLHHGGGAPTGYDYIDGQLIINKEEAELIKEAYRLFLEDDMTMMGIAAKLSVFSEKFKYDHRIRKMLTNPLYAGWTHCRDELYKGQHEAIISQEVFDKVQTKLKIRAENNPHYRNAFNRTSLLAGILWCKKCGARYFKRVRRYEKGSKVYYYNKYQCYSRSSYKNMVRDKSCKNKIWTMDVLDKTVIDEIKALVANPAEVDNIIKLNQSNNNITEKKEFYKKRIKEIEKQMNKLTDLYSIDGIDIDFVAKKITALNTDKKRIESEMNAINEHKPLISAEDAKKRLSGISNILDNGEFTEKVKVITSLINRIEVDDDDIYIYWNFV

SEQ ID NO: 7375 - protein, 474 aa, Unknown
  Description of Unknown: Integrase B7376 sequence
  PTHR30461:SF3,SM00857,IPR006118,G3DSA:1.10.10.2600,IPR036162, PS51737,G3DSA:3.40.50.1390,IPR006119,IPR038109,PF07508, IPR011109,SSF53041,PF00239,PTHR30461,PS00397, PS51736,Coil,cd00338
MKTAAAYIRVSTEDQVEYSPDSQLKAIRDYARKNDMILPEEFIFVDEGISGRKAAKRPEFMKMIGTAKIKPKQFDVILLWKFSRFARNREDSIVYKSMLRKQCGIEVISISEQLGEDKTSILIEALIEAMDEYYSINLAEEVRRGMTEKAQRGEVVSTPPFGYDVKDNVFVPNPETAPIVKMIFNKYLSGRGCLEIAKELNTMGIRTKYGNKWENRGVEYVLRNVVYTGKLTWTPVKSKTRDYKNEATIITQGKHEPIIEQEIFDKVQEMILEKKKLFPKHSRQSSNEFMLKGFLKCSNCGGALVYALNDRVQCNRYSKGTCEVSHSASLSKLNASVINALKSDLETQNFNIYNIKSAEEQKGSDITPILIEKEKKKLERIKEAYAAGIDTLEEYRSNKEKILKAIEELEKNKKSSVINKEDMHKKLSATIRQSLDILEDPNCSESLKNITLRSFVRQIVYAKKTQSIEILYQV

SEQ ID NO: 7376 - protein, 474 aa, Unknown
  Description of Unknown: Integrase B7377 sequence
  PTHR30461:SF3,IPR036162,PS51737,IPR011109,PTHR30461, PS00397,PF00239,G3DSA:1.10.10.2600,IPR006119,SSF53041, cd00338,SM00857,IPR025827,IPR038109,PS51736, IPR006118,PF13408,G3DSA:3.40.50.1390,PF07508,Coil
MQKRMAALYVRVSTEDQAELSPDAQKRLLLEYAKKNDLITCEEFIFCESVSGRHAQKRPEFQKMIAMAKQSSHPFDVILVWKFSRFARNQEESIVYKSMLKKDDVEVISISEPLVDGPFGSLIERIIEWMDEYYSIRLSGEVKRGMKEKALRHGYQSTPPLGYKAVGGGKPFVIDEASYAIVSYAMNLYDCENMDETAIARKCNDLGYRTKRGNLFERRSIDRILRNPFYCGTVTWNGMEFEGSHEVRISKERFQERQKLIQARMRPAKSRSVSTCRHWLSGLLKCSICGATLAYTGGGKDGYHYFNCWQYAKGYHRGTSSIPVKKAEEAVIEYFDKILEGADFSYVRKSNCSVNNEVTVDQIHKELSRIDMKSKRIHDAYESGIDSLQEYKENKERLNDDRSKLEFELHNLLHKKKEKFTDKSEVLKEIKSVNDVLKDPDVGYEEKGMLIRTIVDQIVWDKENNKMYFDIIVH

SEQ ID NO: 7377 - protein, 474 aa, Unknown
  Description of Unknown: Integrase B7378 sequence
  PTHR30461:SF3,cd00338,SM00857,G3DSA:1.10.10.2600,IPR036162, PF13408,PS51737,G3DSA:3.40.50.1390,IPR025827,IPR006119, IPR038109,PF07508,IPR011109,SSF53041,PTHR30461, PS51736,Coil,PF00239
MKIAIYTRVSTMEQAEEGYSISEQQDKLKKYCDIKDWKVARVYTDPGFSGSNTNRPSLQQLISDCKNNMFDAVLVYKLDRLSRSQKDTLYLIEDVFNKNGVGFISLSENFDTSTAFGKAMIGILSVFAQLEREQITERMTLGRVGRAKAGKAMGWSNCPFGYTIYKEVYEIDPFRAEIVKRIFKDYLAGVSIIKLTQNLNKEGHIGKENNWSYRTVRQVLDNIVYAGYIKYKNEIYPGLHKPIISMSDYKKVQAELKKRKITQAKLHNPRPFRTKYMLSGLMRCGYCNSVLQIATSNLKDGTHLHRYNCPSSRPRKRSTNKRHDFDCGFKFIKKNEIESVVISEIKKLPLNMDKVINNQENKDISKEIKAIKAELQQVEKKQDKMVDLYLLDNINVDELNKKNDELSKQKENLQKRLNSLIDNKNKEKIEDFIKNAKEAKNIDKLDYEKQKVIVRKLISGIKVFNDKVEINWNI

SEQ ID NO: 7378 - protein, 474 aa, Unknown
  Description of Unknown: Integrase B7379 sequence
  cd03768,PTHR30461:SF3,SM00857,G3DSA:1.10.10.2600,IPR036162, PF13408,IPR025827,G3DSA:3.40.50.1390,PS51737,IPR006119, IPR038109,PF07508,SSF53041,IPR011109,PTHR30461, PS51736,Coil,PF00239
MKVAIYTRVSTIEQAEEGYSISEQQDKLKKYCDIKDWKVARVYTDPGFSGSNTNRPSLQQLISDCKNSMFDAVLVYKLDRLSRSQKDTLYLIEDVFNKNGVGFISLSENFDTSTAFGKAMIGILSVFAQLEREQITERMTLGRVGRAKAGKAMSWANCPFGYIIQKEIYEIDPFRAEIVKRIYRDYLSGVSITKITQNLNAEGHIGKNVNWSYRTVRQILGNIVYAGYIKYKNEIYPGLHKPIISMSDYKKVQVELEKRRITQAQLFNPRPFRAKYMLSGLMRCGYCNSVLQIYTTQLKSGVQLHNYKCPSSSPKRSSRYKRHDFDCGFTRVRKNDIESVVISEIKKLPLNMDKVINNQENKDNAKEIKAIKVELQQVEKKQDKIVDLYLLDNINVDELNKKNDELSKQKENLQKRLNSLTDDKKKEKIEDFIKNAKEAKDIDKLDYEKQKVIVRNLISGIKVFNDKVEINWNI

SEQ ID NO: 7379 - protein, 474 aa, Unknown
  Description of Unknown: Integrase B7380 sequence
  PTHR30461:SF3,SM00857,G3DSA:1.10.10.2600,IPR036162,PF13408, PS51737,IPR025827,G3DSA:3.40.50.1390,IPR006119,IPR038109, PF07508,IPR011109,SSF53041,PF00239,PTHR30461, PS51736,Coil,cd00338
MKVGIYSRVSTQEQAREGYSIGEQVERLKNYCAAKGWILYKTYTDAGFSGANTDRPGMQQLISDVADGKIDMVLVYKLDRLSRSQKDTLFLIEDVFIKNNVNFASITENFDTSTPFGRAMIGILSVFAQLEREQFRERSIMGKDARAKEGLHHGGGAPTGYDYIDGQLIINKEEAELIKEAYRLFLEDDMTMMGIAAKLSVFSEKFKYDHRIRKMLTNPLYAGWTHCRDELYKGQHEAIISQEVFDNVQTKLKIRAENNPHYRNAFNRTSLLAGILWCKKCGARYFKRVRRYEKGSKVYYYNKYQCYSRSSYKNMVRDKSCKNKIWTMDVLDKAVIDEIKALVANPAEVDNIIKLNQSNNNITEKKEFYKKRIKEIEKQMNKLTDLYSIDGIDIDFVAKKITALNTDKKRIESEMNAINEHKPLISAEDAKKRLSGISNILDNGEFTEKVKVITSLINRIEVDDDDIYIYWNFV

SEQ ID NO: 7380 - protein, 474 aa, Unknown
  Description of Unknown: Integrase B7381 sequence
  PTHR30461:SF3,cd00338,SM00857,IPR006118,G3DSA:1.10.10.2600, IPR036162,PS51737,G3DSA:3.40.50.1390,IPR006119,IPR038109, PF07508,SSF53041,IPR011109,PTHR30461,PS00397, PS51736,Coil,PF00239
MKTAAAYIRVSTEDQVEYSPDSQLKAIRDYARKNDMILPEEFIFVDEGISGRKAAKRPEFMKMIGTAKIKPKQFDVILLWKFSRFARNREDSIVYKSMLRKQCGIEVISISEQLGEDKTSILIEALIEAMDEYYSINLAEEVRRGMTEKAQRGEVVSTPPFGYDVKDNVFVPNPETAPVVKMIFNKYLSGRGCLEIAKELNTMGIRTKYGNKWENRGVEYVLRNVVYTGKLTWTPVKSKTRDYKNEATIITQGKHEPIIEQEIFDKVQKMILEKKKLFPKHSRQSSNEFMLKGFLKCSNCGGALVYALNDRVQCNRYSKGTCEVSHSASLIKLNASVINALKSDLETQNFNIYNIKSAEEQKGSDITPMLIEKEKKKLERIKEAYAAGIDTLEEYRSNKEKILKAIEELEKNKKSSVITKEDMHKKLSATIRQSLDILEDPNCSESLKNITLRSFVRQIVYAKKTQSIEILYQV

SEQ ID NO: 7381 - protein, 474 aa, Unknown
  Description of Unknown: Integrase B7382 sequence
  PTHR30461:SF3,IPR036162,PS51737,IPR011109,PTHR30461, PS00397,PF00239,G3DSA:1.10.10.2600,IPR006119,SSF53041, cd00338,SM00857,IPR025827,IPR038109,PS51736, IPR006118,PF13408,G3DSA:3.40.50.1390,PF07508,Coil
MQKRMAALYVRVSTEDQAELSPDAQKRLLLEYAKKNNLITCEEFIFCESVSGRHAQKRPEFQKMIATAKQSSHPFDVILVWKFSRFARNQEESIVYKSMLKKDDVEVISISEPLVDGPFGSLIERIIEWMDEYYSIRLSGEVKRGMKEKALRHGYQSTPPLGYKAVGGGKPFVIDEASYAIVSYAMNLYDCENMDETAIARKCNDLGYRTKRGNLFERRSIDRILRNPFYCGTVTWNGMEFEGSHEVRISKERFQERQKLIQARMRPAKSRSVSTCRHWLSGLLKCSICGATLAYTGGGKDGYHYFNCWQYAKGYHRGTSSIPVKKAEEAVIEYFDKILEGADFSYVRKSNCSVNNEVTVDQIHKELSRIDMKSKRIHDAYESGIDSLQEYKENKERLNDDRSKLEFELHNLLHKKKEKFTDKSEVLKEIKSVNDVLKDPDVGYEEKGMLIRTIVDQIVWDKENNKMYFDIIVH

SEQ ID NO: 7382 - protein, 474 aa, Unknown
  Description of Unknown: Integrase B7383 sequence
  PTHR30461:SF3,cd00338,SM00857,G3DSA:1.10.10.2600,IPR036162, PF13408,IPR025827,PS51737,G3DSA:3.40.50.1390,IPR006119, IPR038109,PF07508,IPR011109,SSF53041,PTHR30461, PS51736,Coil,PF00239
MKIAIYTRVSTMEQAEEGYSISEQQDKLKKYCDIKDWKVARVYTDPGFSGSNVNRPSLQQLISDCKNHMFDAVLVYKLDRLSRSQKDTLYLIEDVFNKNGIDFISLSENFDTSTAFGKAMIGILSVFAQLEREQITERMTLGRVGRAKAGKAMGWSNCPFGYTIYKEVYEIDPFRAEIVKRIFKDYLAGVSIIKLTQNLNKEGHIGKENNWSYRTVRQVLDNIVYAGYIKYKNEIYPGLHKPIISMSDYKKVQAELKKRKITQAKLHNPRPFRTKYMLSGLMRCGYCNSVLQIATSNLKDGTHLHRYNCPSSRPRKRSTNKRHDFDCGFKFIKKNEIESVVISEIKKLPLNMDKVINNQENKDVSKEIKAIKAELQQVEKKQDKMVDLYLLDNINVDELNKKNDELSKQKENLQKRLNSLINNKNKEKIEDFIKNAKEAKNIDKLDYEKQKVIVRKLISGIKVFNDKVEINWNI

SEQ ID NO: 7383 - protein, 474 aa, Unknown
  Description of Unknown: Integrase B7384 sequence
  PTHR30461:SF3,SM00857,G3DSA:1.10.10.2600,IPR036162,PF13408, IPR025827,PS51737,G3DSA:3.40.50.1390,IPR006119,IPR038109, PF07508,SSF53041,IPR011109,PF00239,PTHR30461, PS51736,Coil,cd00338
MKVGIYSRVSTQEQAREGYSIGEQVERLKNYCAAKGWILYKTYTDAGFSGANTDRPGMQQLISDVADGKIDMVLVYKLDRLSRSQKDTLFLIEDVFIKNNVNFASITENFDTSTPFGRAMIGILSVFAQLEREQFRERSIMGKDARAKEGLHHGGGAPTGYDYIDGQLIINKEEAELIKEAYRLFLEDDMTMMGIAAKLSVFSEKFKYDHRIRKMLSNPLYAGWTHCRDELYKGQHEAIISQEVFDKVQTKLKIRAENNPHYRNAFNRTSLLAGILWCKKCGARYFKRVRRYEKGSKVYYYNKYQCYSRSSYKNMVRDKSCKNKIWTMDVLDKAVIDEIKALVANPAEVDNIIKLNQSNNNITEKKEFYKKRIKEIEKQMNKLTDLYSIDGIDIDFVAKKITALNTDKKRIESEMNAINEHKPLISAEDAKKRLSGISNILDNGEFTEKVKVITSLINRIEVDDDDIYIYWNFV

SEQ ID NO: 7384 - protein, 474 aa, Unknown
  Description of Unknown: Integrase B7385 sequence
  PTHR30461:SF3,SM00857,G3DSA:1.10.10.2600,IPR036162,PF13408, IPR025827,G3DSA:3.40.50.1390,PS51737,IPR006119,IPR038109, PF07508,IPR011109,SSF53041,PTHR30461,Coil, PS51736,cd00338,PF00239
MKVGIYSRVSTQEQAREGYSIGEQVERLKNYCAAKGWILYKTYTDAGFSGANTDRPGMQQLISDVADGKIDMVLVYKLDRLSRSQKDTLYLIEDVFIKNNVNFASITENFDTSTPFGRAMIGILSVFAQLEREQFRERSIMGKDARAKEGLHHGGGAPTGYDYIDGQLIINKEEAELIKEAYRLFLEDDMTMMGIAAKLSVFSEKFKYDHRIRKMLTNPLYAGWTHCRDELYKGQHEAIISQEVFDKVQTKLKIRAENNPHYRNAFNRTSLLAGILWCKKCGARYFKRVRRYEKGSKVYYYNKYQCYSRSSYKNMVRDKSCKNKIWTMDVLDKAVIDEIKALVANPAEVDNIIKLNQSNNNITEKKEFYKKRIKEIEKQMNKLTDLYSIDGIDIDFVAKKITALNTDKKRIETEMNAINEHKPLISAEDAKKRLSGISNILDNGEFTEKVKVITSLINRIEVDDDDIYIYWNFV

SEQ ID NO: 7385 - protein, 474 aa, Unknown
  Description of Unknown: Integrase B7386 sequence
  PTHR30461:SF3,SM00857,G3DSA:1.10.10.2600,IPR036162,PF13408, PS51737,G3DSA:3.40.50.1390,IPR025827,IPR006119,IPR038109, PF07508,SSF53041,IPR011109,PF00239,PTHR30461, PS51736,Coil,cd00338
MKVGIYSRVSTQEQAREGYSIGEQVERLKNYCAAKGWILYKTYTDAGFSGANTDRPGMQQLISDVADGKIDMVLVYKLDRLSRSQKDTLFLIEDVFIKNNVNFASITENFDTSTPFGRAMIGILSVFAQLEREQFRERSIMGKDARAKEGLHHGGGAPTGYDYIDGQLIINKEEAELIKEAYRLFLEDDMTMMGIAAKLSVFSEKFKYDHRIRKMLTNPLYAGWTHCRDELYKGQHEAIISQKVFDKVQTKLKIRAENNPHYRNAFNRTSLLAGILWCKKCGARYFKRVRRCEKGSKVYYYNKYQCYSRSSYKNMVRDKSCKNKIWTMEVLDKAVIGEIKALVANPAEVDNIIKLNQSNNNITEKKEFYKKRIKEIEKQMNKLTDLYSIDGIDIDFVAKKITALNTDKKRIESEMNAINEHKPLISAEDAKKRLSGISNILDNGEFTEKVKVITSLINRIEVDDDDIYIYWNFV

SEQ ID NO: 7386 - protein, 474 aa, Unknown
  Description of Unknown: Integrase B7387 sequence
  PTHR30461:SF3,IPR036162,PS51737,IPR011109,PTHR30461, PS00397,PF00239,G3DSA:1.10.10.2600,IPR006119,SSF53041, cd00338,SM00857,IPR025827,IPR038109,PS51736, IPR006118,PF13408,G3DSA:3.40.50.1390,PF07508,Coil
MQTAAAYVRVSTEEQVEYSPDSQIKAIQKYAKDHDMILPQEFIFADEGISGRKALNRPAFQRMIGLAKTKPRPFDVILLWKFSRFARNREDSIVYKSMLRKQCGVDVISVSEQLGEDKTSILIEALLEAMDEYYSINLSEEVKRGMQEKFNRGEVTARPPLGYAMVEGKYVIQPEGAEIVRRIYTEYLAGVGQRAIARELTASDVRTKKGFNFDQTKIQYILTNPVYTGKVRRKIDGVMQVVPGLHEPIIDQETFDRAQERRREVERIYGKYARTEGNERMLKGILRCGNCGGAMVAKENGARMQCAAYGGGACHQSHSIGTHLAEAAILGKLREDLQMGVVGIEIAPPPERHQKREEGLAAAMLKKEQKKLERAKEAYTAGVDTLQEYKEQKAKIQARILELEEQIEACQHTPEQQSLEIVKRIQAGLAILEDPDASGELKNKTLRGLVESIIFHRQDREHSHFEIIYRDPFA

SEQ ID NO: 7387 - protein, 474 aa, Unknown
  Description of Unknown: Integrase B7388 sequence
  PTHR30461:SF3,cd00338,SM00857,G3DSA:1.10.10.2600,IPR036162, PF13408,PS51737,G3DSA:3.40.50.1390,IPR025827,IPR006119, IPR038109,PF07508,IPR011109,SSF53041,PTHR30461, PS51736,Coil,PF00239
MQRTVIYARFSSDMQREESIDAQVRACKAYAKSKGYTVVKEYVDEAKSGRSTLTRDAYNQMMADAMENKFDVIIFHKIDRNSRNELNYFIFKDKLEKLGIRYEYAAQPIDAATAEGQMTETVMVGMAAYYSRNLAKETKKGMNENAYKAIFNGGYAPLGYKIVDKHYVIDEKEAEAVRLIFNLYLDGTGYGEICLALAAHGYTTRSGKNFPKNSLHDILRNERYMGTYTFNRVPKTKRRNSHSYARPNDFISIPDAIPAIVSKETFLAAQEKMLLNKKRKGGAYTAKRDYLLSGKFFCGYCGSAMQGYSCCTRGNMYYYYSCARKDRVPADRCKEKMIRAEVIEHWIMSTLEREIFSDAGIQRVADSMSTAFGNANKEVKNATTVLLQRKAAAERKLNNLYQVIEDGDADEFDMQRLKKAKEELRNINNEICETAVKSAPDIDTSKIISLLKNMREEIFAKKIATTQNKRLNCL

SEQ ID NO: 7388 - protein, 474 aa, Unknown
  Description of Unknown: Integrase B7389 sequence
  PTHR30461:SF3,SM00857,G3DSA:1.10.10.2600,IPR036162,PS51737, G3DSA:3.40.50.1390,IPR006119,IPR038109,PF07508,SSF53041, IPR011109,PTHR30461,PS51736,cd00338,PF00239
MKKTVTEINPKYAKPKKETAKSKLNVAAYCRVSTESDKQMNSLANQKEYFEKLIKSHEDWNFVDIYYDEGISGTSLKKRDGFNKMIADALAGKIDMIVVKSISRFSRNTVDALQTIRNLRNHDIRIFFEKESIDSNDIKSEFMLTIMSSLAQEESQSLSENVKWGKRKIAQKGLVHIPYSNVLGFQQKGKYRIEIDREQAKTVVLIYDMYLHGKTTGEIIKKLIENGTSTPTGLEASHWCNTAILSILRNEKYCGDVILQKTYTKDFLNHKKCINDDVFPKYYVKNNHEEIIPRATWEYTQELLEKYSKRSVNVRYGELIFCSACEHKYRRFHRYHRYYEETILSYRCLGKYDKSTNCNNITLFEKQLDELYHETVLQLLSIYKKELLEYFKLTIPKVIKGKRKSNRIIKLLDNMISFIQSDYEYYSLHILIKNILVHPNKTLEFTTLDGNIIKISIPKYRLVDHYGRKKTSGN

SEQ ID NO: 7389 - protein, 474 aa, Unknown
  Description of Unknown: Integrase B7390 sequence
  PTHR30461:SF3,cd00338,SM00857,G3DSA:1.10.10.2600,IPR036162, PF13408,IPR025827,PS51737,G3DSA:3.40.50.1390,IPR006119, IPR038109,PF07508,SSF53041,IPR011109, PTHR30461,PS51736,Coil,PF00239
MKIAIYTRVSTMEQAEEGYSISEQQDKLKKYCDIKDWKVARVYTDPGFSGSNTNRPSLQQLISDCKNSMFDAVLVYKLDRLSRSQRDTLYLIEDVFNKNGVGFISLSENFDTSTAFGKAMIGILSVFAQLEREQITERMTLGRVGRAKAGKAMGWSNCPFGYTIHKEVYEIDPFRAEIVKRIFKDYLAGVSIIKLTQNLNKEGHIGKENNWSYRTVRQVLDNIVYAGYIKYKNEIYPGLHKPIISISDYKKTQAELKKRKITQAELHNPRPFRTKYMLSGLMRCGYCNSVLQIATSNLKDGTHLHRYNCPSSRPRKRSTNKRHDFDCGFKFIKKNEIESVVISEIKKLPLNMDKIINNQGNKDVSKEIKAIKAELQQIDKKQDKMVDLYLLDNINVDELNKKNDELSKQKENLQKRLNSLIDNKNKEKIEDFIKNAKEAKNIDKLDYEKQKVIVRKLISDIKVFNDKVEINWNI

SEQ ID NO: 7390 - protein, 474 aa, Unknown
  Description of Unknown: Integrase B7391 sequence
  PTHR30461:SF3,SM00857,IPR006118,G3DSA:1.10.10.2600,IPR036162, PS51737,G3DSA:3.40.50.1390,Coil,IPR006119,IPR038109, PF07508,IPR011109,SSF53041,PTHR30461,PS00397, PS51736,cd00338,PF00239
MKTAAAYIRVSTEDQVEYSPDSQLKAIRDYARKNDMILPEEFIFVDEGISGRKAAKRPEFMKMIGTAKIKPKQFDVILLWKFSRFARNREDSIVYKSMLRKQCGIEVISISEQLGEDKTSILIEALIEAMDEYYSINLAEEVRRGMTEKAQRGEVVSTPPFGYDVKDNVFVPNPETAPIVKMIFNKYLSGRGCLEIAKELNTMGIRTKYGNKWENRGVEYVLRNVVYTGKLTWTPVKSKTRDYKNEATIITQGKHEPIIEQEIFDKVQEMILEKKKLFPKHSRQSSNEFMLKGFLKCSNCGGALVYALNDRVQCNRYSKGTCEVSHSASLSKLNASVINALKSDLETQNFNIYNIKSAEEQKGSDITPMLIEKEKKKLERIKEAYAAGIDTLEEYCSNKEKILKAIEELDKNKKSSVITKEDMHKKLSATIRQSLDILEDPNCSESLKNITLRSFVRQIVYAKKTQSIEILYQV

SEQ ID NO: 7391 - protein, 474 aa, Unknown
  Description of Unknown: Integrase B7392 sequence
  PTHR30461:SF3,cd00338,SM00857,G3DSA:1.10.10.2600,IPR036162, PF13408,IPR025827,G3DSA:3.40.50.1390,PS51737,IPR006119, IPR038109,PF07508,IPR011109,SSF53041,PTHR30461, PS51736,Coil,PF00239
MKVAIYTRVSTIEQAEEGYSISEQQDKLKKYCDIKDWKVARVYTDPGFSGSNVNRPSLQQLISDCKNHMFDAVLVYKLDRLSRSQKDTLYLIEDVFNKNGIDFISLSENFDTSTAFGKAMIGILSVFAQLEREQITERMTLGRVGRAKAGKAMGWSNCPFGYTIYKEVYEIDPFRAEIVKRIFKDYLAGVSIIKLTQNLNKEGHIGKENNWSYRTVRQVLDNIVYAGYIKYKNEIYPGLHKPIISMSDYKKVQAELKKRKITQAKLHNPRPFRTKYMLSGLMRCGYCNSVLQIATSNLKDGTHLHRYNCPSSRPRKRSTNKRHDFDCGFKFIKKNEIESVVISEIKKLPLNMDKVINNQENKDVSKEIKAIKAELQQVEKKQDKMVDLYLLDNINVDELNKKNDELSKQKENLQKRLNSLINNKNKEKIEDFIKNAKEAKNIDKLDYEKQKVIVRKLISGIKVFNDKVEINWNI

SEQ ID NO: 7392 - protein, 474 aa, Unknown
  Description of Unknown: Integrase B7393 sequence
  PTHR30461:SF3,IPR036162,PS51737,IPR011109,PTHR30461, PS00397,PF00239,G3DSA:1.10.10.2600,IPR006119,SSF53041, cd00338,SM00857,IPR025827,IPR038109,PS51736, IPR006118,PF13408,G3DSA:3.40.50.1390,PF07508,Coil
MQKRMAALYVRVSTEDQAELSPDAQKRLLLEYAKKNDLITCEEFIFCESVSGRHAQKRPEFQKMIAMAKQSSHPFDVILVWKFSRFARNQEESIVYKSMLKKDDVEVISISEPLVDGPFGSLIERIIEWMDEYYSIRLSGEVKRGMKEKALRHGYQSTPPLGYKAVGGGKPFVIDEASYAIVSYAMNLYDCENMDETAIARKCNDLGYRTKRGNLFERRSIDRILRNPFYCGTVTWNGMEFEGSHEVRISKERFQERQKLIQARMRPAKSRSVSACRHWLSGLLKCSICGATLAYTGGGKDGYHYFNCWQYAKGYHRGTSSIPVKKAEEAVIEYFDKILEGADFSYVRKSNCSVNNEVTVDQIRKELSRIDMKSKRIHDAYESGIDSLQEYKENKERLNDDRSKLEFELHNLLHKKKEKFTDKSEVLKEIKSVNDVLKDPDVGYEEKGMLIRTIVDQIVWDKENNKMYFDIIVH

SEQ ID NO: 7393 - protein, 474 aa, Unknown
  Description of Unknown: Integrase B7394 sequence
  PTHR30461:SF3,SM00857,G3DSA:1.10.10.2600,IPR036162,PF13408, PS51737,G3DSA:3.40.50.1390,IPR025827,IPR006119,IPR038109, PF07508,SSF53041,IPR011109,PTHR30461,Coil, PS51736,cd00338,PF00239
MKVGIYSRVSTQEQAREGYSIGEQVERLKNYCAAKGWILYKTYTDAGFSGANTDRPGMQQLISDVADGKIDMVLVYKLDRLSRSQKDTLFLIEDVFIKNNVNFASITENFDTSTPFGRAMIGILSVFAQLEREQFRERSIMGKDARAKEGLHHGGGAPTGYDYIDGQLIINKEEAELIKEAYRLFLEDDMTMMGIAAKLSVFSEKFKYDHRIRKMLTNPLYAGWTHCRDELYKGQHEAIISQEVFDKVQTKLKIRAENNPHYRNAFNRTSLLAGILWCKKCGARYFKRVRRCEKGSKVYYYNKYQCYSRSSYKNMVRDKSCKNKIWTMEVLDKAVIGEIKALVANPAEVDNIIKLNQSNNNITEKKEFYKKRIKEIEKQMNKLTDLYSIDGIDIDFVAKKITALNTDKKRIESEMNAINEHKPLISAEDAKKRLSGISNILDNGEFTEKVKVITSLINRIEVDDDDIYIYWNFV

SEQ ID NO: 7394 - protein, 474 aa, Unknown
  Description of Unknown: Integrase B7395 sequence
  PTHR30461:SF3,cd00338,SM00857,G3DSA:1.10.10.2600,IPR036162, PF13408,IPR025827,PS51737,G3DSA:3.40.50.1390,IPR006119, IPR038109,PF07508,SSF53041,IPR011109,PTHR30461, PS51736,Coil,PF00239
MKIAIYTRVSTMEQAEEGYSISEQQDKLKKYCDIKDWKVARVYTDPGFSGSNTNRPSLQQLISDCKNSMFDAVLVYKLDRLSRSQRDTLYLIEDVFNKNGVGFISLSENFDTSTAFGKAMIGILSVFAQLEREQITERMTLGRVGRAKAGKAMGWSNCPFGYTIHKEVYEIDPFRAEIVKRIFKDYLAGVSIIKLTQNLNKEGHIGKENNWSYRTVRQVLDNIVYAGYIKYKNEIYPGLHKPIISISDYKKTQAELKKRKITQAELHNPRPFRTKYMLSGLMRCGYCNSVLQIATSNLKDGTHLHRYNCPSSRPRKRSTNKRHDFDCGFKFIKKNEIESVVISEIKKLPLNMDKIINNQGNKDVSKEIKAIKAELQQIDKKQDKMVDLYLLDNINVDELNKKNDELSKQKENLQKRLNSLIDNKNKEKIEDFIKNAKEAKNIDKLDYEKQKVIVRKLISGIKVFNDKVEINWNI

SEQ ID NO: 7395 - protein, 474 aa, Unknown
  Description of Unknown: Integrase B7396 sequence
  PTHR30461:SF3,SM00857,G3DSA:1.10.10.2600,IPR036162,PF13408, PS51737,G3DSA:3.40.50.1390,IPR025827,IPR006119,IPR038109, PF07508,SSF53041,IPR011109,PF00239,PTHR30461, PS51736,Coil,cd00338
MNIYYVREKLRNCSIYDIELNVAYYARVSTEKVEQQASIKHQEEHFEELIHSNNRWKFAGSYIDDGISGIHADKREEFQRMLRDAKLGKIDMIITKEISRFARNTLDSIQYTRELLSYGVCVWFQNDGINTIDDDSEFRLTIMAGVAQDEIRKLSSRVKFGHAQSIKNGVVLGHRMYGYSNNQGKLELVPEEADMVRMIFQDYASGISTPRIEKKLWDMGYRSFKGGKINRDVIKNIIRNPKYKGYYCGGKVKVVDMFTKKQEFLPQSEWVMFKDDGSRVPQIIDEATWEKANAYLRERGEAIKSRRTSFKNENIFTGKLFCANDGAPYWMKQHYIRGKEDVRWVCSYKIKNGAASCNSFGLAESELKEVIAELINKSSENIDSILEEYFEILQSSIKNIPDNINEITRLEKQIDLLKQKREKILEYNLDGKISDDEFVSRNKEYVKQIKQTESHIRELQNTKSPEPVEILKNS

SEQ ID NO: 7396 - protein, 474 aa, Unknown
  Description of Unknown: Integrase B7397 sequence
  PTHR30461:SF3,cd00338,SM00857,G3DSA:1.10.10.2600,IPR036162, PF13408,IPR025827,G3DSA:3.40.50.1390,PS51737,IPR006119, IPR038109,PF07508,SSF53041,IPR011109,PTHR30461, PS51736,Coil,PF00239
MLNAVIYARFSSDMQREESIDAQVRACKAYAKSKGYTVVKEYIDEAKSGRSTLTRDAYNQMMADAMENKFDVIIFHKIDRNSRNELNYFIFKDKLEKLGIRYEYAAQPIDAATAEGQMMETVMVGMAAYYSRNLAKETKKGMNENAYKAIFNGGYAPLGYKIVDKRYVIDEKEAEAVRLIFNLYLDGKGYGEICLALAARGYTTRSGKNFPKNSLHDILRNERYMGTYTFNRVPKTKRRNSHSYARPNDFISIPDAIPAIVSKETFLTAQEKMLLNKKRKGGAYTAKRDYLLSGKFFCGYCGSAMQGYSCCTRGNMYYYYSCARKDRVPADRCKQKMIRAEVIEHWIMSTLEREIFSDAGIQRVADSMSTAFGNANKEVKNATTVLLQRKAAAERKLNNLYQVIEDGDADEFDMQRLKKAKEELRNINNEICETTVKSAPDIDTSKIISLLKNMREEIFAKKIATTQNKRLNCL

SEQ ID NO: 7397 - protein, 474 aa, Unknown
  Description of Unknown: Integrase B7398 sequence
  cd00338,SM00857,IPR006118,IPR036162,G3DSA:3.40.50.1390, IPR006119,SSF53041,PTHR30461,PS00397,PS51736, Coil,PF00239
MKIAVAYVRVSTNKQDIRGSKLGQEQEIKNYASKEGYNIVAFFDDTEHGDIANRVGLDDLKKYLRMNDSVKYVIVYHSDRFTRGFQNGIQDLFFLDGLGIKLVSVMEGIQNIEGNYDSLPTIVRMLGAQVEKDKMVQKVTTAMYQYAETARYLGGSIFPWFSVEKGYIDGKRCKIVVQNKDTWDFYRRFFLTMIQSKSIKSTAEKFGLNLNTVQSWLVVPELMGKRSYGKKGKIDKLHNKGRRQDYLITEKIVFPALLTKEEYDKLLYLRHRHRIQVREDIKIYLYSQVLYCGCGGKFEGNFIRKIGKEGKGTLYYRCSKCGKRINAKKLERDLIDRICNDSRLQMLNEVEFRLADLFDEKTEYEKQINILREKEKRVIHLVTDGITSMDVVEAELRALKKQRDHFHSLINKIDKTIQEEAKKEITEDNINMLKELLTLNLPDDDFRISLKEIINLIIRRITIGNTDNKIYITF

SEQ ID NO: 7398 - protein, 474 aa, Unknown
  Description of Unknown: Integrase B7399 sequence
  cd03768,PTHR30461:SF3,SM00857,G3DSA:1.10.10.2600, IPR036162,PF13408,IPR025827,G3DSA:3.40.50.1390, PS51737,IPR006119,IPR038109,PF07508, IPR011109,SSF53041,PTHR30461,PS51736,Coil,PF00239
MKVAIYTRVSTIEQAEEGYSISEQQDKLKKYCDIKDWKVARVYTDPGFSGSNTNRPSLQQLISDCKNSMFDAVLVYKLDRLSRSQKDTLYLIEDVFNKNGVDFISLSENFDTSTAFGKAMIGILSVFAQLEREQITERMTLGRVGRAKAGKAMGWSNCPFGYTIYKEVYEIDPFRAEIVKRIFKDYLAGVSIIKLTQNLNKEGHIGKENNWSYRTVRQVLDNIVYAGYIKYKNEIYPGLHKPIISISDYKKAQAELKRRKITQAKLHNPRPFRTKYMLSGLMRCGYCNSVLQIATSNLKDGTHLHRYNCPSSRPRKRSTNKRHDFDCGFKFIKKNEIESVVISEIKKLPLNMDKIINNQENKDVSKEIKAIKAELQQIEKKQDKMVDLYLLDNINVDELNKKNDELSKQKENLQKRLNSLIDNKNKEKIEDFIKNAKEAKNIDKLDYEKQKVIVRKLISGIKVFNDKVEINWNI

SEQ ID NO: 7399 - protein, 473 aa, Unknown
  Description of Unknown: Integrase B7400 sequence
  IPR036162,PS51737,IPR011109,PTHR30461,PS00397, PF00239,G3DSA:1.10.10.2600,IPR006119,SSF53041,cd00338, SM00857,IPR025827,IPR038109,mobidb-lite,IPR006118, PF13408,G3DSA:3.40.50.1390,PF07508,Coil
MRIGAAYIRVSTDDQLDISPESQLDEIQRYAKAHDILIPEEYIFMERTGRSGKRADNRPEFQRMIATAKEKPQPFEVILVWKFSRFARNQDESTFYKGMLRKKLKIDIESVSEPIMEGMYGRLIEMIIEWQDEFYSYNLGVEVKRGMAKKAELKGYQLVPPLGYAAVGNGKPYVIREDEYKIVEMIFHMYAVDRLDMTAIARQLNASGYLTRRGNPFEKRSIDRIIQNRFYVGTVEWNGFSFEGTHKTRASVTELFEQCQERRKAEFRPMRHRNVSTCKHWLSGLMRCSVCGATLSYTGSGAVPYFTCWKYSKGLHPESCSISVKKMERIVLRSLDGILESGHFEYTPAASASGSPADPSNEIQSQLDRLRHQEERARIAYENEVYTLDEYKESKARLRSEIQRLSDELQRLLEQPAESAPPQKELLDRVRNVRDLLASPSVGFETKGNALRSILKCIVFDRKTEHFDFQYYA

SEQ ID NO: 7400 - protein, 473 aa, Unknown
  Description of Unknown: Integrase B7401 sequence
  cd00338,SM00857,G3DSA:1.10.10.2600,IPR036162,PS51737, G3DSA:3.40.50.1390,IPR006119,IPR038109,PF07508,SSF53041, IPR011109,PTHR30461,PS51736,Coil,PF00239
MTKGSRAAIYARFSSHNQRDESIEIQVDKSREFCVESGLAVVRIYSDYAKTGRNSDRTEFQQMLKDAQKGLFDYVVIYKVTRIMRNRDEMALARIMLHKAGVEILYAGETLGEGSTRVLHLGMLEVLAEYESGVDSERIRDGIQKNAQRGMASGQRLYGWNVVDDHFVINEREAAVMHKMKNMLLSGSTVADIQRAVKTERSRRGRPFSHGSIKKLLMREQNCGTYNYAGVRIPNGMPAIWSRSEQEEINNVLNGRGHKHRVEDGERVYALSGKMFCCECGRWYVGTSGTGKSGKVYHYYRCPKCRRTFRRDVIEDAVTDTILESIKDPKVRERIITTLEMMIAETAEYDEPKDSERIKAEIKRIDASFERIWQAIEDGFAPPGGKERVDELKARQGELKDELATALEAESAEALTIDDYIDWLDTLNANSDPYDIIDTFIRFIQIDGDEVQIYFSFDNWDDDFMPTKKTNPR

SEQ ID NO: 7401 - protein, 473 aa, Unknown
  Description of Unknown: Integrase B7402 sequence
  cd00338,SM00857,G3DSA:1.10.10.2600,IPR036162, PF13408,IPR025827,G3DSA:3.40.50.1390,PS51737, IPR006119,IPR038109,PF07508,SSF53041, IPR011109,PTHR30461,PS51736,Coil,PF00239
MKNDVAIYLRKSREDDELKEETLARHETMLLDYCKRNNLNIVKIYKEVVSGESIANRPQMQRLLDDVSRGLYAGVVCIEIERLSRGNQIDQVEILEIFKSSGTKIYTLNKIYDLSKEDIDEEFLEFALFMSRREYKIINRRLQRGRNQSRQEGYYIGSILPFGFDKIRGERGYILVPNDNAKVVEFIFNQYLDGVNVATITNYLNDNGIKPQNHNKIWTPPTVRNVLKNKLYIGMINTNNRGGTVKGKHEPIIDELTFNRVQEQLAKTPKVTNRRKLSNPLAGLVYCSECGRTMIRKINALKFEYITCPSLKCNTRSLKLETLESILLDELKKELKGFNYFLDNYGEQIKTEKEKVAVELAILETELEKKLNMIETACEMLEAGIYTKELFTRRISVLEDDIKAMKENISNIKNTPLEDDTRAYKAIPILEKVLENYNVLDAKEKNLLLKSIVERIDFTRLEDDTSLNITLLL

SEQ ID NO: 7402 - protein, 473 aa, Unknown
  Description of Unknown: Integrase B7403 sequence
  PTHR30461:SF3,IPR036162,PS51737,IPR011109,PTHR30461, PS00397,PF00239,G3DSA:1.10.10.2600,IPR006119,SSF53041, cd00338,SM00857,IPR025827,IPR038109,PS51736, IPR006118,PF13408,G3DSA:3.40.50.1390,Coil
MSYKNVICTAHFCFREGILIVECVAYIRVSTEKQAEEGHGLASQRRDIKNYCRKNGLLISEWYEDDGYTGANMNRPALQRLINDCAKKRVQCVVAFKLDRLSRSMVDGIYLIERIFQPNNIQFRCVHDSVSYDSPMEQAYTQMMAVFAQLDKNTMLLRMRGGMLERVKAGYWAGGGNLPYCYSYDKEKGILVPIPEKAEKARMALDLFIEGYSDVKIQHMLGFKTELTVRKLLTSVTNIGLIPYKGEVYQGLHEPIFDKDKFELAQALRKSRRKAKTVCQAEANLLTGLCYCGVCGCKMRYQKWGKQGRKLYCCSRNKDLYYLPNYNADCDNKTFSAEDVEKQVEEKILQISLNVSDYRPKGTENKEEVLQSQLKNEEQKLKRLYMLYAEGNDAIVETIKEVETVVSNIKEQLNILVEEKNDIKSKDLVYENIKKLADIWEYADKPKKNKILKSIISKIVIGKGNIEIQLKTF

SEQ ID NO: 7403 - protein, 473 aa, Unknown
  Description of Unknown: Integrase B7404 sequence
  SM00857,IPR006118,G3DSA:1.10.10.2600,IPR036162,PF13408, PS51737,G3DSA:3.40.50.1390,IPR025827,IPR006119,IPR038109, PF07508,IPR011109,SSF53041,PF00239,PTHR30461, PS00397,Coil,cd00338
MRIGAAYIRVSTDDQLDISPESQLDEIQRYAKSHDILIPEEYIFMERTGRSGKRADNRPEFQRMIATAKEKPQPFEVILVWKFSRFARNQDESTFYKGMLRKKLKIDIESVSEPIMEGMYGRLIEMIIEWQDEFYSYNLGVEVKRGMAKKAELKGYQLVPPLGYAAVGNGKPYVIREDEYKIVEMIFHMYAVDRLDMTAIARQLNASGYLTRRGNPFEKRSIDRIIQNRFYVGTVEWNGFSFEGTHETRASVTELFEQCQERRKAEFRPMRHRNVSTCKHWLSGLMRCSVCGATLSYTGSGAVPYFTCWKYSKGLHPESCSISVKKMERIVLRSLDGILESGHFEYTPAARASGSPADPSNEIQSQLDRLRHQEERARIAYENDAYTLDEYKESKARLRSEIQRLSDELQRLLEQPAESAPPQKELLDRVRNVRDLLASPSVGFETKGNALRSILKCIVFDRKTEHFDFQYYA

SEQ ID NO: 7404 - protein, 473 aa, Unknown
  Description of Unknown: Integrase B7405 sequence
  cd03768,SM00857,IPR006118,G3DSA:1.10.10.2600,IPR036162, PF13408,IPR025827,G3DSA:3.40.50.1390,PS51737,IPR006119, IPR038109,SSF53041,IPR011109,PTHR30461,PS00397, PS51736,Coil,PF00239
MKAASYVRVSTLEQKKNGYSIDGQKERIESYCKAMGYDLVQNFSDDGFSGSTTNRPALQKLLNTVKAHLVDIVIIYRLDRLSRDVRDTLNLVDFFAEHNVKLYSLSEQIDLSSAFGRASLTMSATFSAMEREVVVERLSSGKWDRVKNGEMLGMGKCGAPFGYKLLKEKKAFEIVPEEAEIVRDLFDLYVNQDFTIRKLYPYARAKYNHPFFKNPMCCRDILKRSMYAGFFTYGGELFKGKNFEPIIPYSLYLQAQDKMEKNRAGRQHDTSPYLLTGLLYCGECGNRYVGKRSKRYSALVNGGKNFHEDTYYGCAARIKRDRHYTPVKCTNMIYKSSALDSLIEPQIKQFDFQDFAVETVSENVFGNILEEISELENKNDKLLDLYLDEKITKDTFEKRSREIKDSIDKKKIILEDEKNKLIDKPLITINYLKEKQLNYDNLTQKEKRQFLRLLIKRIILQKNGEIIIKWRVK

SEQ ID NO: 7405 - protein, 473 aa, Unknown
  Description of Unknown: Integrase B7406 sequence
  cd03768,SM00857,IPR006118,G3DSA:1.10.10.2600,IPR036162, PF13408,IPR025827,G3DSA:3.40.50.1390,PS51737,IPR006119, IPR038109,SSF53041,IPR011109,PTHR30461,PS00397, PS51736,Coil,PF00239
MKAASYVRVSTLEQKKNGYSIDGQKERIESYCKAMGYDLVQNFSDDGFSGSTTNRPALQKLLNTVKAHLVDIVIIYRLDRLSRDVRDTLNLVDFFAEHNVKLYSLSEQIDLSSAFGRASLTMSATFSAMEREVVVERLSSGKWDRVKNGEMLGMGKCGAPFGYKLLKEKKAFEIVPEEAEIVRDLFDLYVNQDFTIRKLYPYARAKYNHPFFKNPMCCRDILKRSMYAGFFTYGGELFKGKNFEPIIPYSLYLQAQDKMEKNRAGRQHDTSPYLLTGLLYCGECGNRYVGKRSKRYSALVNGGKNFHEDTYYGCAARIKRDRHYTPVKCTNLIYKSSALDSLIEPQIKQFDFQDFAVETVSENVFGNILEEISELENKNDKLLDLYLDEKITKDTFEKRSREIKDSIDKKKIILEDEKNKLIDKPLITINYLKEKQLNYDNLTQKEKRQFLRLLIKRIILQKNGEIIIKWRVK

SEQ ID NO: 7406 - protein, 473 aa, Unknown
  Description of Unknown: Integrase B7407 sequence
  PTHR30461:SF3,SM00857,G3DSA:1.10.10.2600,IPR036162,PF13408, IPR025827,G3DSA:3.40.50.1390,PS51737,IPR006119,IPR038109, PF07508,IPR011109,SSF53041,PTHR30461,PS51736, cd00338,PF00239
MARSITVIPARQISTAEFGTAQTVQKLRMAAYCRVSTDQEEQLLSYENQVNYYTNYISENPLYKYARTYADEGISGTNTKKRDEFNRMIADCRAGKIDMIITKSISRFARNTLDCLNYVRELKDLGIGIIFEKENINTLDAKGEVLLTILSSLAQDESRSISENCTWGIRRRFETGKHKMSTKRFLGYDADESSGKLIINRKQAPIVVRLYQEFLDGKTADYIKRIFEREGIKNWDGGTKWQATTLMSMLENEKYKGDALLQKGYTVDFLTKKRTQNKGEIQMYYVEDDHEAIISKRIWECVQLEAERRKKYLEEHGTNSYSRRPENNPFASKIVCGSCNKVFAKKGWRSSRGIGWKIWQCSERYKVKGVMGCSNRHVEEETLVKAYLMAWNALVENREAFMERWKEQMQSENLLEGYRAEKFIEYTDGVQPLTEMDTDFMLKTLDYIKVFENGTLLVVFLDGTEIECRSEKE

SEQ ID NO: 7407 - protein, 473 aa, Unknown
  Description of Unknown: Integrase B7408 sequence
  SM00857,IPR006118,IPR036162,PF13408,IPR025827, PS51737,G3DSA:3.40.50.1390,IPR006119,SSF53041,IPR011109, PTHR30461,PS00397,PS51736,cd00338,PF00239
MVKKVLRCAIYIRVSTAEQAMHGKSLEAQLSYLTQYAKDHDMVVAGVYADQGKTARKNLRDRKEIKNLLSSVKRNEIDVIIFWKMDRWFRNVGDFYKVQDILDAHGARWIATAEPNMNMETREGRLNVNIMLSINQNETDTTSERICFVNEASVRLGKAISGAQPYGYKVVRNESGAKVVVKDPERELYVEEFFRHFLVHQSKRGAFLYLTEKYGPVITMSQVITMCKNTMYFGAYRENPNYCPAYITFDQYIQIREINRKNIKVYQSNLGTGEVYLFCGLIHCPICGRPMSANRITKNSHTGKPLKDPLRYYRCQNWCYKKSCTYSKIASEATIEKYLLGHIDEEKERYRQREEILLTRISAQAPVEKKKPSKEKLLAELDRLNNMYQKGRISDEKYDSEYERISSDIKAMSIETLPAPKRSYKELETVLHSGWHEMYEHLSRQNKQAFWRSIIKEIHLNADNSFVNFIDFL

SEQ ID NO: 7408 - protein, 473 aa, Unknown
  Description of Unknown: Integrase B7409 sequence
  cd03768,PTHR30461:SF3,SM00857,G3DSA:1.10.10.2600, IPR036162,PS51737,G3DSA:3.40.50.1390,IPR006119, IPR038109,PF07508,IPR011109,SSF53041, PTHR30461,PS51736,Coil,PF00239
MYKIAIYVRKSVKSEKNSVSIDTQIKVIKDYFLKEGEKEFEIFIDDGFSGGNTNRPQLQEMLDRALKGEFKTVACYKLDRMARNTLDFLNIFNMLKEKGIDLVCVLDSYDARTPAGKMMMTLLASMSEMERENIKTRVTSSMINLAKQGRWTGGKIPVGYKVVIIENGKYLSLENKNVIKEVFNNFLNGLSIRQIAKKNNCSTIRIREMLKNITYLKSSISANEYLSLNGYEVYGEPNGKGYLPYGKRSNKLTTIAAVSRHEGVIDLPTFAKVQDVLKGYGGHVAPRISTLTYLAQLVYCKCGRLMIVTCGTKRKDGTFLVYFRCKNKGCSRLIRADLLEDDIFTLLSSGNPIYAENEENKDNTKKINTLRNEIKEKEIILNGLIDKLALASDKLTPVILSKAENIEKDIQDLSNKLNSLEIKKVQKVDNSKREDIRKFFVENFKNLSLEEKQRYIRKVIHKIVIDENEIVIY

SEQ ID NO: 7409 - protein, 473 aa, Unknown
  Description of Unknown: Integrase B7410 sequence
  PTHR30461:SF3,IPR036162,PS51737,IPR011109,PTHR30461, PS00397,PF00239,G3DSA:1.10.10.2600,IPR006119,SSF53041, SM00857,IPR025827,IPR038109,PS51736,cd03768, IPR006118,PF13408,G3DSA:3.40.50.1390,PF07508,Coil
MQNKVAIYVRVSTSSQAEEGYSIDEQKAKLEAYCEIKDWKIYDTYIDGGFSGANTQRPELERLISDAKRKKIDIVLVYKLDRLSRSQKDTLFLIEDVFTKNDVSFISLQENFDTSTPFGKASIGMLSVFAQLEREQIKERMMLGKEGRAKNGKTMSWTTIPFGYDYSKETGILSVNPTQALIVNRIFTEYLNGKSVVKIIRDLNAEGHVGRKRPWGETITKYLLKNETYLGKVKYKDKVYEGQHEPIITQELFDLVQLEVEKRQISALEKYNNPRPFRAKYMLSGLMKCGYCGASLGLKYTRKDKNGISHHKYQCRNRHSKDLEKRCESGWYSQEELEKDVIKELERLKLNPKYRNKTLAKKEETIKVEEIKKQLERINKQVSKLTELYLDEIITRKELDEKNAKIKTERQFLEEQLENQKSNVMSIRKRKLTRLLKDFDVEKMSYEEASKIVKTIIKEIVVTKDDMTLTLDF

SEQ ID NO: 7410 - protein, 473 aa, Unknown
  Description of Unknown: Integrase B7411 sequence
  PTHR30461:SF3,SM00857,G3DSA:1.10.10.2600,IPR036162,PF13408, IPR025827,G3DSA:3.40.50.1390,PS51737,IPR006119,IPR038109, PF07508,SSF53041,IPR011109,PTHR30461,Coil, PS51736,cd00338,PF00239
MKVALYSRVSTQEQAINGYSIDEQQERMNKYCEAMGWQAYKEYTDAGYSGATTARPALQKMIKDVEAGKVDKVLVYKLDRLSRSQLDTLYLIEKIFLANNVDFISMSENFDTATPFGRAMIGILAVFAQLEREQIKERMMMGKEARAKKGLYHGSNSYPIGYDYVDGQLIPLDFEAMQIRIIFEKYANGDSPMTIAEYLNGNGYTTRYGRWNDTTIRKILKRKTYIGYVKYHDEWFEGQHEAIISRELFDEVQEIYNKKSRDYKYNKRRDGSVNSYLGGLLHCKYCGRKYLKVLGTSTKNGVKYKIAYYKCYSRAHRKRLLKEDPHCKNKTWRMDELDNLILGEIRKLVLDPESFDDEEEQSSNQNVEILKNEIVKIEKQIDKLMDLYSIGGMSIEAVQDKIHALDDQKKKLELQLESFEKETKMSKGDAKKIITSFGDLIDEGDFEDIRWLITTLIEKIVIDGEDLEIYWKF

SEQ ID NO: 7411 - protein, 473 aa, Unknown
  Description of Unknown: Integrase B7412 sequence
  PTHR30461:SF3,SM00857,G3DSA:1.10.10.2600,IPR036162,PS51737, G3DSA:3.40.50.1390,IPR006119,IPR038109,PF07508,SSF53041, IPR011109,PF00239,PTHR30461,PS51736,Coil, cd00338
MRIAIYVRKSVAGDDRSISLESQKELCTNYFKGENTFEVFQDRGISGKNTDRPAFQELSRRVSNGEFDIVVCYKFDRIARNTLDFLTTLELFKSYNTDLVSITEGYDPSTPAGKMMVTLLASLAEMERENIKARVIDSMNQLAREGRYSGGPTPFGYEIDKTPYGSYLKLIDGETISYIFNSFLKGKSANDLGRELKMTSKGIKLILRNPLYMKSSQLANEYLGNIGYEVISYEDRMGNGYLTYGKKGSSNSNKIAVISKHEAVISDSDWIQVQVRLKTYDGHRAPRISSKTWLAQMVKCTHCNKYMKVRTTNTGVYLMCPNNCMKKYINVSKAENLILDELKKFTLDEDTINDNSKENNLLSEINVITKQIDEKDKLIIGLVDKLALANESLANRLVKTIEAYETELNNLKNIKTQKLIAMENKKSNHLFNNEKEFNDFIDSFNKLDMKEKQQSIRNIIDYIEFDGDYFTIY

SEQ ID NO: 7412 - protein, 473 aa, Unknown
  Description of Unknown: Integrase B7413 sequence
  IPR036162,PS51737,IPR011109,PTHR30461,PS00397, PF00239,G3DSA:1.10.10.2600,IPR006119,SSF53041,cd00338, SM00857,IPR025827,IPR038109,PS51736,IPR006118, PF13408,G3DSA:3.40.50.1390,PF07508,Coil
MKTAAAYIRVSTDEQTEHSPDSQLKEIRNYADRHGLILDPSHIYIDAGVSGRKAKKRPQFLKMIATAKGEPSPFSVVLVWKFSRFARNQEESIVYKSLLNRECGVEVVSITEETQDKMFGSLVERMIEWMDEFYSIRLGEEVRTKMTYVAETGKIQTAPSFGFSKNSEGEYVLNPDEAEWVLFMAESLLQKKSLRWIAKELNSHGVRTHRGNKFEPRTVRYILKNLTNTGASHWTPNREDHENEYHPYSDSTIVVDGVCDHIYTREYYDKIIAELDTRAENRKKYDKPDTVKKHWLSGFLKCSNCGSTMVYSLANKGFQCYKYGKSLCDVSHFISASKIEESVIQAIKNVTVNDKFIKSVTKPPKKADHKKDIRRLEGMLQRAKIAYMEEIDTLEEYAANKERIEKEILKFKKEDEKATAYRPAEDVRRQFAEIVDLLSSDSEDAIKRAALGEIVESIVFSRPNTAIKIYFRL

SEQ ID NO: 7413 - protein, 473 aa, Unknown
  Description of Unknown: Integrase B7414 sequence
  PTHR30461:SF3,IPR036162,PS51737,IPR011109,PTHR30461, PS00397,PF00239,G3DSA:1.10.10.2600,IPR006119,SSF53041, SM00857,IPR025827,IPR038109,PS51736,cd03768, IPR006118,PF13408,G3DSA:3.40.50.1390,PF07508,Coil
MSQDMIVVGYVRVSTEHQLDNYSIDEQTERLKAYCRAKGWILAKIYTDGGFSGGNTNRPALQQMLLDIRNNNINSVIVYKLDRLSRSQKDTLRLIEDEFLANDTDFISISENFDTSTPFGRAMIGILSVFAQLEKDQITERLSMGRTARSKSGLFHGGGQAPFGYDYVDSRLQVNSYQSLQVQEVYQRFLSGQSINSIHLQMKALYGGFWSAAKVLNMLRNSIYIGKVKFAQQEYNGVHEPIISETVFQDVQRLLTAPERDAQKSAAQKTPYRAGYLLSSMIYCGQCGSRYSANHGYYRCYSRSKSNKKYITDPNCQNDHWSIEELDQYVIQSIEDLLSNETLLADIMNSCQQNPVLPVIDRQALENRISEINKQMSNVIDLYQLVHQDGNDIPIEDIVSRIKQLSIEKSRLEAELKNDHTTPDNKRTSFLSTLQNFQEHFHNAPLETQRLIVSGLLESITVDGRKISLKWRI

SEQ ID NO: 7414 - protein, 473 aa, Unknown
  Description of Unknown: Integrase B7415 sequence
  cd03768,PTHR30461:SF3,SM00857,G3DSA:1.10.10.2600,IPR036162, PS51737,G3DSA:3.40.50.1390,IPR006119,IPR038109,PF07508, IPR011109,SSF53041,PTHR30461,PS51736,Coil, PF00239
MYKIAIYVRKSVKSEKNSVSIDTQIKVIKDYFLKEGEKEFEIFIDDGFSGGNTNRPQLQEMLDRALKGEFKTVACYKLDRMARNTLDFLNIFNMLKEKGIDLVCVLDSYDARTPAGKMMMTLLASMSEMERENIKTRVTSSMINLAKQGRWTGGKIPVGYKVVIIENGKYLSLENKNVIKEVFNNFLNGLSIRQIAKKNNCSTIRIREMLKNITYLKSSISANEYLSLNGYEVYGEPNGKGYLPYGKRSNKLTTIAAVSRHEGVIDLPTFAKVQDVLKGYGGHVAPRISTLTYLAQLVYCKCGRLMIVTCGTKRKDGTFLVYFRCKNKGCSRLIRADLLEDDIFTLLSSGNPIYAENEENKDNTKKINTLRNEIKEKEIILNGLIDKLALASDKLTPVILSKAENIEKDIQDLSNKLNSLEIKKVQKVDNSKREDIRKFFVENFKNLSLEEKQRYIRKVINKIVIDENEIVIY

SEQ ID NO: 7415 - protein, 473 aa, Unknown
  Description of Unknown: Integrase B7416 sequence
  SM00857,IPR006118,G3DSA:1.10.10.2600,IPR036162,PF13408, IPR025827,PS51737,G3DSA:3.40.50.1390,IPR006119,IPR038109, PF07508,IPR011109,SSF53041,PF00239,PTHR30461, PS00397,Coil,cd00338
MRIGAAYIRVSTDDQLDISPESQLDEIQRYAKSHDILIPEEYIFMERTGRSGKRADNRPEFQRMIATAKEKPQPFEVILVWKFSRFARNQDESTFYKGMLRKKLKIDIESVSEPIMEGMYGRLIEMIIEWQDEFYSYNLGVEVKRGMAKKAELKGYQLVPPLGYAAVGNGKPYVIREDEYKIVEMIFHMYAVDRLDMTAIARQLNASGYLTRRGNPFEKRSIDRIIQNRFYLGTVEWNGFSFEGMHETKPSVTKLFEQCQERRKAEFRPMRHRNVSTCKHWLSGLMRCSVCGATLSYTGSGAVPYFTCWKYSKGLHPESCSISVKKMERIVLRSLDGILESGHFEYTPAASASGSPANLSNEIQSQLDRLRHQEERARIAYENEVYTLDEYKESKARLRSEIQRLSDELQRLLEQPAESAPPQKELLDRVRNVRDLLASPSVGFETKGNALRSILKCIVFDRKTEHFDFQYYA

SEQ ID NO: 7416 - protein, 473 aa, Unknown
  Description of Unknown: Integrase B7417 sequence
  PTHR30461:SF3,SM00857,IPR006118,G3DSA:1.10.10.2600,IPR036162, PS51737,G3DSA:3.40.50.1390,Coil,IPR006119,IPR038109, PF07508,SSF53041,IPR011109,PTHR30461,PS00397, PS51736,cd00338,PF00239
MKIAAAYVRVSTEDQTELSPTSQIKQIREYAKNHGYIVPDEFVFADEGISGKNTQKRPAFNRMIGLAKTKPKPFECILLWKYSRFARNREDSIVYKSMLRKQLGIDVISISESLGDDKMSILIEALIEAMDEYYSINLAEEVKRGMTERVSRGEAVSVPAYGYDIEEGKYIINEAEAEVVRQIFSDFKNGIGTVTIARNLNAIGIKTKRGKLWENRTVKYILHNPVYIGKIRWNPEEITGLNYEHEKIMLVDGIHEPLLTKELWDSVQEKLSLIKRTRKPREKSNSNPDYMLYGLMRCGTCGGTLTLSCGNGLQCHKYAHGTCDTSHYISLSKANAAVIDLIQHTLENGIFTLTPKKQDVSTQQVAMIDKQIQNEKNKLLRVKEAFEYGVDTLEEYKENKNKILQKISELESSKPVQQTNIDKKKFAQKYLGVIDTLKDDTVSESDKNHILRQFVEKIVLHRPSNEIEIFYHY

SEQ ID NO: 7417 - protein, 472 aa, Unknown
  Description of Unknown: Integrase B7418 sequence
  IPR036162,PS51737,IPR011109,PTHR30461,PS00397, PF00239,G3DSA:1.10.10.2600,IPR006119,SSF53041,cd00338, SM00857,IPR025827,IPR038109,PS51736,IPR006118, PF13408,G3DSA:3.40.50.1390,PF07508,Coil
MSARYAYGYVRVSTDKQEELSPDSQEKLLREYAAKNNIIILKVFFEIGISGRKADKRPEFQKMIGLAKSSDHPVDVILVWKFSRFARNQEESIVYKSLLRKQSNVDVVSVSEPLIDGPFGSLIERIIEWMDEYYSIRLSGEVLRGMKEKATKKGYQMSPPFGYRAVGNGDPYKIDQDEMKIVDFICDEFDYRNSDTTKITRKLNDMGVRTRRGNPFESRSVERILKNPFYYGLVAWNGITFMGTHEVHYSKERFEARMKKIQTTYKPLKRRDVSSCKHWLSGILKCGYCGASLAYNGANRHSPGFQCYKYSKGIHTESCSISEKKVIAALEEYFEKLLSGMDFEYSYHSAETGEKISERESLLSELDKISNREKRIRLAYENEVDTLEEYKRNKERLRKDREDILMQLENLDKNNEDTKTKSDVLKNVQTVYDVIKNDAIDYGTKGIFMRSLVEDIVYDKKNSKLIFHLYIS

SEQ ID NO: 7418 - protein, 472 aa, Unknown
  Description of Unknown: Integrase B7419 sequence
  cd03768,PTHR30461:SF3,SM00857,G3DSA:1.10.10.2600,IPR036162, PF13408,IPR025827,G3DSA:3.40.50.1390,PS51737,IPR006119, IPR038109,PF07508,IPR011109,SSF53041,PTHR30461, PS51736,Coil,PF00239
MNSKRKVAIYSRVSTLHQAEEGYSIGQQIEALTKYCQAMDWVIYDNYSDGGFSGGKLERPAMQKMIQDAESGKFDTVIVYKLDRLSRNVRDTLYLVKDVFNANNVDFVSLQENIDTKSAMGNLFITLLSAIAEFEREQIKERMQLGVKGRAKSGKTTSWATPPFGYKYDTNTQSMTVDHYQAEIVRDMFNKIISGWSIMGITTYMRENYDGKWTHVKVKRILENITYIGKVKYRNEIFEGEHTPILPEELFYKAQKALEERTNKKDNTRPFQGLYMLSHIAKCGYCGTPLKIDTYKPRKDGTRKRTYTCINKNPRRTKTTIYNNGEECKESGRYDVKDVESYVLNEINKFQLNPESIESLYKDKPEENLKAYEEQLKQLEKKLSKLNDLYINELISMDALKQKSAELLKEKSSLESFINRNKTQTNNKQSFEKLVKMDDILKMSYDDQKKVVKTLIKRVEVKRDEIDVIFKL

SEQ ID NO: 7419 - protein, 472 aa, Unknown
  Description of Unknown: Integrase B7420 sequence
  IPR036162,PS51737,IPR011109,PTHR30461,PS00397, PF00239,G3DSA:1.10.10.2600,IPR006119,SSF53041,cd00338, SM00857,IPR025827,IPR038109,PS51736,IPR006118, PF13408,G3DSA:3.40.50.1390,PF07508,Coil
MSARYAYGYVRVSTDKQEELSPDSQEKLLREYAAKNNIIILKVFFELGISGRKADKRPEFQKMIGLAKSTDHPVDVILVWKFSRFARNQEESIVYKSLLRKQSNVDVVSISEPLIDGPFGSLIERIIEWMDEYYSIRLSGEVLRGMKEKATKKGYQMSPPLGYHAVGNGEPYKIDPDEMKIVEFICDEFDYHNSDVTKITRKLNDMGVRTRRGNPFESRSVERILRNPFYYGLVVWNGISFAGSHEVHYSKERFETRMKKIQTTYRPLKRRDVSSCKHWLSGLLKCGYCGASLSYNGANRHSPGFQCYKYSKGIHTESCSISEKKVVAALEEYFEKLLSGMDFEYSYHSAETGEKISERESLVSELDKISNREKRIRLAYENEVDTLEEYKRNKERLQKDREDILEQLKNLDKNNEDTKTKSDVLKNVQTVYDVIKNDAIDYDTKGIFMRSLVEDIVYDKKNGKLIFHLYIS

SEQ ID NO: 7420 - protein, 472 aa, Unknown
  Description of Unknown: Integrase B7421 sequence
  IPR036162,PS51737,IPR011109,PTHR30461,PS00397, PF00239,G3DSA:1.10.10.2600,IPR006119,SSF53041,cd00338, SM00857,IPR025827,IPR038109,PS51736,IPR006118, PF13408,G3DSA:3.40.50.1390,PF07508,Coil
MSARYAYGYVRVSTDKQEELSPDSQEKLLREYAAKNNIIILKVFFELGISGRKADKRPEFQKMIGLAKSSDHPVDVILVWKFSRFARNQEESIVYKSLLRKQSNVDVVSVSEPLIDGPFGSLIERIIEWMDEYYSIRLSGEVLRGMKEKATKKGYQMSPPLGYHAVGNGEPYKIDLDEMKIVDFICDEFDYHNSDVTKITRKLNDMGVRTRRGNPFESRSVERILKNPFYYGLVAWNGITFMGTHEVHYSKERFEARMKKIQTTYKPLKRRDVSSCKHWLSGILKCGYCGASLAYNGANRHSPGFQCYRYSKGMHAESCSISEKKVVAALEEYFEKLLSGMDFEYSYHSAETGEKISERESLLSELDKISNREKRIRIAYENEVDTLEEYKRNKERLQKDREDILMQLENLNKNNEDTKTKSDVLKNVQTVYDVIKNDAIDYGTKGIFMRSLVEDIVYDKKNSKLIFHLYIS

SEQ ID NO: 7421 - protein, 472 aa, Unknown
  Description of Unknown: Integrase B7422 sequence
  PTHR30461:SF3,IPR036162,PS51737,IPR011109,PTHR30461, PS00397,PF00239,G3DSA:1.10.10.2600,IPR006119,SSF53041, cd00338,SM00857,IPR025827,IPR038109,PS51736, IPR006118,PF13408,G3DSA:3.40.50.1390,Coil
MSKIIKNVKDKIIRVAIYIRVSTEEQAKHGYSIESQKSRLIEWAKEHNYQVVDIYADEGKSARTKISNRKELLRLLDDVKSDKIDRIIIWRLDRWFRNVADYYRIQDLLDKYNVDWECSDEEFNTSTSNGRLYLNIKLSIAQNESDQTSDRIKFNFENMVRNKRPISGALPIGYKIEGEKQNKRVVKDPELSQMAIDMFDKFEETLSLRATTQYLHDNYPQRPILYERVKHMLKNSMYHGVYRDVEDYCEPYISKERHQKIIDLINKNHRPNKHSDHFFIFSGLIRCYDCGRRMGGSRAGRNHVDGTRIRYGTYKCCNHFLDCRCSNNHTVNEDKLEKWLISNFLIMLNDYVISVESVEEKQIINKNVNKVERLKDKLDRLNELYLDGRITKEKYDNDYNTTQLKIQELDSVDVSIKKRNLEKYKKILKSNTILDLYNKLTRENKRLFWYEYIDYIVQDADDPVNNWHVFFK

SEQ ID NO: 7422 - protein, 472 aa, Unknown
  Description of Unknown: Integrase B7423 sequence
  PTHR30461:SF3,SM00857,IPR006118,G3DSA:1.10.10.2600,IPR036162, PS51737,G3DSA:3.40.50.1390,Coil,IPR006119,IPR038109, PF07508,IPR011109,SSF53041,PTHR30461,PS00397, PS51736,cd00338,PF00239
MKTAAAYIRVSTDDQIEYSPDSQLKAIRDYARKNDMILPEEFVFIDEGISGRKAEKRPEFMKMIGTAKMKPKQFDVILLWKFSRFARNREDSIVYKSMLRKQCGIDVISVSEQLGEDKTSILIEALIEAMDEYYSINLAEEVRRGMTEKAQRGEVVSAPPFGYDIKDNVFIPDPEAAPIVKMIFDKYLKGQGCLEIAKELNKMGIKTKHGNKWENRGVEYVLRNVVYTGKLTWTPIKTKTRDYNCKDTIISRGMHEPIIDQETFDKVQNMILEKKKLFPKHSRQSSNEFMLKGFLKCSNCGGALVYATNNRVQCNRYSKGTCEVSHSVSLSKLNSSVISALKSDLETQQFKIYKKAAEEQDNKDITPTLIAKERKKLERVKDAYEAGIDSLEEYRINKEKILKTIAELEKNKKPESSQKDDFQKLSKTIKKSLDILEDENCSESIKNITLRSFVRQIVYMKKTQSIEILYQI

SEQ ID NO: 7423 - protein, 472 aa, Unknown
  Description of Unknown: Integrase B7424 sequence
  IPR036162,PS51737,IPR011109,PTHR30461,PS00397, PF00239,G3DSA:1.10.10.2600,IPR006119,SSF53041,cd00338, SM00857,IPR025827,IPR038109,PS51736,IPR006118, PF13408,G3DSA:3.40.50.1390,PF07508,Coil
MSARYAYGYVRVSTDKQEELSPDSQEKLLREYAAKNNIIILKVFFEIGISGRKADKRPEFQKMIGLAKSSDHPVDVILVWKFSRFARNQEESIVYKSLLRKQSNVDVVSVSEPLIDGPFGSLIERIIEWMDEYYSIRLSGEVLRGMKEKATKKGYQMSPPFGYRAVGNGDPYKIDQDEMKIVDFICDEFDYHNSDVTKITRKLNDMGVRTRRGNPFESRSVERILKNPFYYGLVAWNGITFMGTHEVHYSKERFEARMKKIQTTYKPLKRRDVSSCKHWLSGILKCGYCGASLAYNGANRHSPGFQCYKYSKGIHAESCSISEKKVIAALEEYFEKLLSGMDFEYSYHSAETGEKISERESLLSELDKISNREKRVRLAYENEVDTLEEYKRNKERLQKDREDILEQLKNLDKNNEDTKTKSDVLKNVQTVYDVIKNDAIDYDTKGIFMRSLVEDIVYDKKNGKLIFHLYIS

SEQ ID NO: 7424 - protein, 472 aa, Unknown
  Description of Unknown: Integrase B7425 sequence
  IPR036162,PS51737,IPR011109,PTHR30461,PS00397, PF00239,G3DSA:1.10.10.2600,IPR006119,SSF53041,cd00338, SM00857,IPR025827,SSF90257,IPR038109,PS51736, IPR006118,PF13408,G3DSA:3.40.50.1390,PF07508,Coil
MSDRIGALYIRVSTDDQAELSPDAQKRLLLDYAKKNGIIISNDFIFSESVSGRHVQKRPEFQRMIGIAKQPSHPIDVILVWKYSRFARNQEESIVYKSMLKKDHVEVISVSEPLVDGPFGSLIERIIEWMDEYYSIRLSGEVLRGMKEKALRNGYQSSPCLGYEAVGHGKPFQINEAEYAMVSYIMDLYDNQNMDETAIARKCNDLGYKTKRGNPFERRTVDRILQNPFYCGIVSWNGVEFDGAHEVRISKERFDRRQKLIASRRRPMKARNVSTCKHWLSGLLKCSVCGATLSYTGNNKCPYFQCWKYAKGFHKTSVALSVKKAEEAVTAYFDQILSGTDFTYVRKDQPAADETAAIEQLQKELSKLSARESRIRDAYESGIDSLEEYKANKERLISNRLQLESELEKLRKEQEEKEVSKEDVLHEIKSVNDILKNPDVSYEEKGTLIRTIVDQIVYDKESGKMYFDIIVS

SEQ ID NO: 7425 - protein, 472 aa, Unknown
  Description of Unknown: Integrase B7426 sequence
  IPR036162,PS51737,IPR011109,PTHR30461,PS00397, PF00239,G3DSA:1.10.10.2600,IPR006119,SSF53041,cd00338, SM00857,IPR025827,IPR038109,PS51736,IPR006118, PF13408,G3DSA:3.40.50.1390,PF07508,Coil
MSVKYAYGYVRVSTDKQEELSPDSQEKLLREYAAKNNIVILKIFFELGISGRKADKRPEFQKMIGLAKSSDHPVDVILVWKFSRFARNQEESIVYKSLLRKQSNVDVVSVSEPLIDGPFGSLIERIIEWMDEYYSIRLSGEVLRGMKEKATKKGYQMSPPFGYRAVGNGDPYKIDPDEMKVVDFICDEFDYRNSDTTKITRKLNDMGVRTRRGNPFESRSVERILKNPFYYGLVAWNGITFMGTHEVHYSKERFEARMKKIQTTYKPLKRRDVSSCKHWLSGILKCGYCGASLAYNGANRHSPGFQCYKYSKGIHTESCSISEKRVIAALEEYFEKLLSGMDFEYSYHSAETGEKISERESLLSELDKISNREKRIRLAYENEVDTLEEYKRNKERLQKDREDILVQLENLDKNNEDTKTKSDVLKNVQTVYDVIKNDAIDYDTKGIFMRSLVEDIVYDKKNGKLVFHLYIS

SEQ ID NO: 7426 - protein, 472 aa, Unknown
  Description of Unknown: Integrase B7427 sequence
  IPR036162,PS51737,IPR011109,PTHR30461,PS00397, PF00239,G3DSA:1.10.10.2600,IPR006119,SSF53041,cd00338, SM00857,IPR025827,IPR038109,PS51736,IPR006118, PF13408,G3DSA:3.40.50.1390,PF07508,Coil
MSVKYAYGYVRVSTDKQEELSPDSQEKLLREYATKNNIVILKVFFELGISGRKADKRPEFQKMIGLAKSSDHPVDVILVWKFSRFARNQEESIVYKSLLRKQSNVDVVSVSEPLIDGPFGSLIERIIEWMDEYYSIRLSGEVLRGMKEKATKKGYQMSPPFGYRAVGNGDPYKIDQDEMKIVDFICDEFDYHNSDVTKITRKLNDMGVRTRRGNPFESRSVERILKNPFYYGLVAWNGITFMGTHEVHYSKERFEARMKKIQTTYKPLKRRDVSSCKHWLSGILKCGYCGASLSYNGANRHSPGFQCYKYSKGIHTESCSISEKKVIAALEEYFEKLLSGMDFEYSYHSAETGEKISERESLLSELDKISNREKRIRIAYENEVDTLEEYKRNKERLRKDREDILMQLENLNKNNEDAKTKSDVLKNVQTVYDVIKNDAIDYDTKGIFMRSLVEDIVYDKKNGKLVFHLYIS

SEQ ID NO: 7427 - protein, 472 aa, Unknown
  Description of Unknown: Integrase B7428 sequence
  IPR036162,PS51737,IPR011109,PTHR30461,PS00397, PF00239,G3DSA:1.10.10.2600,IPR006119,SSF53041,cd00338, SM00857,IPR025827,IPR038109,PS51736,IPR006118, PF13408,G3DSA:3.40.50.1390,PF07508,Coil
MSARYAYGYVRVSTDKQEELSPDSQEKLLREYAAKNNIIILKVFFEIGISGRKADKRPEFQKMIGLAKSSDHPVDVILVWKFSRFARNQEESIVYKSLLRKQSNVDVVSVSEPLIDGPFGSLIERIIEWMDEYYSIRLSGEVIRGMKEKATKKGYQMSPPFGYRAVGNGDPYKIDPDEMKVVDFICDEFDYRNSDTTKITRKLNDMGVRTRRGNPFESRSVERILKNPFYYGLVAWNGITFMGTHEVHYSKERFEARMKKIQTTYKPLKRRDVSSCKHWLSGILKCGYCGASLAYNGANRHSPGFQCYRYSKGMHAESCSISEKKVVAALEEYFEKLLSGMDFEYSYHSAETGEKISERESLLSELDKISNREKRIRIAYENEVDTLEEYKRNKERLQKDREDILMQLENLNKNNEDTKTKSDVLKNVQTVYDVIKNDAIDYGTKGIFMRSLVEDIVYDKKNSKLIFHLYIS

SEQ ID NO: 7428 - protein, 472 aa, Unknown
  Description of Unknown: Integrase B7429 sequence
  IPR036162,PS51737,IPR011109,PTHR30461,PS00397, PF00239,G3DSA:1.10.10.2600,IPR006119,SSF53041,cd00338, SM00857,IPR025827,IPR038109,PS51736,IPR006118, PF13408,G3DSA:3.40.50.1390,PF07508,Coil
MSARYAYGYVRVSTDKQEELSPDSQEKLLREYAAKNNIIILKVFFEIGISGRKADKRPEFQKMIGLAKSSDHPVDVILVWKFSRFARNQEESIVYKSLLRKQSNVDVVSVSEPLIDGPFGSLIERIIEWMDEYYSIRLSGEVLRGMKEKATKKGYQMSPPFGYRAVGNGDPYKIDPDEMKVVDFICDEFDYHNSDTTKITRKLNDMGVRTRRGNPFESRSVERILKNPFYYGLVAWNGITFMGTHEVHYSKERFEARMKKIQTTYKPLKRRDVSSCKHWLSGILKCGYCGASLAYNGANRHSPGFQCYKYSKGVHTESCSISEKKVIAALEEYFEKLLSGMDFEYSYHSAETGEKISERESLLSELDKISNREKRIRLAYENEVDTLEEYKRNKERLQKDREDILVQLENLDKNNEDTKTKSDVLKNVQTVYDVIKNDAIDYDTKGIFMRSLVEDIVYDKKNGKLVFHLYIS

SEQ ID NO: 7429 - protein, 472 aa, Unknown
  Description of Unknown: Integrase B7430 sequence
  PTHR30461:SF3,IPR036162,PS51737,IPR011109,PTHR30461, PS00397,PF00239,G3DSA:1.10.10.2600,IPR006119,SSF53041, cd00338,SM00857,IPR025827,IPR038109,PS51736, IPR006118,PF13408,G3DSA:3.40.50.1390,Coil
MSKIIKNVKDKIIRVAIYIRVSTEEQAKHGYSIKSQKSRLIEWAKEHNYQVVDIYADEGKSARTKISNRKELLRLLDDVKSDKIDRIIIWRLDRWFRNVADYYRIQDLLDKYNVDWECSDEEFNTSTSNGRLYLNIKLSIAQNESDQTSDRIKFNFENMVRNKRPISGALPIGYKIEGEKQNKRVVKDPELSQMAIDMFDKFEETLSLRATTQYLHDNYPQRPILYERVKHMLKNSMYHGVYRDVEDYCEPYISKERHQKIIDLINKNHRPNKHSDHFFIFSGLIRCYDCGRRMGGSRAGRNHVDGTRIRYGTYKCCNHFLDCRCSNNHTVNEDKLEKWLISNFLIMLNDYVISVESVEEKQIINKNVNKVERLKDKLDRLNELYLDGRITKEKYDNDYNTTQLKIQELDSVDVSIKKRNLEKYKKILKSNTILDLYNKLTRENKRLFWYEYIDYIVQDAEDPVNNWHVFFK

SEQ ID NO: 7430 - protein, 472 aa, Unknown
  Description of Unknown: Integrase B7431 sequence
  IPR036162,PS51737,IPR011109,PTHR30461,PS00397, PF00239,G3DSA:1.10.10.2600,IPR006119,SSF53041,cd00338, SM00857,IPR025827,IPR038109,PS51736,IPR006118, PF13408,G3DSA:3.40.50.1390,PF07508,Coil
MSDRIGALYIRVSTDDQAELSPDAQKRLLLDYAKKNGIIISNDFIFSESVSGRHVQKRPEFQRMIGIAKQPSHPIDVILVWKYSRFARNQEESIVYKSMLKKDHVDVISISEPLIDGPFGSLIERIIEWMDEYYSIRLSGEVLRGMKEKALQNGYQSSPCLGYEAVGHGKPYQINEAEYAMVSYIMDLYDNQNMDETAIARKCNDLGYKTKRGNPFERRTIDRILQNPFYCGIVSWNGVEFEGAHEVRISKERFDRRQRLIASRKRPMKARNVSTCKHWLSGLLKCSVCGATLSYTGNGKCPYFQCWKYAKGFHKTSVALSVKKAEEAVISYFDQILSGTDFTYVRKDQPATDETVAIEQLQKELSKLSTREIRIRDAYESGIDSLEEYKANKERLISNRLQLETGLEKLRKEQEEKEVNKEDVLHEIKSVNDILKNPDVSYEEKGTLIRTIVDQIVYDKESGKMYFDIIVS

SEQ ID NO: 7431 - protein, 472 aa, Unknown
  Description of Unknown: Integrase B7432 sequence
  PTHR30461:SF3,cd00338,SM00857,IPR006118,G3DSA:1.10.10.2600, IPR036162,PS51737,G3DSA:3.40.50.1390,IPR006119,IPR038109, PF07508,IPR011109,SSF53041,PTHR30461,PS00397, PS51736,Coil,PF00239
MVKYAYGYIRVSTDKQEELSPDSQEKLLREYAAKNNIIILKFFYELGVSGRKADKRPEFQAMIGLAKSPDHPVDLILVWKFSRFARNQEESIVYKSLLRQKSNVDVVSVSEPLIDGPFGSLIERIIEWMDEYYSIRLSGEVLRGMREKAEKNGYQLKPPLGYQAVGGGKPYVINEEEYKIYQFIADEYDFHNTNFSTIARKLNALGLRTRLGRPFELRTIRRLLQNPFYYGLVIWNGVSFMGTHEVRLTKERFDSRMEKMQSQYVPIHRREVSSCQHWISGLLKCGYCGATMCFNGSRTSVTGFQCYKYSKGIHKESCFITERKVLAAVEEYFEKLLDGMDFEYTYRPPKSANSLSERDPLLQELKKIAVREERIKLAYENGIDSIEEYKQNKDRINQAKADIQLQLDELDSSIQKSATTKEDVLAKVKTVYDVIKDPDVDMETKGNFMRSLVEDIVYDKENGKLIFHLYSS

SEQ ID NO: 7432 - protein, 472 aa, Unknown
  Description of Unknown: Integrase B7433 sequence
  IPR036162,PS51737,IPR011109,PTHR30461,PS00397, PF00239,G3DSA:1.10.10.2600,IPR006119,SSF53041,cd00338, SM00857,IPR025827,IPR038109,PS51736,IPR006118, PF13408,G3DSA:3.40.50.1390,PF07508,Coil
MSARYAYGYVRVSTDKQEELSPDSQEKLLREYAAKNNIIILKVFFEIGISGRKADKRPEFQKMIGLAKSSDHPVDVILVWKFSRFARNQEESIVYKSLLRKQSNVDVVSVSEPLIDGPFGSLIERIIEWMDEYYSIRLSGEVLRGMKEKATKKGYQMSPPFGYRAVGNGDPYKIDQDEMKIVDFICDEFDYRNSDTTKITRKLNDMGVRTRRGNPFESRSVERILKNPFYYGLVAWNGITFMGTHEVHYSKERFEARMKKIQTTYKPLKRRDVSSCKHWLSGILKCGYCGASLAYNGANRHSPGFQCYKYSKGIHTESCSISEKKVIAALEEYFEKLLSGMDFEYSYHSAETGAKISERESLLSELDKISNREKRIRLAYENEVDTLEEYKRNKERLQKDREDILMQLENLNKNNEDTKTKSDVLKNVQTVYDVIKNDAIDYGTKGIFMRSLVEDIVYDKKNGKLIFHLYIS

SEQ ID NO: 7433 - protein, 472 aa, Unknown
  Description of Unknown: Integrase B7434 sequence
  cd03768,PTHR30461:SF3,SM00857,G3DSA:1.10.10.2600,IPR036162, PF13408,IPR025827,G3DSA:3.40.50.1390,PS51737,IPR006119, IPR038109,PF07508,IPR011109,SSF53041,PTHR30461, PS51736,Coil,PF00239
MQTKRKVAIYSRVSTLHQAEEGYSIGQQIEALTKYCQAMGWVIYDNYSDGGFSGGKLERPAMQKMIQDAESGKFDTVVVYKLDRLSRNVRDTLYLVKDVFNANNVDFVSLQENIDTKSAMGNLFITLLSAIAEFEREQIKERMQLGVKGRAKSGKTTSWHTPPYGYVYNQETQMLNIEPFAAETVKNIFDKLNSGWSIMEITTFLRKNHPDNWRPTKVTRILSNISYTGKVKYKGEIFDGLHEPIISDETYTRAQQMLRERSEKATNTRAFQGKYLLSRIVKCGYCGAPLQIDSYRPKKDGTRTRTYSCPNRFTGRAKATIYNNGKFCEKSRRHKADDIEKYVLTEISKLQLNPKIIESLYKGKPEANLDTYYNQLKKVNDKLSKLNDLYINSLIDLDNLKEKSDKILKEKNSIEEIIAKNKNKPNNKPAFEKVIKMEDISTMTYEEQKKIVRMLVSRVEVTPDEIRLIFKL

SEQ ID NO: 7434 - protein, 472 aa, Unknown
  Description of Unknown: Integrase B7435 sequence
  IPR036162,PS51737,IPR011109,PTHR30461,PS00397, PF00239,G3DSA:1.10.10.2600,IPR006119,SSF53041,cd00338, SM00857,IPR025827,IPR038109,PS51736,IPR006118, PF13408,G3DSA:3.40.50.1390,PF07508,Coil
MSARYAYGYVRVSTDKQEELSPDSQEKLLREYAAKNNIIILKVFFEIGISGRKADKRPEFQKMIGLAKSSDHPVDVILVWKFSRFARNQEESIVYKSLLRKQSNVDVVSVSEPLIDGPFGSLIERIIEWMDEYYSIRLSGEVLRGMKEKATKKGYQMSPPFGYRAVGNGDPYKIDPDEMKVVDFICDEFDYHNSDTTKITRKLNDMGVRTRRGNPFESRSVERILKNPFYYGLVAWNGITFMGTHEVHYSKERFEARMKKIQTTYKPLKRRDVSSCKHWLSGILKCGYCGASLAYNGANRHSPGFQCYKYSKGVHTESCSISEKKVIAALEEYFEKLLSGMDFEYSYHSAETGEKISERESLLSELDKISNREKRIRLAYENEVDTLEEYKRNKERLQKDREDILMQLENLDKNNGDTKTKSDVLKNVQTVYDVIKNDAIDYDTKGIFMRSLVEDIVYDKKNGKLIFHLYIS

SEQ ID NO: 7435 - protein, 472 aa, Unknown
  Description of Unknown: Integrase B7436 sequence
  IPR036162,PS51737,IPR011109,PTHR30461,PS00397, PF00239,G3DSA:1.10.10.2600,IPR006119,SSF53041,cd00338, SM00857,IPR025827,IPR038109,PS51736,IPR006118, PF13408,G3DSA:3.40.50.1390,PF07508,Coil
MSARYAYGYVRVSTDKQEELSPDSQEKLLREYAAKNNIIILKVFFEIGISGRKADKRPEFQKMIGLAKSSDHPVDVILVWKFSRFARNQEESIVYKSLLRKQSNVDVVSVSEPLIDGPFGSLIERIIEWMDEYYSIRLSGEVLRGMKEKATKKGYQMSPPFGYRAVGNGDHYKIDPDEMKVVDFICDEFDYHNSDVTKITRKLNDMGARTRRGNPFESRSVERILKNPFYYGLVAWNGITFMGTHEVHYSKERFEARMKKIQTTYKPLKRRDVSSCKHWLSGILKCGYCGASLAYNGANRHSPGFQCYKYSKGIHTESCSISEKKVIAALEEYFEKLLSGMDFEYSYHSAETGEKISERESLLSELDKISNREKRIRLAYENEVDTLEEYKRNKERLQKDREDILMQLENLNKNNEDTKTKSDVLKNVQTVYDVIKNDAIDYGTKGIFMRSLVEDIVYDKKNSKLIFHLYIS

SEQ ID NO: 7436 - protein, 472 aa, Unknown
  Description of Unknown: Integrase B7437 sequence
  IPR036162,PS51737,IPR011109,PTHR30461,PS00397, PF00239,G3DSA:1.10.10.2600,IPR006119,SSF53041,cd00338, SM00857,IPR025827,SSF90257,IPR038109,PS51736, IPR006118,PF13408,G3DSA:3.40.50.1390,PF07508,Coil
MSDRIGALYIRVSTDDQAELSPDAQKRLLLDYAKKNAIIISNDFIFSESVSGRHVQKRPEFQRMIGIAKQPSHPIDVILVWKYSRFARNQEESIVYKSMLKKDHVEVISVSEPLIDGPFGSLIERIIEWMDEYYSIRLSGEVLRGMKEKALRNGYQSSPCLGYEAVGHGKPYQINEAEYAMVSYIMDLYDNQNMDETAIARKCNDLGYKTKRGNPFERRTIDRILQNPFYCGIVSWNGVEFEGAHEVRISKERFDRRQRLITSRKRPMKARNISTCKHWLSGLLKCSVCGATLSYTGNGKCPYFQCWKYAKGFHKTSVALSVKKAEEAVIEYFDQVLAGADFTYVRKEQPAADETAAIEQLQKELSKLSARESRIRDAYESGIDSLEEYKANKERLISNRLQLETELEKLRKEQAEKEVNKEDVLHEIKSVNDILKNPDVSYEEKGTLIRTIVDQIVYDKESGKMYFDIIVS

SEQ ID NO: 7437 - protein, 472 aa, Unknown
  Description of Unknown: Integrase B7438 sequence
  PTHR30461:SF3,cd00338,G3DSA:1.10.10.2600,IPR036162,PF13408, IPR025827,G3DSA:3.40.50.1390,PS51737,IPR006119,IPR038109, PF07508,IPR011109,SSF53041,PTHR30461,Coil, PF00239
MVIVWKLDRFARNRYDSAHYKATLRRNGVKVVSATEVISEGAEGIILESVLEGYAEYYSAELSEKVIRGMTENALKCQYNGGYIPVGYKVDENKHYQIDELTAPFVKEAFLMYVNGRHIKKIVEYFNENGIRSSRNKPMTKTTVSTILQNRKYIGEYQYRDIVVSDGIPAIISRELFALAQQRTEQNKYAPSASRSEIKYLLTGKLMCGDCGSVYAGESGTGRTGQKYHYYKCVKAKKRDGCERKAIKKDEVEEAVIEATVENIFVDEVIEEIADRVISWQEKESTLVPLYQRELAEVEKSIANLLSAIEQGIITSATKNRMAELESLKIDLEVKIAREEIQTQILTKDQVKFWLKNMEKLDLASIDNRQRIINTFVNSIYVYEDRFEVNFNCREGFETIPLDIERFVSRLEIVGEPKQKHTNRFDNMRLYGNQKASGITSRRFSFATNKKISRPQPRAGENFIRTCSVPCG

SEQ ID NO: 7438 - protein, 472 aa, Unknown
  Description of Unknown: Integrase B7439 sequence
  IPR036162,PS51737,IPR011109,PTHR30461,PS00397, PF00239,G3DSA:1.10.10.2600,IPR006119,SSF53041,cd00338, SM00857,IPR025827,IPR038109,PS51736,IPR006118, PF13408,G3DSA:3.40.50.1390,PF07508,Coil
MVKYAYGYIRVSTDKQEELSPDSQEKLLREYAAKNNIIILKFFYELGVSGRKADKRPEFQSMIGLAKSSDHPVDLILVWKFSRFARNQEESIVYKSLLRQKSNVDVVSVSEPLVDGPFGSLIERIIEWMDEYYSIRLSGEVLRGMREKAEQNGYQFVPPLGYQAVGGGKPFVINEDEYKIYQYISDEYDLRNTSVSTIARKLNALGFHTRRGKPFELRSIKRLLQNPFYYGLVVWNGVSFIGPHEVRITKERFDARMQKMQSQYTPTRRREVSSCRHWLSGLLKCGYCGATMCFNGARASVTGFQCYKYSKGLHKESCFITEKKVLSAIEEYFEKLLDGMDFEYAYHPPKSAEFLSEREPLLQELKRIAMREDRIRSAYENGIDTLEEYKQNRERIKQARNDIQSQLDELNNSSAKSPVTKEDILAKVKTVYDVIQDPDVDMETKGAFMRSLVEDIIYDKENGKMIFHLYSS

SEQ ID NO: 7439 - protein, 472 aa, Unknown
  Description of Unknown: Integrase B7440 sequence
  PTHR30461:SF3,IPR036162,PS51737,IPR011109,PTHR30461, PS00397,PF00239,G3DSA:1.10.10.2600,IPR006119,SSF53041, cd00338,SM00857,IPR025827,IPR038109,PS51736, IPR006118,PF13408,G3DSA:3.40.50.1390,PF07508,Coil
MKIAAAYVRVSTEDQTELSPTSQIKQIREYAKNHGYIVPDEYVFADEGISGKNTQKRPAFNRMIGLAKTKPKPFECILLWKYSRFARNREDSIVYKSMLRKQLGIDVISISESLGDDKMSILIEALIEAMDEYYSINLAEEVKRGMTERVSRGEAVSVPAYGYDIEEGKYIINEAEAEVVRQIFSDFNGGVGTVTIARNLNAIGIKTKRGKLWENRTVKYILHNPVYIGKIRWNPEEITGLNYDHEKIMLVDGVHEPLLTKELWDSVQEKLSLMKRTRKPREKSNPTPDYMLYGLIRCGSCGGTLTQSRDGLQCHKYAHGTCNTSHYISLSKANAAVIDLIQHTLENGIFTLTPKKQDISTQQIAMIDKQIQNEKNKLLRVKEAFEYGVDTLEEYKENKNKILQKISELESSKPAQQTNIDKKKFAQKYLGVMDTLKDDTVSEADKNHILRQFVEKIVLHCPSNEIEIFYHY

SEQ ID NO: 7440 - protein, 472 aa, Unknown
  Description of Unknown: Integrase B7441 sequence
  IPR036162,PS51737,IPR011109,PTHR30461,PS00397, PF00239,G3DSA:1.10.10.2600,IPR006119,SSF53041,cd00338, SM00857,IPR025827,IPR038109,PS51736,IPR006118, PF13408,G3DSA:3.40.50.1390,PF07508,Coil
MSARYAYGYVRVSTDKQEELSPDSQEKLLREYAAKNNIIILKVFFEIGISGRKADKRPEFQKMIGLAKSSDHPVDVILVWKFSRFARNQEESIVYKSLLRKQSNVDVVSVSEPLIDGPFGSLIERIIEWMDEYYSIRLSGEVIRGMKEKATKKGYQMSPPFGYRAVGNGDPYKIDPDEMKVVDFICDEFDYRNSDTTKITRKLNDMGVRTRRGNPFESRSVERILKNPFYYGLVAWNGITFMGTHEVHYSKERFEARIKKIQTTYKPLKRRDVSSCKHWLSGILKCGYCGASLAYNGANRHSPGFQCYKYSKGIHTESCSISEKKVIAALEEYFEKLLSGMDFEYSYHSAETGEKISERESLLSELDKISNREKRIRIAYENEVDTLEEYKRNKERLQKDREDILMQLENLNKNNEDTKTKSDVLKNVQTVYDVIKNDAIDYGTKGIFMRSLVEDIVYDKKNSKLIFHLYIS

SEQ ID NO: 7441 - protein, 472 aa, Unknown
  Description of Unknown: Integrase B7442 sequence
  IPR036162,PS51737,IPR011109,PTHR30461,PS00397, PF00239,G3DSA:1.10.10.2600,IPR006119,SSF53041,cd00338, SM00857,IPR025827,SSF90257,IPR038109,PS51736, IPR006118,PF13408,G3DSA:3.40.50.1390,PF07508,Coil
MSDRIGALYIRVSTDDQAELSPDAQKRLLLDYAKKNGIIISNDFIFSESVSGRHVQKRPEFQRMIGIAKQPSHPIDVILVWKYSRFARNQEESIVYKSMLKKDHVEVISVSEPLVDGPFGSLIERIIEWMDEYYSIRLSGEVLRGMKEKALRNGYQSSPCLGYEAVGHGKPFQINEAEYAMVSYIMDLYDNQNMDETAIARKCNDLGYKTKRGNPFERRTIDRILQNPFYCGIVSWNGVEFEGAHEVRISKERFDRRQRLITSRKRPMKARNISTCKHWLSGLLKCSVCGATLSYTGNGKCPYFQCWKYAKGFHKTSVALSVKKAEEAVIEYFDQVLAGADFTYVRKEQPAADETAAIEQLQKELSKLSARESRIRDAYESGIDSLEEYKANKERLISNRLQLETGLEKLRKEQEEKEVNKEDVLHEIKSLNDILKNPDVSYEEKGTLIRTIVDQIVYDKESGKMYFDIIVS

SEQ ID NO: 7442 - protein, 472 aa, Unknown
  Description of Unknown: Integrase B7443 sequence
  IPR036162,PS51737,IPR011109,PTHR30461,PS00397, PF00239,G3DSA:1.10.10.2600,IPR006119,SSF53041,cd00338, SM00857,IPR025827,IPR038109,PS51736,IPR006118, PF13408,G3DSA:3.40.50.1390,PF07508,Coil
MNDRTGALYIRVSTEDQTELSPDAQKRLLLDYAKKNNIIISNDFIFSESVSGRHVQKRPEFQKMIAIAKQSSHPIDVILVWKYSRFARNQEESIVYKSMLKKDNVDVISVSEPLIDGPFGTLIERIIEWMDEYYSIRLSGEVLRGMKEKALQNGYQMSPPLGYEAVGHGKPYKINEAEYAIVSYVMDLYDNQNMDETAIARKCNDMGYRTKRGKLFERRSVDRILSNSFYCGIVRWNGVEFEGPHEIRLSKERFLNRQKLITARKRPVKARSVSACKHWLSGLLKCPVCGATLSYTGNNKCPYFQCWKYAKGFHKTSIALSVKKAEELVLSYFDSVLAGAEFSYIRKNPATNNNTAAIEQLQRELSRYDVKEKRIRDAYESEIDTLEEYRANKERLANERLQVEKELELLLCEQSENAVNKEEVLCEIKSVNDVLKNPDVGYEEKGNLIRTIVDQIVYDKESGKMYFDIIVS

SEQ ID NO: 7443 - protein, 472 aa, Unknown
  Description of Unknown: Integrase B7444 sequence
  PTHR30461:SF3,SM00857,G3DSA:1.10.10.2600,IPR036162,PF13408, IPR025827,G3DSA:3.40.50.1390,PS51737,IPR006119,IPR038109, PF07508,IPR011109,SSF53041,PF00239,PTHR30461, PS51736,Coil,cd00338
MNTKRKVAIYSRVSTLHQAEEGYSIGQQIEALTKYCQAMGWVIYDNYSDGGFSGGKLERPAMQKMIQDAESGKFDTVVVYKLDRLSRNVRDTLYLVKDVFNANNVDFVSLQENIDTKSAMGNLFITLLSAIAEFEREQIKERMQLGVKGRAKSGKTTSWHTPPYGYIYNQETQMLNIEPFAAETVKNIFDKLNSGWSIMEITTFLRKNHPDNWRPTKVTRILSNISYTGKVKYKGEIFDGLHEPIISDETYTRAQQMLRERSEKATNTRAFQGKYLLSRIVKCGYCGAPLQIDSYRPKKDGTKTRTYSCPNRFTGRAKATIYNNGKFCEKSRRHKADDIEKYVLTEISKLQLNPKIIESLYKGKPEANLDTYYNQLKKVNDKLSKLNDLYINGLIDLDNLKEKSDKILKEKNSIEEIIAKNKNRPNNKPAFEKVIKMEDISTMTYEEQKKIVRMLVSRVEVTPDEIRLIFKL

SEQ ID NO: 7444 - protein, 472 aa, Unknown
  Description of Unknown: Integrase B7445 sequence
  IPR036162,PS51737,IPR011109,PTHR30461,PS00397, PF00239,G3DSA:1.10.10.2600,IPR006119,SSF53041,cd00338, SM00857,IPR025827,IPR038109,PS51736,IPR006118, PF13408,G3DSA:3.40.50.1390,PF07508,Coil
MSARYAYGYVRVSTDKQEELSPDSQEKLLREYAAKNNIIILKVFFEIGISGRKADKRPEFQKMIGLAKSSDHPVDVILVWKFSRFARNQEESIVYKSLLRKQSNVDVVSVSEPLIDGPFGSLIERIIEWMDEYYSIRLSGEVLRGMKEKATKKGYQMSPPFGYRAVGNGDPYKIDQDEMKIVDFICDEFDYHNSDVTKITRKLNDMGVRTRRGNPFESRSVERILKNPFYYGLVAWNGITFMGTHEVHYSKERFEARMKKIQTTYKPLKRRDVSSCKHWLSGILKCGYCGASLAYNGANRHSPGFQCYKYSKGIHTESCSISEKKVIAALEEYFEKLLSGMDFEYSYHSAETGEKISERESLLSELDKISNREKRVRLAYENEVDTLEEYKRNKERLQKDREDILEQLKNLDKNNEDTKTKSDVLKNVQTVYDVIKNDAIDYDTKGIFMRSLVEDIVYDKKNGKLIFHLYIS

SEQ ID NO: 7445 - protein, 472 aa, Unknown
  Description of Unknown: Integrase B7446 sequence
  IPR036162,PS51737,IPR011109,PTHR30461,PS00397, PF00239,G3DSA:1.10.10.2600,IPR006119,SSF53041,cd00338, SM00857,IPR025827,IPR038109,PS51736,IPR006118, PF13408,G3DSA:3.40.50.1390,PF07508,Coil
MSVKYAYGYVRVSTDKQEELSPDSQEKLLREYATKNNIVILKVFFELGISGRKADKRPEFQKMIGLAKSSDHPVDVILVWKFSRFARNQEESIVYKSLLRKQSNVDVVSVSEPLIDGPFGSLIERIIEWMDEYYSIRLSGEVLRGMKEKATKKGYQMSPPFGYRAVGNGDPYKIDLDEMKIVDFICDEFDYRNSDTTKITRKLNDMGVRTRRGNPFESRSVERILKNPFYYGLVAWNGITFMGTHEVHYSKERFEARIKKIQTTYKPLKRRDVSSCKHWLSGILKCGYCGASLAYNGANRHSPGFQCYKYSKGIHTESCSISEKKVIAALEEYFEKLLSGMDFEYSYHSAETGEKISERESLLAELDKISNREKRIRLAYENEVDTLEEYKRNKERLQKDREDILMQLENLNKNNEDTKTKSDVLKNVQTVYDVIKNDAIDYGTKGIFMRSLVEDIVYDKKNSKLIFHLYIS

SEQ ID NO: 7446 - protein, 472 aa, Unknown
  Description of Unknown: Integrase B7447 sequence
  PTHR30461:SF3,SM00857,IPR006118,IPR036162,PF13408, IPR025827,G3DSA:3.40.50.1390,Coil,PS51737,IPR006119, SSF53041,IPR011109,PTHR30461,PS00397,PS51736, cd00338,PF00239
MQEKIQRCAIYIRVSTAEQAMHGKSLEAQTEYLTNYAHQHNMVIVGVFADEGKTARKNFKDRKAIKALLKLVKEDAIDIIIFWKMDRWFRNVSDFYKVQDILDAHQVKWIATAEPNMNLDTREGRLNLNIMLSINQNETDTTSERIRFVNEASVRQGKVVSGAQPFGFMIKIFEDGKKKVVKDPDTESIVDEFYEYYFVHQSKRGAFVYLCNKYGPVITMRQVEKLCNNTMYYGRYRDNYNYCPAYITEEQYNQLQEINKRNIKLYMSYEETGEIYLFTGLIPCPICGRPLSANRTTKNSHTGKPFKRAYRYYRCQNWIYKKTCTYSKLANEATIEKYLLDHIEEAKRQYLNEIIVYNSVSEKVPVEKKKNDKEKLLKELDRLNNMYQKGRISEDKYDAEYDRINNELKAITEIPVPRIKRSVEELEAILCEDWKNMYDKLSRENKRAFWRSLIAEIRLNEDSSFVKSIELI

SEQ ID NO: 7447 - protein, 472 aa, Unknown
  Description of Unknown: Integrase B7448 sequence
  IPR036162,PS51737,IPR011109,PTHR30461,PS00397, PF00239,G3DSA:1.10.10.2600,IPR006119,SSF53041,cd00338, SM00857,IPR025827,IPR038109,PS51736,IPR006118, PF13408,G3DSA:3.40.50.1390,PF07508,Coil
MSARYAYGYVRVSTDKQEELSPDSQEKLLREYAAKNNIIILKVFFEIGISGRKADKRPEFQKMIGLAKSSDHPVDVILVWKFSRFARNQEESIVYKSLLRKQSNVDVVSVSEPLIDGPFGSLIERIIEWMDEYYSIRLSGEVLRGMKEKATKKGYQMSPPFGYRAVGNGDPYKIDPDEMKVVDFICDEFDYRNSDATKITRKLNDMGVRTRRGNPFESRSVERILKNPFYYGLVAWNGITFMGTHEVHYSKERFEARMKKIQTTYKPLKRRDVSSCKHWLSGILKCGYCGASLAYNGANRHSPGFQCYKYSKGIHTESCSISEKKVIAALEEYFEKLLSGMDFEYSYHSAETGEKISERESLLSELDKISNREKRIRLAYENEVDTLEEYKRNKERLQKDREDILMQLENLNKNNEDTKTKSDVLKNVQTVYDVIKNDAIDYDTKGIFMRSLVEDIVYDKKNGKLIFHLYIS

SEQ ID NO: 7448 - protein, 472 aa, Unknown
  Description of Unknown: Integrase B7449 sequence
  cd03768,PTHR30461:SF3,SM00857,G3DSA:1.10.10.2600,IPR036162, PF13408,PS51737,G3DSA:3.40.50.1390,IPR025827,IPR006119, IPR038109,PF07508,IPR011109,SSF53041,PTHR30461, PS51736,Coil,PF00239
MNSKRKVAIYSRVSTLHQAEEGYSIGQQIEALTKYCQAMGWVIYDNYSDGGFSGGKLERPAMQKMIQDAKSGKFDTVVVYKLDRLSRNVRDTLYLVKDVFNANNVDFVSLQENIDTKSAMGNLFITLLSAIAEFEREQIKERMQLGVKGRAKSGKTTAWTTPPFGYKYDTNTQSMTVDHYQAEIVRDMFNKIISGWSIMGITTYMRENYDGKWTHVKVKRILENITYIGKVKYRNEIFEGEHTPILPEELFSKAQKALEERTNKKDNTRPFQGLYMLSHIAKCGYCGTPLKIDTYKPRKDGTRKRTYTCINKNPKRIKTATYNDGKQCKESGRYDVKDVERYVLNEISKLQLNPKSIESLYRDKPEENITAHQERLKKLETKLSKLNDLYINELISMEALKQKSAELLKEKSSLETFINNNKRKINNKPAFEKVAKMDDVFKMSYDDQKKIVKTLIKRVEVKRDEINIIFKL

SEQ ID NO: 7449 - protein, 472 aa, Unknown
  Description of Unknown: Integrase B7450 sequence
  IPR036162,PS51737,IPR011109,PTHR30461,PS00397, PF00239,G3DSA:1.10.10.2600,IPR006119,SSF53041,cd00338, SM00857,IPR025827,IPR038109,PS51736,IPR006118, PF13408,G3DSA:3.40.50.1390,PF07508,Coil
MSVKYAYGYVRVSTDKQEELSPDSQEKLLREYATKNNIVILKVFFELGISGRKADKRPEFQKMIGLAKSSDHPVDAILVWKFSRFARNQEESIVYKSLLRKQSNVDVVSVSEPLIDGPFGSLIERIIEWMDEYYSIRLSGEVLRGMKEKATKKGYQMSPPFGYRAVGNGDPYKIDQDEMKIVDFICDEFDYHNSDVTKITRKLNDMGVRTRRGNPFESRSVERILKNPFYYGLVAWNGITFMGTHEVHYSKERFEARMKKIQTTYKPLKRRDVSSCKHWLSGILKCGYCGASLAYNGANRHSPGFQCYRYSKGMHAESCSISEKKVVAALEEYFEKLLSGMDFEYSYHSAETGEKISERESLLSELDKISNREKRIRIAYENEVDTLEEYKRNKERLQKDREDILMQLENLDKNNEDTKTKSDVLKNVQTVYDVIKNDAIDYDTKGVFMRSLVEDIVYDKKNGKLVFHLYIS

SEQ ID NO: 7450 - protein, 472 aa, Unknown
  Description of Unknown: Integrase B7451 sequence
  PTHR30461:SF3,SM00857,G3DSA:1.10.10.2600,IPR036162,PF13408, PS51737,IPR025827,G3DSA:3.40.50.1390,IPR006119,IPR038109, PF07508,IPR011109,SSF53041,PTHR30461,Coil, PS51736,cd00338,PF00239
MNTKRKVAIYSRVSTLHQAEEGYSIGQQIEALTKYCQAMGWVIYDNYSDGGFSGGKLERPAMQKMIQDAKSGKFDTVVVYKLDRLSRNVRDTLYLVKDVFNANNVDFVSLQENIDTKSAMGNLFITLLSAIAEFEREQIKERMQLGVKGRAKSGKTTSWTTPPFGYEYDTNTQLMTINHYQAEIVRDMFNKIISGWSIMGITTYMRENYDGKWTHVKVKRILENITYIGKVKYRNEIFEGEHTPILPEELFYKAQKALEERTNKKDNTRPFQGLYMLSHIAKCGYCGTPLKIDTYKPRKDGTRKRTYTCINKNPKRIKTAIYNDGKQCKESGRYDVKDVERYVLNEISELQLNPKSIESLYKDKPEENITAHQEQLKKLENKLSKLNDLYINELISMEALKQKSAELLKEKSSLETFINNNKRKINNKPAFEKVAKMDDVFKMSYDDQKKIVKTLIKRVEVKRDEINVIFKL

SEQ ID NO: 7451 - protein, 472 aa, Unknown
  Description of Unknown: Integrase B7452 sequence
  IPR036162,PS51737,IPR011109,PTHR30461,PS00397, PF00239,G3DSA:1.10.10.2600,IPR006119,SSF53041,cd00338, SM00857,IPR025827,IPR038109,PS51736,IPR006118, PF13408,G3DSA:3.40.50.1390,PF07508,Coil
MSARYAYGYVRVSTDKQEELSPDSQEKLLREYAAKNNIIILKVFFEIGISGRKADKRPEFQKMIGLAKSSDHPVDVILVWKFSRFARNQEESIVYKSLLRKQSNVDVVSVSEPLIDGPFGSLIERIIEWMDEYYSIRLSGEVLRGMKEKATKKGYQMSPPFGYRAVGNGDPYKIDPDEMKVVDFICDEFDYLNSDATKITRKLNDMGARTRRGNPFESRSVERILKNPFYYGLVAWNGITFMGTHEVHYSKERFEARMKKIQTTYKPLKRRDVSSCKHWLSGILKCGYCGASLAYNGANRHSPGFQCYKYSKGIHTESCSISEKKVIAALEEYFEKLLSGMDFEYSYHSAETGEKISERESLLSELDKISNREKRIRLAYENEVDTLEEYKRNKERLQKDREDILMQLENLNKNNEDTKTKSDVLKNVQTVYDVIKNDAIDYGTKGIFMRSLVEDIVYDKKNSKLIFHLYIS

SEQ ID NO: 7452 - protein, 472 aa, Unknown
  Description of Unknown: Integrase B7453 sequence
  IPR036162,PS51737,IPR011109,PTHR30461,PS00397, PF00239,G3DSA:1.10.10.2600,IPR006119,SSF53041,cd00338, SM00857,IPR025827,IPR038109,PS51736,IPR006118, PF13408,G3DSA:3.40.50.1390,PF07508,Coil
MSARYAYGYVRVSTDKQEELSPDSQEKLLREYAAKNNIIILKVFFELGISGRKADKRPEFQKMIGLAKSTDHPVDVILVWKFSRFARNQEESIVYKSLLRKQSNVDVVSVSEPLIDGPFGSLIERIIEWMDEYYSIRLSGEVLRGMKEKATKKGYQMSPPFGYRAVGNGDPYKIVPDEMKVVDFICDEFDYRNSDTTKITRKLNDMGVRTRRGNPFESRSVERILKNPFYYGLVAWNGITFMGTHEVHYSKERFEARMKKIQTTYKPLKRRDVSSCKHWLSGILKCGYCGASLAYNGANRHSPGFQCYKYSKGIHTESCSISEKKVIAALEEYFEKLLSGMDFEYSYHSAETGAKISERESLLSELDKISNREKRIRLAYENEVDTLEEYKRNKERLQKDREDILMQLENLNKNNEDTKTKSDVLKNVQTVYDVIKNDAIDYGTKGVFMRSLVEDIVYDKKNGKLIFHLYIS

SEQ ID NO: 7453 - protein, 472 aa, Unknown
  Description of Unknown: Integrase B7454 sequence
  IPR036162,PS51737,IPR011109,PTHR30461,PS00397, PF00239,G3DSA:1.10.10.2600,IPR006119,SSF53041,cd00338, SM00857,IPR025827,IPR038109,PS51736,IPR006118, PF13408,G3DSA:3.40.50.1390,PF07508,Coil
MSARYAYGYVRVSTDKQEELSPDSQEKLLREYAAKNNIIILKVFFEIGISGRKADKRPEFQKMIGLAKSSDHPVDVILVWKFSRFARNQEESIVYKSLLRKQSNVDVVSVSEPLIDGPFGSLIERIIEWMDEYYSIRLSGEVLRGMKEKATKKGYQMSPPFGYRAVGNGDPYKIDPDEMKVVDFICDEFDYHNSDTTKITRKLNDMGVRTRRGNPFESRSVERILKNPFYYGLVAWNGITFMGTHEVHYSKERFEARMKKIQTTYRPLKRRDVSSCKHWLSGILKCGYCGASLAYNGANRHSPGFQCYKYSKGVHTESCSISEKKVIAALEEYFEKLLSGMDFEYSYHSAETGEKISERESLLSELDKISNREKRIRLAYENEVDTLEEYKRNKERLQKDREDILMQLENLDKNNGDTKTKSDVLKNVQTVYDVIKNDAIDYDTKGIFMRSLVEDIVYDKKNGKLIFHLYIS

SEQ ID NO: 7454 - protein, 472 aa, Unknown
  Description of Unknown: Integrase B7455 sequence
  IPR036162,PS51737,IPR011109,PTHR30461,PS00397, PF00239,G3DSA:1.10.10.2600,IPR006119,SSF53041,cd00338, SM00857,IPR025827,IPR038109,PS51736,IPR006118, PF13408,G3DSA:3.40.50.1390,PF07508,Coil
MSARYAYGYVRVSTDKQEELSPDSQEKLLREYAAKNNIIILKVFFELGISGRKADKRPEFQKMIGLAKSTDHPVDVILVWKFSRFARNQEESIVYKSLLRKQSNVDVVSVSEPLIDGPFGSLIERIIEWMDEYYSIRLSGEVLRGMKEKAAKKGYQMSPPFGYRAVGNGDPYKIDPDEMKVVDFICDEFDYRNSDTTKITRKLNDMGVRTRRGNPFESRSVERILKNPFYYGLVAWNGITFMGTHEVHYSKERFEARMKKIQTTYKPLKRRDVSSCKHWLSGILKCGYCGASLAYNGANRHSPGFQCYKYSKGIHTESCSISEKKVIAALEEYFEKLLSGMDFEYSYHSAETGAKISERESLLSELDKISNREKRIRLAYENEVDTLEEYKRNKERLQKDREDILMQLENLNKNNEDTKTKSDVLKNVQTVYDVIKNDAIDYGTKGVFMRSLVEDIVYDKKNGKLIFHLYIS

SEQ ID NO: 7455 - protein, 472 aa, Unknown
  Description of Unknown: Integrase B7456 sequence
  IPR036162,PS51737,IPR011109,PTHR30461,PS00397, PF00239,G3DSA:1.10.10.2600,IPR006119,SSF53041,cd00338, SM00857,IPR025827,SSF90257,IPR038109,PS51736, IPR006118,PF13408,G3DSA:3.40.50.1390,PF07508,Coil
MSDRIGALYIRVSTDDQAELSPDAQKRLLLDYAKKNGIIISNDFIFSESVSGRHVQKRPEFQRMIGIAKQPSHPIDVILVWKYSRFARNQEESIVYKSMLKKDHVEVISVSEPLVDGPFGTLIERIIEWMDEYYSIRLSGEVLRGMKEKALRNGYQSSPCLGYEAVGHGKPYQINEAEYAMVSYIMDLYDNQNMDETAIARKCNDLGYKTKRGNPFERRTIDRILQNPFYCGIVSWNGVEFEGAHEVRISKERFDRRQRLIASRKRPMKTRNVSTCKHWLSGLLKCSVCGATLSYTGNGKCPYFQCWKYAKGFHKTSVALSVRKAEEAVITYFDQILSGADFTYIRKDEPTADNTAAIEQIQRELSKLSTRENRIRDAYESGIDTLEEYKANKDRLINNRLQLENELETLQKEQEEKELNKDDVLHEIKSVNDILKNPDVSYEEKGTLIRTIVDQIVYDKESGKMYFDIIVS

SEQ ID NO: 7456 - protein, 472 aa, Unknown
  Description of Unknown: Integrase B7457 sequence
  IPR036162,PS51737,IPR011109,PTHR30461,PS00397, PF00239,G3DSA:1.10.10.2600,IPR006119,SSF53041,cd00338, SM00857,IPR025827,IPR038109,PS51736,IPR006118, PF13408,G3DSA:3.40.50.1390,PF07508,Coil
MSVKYAYGYVRVSTDKQEELSPDSQEKLLREYAAKNNIIILKVFFEIGISGRKADKRPEFQKMIGLAKSSDHPVDVILVWKFSRFARNQEESIVYKSLLRKQSNVDVVSVSEPLIDGPFGSLIERIIEWMDEYYSIRLSGEVLRGMKEKATKKGYQMSPPFGYRAVGNGDPYKIVPDEMKVVDFICDEFDYRNSDTTKITRKLNDMGVRTRRGNPFESRSVERILKNPFYYGLVAWNGITFMGTHEVHYSKERFEARMKKIQTTYKPLKRRDVSSCKHWLSGILKCGYCGASLAYNGANRHSPGFQCYKYSKGIHTESCSISEKKVVAALEEYFEKLLSGMDFEYSYHSAETGEKISERESLLSELDKISNREKRIRLAYENEVDTLEEYKRNKERLRKDREDILMQLENLNKNNEDAKTKSDVLKNVQTVYDVIKNDAIDYDTKGIFMRSLVEDIVYDKKNGKLIFHLYIS

SEQ ID NO: 7457 - protein, 472 aa, Unknown
  Description of Unknown: Integrase B7458 sequence
  IPR036162,PS51737,IPR011109,PTHR30461,PS00397, PF00239,G3DSA:1.10.10.2600,IPR006119,SSF53041,cd00338, SM00857,IPR025827,SSF90257,IPR038109,PS51736, IPR006118,PF13408,G3DSA:3.40.50.1390,PF07508,Coil
MSDRIGALYIRVSTDDQAELSPDAQKRLLLDYAKKNGIIISNDFIFSESVSGRHVQKRPEFQRMIGIAKQPSHPIDVILVWKYSRFARNQEESIVYKSMLKKDHVEVISVSEPLVDGPFGSLIERIIEWMDEYYSIRLSGEVLRGMKEKALRNGYQSSPCLGYEAVGHGKPFQINEVEYAMVSYIMDLYDNQNMDETAIARKCNDLGYTTKRGNPFERRTVDRILQNPFYCGIVSWNGIQFEGTHEVRISKERFDRRQKLIASRRRPMKARNVSTCKHWLSGLLKCSVCGATLSYTGNNKCPYFQCWKYAKGFHKTSVALSVKKAEEAVTAYFDQILSGTDFTYVRKDQPAADETAAIEQLQKELSKLSARESRSRDAYESGIDSLEEYKANKERLISNRLQLESELEKLRKEQEEKEVSKEDVLHEIKSVNDILKDPDVSYEEKGTLIRTIVDQIVYDKESGKMYFDIIVS

SEQ ID NO: 7458 - protein, 472 aa, Unknown
  Description of Unknown: Integrase B7459 sequence
  SM00857,G3DSA:1.10.10.2600,IPR036162,PF13408,PS51737, G3DSA:3.40.50.1390,IPR025827,IPR006119,IPR038109,PF07508, IPR011109,SSF53041,PF00239,PTHR30461,PS51736, Coil,cd00338
MEKVAIYIRVSKKEQTRDKGSDSSLNLQLKKCLDYCKEKGYEVLKVYQDIESGRIDDRKEFNELFEAISKKIYTKIVFWEISRIARKISTGMKFFEELELYKITFDSISQPYLKDFMTLSIFLAWGTEDLKQMSLRIKSNLEEKTKAGYFVHGRPATGYIRGKNKMIIPDPEKAPYILSIFETYAKNFNLTETARIFNKTRMDIVDIIDNKIYIGYVPFRKYIQELNQKKRIQVSKKDIKWYKGLHEPIVPLELFEFCQSIREKNIKSRAAYGDYKPHLLFSSMIYCECGDKMYQQKRNRTYKDNTNYVYYSYSCKNRKHKKSFSARIMDKTIKEMILNSKELEDLNNYNSNDIEKSEKKLLKLENNLKLLENERERIINLFQKSYISEDELENKFKDLNTRIQIAKEKKIEFENTLNIPRNNDIKVLEKLKFIIENYDEEDVIETRKILKMIIKEIRVISFYPLKISILFY

SEQ ID NO: 7459 - protein, 472 aa, Unknown
  Description of Unknown: Integrase B7460 sequence
  cd03768,PTHR30461:SF3,SM00857,G3DSA:1.10.10.2600,IPR036162, PF13408,IPR025827,PS51737,G3DSA:3.40.50.1390,IPR006119, IPR038109,PF07508,IPR011109,SSF53041,PTHR30461, PS51736,Coil,PF00239
MQTKRKVAIYSRVSTLHQAEEGYSIGQQIEALTKYCQAMGWVIYDNYSDGGFSGGKLERPAMQKMIQDAESGKFDTVVVYKLDRLSRNVRDTLYLVKDVFNANNVDFVSLQENIDTKSAMGNLFITLLSAIAEFEREQIKERMQLGVKGRAKSGKTTSWHTPPYGYVYNQETQMLNIEPFAAETVKNIFDKLNSGWSIMEITTFLRKNHPDNWRPTKVTRILSNISYTGKVKYKGEIFDGLHEPIISDETYTRAQQMLRERSEKATNTRAFQGKYLLSRIVKCGYCGAPLQIDSYRPKKDGTRTRTYSCPNRFTGRAKATIYNNGKFCEKSRRHKADDIEKYVLTEISKLQLNPKIIESLYKGKPEANLDIYYNQLKKVNDKLSKLNDLYINSLIDLDNLKEKSDKILKEKNSIEEIIAKNKNKPNNKPAFEKVIKMEDISTMTYEEQKKIVRMLVSRVEVTPDEIRLIFKL

SEQ ID NO: 7460 - protein, 472 aa, Unknown
  Description of Unknown: Integrase B7461 sequence
  PTHR30461:SF3,cd00338,SM00857,IPR006118,G3DSA:1.10.10.2600, IPR036162,PS51737,G3DSA:3.40.50.1390,IPR006119,IPR038109, IPR011109,SSF53041,PTHR30461,PS00397,PS51736, Coil,PF00239
MMRAAIYIRVSTDEQARHGFSLAEQEHDLTEYADKHHYIVVGVYADEGSSARKSIARRKQLQRLLDDVRADRVDIILLKCLDRWFRNVADFYKVQAILDEHKVQWVCTQEDYNTTTTNGRLMLNLKLSIAQNESDQTADRIKYVNQGILRRKREIGGKAPFGYRFVDLEDGGKRIAVVEEQRAAVEFIFRSHLSGHSPMKIAHDVFVQYGIPITRRRVRCVLRNETYTGRRYGIDDFCPAIISPDTFRQAQERIAGHKSWPKKRDFLYLFRGKVICPSCGRILFGHHGDHKKKNGYISHYCNYWCCKHFVFGAPDVAAGGCAYGGAVSERSIERYLLDHLAELLESYQLDISKRRSSSRLSPDQRIQTAAAKLTRLKDLYVDGFIDKSTYQADYTKLQQEISAALAEKQATRATPEAVQNLILHADDIRKIYATMDRQHKYDLWQSTIKSIKIGEPRPSRGRAYKNFIVEFY

SEQ ID NO: 7461 - protein, 472 aa, Unknown
  Description of Unknown: Integrase B7462 sequence
  IPR036162,PS51737,IPR011109,PTHR30461,PS00397, PF00239,G3DSA:1.10.10.2600,IPR006119,SSF53041,cd00338, SM00857,IPR025827,IPR038109,PS51736,IPR006118, PF13408,G3DSA:3.40.50.1390,PF07508,Coil
MSDRIGALYIRVSTDDQAELSPDAQKRLLLDYAKKNGIIISNDFIFSESVSGRHVQKRPEFQRMIGIAKQPSHPIDVILVWKYSRFARNQEESIVYKSMLKKDHVEVISVSEPLIDGPFGSLIERIIEWMDEYYSIRLSGEVLRGMKEKALRNGYQSSPCLGYEAIGHGKPYQINEAEYAMVSYIMDLYDNQNMDETAIARKCNDLGYKTKRGNPFERRTIDRILQNPFYCGIVSWNGVEFEGAHEVRISKERFDRRQRLIASRKRPMKARSVSTCKHWLSGLLKCSVCGATLSYTGNGKCPYFQCWKYAKGFHKTSVALSVRKAEEAVITYFDQILSGADFTYVRKDEPTADNTAAIEQIQRELSKLATRENRIRDAYESGIDTLEEYKANKDRLISNRLQLENELEVLQKEQKDKELNKDDVLYEIKSVNDILKNPDVSYEEKGTLIRTIVDQIVYDKESGKMYFDIIVS

SEQ ID NO: 7462 - protein, 472 aa, Unknown
  Description of Unknown: Integrase B7463 sequence
  PTHR30461:SF3,SM00857,IPR006118,G3DSA:1.10.10.2600,IPR036162, PS51737,G3DSA:3.40.50.1390,Coil,IPR006119,IPR038109, PF07508,IPR011109,SSF53041,PTHR30461,PS00397, PS51736,cd00338,PF00239
MKIAAAYVRVSTEDQTELSPASQIKQIREYAKNHGYIVPDEYIFADEGISGKNTQKRPAFNRMIGLAKTKPKPFECILLWKYSRFARNREDSIVYKSMLRKQLGIDVISISENLGDDKMSILIEALIEAMDEYYSINLAEEVKRGMTERVSRGEAVSVPAYGYDIEEGKYIINEAEAEVVRQIFSDFNNGIGTVTIARNLNAIGIKTKRGKLWENRTVKYILHNPVYIGKIRWNPEEITGLNYDHEKIMLVDGIHEPLLTKDLWDSVQEKLSLMKKTRKPRERSNPTPDYMLYGLMRCGSCGGTLTQSRDGLQCHKYAHGTCDTSHYISLSKANTAVIDLIQHTLENGIFTLTPKKQDVSTQQIAMIDKQIQSEKNKLIRVKEAFEYGVDTLEEYKENKNKILQKISELESSKPVQQTNIDKKKFAQKYLGVIDTLKDDTVSEADKNHILRQFVEKIVLHRPSNEIEIFYYY

SEQ ID NO: 7463 - protein, 472 aa, Unknown
  Description of Unknown: Integrase B7464 sequence
  IPR036162,PS51737,IPR011109,PTHR30461,PS00397, PF00239,G3DSA:1.10.10.2600,IPR006119,SSF53041,cd00338, SM00857,IPR025827,SSF90257,IPR038109,PS51736, IPR006118,PF13408,G3DSA:3.40.50.1390,PF07508,Coil
MSDRIGALYIRVSTDDQAELSPDAQKRLLLDYAKKNGIIISNDFIFSESVSGRHVQKRPEFQRMIGIAKQPSHPIDVILVWKYSRFARNQEESIVYKSMLKKDHVEVISVSEPLIDGPFGSLIERIIEWMDEYYSIRLSGEVLRGMKEKALRNGYQSSPCLGYEAVGHGKPFQINEAEYAMVSYIMDLYDNQNMDETAIARKCNDLGYKTKRGNPFERRTIDRILQNPFYCGIVSWNGVEFEGAHEVRISKERFDRRQRLIASRKRPMKARNISTCKHWLSGLLKCSVCGATLSYTGNGKCPYFQCWKYAKGFHKTSVALSVKKAEEAVIEYFDQVLAGADFTYVRKEQPAADETAAIEQLQKELSKLSTRENRIRDAYESGIDSLEEYKANKERLISNRLQLETELEKLRKEQEEKEVNKEDVLHEIKSLNDILKNPDVSYEEKGTLIRTIVDQIVYDKESGKMYFDIIVS

SEQ ID NO: 7464 - protein, 472 aa, Unknown
  Description of Unknown: Integrase B7465 sequence
  IPR036162,PS51737,IPR011109,PTHR30461,PS00397, PF00239,G3DSA:1.10.10.2600,IPR006119,SSF53041,cd00338, SM00857,IPR025827,SSF90257,IPR038109,PS51736, IPR006118,PF13408,G3DSA:3.40.50.1390,PF07508,Coil
MSDRIGALYIRVSTDDQAELSPDAQKRLLLDYAKKNGIIISNDFIFSESVSGRHVQKRPEFQRMIGIAKQPSHPIDVILVWKYSRFARNQEESIVYKSMLKKDHVEVISVSEPLIDGPFGSLIERIIEWMDEYYSIRLSGEVLRGMKEKALRNGYQSSPCLGYEAVGHGKPFQINEAEYAMVSYIMDLYDNQNMDETAIARKCNDLGYKTKRGNPFERRTIDRILQNPFYCGIVSWNGVEFEGAHEVRISKERFDRRQRLIASRKRPMKARNISTCKHWLSGLLKCSVCGATLSYTGNGKCPYFQCWKYAKGFHKTSVALSVKKAEEAVIEYFDQVLAGADFTYVRKEQPAADETAAIEQLQKELSKLSARESRIRDAYESGIDSLEEYKTNKERLISNRLQLETELEKFRKEQEEKEVNKEDVLHEIKSLNDILKNPDVSYEEKGTLIRTIVDQIVYDKESGKMYFDIIVS

SEQ ID NO: 7465 - protein, 472 aa, Unknown
  Description of Unknown: Integrase B7466 sequence
  PTHR30461:SF3,SM00857,IPR006118,G3DSA:1.10.10.2600,IPR036162, PS51737,G3DSA:3.40.50.1390,Coil,IPR006119,IPR038109, PF07508,IPR011109,SSF53041,PTHR30461,PS00397, PS51736,cd00338,PF00239
MKTAAAYIRVSTDDQIEYSPDSQLKAIRDYARKNDMILPEEFVFIDEGISGRKAEKRPEFMKMIGTAKMKPKQFDVILLWKFSRFARNREDSIVYKSMLRKQCGIDVISVSEQLGEDKTSILIEALIEAMDEYYSINLAEEVRRGMTEKAQRGEVVSAPPFGYDIKDNVFIPDPEAAPIVKMIFDKYLNGQGCLEIAKELNKMGIKTKHGNKWENRGVEYVLRNVVYTGKLTWTPIKTKTRDYNCKDTIISRGMHEPIIDQETFDKVQNMILEKKKLFPKHSRQSSNEFMLKGFLKCSNCGGALVYATNNRVQCNRYSKGTCEVSHSVSLSKLNSSVISALKSDLETQQFKIYKKAAEEQDNKDITPTLIAKERKKLERVKDAYEAGIDSLEEYRINKEKILKTIAELEKNKKPESSQKDDFQKLSKTIKKSLDILEDENCSESIKNITLRSFVRQIVYMKKTQSIEILYQI

SEQ ID NO: 7466 - protein, 472 aa, Unknown
  Description of Unknown: Integrase B7467 sequence
  IPR036162,PS51737,IPR011109,PTHR30461,PS00397, PF00239,G3DSA:1.10.10.2600,IPR006119,SSF53041,cd00338, SM00857,IPR025827,IPR038109,PS51736,IPR006118, PF13408,G3DSA:3.40.50.1390,PF07508,Coil
MSVKYAYGYVRVSTDKQEELSPDSQEKLLREYAAKNNIVILKIFFELGISGRKADKRPEFQKMIGLAKSSDHPVDVILVWKFSRFARNQEESIVYKSLLRKQSNVDVVSVSEPLIDGPFGSLIERIIEWMDEYYSIRLSGEVLRGMKEKAAKKGYQMSPPFGYRAVGNGDPYKIDQDEMKIVDFICDEFDYHNSDVTKITRKLNDMGVRTRRGNPFESRSVERILKNPFYYGLVAWNGITFMGTHEVHYSKERFEARMKKIQTTYKPLKRRDVSSCKHWLSGILKCGYCGASLAYNGANRHSPGFQCYKYSKGIHTESCSISEKKVIAALEEYFEKLLSGMDFEYSYHSAETGEKISERESLLSELDKISNREKRIRLAYENEVDTLEEYKRNKERLQKDREDILMQLENLNKNNEDTKTKSDVLKNVQTVYDVIKNDAIDYGTKGIFMRSLVEDIVYDKKNSKLIFHLYIS

SEQ ID NO: 7467 - protein, 472 aa, Unknown
  Description of Unknown: Integrase B7468 sequence
  IPR036162,PS51737,IPR011109,PTHR30461,PS00397, PF00239,G3DSA:1.10.10.2600,IPR006119,SSF53041,cd00338, SM00857,IPR025827,IPR038109,PS51736,IPR006118, PF13408,G3DSA:3.40.50.1390,PF07508,Coil
MSVKYAYGYVRVSTDKQEELSPDSQEKLLREYATKNNIVILKVFFELGISGRKADKRPEFQKMIGLAKSSDHPVDVILVWKFSRFARNQEESIVYKSLLRKQSNVDVVSVSEPLIDGPFGSLIERIIEWMDEYYSIRLSGEVLRGMKEKATKKGYQMSPPFGYRAVGNGDPYKIDQDEMKIVDFICDEFDYHNSDVTKITRKLNDMGVRTRRGNPFESRSVERILKNPFYYGLVAWNGITFMGTHEVHYSKERFEARMKKIQTTYKPLKRRDVSSCKHWLSGILKCGYCGASLSYNGANRHSPGFQCYKYSKGIHTESCSISEKKVIAALEEYFEKLLSGMDFEYSYHSAETGEKISERESLLSELDKISNREKRIRLAYENEVDTLEEYKRNKERLQKDREDILMQLENLDKNNGDTKTKSDVLKNVQTVYDVIKNDAIDYDTKGIFMRSLVEDIVYDKKNGKLIFHLYIS

SEQ ID NO: 7468 - protein, 472 aa, Unknown
  Description of Unknown: Integrase B7469 sequence
  IPR036162,PS51737,IPR011109,PTHR30461,PS00397, PF00239,G3DSA:1.10.10.2600,IPR006119,SSF53041,cd00338, SM00857,IPR025827,IPR038109,PS51736,IPR006118, PF13408,G3DSA:3.40.50.1390,PF07508,Coil
MSARYAYGYVRVSTDKQEELSPDSQEKLLREYAAKNNIIILKVFFEIGISGRKADKRPEFQKMIGLAKSSDHPVDVILVWKFSRFARNQEESIVYKSLLRKQSNVDVVSVSEPLIDGPFGSLIERIIEWMDEYYSIRLSGEVLRGMKEKATKKGYQMSPPFGYRAVGNGDPYKIDQDEMKIVDFICDEFDYHNSDVTKITRKLNDMGVRTRRGNPFESRSVERILKNPFYYGLVAWNGITFMGTHEVHYSKERFEARMKKIQTTYKPLKRRDVSSCKHWLSGILKCGYCGASLAYNGANRHSPGFQCYKYSKGVHTESCSISEKKVIAALEEYFEKLLSGMDFEYSYHSAETGEKISERESLLSELDKISNREKRIRLAYENEVDTLEEYKRNKERLQKDREDILMQLENLDKNNGDTKTKSDVLKNVQTVYDVIKNDAIDYDTKGIFMRSLVEDIVYDKKNGKLIFHLYIS

SEQ ID NO: 7469 - protein, 472 aa, Unknown
  Description of Unknown: Integrase B7470 sequence
  IPR036162,PS51737,IPR011109,PTHR30461,PS00397, PF00239,G3DSA:1.10.10.2600,IPR006119,SSF53041,cd00338, SM00857,IPR025827,SSF90257,IPR038109,PS51736, IPR006118,PF13408,G3DSA:3.40.50.1390,PF07508,Coil
MSDRIGALYIRVSTDDQAELSPDAQKRLLLDYAKKNGIIISNDFIFSESVSGRHVQKRPEFQRMIGIAKQPSHPIDVILVWKYSRFARNQEESIVYKSMLKKDHVEVISISEPLIDGPFGSLIERIIEWMDEYYSIRLSGEVLRGMKEKALRNGYQSSPCLGYEAVGHGKPYQINEAEYAMVSYIMDLYDNQNMDETAIARKCNDLGYKTKRGNPFERRTIDRILQNPFYCGIVSWNGVEFEGAHEVRISKERFDRRQRLIASRKRPMKARNVSTCKHWLSGLLKCSVCGATLSYTGNGKCPYFQCWKYAKGFHKTSVALSVKKAEEAVIAYFDQILSGEDFTYVRKDEPTADNTAAIEQIQRELSKLSTRENRIRDAYESGIDTLEEYKANKDRLISNRLQLENELEALQTEQKEKELNKDDVLHEIKSVNDILKNPDVSYEEKGTLIRTIVDQIVYDKESGKMYFDIIVS

SEQ ID NO: 7470 - protein, 472 aa, Unknown
  Description of Unknown: Integrase B7471 sequence
  IPR036162,PS51737,IPR011109,PTHR30461,PS00397, PF00239,G3DSA:1.10.10.2600,IPR006119,SSF53041,cd00338, SM00857,IPR025827,IPR038109,PS51736,IPR006118, PF13408,G3DSA:3.40.50.1390,PF07508,Coil
MSARYAYGYVRVSTDKQEELSPDSQEKLLREYAAKNNIIILKVFFEIGISGRKADKRPEFQKMIGLAKSTDHPVDVILVWKFSRFARNQEESIVYKSLLRKQSNVDVVSVSEPLIDGPFGSLIERIIEWMDEYYSIRLSGEVLRGMKEKAAKKGYQMSPPFGYRAVGNGDPYKIDPDEMKVVDFICDEFDYRNSDTTKITRKLNDMGVRTRRGNPFESRSVERILKNPFYYGLVAWNGITFMGTHEVHYSKERFEARMKKIQTTYKPLKRRDVSSCKHWLSGILKCGYCGASLAYNGANRHSPGFQCYKYSKGIHTESCSISEKKVIAALEEYFEKLLSGMDFEYSYHSAETGAKISERESLLSELDKISNREKRIRLAYENEVDTLEEYKRNKERLQKDREDILMQLENLNKNNEDTKTKSDVLKNVQTVYDVIKNDAIDYGTKGVFMRSLVEDIVYDKKNGKLIFHLYIS

SEQ ID NO: 7471 - protein, 472 aa, Unknown
  Description of Unknown: Integrase B7472 sequence
  IPR036162,PS51737,IPR011109,PTHR30461,PS00397, PF00239,G3DSA:1.10.10.2600,IPR006119,SSF53041,cd00338, SM00857,IPR025827,IPR038109,PS51736,IPR006118, PF13408,G3DSA:3.40.50.1390,PF07508,Coil
MSARYAYGYVRVSTDKQEELSPDSQEKLLREYAAKNNIIILKVFFEIGISGRKADKRPEFQKMIGLAKSSDHPVDVILVWKFSRFARNQEESIVYKSLLRKQSNVDVVSVSEPLIDGPFGSLIERIIEWMDEYYSIRLSGEVLRGMKEKATKKGYQMSPPFGYRAVGNGDPYKIDPDEMKVVDFICDEFDYRNSDATKITRKLNDMGVRTRRGNPFESRSVERILKNPFYYGLVAWNGITFMGTHEVHYSKERFEARMKKIQTTYRPLKRRDVSSCKHWLSGILKCGYCGASLAYNGANRHSPGFQCYKYSKGIHTESCSISEKKVIAALEEYFEKLLSGMDFEYSYHSAETGAKISERESLLAELDKISNREKRIRLAYENEVDTLEEYKRNKERLQKDREDILEQLKNLDKNNEDTKTKSDVLKNVQTVYDVIKNDAIDYDTKGIFMRSLVEDIVYDKKNGKLIFHLYIS

SEQ ID NO: 7472 - protein, 472 aa, Unknown
  Description of Unknown: Integrase B7473 sequence
  PTHR30461:SF3,cd00338,SM00857,G3DSA:1.10.10.2600,IPR036162, PF13408,IPR025827,G3DSA:3.40.50.1390,PS51737,IPR006119, IPR038109,PF07508,SSF53041,IPR011109,PTHR30461, PS51736,Coil,PF00239
MTQKTAVIYARFSCSKQREASIEDQLRVCREWCSREGYEVVKEYSDYALSGRSDDRPQFQTMIANAGESDIVLVYMMDRFSRDEYDAPVYKRELRKHGVELYSAMEAMPDGPERILIEKIYEGLAAVESAKTAIRVKRGMTGNALKCKTNGVRLFGYNEGEDGCYVINEDEAVLVREAFKRKIEGEPVNHIASDFAKRGVKTYVGRPCGYNMIYHMLKSEKYMGVYSWGDVRVEGGMPAIVDKGTFMRAQEIKTKKRRKDENWCDYALAGRVICASCGRNFYGMSGHSRSGKRYDYYTCGSCKEVKAVRKDWLEGEITSRIREMLKDRDTATRIAEMVADAQDDKTTREARKSAQNAKQSAETGLANILAAIEQGIIAPGTQERIAQLEIQRDKAERDLASLKDRTIDPEDFVDFLMFGATLDDKQLLDAFVYQVMVSNEDVIVVLNYNTKENEPARFTFERVRTNLRWCAI

SEQ ID NO: 7473 - protein, 472 aa, Unknown
  Description of Unknown: Integrase B7474 sequence
  cd03768,PTHR30461:SF3,SM00857,G3DSA:1.10.10.2600,IPR036162, PF13408,IPR025827,PS51737,G3DSA:3.40.50.1390,IPR006119, IPR038109,PF07508,IPR011109,SSF53041,PTHR30461, PS51736,Coil,PF00239
MQTKRKVAIYSRVSTLHQAEEGYSIGQQIEALTKYCQAMGWVIYDNYSDGGFSGGKLERPAMQKMIQDAKSGKFDTVVVYKLDRLSRNVRDTLYLVKDVFNANNVDFVSLQENIDTKSAMGNLFITLLSAIAEFEREQIKERMQLGVKGRAKSGKTTSWTTPPFGYEYDTNTQLMTINHYQAEIVRDMFDKIISGWSIMGITTHLRKTNNKKWTHVRVKRILENVAYIGKVKYRDEIFDGEHAPILTEEIFYKAQKALEERTSKKDNTRPFQGLYMLSNIAKCGYCGTPLKIDSYKPRKDGTRKRTYTCINRNPKRIKTATYNDGKQCKESGRYDVKDVERYVLNEISKLQLNPKSIESLYRDKPEENITAHQERLKKLETKLSKLNDLYINELISMEALKQKSAELLKEKSSLETFINNNKRKINNKPAFEKVAKMDDVFKMSYDDQKKIVKTLIKRVEVKRDEINVIFKL

SEQ ID NO: 7474 - protein, 472 aa, Unknown
  Description of Unknown: Integrase B7475 sequence
  IPR036162,PS51737,IPR011109,PTHR30461,PS00397, PF00239,G3DSA:1.10.10.2600,IPR006119,SSF53041,cd00338, SM00857,IPR025827,IPR038109,PS51736,IPR006118, PF13408,G3DSA:3.40.50.1390,PF07508,Coil
MSVKYAYGYVRVSTDKQEELSPDSQEKLLREYATKNNIVILKVFFELGISGRKADKRPEFQKMIGLAKSSDHPVDVILVWKFSRFTRNQEESIVYKSLLRKQSNVDVVSVSEPLIDGPFGSLIERIIEWMDEYYSIRLSGEVLRGMKEKATKKGYQMSPPFGYRAVGNGDPYKIDQDEMKIVDFICDEFDYHNSDVTKITRKLNDMGVRTRRGNPFESRSVERILKNPFYYGLVAWNGITFMGTHEVHYSKERFEARMKKIQTTYKPLKRRDVSSCKHWLSGILKCGYCGASLSYNGANRHSPGFQCYKYSKGIHTESCSISEKKVIAALEEYFEKLLSGMDFEYSYHSAETGEKISERESLLSELDKISNREKRIRIAYENEVDTLEEYKRNKERLRKDREDILMQLENLNKNNEDAKTKSDVLKNVQTVYDVIKNDAIDYDTKGIFMRSLVEDIVYDKKNGKLVFHLYIS

SEQ ID NO: 7475 - protein, 472 aa, Unknown
  Description of Unknown: Integrase B7476 sequence
  IPR036162,PS51737,IPR011109,PTHR30461,PS00397, PF00239,G3DSA:1.10.10.2600,IPR006119,SSF53041,cd00338, SM00857,IPR025827,IPR038109,PS51736,IPR006118, PF13408,G3DSA:3.40.50.1390,PF07508,Coil
MSARYAYGYVRVSTDKQEELSPDSQEKLLREYAVKNNIIILKVFFEIGISGRKADKRPEFQKMIGLAKSSDHPVDVILVWKFSRFARNQEESIVYKSLLRKQSNVDVVSVSEPLIDGPFGSLIERIIEWMDEYYSIRLSGEVLRGMKEKATKKGYQMSPPFGYRAVGNGDPYKIDPDEMKVVDFICDEFDYHNSDTTKITRKLNDMGVRTRRGNPFESRSVERILKNPFYYGLVAWNGITFMGTHEVHYSKERFEARMKKIQTTYKPLKRRDVSSCKHWLSGILKCGYCGASLAYNGANRHSPGFQCYRYSKGMHAESCSISEKKVVAALEEYFEKLLSGMDFEYSYHSAETGEKISERESLLSELDKISNREKRIRIAYENEVDTLEEYKRNKERLQKDREDILMQLENLNKNNEDTKTKSDVLKNVQTVYDVIKNDAIDYGTKGIFMRSLVEDIVYDKKNSKLIFHLYIS

SEQ ID NO: 7476 - protein, 472 aa, Unknown
  Description of Unknown: Integrase B7477 sequence
  IPR036162,PS51737,IPR011109,PTHR30461,PS00397, PF00239,G3DSA:1.10.10.2600,IPR006119,SSF53041,cd00338, SM00857,IPR025827,IPR038109,PS51736,IPR006118, PF13408,G3DSA:3.40.50.1390,PF07508,Coil
MSDRIGALYIRVSTDDQAELSPDAQKRLLLDYAKKSGIIISNDFIFSESVSGRHVQKRPEFQRMIGIAKQPSHPIDVILVWKYSRFARNQEESIVYKSMLKKDHVEVISVSEPLVDGPFGSLIERIIEWMDEYYSIRLSGEVLRGMKEKALRNGYQSSPCLGYEAVGHGKPYQINEAEYAMVSYIMDLYDNHNMDETAIARKCNDLGYKTKRGNLFERRTIDRILQNPFYCGIVSWNGVEFEGAHEVRISKERFDRRQRLIASRKRPMKARNVSTCKHWLSGLLKCSVCGATLSYTGNGKCPYFQCWKYAKGFHKTSVALSVKRAEEAVISYFDQILSGTDFTYVRKDQPATDETVAIEQLQKELSKLSTRESRIRDAYESGIDSLEEYKANKERLISNRLQLETGLEKLRKEQKEKEVTKEDVLHEIKSVNDILKNPDVSYEEKGTLIRTIVDQIVYDKESGKMYFDIIVS

SEQ ID NO: 7477 - protein, 472 aa, Unknown
  Description of Unknown: Integrase B7478 sequence
  IPR036162,PS51737,IPR011109,PTHR30461,PS00397, PF00239,G3DSA:1.10.10.2600,IPR006119,SSF53041,cd00338, SM00857,IPR025827,IPR038109,PS51736,IPR006118, PF13408,G3DSA:3.40.50.1390,PF07508,Coil
MSDRIGALYIRVSTDDQAELSPDAQKRLLLDYAKKSGIIISNDFIFSESVSGRHVQKRPEFQRMIGIAKQPSHPIDVILVWKYSRFARNQEESIVYKSMLKKDHVEVISVSEPLVDGPFGSLIERIIEWMDEYYSIRLSGEVLRGMKEKALRNGYQSSPCLGYEAVGHGKPYQINEAEYAMVSYIMDLYDNHNMDETAIARKCNDLGYKTKRGNLFERRTIDRILQNPFYCGIVSWNGVEFEGAHEVRISKERFDRRQQLIASRKRPMKARNVSTCKHWLSGLLKCSVCGATLSYTGNGKCPYFQCWKYAKGFHKTSVALSVKRAEEAVISYFDQILSGTDFTYVRKDQPATDETVAIEQLQKELSKLSTRESRIRDAYESGIDSLEEYKANKERLISNRLQLETGLEKLRKEQKEKEVTKEDVLHEIKSVNDILKNPDVSYEEKGTLIRTIVDQIVYDKESGKMYFDIIVS

SEQ ID NO: 7478 - protein, 472 aa, Unknown
  Description of Unknown: Integrase B7479 sequence
  PTHR30461:SF3,IPR036162,PS51737,IPR011109,PTHR30461, PS00397,PF00239,G3DSA:1.10.10.2600,IPR006119,SSF53041, cd00338,SM00857,IPR025827,IPR038109,PS51736, IPR006118,PF13408,G3DSA:3.40.50.1390,PF07508,Coil
MVKYAYGYIRVSTDKQEELSPDSQEKLLREYATKNNIIILKFFYEIGISGRKADKRPEFQSMIGLAKSPDHPVDLILVWKFSRFARNQEESIVYKSLLRQKSNVDVVSVSEPLIDGPFGSLIERIIEWMDEYYSIRLSGEVLRGMREKAEQNGYQFIPPLGYQAVGGGKPFVINENEYKIYQYIADEYDLRNSGISTIARKLNDLGLQTRRGRPFEMRSIRRLLQNPFYYGLVVWNGVSFVGTHEVRITKERFDARMQKMQSQYAPARRRDVSSCRHWLSGLLKCGYCGATMCFNGARSSTAGFQCYKYSKGLHKESCFITERKVLAAINEYFEKLLNGMDFEYTYHPPKSAELLSEREPLLQELKKIAMREERIRSAYENGIDTLEEYKRNKERIKQAKEDIQSQLDELNDSSAKPSVTKEDMLAKVRTVYDVIQDPDVDLETKGAFMRSLVEDIVYDKENGKMIFHLYAS

SEQ ID NO: 7479 - protein, 472 aa, Unknown
  Description of Unknown: Integrase B7480 sequence
  IPR036162,PS51737,IPR011109,PTHR30461,PS00397, PF00239,G3DSA:1.10.10.2600,IPR006119,SSF53041,cd00338, SM00857,IPR025827,IPR038109,PS51736,IPR006118, PF13408,G3DSA:3.40.50.1390,PF07508,Coil
MSARYAYGYVRVSTDKQEELSPDSQEKLLREYAAKNNIIILKVFFEIGISGRKADKRPEFQKMIGLAKSSDHPVDVILVWKFSRFARNQEESIVYKSLLRKQSNVDVVSVSEPLIDGPFGSLIERIIEWMDEYYSIRLSGEVLRGMKEKATKKGYQMSPPFGYRAVGNGDPYKIDPDEMKVVDFICDEFDYRNSDTTKITRKLNDMGARTRRGNPFESRSVERILKNPFYYGLVAWNGITFMGTHEVHYSKERFEARIKKIQTTYKPLKRRDVSSCKHWLSGILKCGYCGASLAYNGANRHSPGFQCYKYSKGIHTESCSISEKKVIAALEEYFEKLLSGMDFEYSYHSAETGEKISERESLLAELDKISNREKRIRLAYENEVDTLEEYKRNKERLQKDREDILMQLENLNKNNEDTKTKSDVLKNVQTVYDVIKNDAIDYGTKGIFMRSLVEDIVYDKKNSKLIFHLYIS

SEQ ID NO: 7480 - protein, 472 aa, Unknown
  Description of Unknown: Integrase B7481 sequence
  IPR036162,PS51737,IPR011109,PTHR30461,PS00397, PF00239,G3DSA:1.10.10.2600,IPR006119,SSF53041,cd00338, SM00857,IPR025827,IPR038109,PS51736,IPR006118, PF13408,G3DSA:3.40.50.1390,PF07508,Coil
MSVKYAYGYVRVSTDKQEELSPDSQEKLLREYAAKNNIVILKIFFELGISGRKADKRPEFQKMIGLAKSSDHPVDVILVWKFSRFARNQEESIVYKSLLRKQSNVDVVSVSEPLIDGPFGSLIERIIEWMDEYYSIRLSGEVLRGMKEKATKKGYQMSPPLGYRAVGNGNPYKIDPDEMKIVDFICDEFDHRNSDITKITRRLNDMGVRTRRGNPFESRSVERILKNPFYYGLVVWNGISFMGTHEVHYSKDRFEERMQKIQTTYRPVKRRDVSSCKHWLSGLLKCGYCGASLSYNGSNVHSPGFQCYKYSKGIHAESCSISEKKVIAALKEYFEKLLSGMDFEYSYHSAETGEKISERESLLSELDKITNREKRIRIAYENEVDTLEEYKQNKERLQKDREDILMQLENLDKNNEDTKTKSDVLKNVQTVYDVIKNDAIDYDTKGIFMRSLVEDIVYDKKNGKLIFHLYIS

SEQ ID NO: 7481 - protein, 472 aa, Unknown
  Description of Unknown: Integrase B7482 sequence
  IPR036162,PS51737,IPR011109,PTHR30461,PS00397, PF00239,G3DSA:1.10.10.2600,IPR006119,SSF53041,cd00338, SM00857,IPR025827,IPR038109,PS51736,IPR006118, PF13408,G3DSA:3.40.50.1390,PF07508,Coil
MSARYAYGYVRVSTDKQEELSPDSQEKLLREYAAKNNIIILKVFFEIGISGRKADKRPEFQKMIGLAKSSDHPVDVILVWKFSRFARNQEESIVYKSLLRKQSNVDVVSVSEPLIDGPFGSLIERIIEWMDEYYSIRLSGEVLRGMKEKAAKKGYQMSPPFGYRAVGNGDPYKIDPDEMKVVDFICDEFDYRNSDATKITRKLNDMGVRTRRGNPFESRSVERILKNPFYYGLVAWNGITFMGTHEVHYSKERFEARMKKIQTTYKPLKRRDVSSCKHWLSGILKCGYCGASLAYNGANRHSPGFQCYKYSKGIHTESCSISEKKVIAALEEYFEKLLSGMDFEYSYHSAETGEKISERESLLSELDKISNREKRIRLAYENEVDTLEEYKRNKERLQKDREDILMQLENLDKNNGDTKTKSDVLKNVQTVYDVIKNDAIDYDTKGIFMRSLVEDIVYDKKNGKLIFHLYIS

SEQ ID NO: 7482 - protein, 472 aa, Unknown
  Description of Unknown: Integrase B7483 sequence
  IPR036162,PS51737,IPR011109,PTHR30461,PS00397, PF00239,G3DSA:1.10.10.2600,IPR006119,SSF53041,cd00338, SM00857,IPR025827,IPR038109,PS51736,IPR006118, PF13408,G3DSA:3.40.50.1390,PF07508,Coil
MSVKYAYGYVRVSTDKQEELSPDSQEKLLREYAAKNNIIILKVFFEIGISGRKADKRPEFQKMIGLAKSSDHPVDVILVWKFSRFARNQEESIVYKSLLRKQSNVDVVSVSEPLIDGPFGSLIERIIEWMDEYYSIRLSGEVLRGMKEKATKKGYQMSPPLGYHAVGNGEPYKIDLDEMKIVDFICDEFDYHNSDVTKITRKLNDMGVRTRRGNPFESRSVERILKNPFYYGLVAWNGITFMGTHEVHYSKERFEARMKKIQTTYKPLKRRDVSSCKHWLSGILKCGYCGASLAYNGANRHSPGFQCYRYSKGMHAESCSISEKKVVAALEEYFEKLLSGMDFEYSYHSAETGEKISERESLLSELDKISNREKRIRIAYENEVDTLEEYKRNKERLQKDREDILMQLENLNKNNEDTKTKSDVLKNVQTVYDVIKNDAIDYGTKGIFMRSLVEDIVYDKKNSKLIFHLYIS

SEQ ID NO: 7483 - protein, 472 aa, Unknown
  Description of Unknown: Integrase B7484 sequence
  cd03768,PTHR30461:SF3,SM00857,G3DSA:1.10.10.2600,IPR036162, PF13408,IPR025827,PS51737,G3DSA:3.40.50.1390,IPR006119, IPR038109,PF07508,IPR011109,SSF53041,PTHR30461, PS51736,Coil,PF00239
MQTKRKVAIYSRVSTLHQAEEGYSIGQQIEALTKYCQAMGWVIYDNYSDGGFSGGKLERPAMQKMIQDAKSGKFDTVVVYKLDRLSRNVRDTLYLVKDVFNANNVDFVSLQENIDTKSAMGNLFITLLSAIAEFEREQIKERMQLGVKGRAKSGKTTSWTTPPFGYKYDTNTQSMTVDHYQAEIVRDMFNKIISGWSIMGITTYMRENYDGKWTHVKVKRILENITYIGKVKYRNEIFDGEHAPILTEEIFYKAQKALEERTSKKDNTRPFQGLYMLSNIAKCGYCGTPLKIDSYKPRKDGTRKRTYTCINRNPKRIKTAIYNDGEQCKESGRYDVKDVERYVLNEISKLQLNPKSIESLYRDKPEENITAHQERLKKLETKLSKLNDLYINELISMEALKQKSAELLKEKSSLETFINNNKRKINNKPAFEKVAKMDDVFKMSYDDQKKIVKTLIKRVEVKRDEINVIFKL

SEQ ID NO: 7484 - protein, 471 aa, Unknown
  Description of Unknown: Integrase B7485 sequence
  IPR036162,PS51737,IPR011109,PTHR30461,PS00397, PF00239,G3DSA:1.10.10.2600,IPR006119,SSF53041,cd00338, SM00857,IPR025827,IPR038109,PS51736,IPR006118, PF13408,G3DSA:3.40.50.1390,PF07508,Coil
MSSKVAALYIRVSTEDQTELSPDAQKRLLLDYAQKNDMIVSGDFIFTESVSGRHAQKRPEFQKMIALAKQPSHPIDVILVWKFSRFARNQEESIVYKSMLKKDNVDVISVSEPLIEGPFGSLIERIIEWMDEYYSIRLSGEVLRGMKEKALQKGYQTSPCLGYTAVGHGKPYIINEAEYAIVSYIMDLYDNQNLDETAIARRCNDLGYRTKRGKLFERRSVDRILGNPFYCGTVVWNGVEFEGSHEVRLSRERYEKRQKLITSRKRPVKARNVSACKHWLSGLLKCSVCGATLSYTGNNKCPYFQCWKYAKGFHKTSVALSVKKAEEAVISYFDQILDGAEFTYVCKKKKTDHSLQIDQLQREISKLSMRENRIKEAYEAGVDTLEEYKSNKDRLVSDRLELTAALSQLLQEEQSEQPNTEEILKEIRSVADVLKNPDVGYEEKGNLIRSVVEQIIYDKESGKMSFDIIIS

SEQ ID NO: 7485 - protein, 471 aa, Unknown
  Description of Unknown: Integrase B7486 sequence
  IPR036162,PS51737,IPR011109,PTHR30461,PS00397, PF00239,G3DSA:1.10.10.2600,IPR006119,SSF53041,cd00338, SM00857,IPR025827,IPR038109,PS51736,IPR006118, PF13408,G3DSA:3.40.50.1390,PF07508,Coil
MSSKVACLYIRVSTEDQTELSPDAQKRLLLDYAQKNDMIVSGDFIFTESVSGRHAQKRPEFQKMIALAKQPSHPIDVILVWKFSRFARNQEESIVYKSMLKKDNVDVISVSEPLIEGPFGSLIERIIEWMDEYYSIRLSGEVLRGMKEKALQKGYQTSPCLGYTAVGHGKPYVINEAEYAIVSYIMDLYDNQNLDETAIARRCNDLGYRTKRGKLFERRSVDRILGNPFYCGTVVWNGVEFEGNHEVRLSRERYEKRQKLITSRKRPVKARNVSACKHWLSGLLKCSVCGATLSYTGNNKCPYFQCWKYAKGFHKTSVALSVKKAEEAVISYFDQILDGAEFTYVCKKKKTDHSLQIEQLQKEISKLTMRESRIKEAYEAGVDTLEEYKNNKDRLVSDRLELTAALSQLLQKEQAEQPDTEEILKEIRSVSDVLKNPDVGYEEKGNLIRSVVEQIIYDKESGKMSFDIIIS

SEQ ID NO: 7486 - protein, 471 aa, Unknown
  Description of Unknown: Integrase B7487 sequence
  IPR036162,PS51737,IPR011109,PTHR30461,PS00397, PF00239,G3DSA:1.10.10.2600,IPR006119,SSF53041,cd00338, SM00857,IPR025827,IPR038109,PS51736,IPR006118, PF13408,G3DSA:3.40.50.1390,PF07508,Coil
MSSKVACLYIRVSTEDQTELSPDAQKRLLLDYAQKNDMIVSGDFIFTESVSGRHAQKRPEFQKMIALAKQPSHPIDVILVWKFSRFARNQEESIVYKSMLKKDNVDVISVSEPLIEGPFGSLIERIIEWMDEYYSIRLSGEVLRGMKEKALQKGYQTSPCLGYTAVGHGKPYVINEAEYAIVSYIMDLYDNQNLDETAIARRCNDLGYRTKRGKLFERRSVDRILGNPFYCGTVVWNGVEFEGSHEVRLSRERYEKRQKLITSRKRPVKVRNVSACKHWLSGLLKCSVCGATLSYTGNNKCPYFQCWKYAKGFHKTSVALSVKKAEEAVISYFDQILDGAEFTYVCKKKKTDHSLQIEQLQREISKLTMRESRIKEAYEAGVDTLEEYKNNKDRLVSDRLELTAALSQLLQEEQAEQPDAEEILKEIRSVTDVLKNPDVGYEAKGNLIRSVVEQIIYDKESGKMSFDIIIS

SEQ ID NO: 7487 - protein, 471 aa, Unknown
  Description of Unknown: Integrase B7488 sequence
  IPR036162,PS51737,IPR011109,PTHR30461,PS00397, PF00239,G3DSA:1.10.10.2600,IPR006119,SSF53041,cd00338, SM00857,IPR025827,IPR038109,PS51736,IPR006118, PF13408,G3DSA:3.40.50.1390,PF07508,Coil
MSSKVAALYIRVSTEDQTELSPDAQKRLLLDYAQKNDMIVSGDFIFTESVSGRHAQKRPEFQKMIALAKQPSHPIDVILVWKFSRFARNQEESIVYKSMLKKDNVDVISVSEPLIEGPFGSLIERIIEWMDEYYSIRLSGEVLRGMKEKALQKGYQTSPCLGYTAVGHGKPYIINEAEYAIVSYIMDLYDNQNLDETAIARRCNDLGYRTKRGKLFERRSVDRILGNPFYCGTVVWNGVEFEGSHEVRLSRERYEKRQKLITSRKRPVKARNVSACKHWLSGLLKCSVCGATLSYTGNNKCPYFQCWKYAKGFHKTSVALSVKKAEEAVISYFDQILDGAEFTYVCKKKKTDHSLQIEQLQREINKLTMRESRIKEAYEAGVDTLEEYKSNKDRLVSDRLELTAALSQLLQEEQSEQPNTEEILKEIRSVADVLKNPDVGYEEKGNLIRSVVEQIIYDKESGKMSFDIIIS

SEQ ID NO: 7488 - protein, 471 aa, Unknown
  Description of Unknown: Integrase B7489 sequence
  IPR036162,PS51737,IPR011109,PTHR30461,PS00397, PF00239,G3DSA:1.10.10.2600,IPR006119,SSF53041,cd00338, SM00857,IPR025827,IPR038109,PS51736,IPR006118, PF13408,G3DSA:3.40.50.1390,PF07508,Coil
MSSKVAALYIRVSTEDQTELSPDAQKRLLLDYAQKNDMIVSGDFIFTESVSGRHAQKRPEFQKMIALAKQPSHPIDVILVWKFSRFARNQEESIVYKSMLKKDNVDVISVSEPLIEGPFGSLIERIIEWMDEYYSIRLSGEVLRGMKEKALQKGYQTSPCLGYTAVGHGKPYVINEAEYAIVSYIMDLYDNQNLDETAIARRCNDLGYRTKRGKLFERRSVDRILGNPFYCGTVVWNGVEFEGSHEVRLSRERYEKRQKLITSRKRPVKARNVSACKHWLSGLLKCSVCGATLSYTGNNKCPYFQCWKYAKGFHKTSVALSVKKAEEAVISYFDQILDGAEFTYVCKKKKTDHSLQIEQLQKEIGKLTMRESRIKEAYEAGVDTLEEYKNNKDRLVSDRLELTAALSQLLQEEQAEQPDTEKILKEIRSVADVLKNPDVGYEEKGNLIRSVVEQIIYDKESGKMSFDIIIS

SEQ ID NO: 7489 - protein, 471 aa, Unknown
  Description of Unknown: Integrase B7490 sequence
  IPR036162,PS51737,IPR011109,PTHR30461,PS00397, PF00239,G3DSA:1.10.10.2600,IPR006119,SSF53041,cd00338, SM00857,IPR025827,IPR038109,PS51736,IPR006118, PF13408,G3DSA:3.40.50.1390,PF07508,Coil
MSSKVAALYIRVSTEDQTELSPDAQKRLLLDYAQKNDMIVSGDFIFTESVSGRHAQKRPEFQRMIALAKQPSHPIDVILVWKFSRFARNQEESIVYKSMLKKDNVDVISVSEPLIEGPFGSLIERIIEWMDEYYSIRLSGEVLRGMKEKALQKGYQTSPCLGYTAVGHGKPYVINEAEYAIVSYIMDLYDNQNLDETAIARRCNDLGYRTKRGKLFERRSVDRILGNPFYCGTVVWNGVEFEGNHEVRLSRERYEKRQKLITSRKRPVKARNVSACKHWLSGLLKCSVCGATLSYTGNNKCPYFQCWKYAKGFHKTSVALSVKKAEEAVISYFDQILDGAEFTYVCKKKKTDHSLQIEQLQKEISKLTMRESRIKEAYEAGVDTLEEYKNNKDRLVSDRLELTAALSQLLQEEQADQPDTEEILKEIRSVADVLKNPDVGYEEKGNLIRSVVEQIIYDKESGKMSFDIIIS

SEQ ID NO: 7490 - protein, 471 aa, Unknown
  Description of Unknown: Integrase B7491 sequence
  PTHR30461:SF3,IPR036162,PS51737,IPR011109,PTHR30461, PS00397,PF00239,G3DSA:1.10.10.2600,IPR006119,SSF53041, cd00338,SM00857,IPR025827,IPR038109,PS51736, IPR006118,PF13408,G3DSA:3.40.50.1390,PF07508,Coil
MENRVGALYVRVSTDDQTDLSPDAQRRLLLEYAKKNGIIVPSEFIFSESVSGRHALKRPEFQRMIALAKQSSHPIDVILVWKFSRFARNQEESIVYKSMLKKDNVEVVSVSEPLVDGPFGSLIERIIEWMDEYYSIRLSGEVLRGMKEKALQHGYQSVPSLGYRAVGGGKPFVIDEGEYAIVALIMDLYDNGNLDPTAIARRCNDLGYRTRRGTLFEHRTVMRILQNAFYCGTVAWNGIEFEGSHEVRLSKERFHHRQELIAARHRPAKARSVSACKHWLSGLLRCSTCGGTLARNGCRGYSYFQCWKYTKGFHKGSSAIRIEEAEKAVINYFDGILSGADFSYVRKSQSTIDNTAAIEQLQRELSRLSVKEDRIRDAYENGIDTLEEYKDNKMRLADSRHRLEQELQNLQSTKELPIDREKILEEIRSVNDVLKDPDVSYEEKGNLIRTIVEQIVYDKKTGKMYFDIIVP

SEQ ID NO: 7491 - protein, 471 aa, Unknown
  Description of Unknown: Integrase B7492 sequence
  IPR036162,PS51737,IPR011109,PTHR30461,PS00397, PF00239,G3DSA:1.10.10.2600,IPR006119,SSF53041,cd00338, SM00857,IPR025827,IPR038109,PS51736,IPR006118, PF13408,G3DSA:3.40.50.1390,PF07508,Coil
MSSKVAALYIRVSTEDQTELSPDAQKRLLLDYAQKNDMIVSGDFIFTESVSGRHAQKRPEFQKMIALAKQPSHPIDVILVWKFSRFARNQEESIVYKSMLKKDNVDVISVSEPLIEGPFGSLIERIIEWMDEYYSIRLSGEVLRGMKEKALQKGYQTSPCLGYTAVGHGKPYVINEAEYAIVSYIMDLYDNQNLDETAIARRCNDLGYRTKRGKLFERRSVDRILGNPFYCGTVVWNGVEFEGSHEVRLSRERYEKRQKLITSRKRPVKARNVSACKHWLSGLLKCSVCGATLSYTGNNKCPYFQCWKYAKGFHKTSVALSVKKAEEAVISYFDQILDGAEFTYVCKKKKTDHSLQIEQLQKEIGKLTMRESRIKEAYEAGVDTLEEYKNNKDRLVSDRLELTVALSQLLQEEQAEQPDTEEILKEIRSVSDVLKNPDVGYEEKGNLIRSVVEQIIYDKESGKMSFDIIIS

SEQ ID NO: 7492 - protein, 471 aa, Unknown
  Description of Unknown: Integrase B7493 sequence
  IPR036162,PS51737,IPR011109,PTHR30461,PS00397, PF00239,G3DSA:1.10.10.2600,IPR006119,SSF53041,cd00338, SM00857,IPR025827,IPR038109,PS51736,IPR006118, PF13408,G3DSA:3.40.50.1390,PF07508,Coil
MSSKVAALYIRVSTEDQTELSPDAQKRLLLDYAQKNDMIVSGDFIFTESVSGRHAQKRPEFQKMIALAKQPSHPIDVILVWKFSRFARNQEESIVYKSMLKKDNVDVISVSEPLIEGPFGSLIERIIEWMDEYYSIRLSGEVLRGMKEKALQKGYQTSPCLGYTAVGHGKPYIINEAEYAIVSYIMDLYDNQNLDETAIARRCNDLGYRTKRGKLFERRSVDRILGNPFYCGTVVWNGVEFEGSHEVRLSRERYEKRQKLITSRKRPVKARNVSACKHWLSGLLKCSVCGATLSYTGNNKCPYFQCWKYAKGFHKTSVALSVKKAEEAVISYFDQILDGAEFTYVCKKKKTDHSLQIEQLQKEISKLTMRESRIKEAYEAGVDTLEEYKNNKDRLVSDRLELTAALSQLLQEEQAEQPDTEEILKEIRSVADVLKNPDVGYEEKGNLIRSVVEQIIYDKESGKMSFDIIIS

SEQ ID NO: 7493 - protein, 471 aa, Unknown
  Description of Unknown: Integrase B7494 sequence
  IPR036162,PS51737,IPR011109,PTHR30461,PS00397, PF00239,G3DSA:1.10.10.2600,IPR006119,SSF53041,cd00338, SM00857,IPR025827,IPR038109,PS51736,IPR006118, PF13408,G3DSA:3.40.50.1390,PF07508,Coil
MSSKVAALYIRVSTEDQTELSPDAQKRLLLDYAQKNDMIVSGDFIFTESVSGRHAQKRPEFQKMIALAKQPSHPIDVILVWKFSRFARNQEESIVYKSMLKKDNVDVISVSEPLIEGPFGSLIERIIEWMDEYYSIRLSGEVLRGMKEKALQKGYQTSPCLGYTAVGHGKPYIINEAEYAIVSYIMDLYDNQNLDETAIARRCNDLGYRTKRGKLFERRSVDRILGNPFYCGTVVWNGVEFEGSHEVRLSRERYEKRQKLITSRKRPVKARNVSACKHWLSGLLKCSVCGATLSYTGNNKCPYFQCWKYAKGFHKTSVALSVKKAEEAVISYFDQILDGAEFTYVCKKKKTDHSLQIEQLQKEISKLTMRESRIKEAYEAGVDTLEEYKNNKDRLVSDRLELTTALSQLLQEEQAEQPDTEEILKEIRSVADVLKNPDVGYEEKGNLIRSVVEQIIYDKESGKMSFDIIIS

SEQ ID NO: 7494 - protein, 471 aa, Unknown
  Description of Unknown: Integrase B7495 sequence
  IPR036162,PS51737,IPR011109,PTHR30461,PS00397, PF00239,G3DSA:1.10.10.2600,IPR006119,SSF53041,cd00338, SM00857,IPR025827,IPR038109,PS51736,IPR006118, PF13408,G3DSA:3.40.50.1390,PF07508,Coil
MSSKVACLYIRVSTEDQTELSPDAQKRLLLDYAQKNDMIVSGDFIFTESVSGRHAQKRPEFQKMIALAKQPSHPIDVILVWKFSRFARNQEESIVYKSMLKKDNVDVISVSEPLIEGPFGSLIERIIEWMDEYYSIRLSGEVLRGMKEKALQKGYQTSPCLGYTAVGHGKPYVINEAEYAIVSYIMDLYDNQNLDETAIARRCNDLGYRTKRGKLFERRSVDRILGNPFYCGTVVWNGVEFEGSHEVRLSRERYEKRQKLITSRKRPVKARNVSACKHWLSGLLKCSVCGATLSYTGNNKCPYFQCWKYAKGFHKTSVALSVKKAEEAVISYFDQILDGAEFTYVCKKKKTDHSLQIEQLQREISKLTMRESRIKEAYEAGVDTLEEYKNNKDRLVSDRLELTAALSQLLQEEQAEQPDTEEILKEIRSVADVLKNPDIGYEAKGNLIRSVVEQIIYDKESGKMSFDIIIS

SEQ ID NO: 7495 - protein, 471 aa, Unknown
  Description of Unknown: Integrase B7496 sequence
  PTHR30461:SF3,SM00857,G3DSA:1.10.10.2600,IPR036162,PS51737, G3DSA:3.40.50.1390,IPR006119,IPR038109,PF07508,IPR011109, SSF53041,PF00239,PTHR30461,PS51736,Coil, cd00338
MNVIYLRKSREDLNSEDTLWKHRSTLVELCKRNNWEYTIFEEIGSSDSLDKRTEINKVIALAEEGKIRNVICMDLDRLSRNTFHSTYIQKIFRDNNVKIVTPTKTYDLNNENDILFSELQNVISAQEYRLIRKRMMQGKELGAKEGNLVGGTTPLGYYYDRNERIVKIDEDESKRYRWLIDNFLTGVFSTRTLAVEFNKYYVSKRGNKINCSSLHRILTNRFYLGEIRFKGEWYKGKHQPLITLDEFELVQKQLNGNSIVPLRQGYKKIKPLSQILRCGYCGHTLSVTVDKRYGNFIRCWHSDIITGERCCQKGIKESIVLEVLDAEIKSHMDSLRDAINNGGTEHQNKKINTLQSQIESIDTTIGKLETKKENTILMTQEGILTLAKCKEELAKIEKEIKTFNDDKQLLQKEISSTNKDYKKDLIRFEEVYESLKDATAEEFNTLIRTLVNRIVLKKEDRYTLEVDIQFI

SEQ ID NO: 7496 - protein, 471 aa, Unknown
  Description of Unknown: Integrase B7497 sequence
  IPR036162,PS51737,IPR011109,PTHR30461,PS00397, PF00239,G3DSA:1.10.10.2600,IPR006119,SSF53041,cd00338, SM00857,IPR025827,IPR038109,PS51736,IPR006118, PF13408,G3DSA:3.40.50.1390,PF07508,Coil
MSSKVAALYIRVSTEDQTELSPDAQKRLLLDYAQKNDMIVSGDFIFTESVSGRHAQKRPEFQKMIALAKQPSHPIDVILVWKFSRFARNQEESIVYKSMLKKDNVDVISVSEPLIEGPFGSLIERIIEWMDEYYSIRLSGEVLRGMKEKALQKGYQTSPCLGYTAVGHGKPYIINEAEYAIVSYIMDLYDNQNLDETAIARRCNDLGYRTKRGKLFERRSVDRILGNPFYCGTVVWNGVEFEGSHEVRLSRERYEKRQKLITSRKRPVKARNVSACKHWLSGLLKCSVCGATLSYTGNNKCPYFQCWKYAKGFHKTSVALSVKKAEEAVISYFDQILDGAEFTYVCKKKKTDHSLQIEQLQKEISKLTMRESRIKEAYEAGVDTLEEYKNNKDRLVSDRLELTAALSQLLQKEQAEQPDTEEILKEIRSVSDVLKNPDVGYEEKGNLIRSVVEQIIYDKESGKMSFDIIIS

SEQ ID NO: 7497 - protein, 471 aa, Unknown
  Description of Unknown: Integrase B7498 sequence
  PTHR30461:SF3,SM00857,G3DSA:1.10.10.2600,IPR036162,PF13408, PS51737,G3DSA:3.40.50.1390,IPR025827,IPR006119,IPR038109, PF07508,IPR011109,SSF53041,PF00239,PTHR30461, PS51736,Coil,cd00338
MFAFNASTMEQATDGYSIGEQKDKLLHYASAQGYAVVDTYSDEGFSGKDLLRPNMERMLNDIQHGKINTVLVYKLDRLSRHVKDVLELVETFDKCNVTLYSLSENFDLASPFGRAALKMMATFAELERETIVERMEMGKIARAKDGKYTCPGTRCPFGYRHDKKNDRLLIEESEAEIIRKIFDLYVNHGYTFRKLYDYCREAYPDVKYFNNQMCCKPIIERPLYAGYFRYRGGELTKGTNFEAIISYELFLQAQAQVDRNRTKRLSDSSPYLLTGLLICGRCGNRYVGKMYERYTKKPDGTHTKHYRYRDYGCAARLKRDKNYHPAKCDNDIYRAEELEKIVEDYVLNLNIDDYNKADFSPGLIDKMMSEIGAIKRSQSKLLDLYLSGDIDKDTFLIRKIEYDSKIAELQNLIEKETESVQSAPTNAEAIKKSIAEYSMLNRRQKRTLLEYLIKNIIVDGSRITVNLRLKK

SEQ ID NO: 7498 - protein, 471 aa, Unknown
  Description of Unknown: Integrase B7499 sequence
  IPR036162,PS51737,IPR011109,PTHR30461,PS00397, PF00239,G3DSA:1.10.10.2600,IPR006119,SSF53041,cd00338, SM00857,IPR025827,IPR038109,PS51736,IPR006118, PF13408,G3DSA:3.40.50.1390,PF07508,Coil
MSSKVAALYIRVSTEDQTELSPDAQKRLLLDYAQKNDMIVSGDFIFTESVSGRHAQKRPEFQKMIALAKQPSHPIDVILVWKFSRFARNQEESIVYKSMLKKDNVDVISVSEPLIEGPFGSLIERIIEWMDEYYSIRLSGEVLRGMKEKALQKGYQTSPCLGYTAVGHGKPYVINEAEYAIVSYIMDLYDNQNLDETAIARRCNDLGYRTKRGKLFERRSVDRILGNPFYCGTVVWNGVEFEGSHEVRLSRERYEKRQKLITSRKRPVKARNVSACKHWLSGLLKCSVCGATLSYTGNNKCPYFQCWKYAKGFHKTSVALSVKKAEEAVISYFDQILDGAEFTYVCKKKKTDHSLQIEQLQREISKLTMRESRIKEAYEAGVDTLEEYKNNKDRLVSDRLELTAALSQLLQEEQAEQPDTEEILKEIRSVADVLKNPDIGYEAKGNLIRSVVEQIIYDKESGKMSFDIIIS

SEQ ID NO: 7499 - protein, 471 aa, Unknown
  Description of Unknown: Integrase B7500 sequence
  SM00857,G3DSA:1.10.10.2600,IPR036162,PS51737,G3DSA:3.40.50.1390, IPR006119,IPR038109,PF07508,IPR011109,SSF53041, PF00239,PTHR30461,PS51736,Coil,cd00338
MPFEDYIDGAAYTRVSSGKQEELSPAAQKRLLLDYAKKHKILIRPEHIFMENGISGRNAQKRPEFQKMIALAKQKPSPFQVILVWKFSRFARNQEESIVYKSMLKKQCHVEVISITEPLIDGPFGSLIERIIEWMDEYYSINLSGETLRGMTENALRGGYQSTPCLGYAAVGNGQPFVVVKEEKNVVQFIFEKFCYSYMEPTAIARVLNEKGIKTKRGGLFEKRSVTYILRNQFYIGKISWNGVEHDGAHETFISQELFDLAQERLNATFKPKKRRDISECKHWASGLVKCSICGATLSYNKCRYPFFNCWKYSKGFHKETSSISEKNLVKGILDYFEKLLDGEDFSFHSLPASEPVSLRENYEDELKKLDAREQRVRLAYENGIDSLEEYRENKIRLQAERRQLQELQNACKEPEPISKADFLEKIHTVYDILKDDGISYEIKGTFLRSVVEEIIYDKEKNSLAFHLYRS

SEQ ID NO: 7500 - protein, 471 aa, Unknown
  Description of Unknown: Integrase B7501 sequence
  IPR036162,PS51737,IPR011109,PTHR30461, PS00397,PF00239,G3DSA:1.10.10.2600,IPR006119, SSF53041,cd00338,SM00857,IPR025827,IPR038109,PS51736 ,IPR006118,PF13408,G3DSA:3.40.50.1390,PF07508,Coil
MSSKVACLYIRVSTEDQTELSPDAQKRLLLDYAQKNDMIVSGDFIFTESVSGRHAQKRPEFQKMIALAKQPSHPIDVILVWKFSRFARNQEESIVYKSMLKKDNVDVISVSEPLIEGPFGTLIERIIEWMDEYYSIRLSGEVLRGMKEKALQNGYQTSPCLGYDAVGHGKPYVINEAEYAVVSYIMDLYDNHNLDETAIARRCNDLGYRTKRGNLFERRTVDRILENPFYCGTVIWNGVEFEGSHEVRLSKERYEKRQRLIASRKRPVKARNVSACKHWLSGLLKCSICGATLSYTGNNKCPYFQCWKYAKGFHKVSTALSVKKAEEAVINYFEQILNGAEFTYVCKRKTTDNSLQIEQLQKEINKLSMRESRIRDAYEAGIDTLEEYKNNKERLVSDRLELTAALSQLLQEEQADVPDTEEVLKEIRSIADILKNPDVSYEEKGSLIRSVVEQIVYDKASGKMSFDIIIS

SEQ ID NO: 7501 - protein, 471 aa, Unknown
  Description of Unknown: Integrase B7502 sequence
  IPR036162,PS51737,IPR011109,PTHR30461,PS00397, PF00239,G3DSA:1.10.10.2600,IPR006119,SSF53041,cd00338, SM00857,IPR025827,IPR038109,PS51736,IPR006118, PF13408,G3DSA:3.40.50.1390,PF07508,Coil
MSSKVAALYIRVSTEDQTELSPDAQKRLLLDYAQKNDMIVSGDFIFTESVSGRHAQKRPEFQKMIALVKQPSHPIDVILVWKFSRFARNQEESIVYKSMLKKDNVDVISVSEPLIEGPFGSLIERIIEWMDEYYSIRLSGEVLRGMKEKALQKGYQTSPCLGYTAVGHGKPYIINEAEYAIVSYIMDLYDNQNLDETAIARRCNDLGYRTKRGKLFERRSVDRILGNPFYCGTVVWNGVEFEGSHEVRLSRERYEKRQKLITSRKRPVKARNVSACKHWLSGLLKCSVCGATLSYTGNNKCPYFQCWKYAKGFHKTSVALSVKKAEEAVISYFDQILDGAEFTYVCKKKKTDHSLQIEQLQKEINKLTMRESRIKEAYEAGVDTLEEYKNNKDRLVSDRLELTAALSQLLQEEQAEQPDTEEILKEIRSVADVLKNPDVGYEEKGNLIRSVVEQIIYDKESGKMSFDIIIS

SEQ ID NO: 7502 - protein, 471 aa, Unknown
  Description of Unknown: Integrase B7503 sequence
  IPR036162,PS51737,IPR011109,PTHR30461,PS00397, PF00239,G3DSA:1.10.10.2600,IPR006119,SSF53041,cd00338, SM00857,IPR025827,IPR038109,PS51736,IPR006118, PF13408,G3DSA:3.40.50.1390,PF07508,Coil
MSSKVAALYIRVSTEDQTELSPDAQKRLLLDYAQKNDMIVSGDFIFTESVSGRHAQKRPEFQKMIALAKQPSHPIDVILVWKFSRFARNQEESIVYKSMLKKDNVDVISVSEPLIEGPFGSLIERIIEWMDEYYSIRLSGEVLRGMKEKALQKGYQTSPCLGYTAVGHGKPYVINEAEYTIVSYIMDLYDNQNLDETAIARRCNDLGYRTKRGKLFERRSVDRILGNPFYCGTVVWNGVEFEGSHEVRLSRERYEKRQKLITSRKRPVKARNVSACKHWLSGLLKCSVCGATLSYTGNNKCPYFQCWKYAKGFHKTSVALSVKKAEEAVISYFEQILDGAEFTYVCKKKKTDHSLQIEQLQKEISKLSMRESRIKEAYEAGVDTLEEYKRNKDRLVSDRLELTAALSQLLQEEQAEQPNTEEVLKEIRSVADVLKNPDVGYEEKGNLIRSVVEQIIYDKESGKMSFDIIIS

SEQ ID NO: 7503 - protein, 471 aa, Unknown
  Description of Unknown: Integrase B7504 sequence
  IPR036162,PS51737,IPR011109,PTHR30461,PS00397, PF00239,G3DSA:1.10.10.2600,IPR006119,SSF53041,cd00338, SM00857,IPR025827,IPR038109,PS51736,IPR006118, PF13408,G3DSA:3.40.50.1390,PF07508,Coil
MSSKVACLYIRVSTEDQTELSPDAQKRLLLDYAQKNDMIVSGDFIFTESVSGRHAQKRPEFQKMIALAKQPSHPIDVILVWKFSRFARNQEESIVYKSMLKKDNVDVISVSEPLIEGPFGSLIERIIEWMDEYYSIRLSGEVLRGMKEKALQKGYQTSPCLGYTAVGHGKPYIINEAEYAIVSYIMDLYDNQNLDETAIARRCNDLGYRTKRGKLFERRSVDRILGNPFYCGIVVWNGVEFEGSHEVRLSRERYEKRQKLITSRKRPVKARNVSACKHWLSGLLKCSVCGATLSYTGNNKCPYFQCWKYAKGFHKTSVALSVKKAEEAVISYFDQILDGAEFTYVCKKKKTDHSLQIEQLQKEISKLTMRESRIKEAYEAGVDTLEEYKNNKDRLVSDRLELTAALSQLLQEEQAEQPDTEEILKEIRSVADVLKNPDVGYEEKGNLIRSVVEQIIYDKESGKMSFDIIIS

SEQ ID NO: 7504 - protein, 471 aa, Unknown
  Description of Unknown: Integrase B7505 sequence
  IPR036162,PS51737,IPR011109,PTHR30461,PS00397, PF00239,G3DSA:1.10.10.2600,IPR006119,SSF53041,cd00338, SM00857,IPR025827,IPR038109,PS51736,IPR006118, PF13408,G3DSA:3.40.50.1390,PF07508,Coil
MSSKVAALYIRVSTEDQTELSPDAQKRLLLDYAQKNDMIVSGDFIFTESVSGRHAQKRPEFQKMIALAKQPSHPIDVILVWKFSRFARNQEESIVYKSMLKKDNVDVISVSEPLIEGPFGSLIERIIEWMDEYYSIRLSGEVLRGMKEKALQKGYQTSPCLGYTAVGHGKPYIINEAEYAIVSYIMDLYDNQNLDETAIARRCNDLGYRTKRGKLFERRSVDRILGNPFYCGTVVWNGVEFEGNHEVRLSRERYEKRQKLITSRKRPVKARNVSACKHWLSGLLKCSVCGATLSYTGNNKCPYFQCWKYAKGFHKTSVALSVKKAEEAVISYFDQILDGAEFTYVCKKKKTDHSLQIDQLQREISKLAMREGRIKEAYEAGVDTLAEYKNNKDRLVSDRLELTAALSQLLQEEQAEQPDAEEILKEIRSVADVLKNPDVGYEEKGNLIRSVVEQIIYDKESGKMSFDIIIS

SEQ ID NO: 7505 - protein, 471 aa, Unknown
  Description of Unknown: Integrase B7506 sequence
  IPR036162,PS51737,IPR011109,PTHR30461,PS00397, PF00239,G3DSA:1.10.10.2600,IPR006119,SSF53041,cd00338, SM00857,IPR025827,IPR038109,PS51736,IPR006118, PF13408,G3DSA:3.40.50.1390,PF07508,Coil
MSSKVACLYIRVSTEDQTELSPDAQKRLLLDYAQKNDMIVSGDFIFTESVSGRHAQKRPEFQKMIALAKQPSHPIDVILVWKFSRFARNQEESIVYKSMLKKDNVDVISVSEPLIEGPFGSLIERIIEWMDEYYSIRLSGEVLRGMKEKALQKGYQTSPCLGYTAVGHGKPYIINEAEYAIVSYIMDLYDNQNLDETAIARRCNDLGYRTKRGKLFERRSVDRILGNPFYCGTVVWNGVEFEGSHEVRLSRERYEKRQKLITSRKRPVKARNVSACKHWLSGLLKCSVCGATLSYTGNNKCPYFQCWKYAKGFHKTSVALSVKKAEEAVISYFDQILDGAEFTYVCKKKKTDHSLQIEQLQKEIGKLTMREGRIKEAYEAGVDTLEEYKNNKDRLVSDRLELTAALSQLLQEEQAEQPDAEEILKEIRSVADVLKNPDVGYEEKGNLIRSVVEQIIYDKESGKMSFDIIIS

SEQ ID NO: 7506 - protein, 471 aa, Unknown
  Description of Unknown: Integrase B7507 sequence
  IPR036162,PS51737,IPR011109,PTHR30461,PS00397, PF00239,G3DSA:1.10.10.2600,IPR006119,SSF53041,cd00338, SM00857,IPR025827,IPR038109,PS51736,IPR006118, PF13408,G3DSA:3.40.50.1390,PF07508,Coil
MSSKVAALYIRVSTEDQTELSPDAQKRLLLDYAQKNDMIVSGDFIFTESVSGRHAQKRPEFQKMIALAKQPSHPIDVILVWKFSRFARNQEESIVYKSMLKKDNVDVISVSEPLIEGPFGSLIERIIEWMDEYYSIRLSGEVLRGMKEKALQKGYQTSPCLGYTAVGHGKPYIINEAEYAIVSYIMDLYDNQNLDETAIARRCNDLGYRTKRGKLFERRSVDRILGNPFYCGTVVWNGVEFEGNHEVRLSRERYEKRQKLITSRKRPVKARNVSACKHWLSGLLKCSVCGATLSYTGNNKCPYFQCWKYAKGFHKTSVALSVKKAEEAVISYFDQILDGAEFTYVCKKKKTDHSLQIEQLQKEIGKLTMRESRIKEAYEAGVDTLEEYKNNKDRLVSDRLELTAALSQLLQEEQSEQPNTEEILKEIRSVADVLKNPDVGYEEKGNLIRSVVEQIIYDKGSGKMSFDIIIS

SEQ ID NO: 7507 - protein, 471 aa, Unknown
  Description of Unknown: Integrase B7508 sequence
  IPR036162,PS51737,IPR011109,PTHR30461,PS00397, PF00239,G3DSA:1.10.10.2600,IPR006119,SSF53041,cd00338, SM00857,IPR025827,IPR038109,PS51736,IPR006118, PF13408,G3DSA:3.40.50.1390,PF07508,Coil
MSSKVAALYIRVSTEDQTELSPDAQKRLLLDYAQKNDMIVSGDFIFTESVSGRHAQKRPEFQKMIALAKQPSHPIDVILVWKFSRFARNQEESIVYKSMLKKDNVDVISVSEPLIEGPFGSLIERIIEWMDEYYSIRLSGEVLRGMKEKALQKGYQTSPCLGYTAVGHGKPYVINEAEYAIVSYIMDLYDNQNLDETAIARRCNDLGYRTKRGKLFERRSVDRILGNPFYCGTVVWNGVEFEGNHEVRLSRERYEKRQKLITSRKRPVKARNVSACKHWLSGLLKCSVCGATLSYTGNNKCPYFQCWKYAKGFHKTSVALSVKKAEDAVITYFEQILDGAEFTYVCKKKKTDHSLQIDQLQREISKLAMREGRIKEAYEAGVDTLEEYKNNKDRLVSDRLELTAALSQLLQEEQADQPDTEEILKEIRSVADVLKNPDVGYEEKGNLIRSVVEQIIYDKESGKMSFDIIIS

SEQ ID NO: 7508 - protein, 471 aa, Unknown
  Description of Unknown: Integrase B7509 sequence
  cd00338,SM00857,G3DSA:1.10.10.2600,IPR036162,PF13408, IPR025827,G3DSA:3.40.50.1390,PS51737,IPR006119,IPR038109, PF07508,SSF53041,IPR011109,PTHR30461,PS51736, Coil,PF00239
MSSKVAALYSRVSTEDQTELSPDAQKRLLLDYAQKNDMIVSGDFIFTESVSGRHAQKRPEFQKMIALAKQPSHPIDVILVWKFSRFARNQEESIVYKSMLKKDNVDVISVSEPLIEGPFGSLIERIIEWMDEYYSIRLSGEVLRGMKEKALQKGYQTSPCLGYTAVGHGKPYIINEAEYAIVSYIMDLYDNQNLDETAIARRCNDLGYRTKRGKLFERRSVDRILGNPFYCGTVVWNGVEFEGSHEVRLSRERYEKRQKLITSRKRPVKARNVSACKHWLSGLLKCSVCGATLSYTGNNKCPYFQCWKYAKGFHKTSVALSVKKAEEAVISYFDQILDGAEFTYVCKKKKTDHSLQIEQLQKEISKLTMRESRIKEAYEAGVDTLEEYKNNKDRLVSDRLELTAALSQLLQEEQADQPDTEEILKEIRSVADVLKNPDVGYEEKGNLIRSVVEQIIYDKESGKMSFDIIIS

SEQ ID NO: 7509 - protein, 471 aa, Unknown
  Description of Unknown: Integrase B7510 sequence
  PTHR30461:SF3,cd00338,SM00857,G3DSA:1.10.10.2600,IPR036162, PF13408,IPR025827,PS51737,G3DSA:3.40.50.1390,IPR006119, IPR038109,PF07508,IPR011109,SSF53041,PTHR30461, PS51736,Coil,PF00239
MDGKLKEIDKNCGDIMRNKEIAPALVRVALYIRVSGEEQKIKGLSLEAQQERLEAYARERGWVIVGIYIDAAKTARKNIHKRTEFQRMMDSVKRDEVDILLFARLDRWFRSVADYYKVMEVLQAHNCDWKTTDEEYDTTTANGRLYINVKLSIAQNEADIDGERIDVVFDSKIAHGTVVSGSAPFGFRVNEEKRLEVVPEDAAIVQDAFNYFENTVSQRATVRYIRETYGVNWCDATFRRMLKEKLYTGVYDRGGRYNDQFCPAIIDRQQFDRVQALLTRNVRSALSGKVYIFTSILTCAECGHKLVGYKSSDYFYYRCNQHFQRGRCSHNHSAREDVVEQWLFEHLGEELERCQLEWDVEAAKKKASVARTDKAALKRKLTKLKELYVNDLIDIEDYKKDYQIYVSALNQIPEPAQEAPPDFAAVRRLLDNSFRTIYDTLTREEKRTLWRSVIKEIRIDNDQNITGVVFG

SEQ ID NO: 7510 - protein, 471 aa, Unknown
  Description of Unknown: Integrase B7511 sequence
  IPR036162,PS51737,IPR011109,PTHR30461,PS00397, PF00239,G3DSA:1.10.10.2600,IPR006119,SSF53041,cd00338, SM00857,IPR025827,IPR038109,PS51736,IPR006118, PF13408,G3DSA:3.40.50.1390,PF07508,Coil
MSSKVACLYIRVSTEDQTELSPDAQKRLLLDYAQKNDMIVSGNFIFTESVSGRHAQKRPEFQKMIALAKQPSHPIDVILVWKFSRFARNQEESIVYKSMLKKDNVDVISVSEPLIEGPFGSLIERIIEWMDEYYSIRLSGEVLRGMKEKALQKGYQTSPCLGYTAVGHGKPYIINEAEYAIVSYIMDLYDNQNLDETAIARRCNDLGYRTKRGKLFERRSVDRILGNPFYCGTVVWNGVEFEGNHEVRLSREQYEKRQKLITSRKRPVKARNVSACKHWLSGLLKCSVCGATLSYTGNNKCPYFQCWKYAKGFHKTSVALSVKKAEEAAISYFDQILDGAEFTYVCKKKKTDHSLQIEQLQREISKLTMRESRIKEAYEAGVDTLEEYKNNKDRLVSDRLELTAALSQLLQEEQADQPDTEEILKEIRSVADVLKNPDVGYEEKGNLIRSVVEQIIYDKESGKMSFDIIIS

SEQ ID NO: 7511 - protein, 471 aa, Unknown
  Description of Unknown: Integrase B7512 sequence
  IPR036162,PS51737,IPR011109,PTHR30461,PS00397, PF00239,G3DSA:1.10.10.2600,IPR006119,SSF53041,cd00338, SM00857,IPR025827,IPR038109,PS51736,IPR006118, PF13408,G3DSA:3.40.50.1390,PF07508,Coil
MSSKVAALYIRVSTEDQTELSPDAQKRLLLDYAQKNDMIVSGDFIFTESVSGRHAQKRPEFQRMIALAKQPSHPIDIILVWKFSRFARNQEESIVYKSMLKKDNVDVISVSEPLIEGPFGSLIERIIEWMDEYYSIRLSGEVLRGMKEKALQKGYQTSPCLGYTAVGHGKPYVINEAEYAIVSYIMDLYDNQNLDETAIARRCNDLGDRTKRGKLFERRSVDRILGNPFYCGTVVWNGVEFEGSHEVRLSRERYEKRQKLITSRKRPVKARNVSACKHWLSGLLKCSVCGATLSYTGNNKCPYFQCWKYAKGFHKTSVALSVKKAEEAVISYFDQILDGAEFTYVCKKKKTDHSLQIEQLQKEIGKLTMRESRIKEAYEAGVDTLEEYKNNKDRLVSDRLELTAALSQLLQEEQAEQPDTEEILKEIRSVADVLKNPDVGYEEKGNLIRSVVEQIIYDKESGKMSFDIIIS

SEQ ID NO: 7512 - protein, 471 aa, Unknown
  Description of Unknown: Integrase B7513 sequence
  IPR036162,PS51737,IPR011109,PTHR30461,PS00397, PF00239,G3DSA:1.10.10.2600,IPR006119,SSF53041,cd00338, SM00857,IPR025827,IPR038109,PS51736,IPR006118, PF13408,G3DSA:3.40.50.1390,PF07508,Coil
MSSKVAALYIRVSTEDQTELSPDAQKRLLLDYAQKNDMIVSGDFIFTESVSGRHAQKRPEFQRMIALAKQPSHPIDVILVWKFSRFARNQEESIVYKSMLKKDNVDVISVSEPLIEGPFGSLIERIIEWMDEYYSIRLSGEVLRGMKEKALQKGYQTSPCLGYTAVGHGKPFVINESEYAIVSYIMDLYDNQNLDETAIARRCNDLGYRTKRGNLFERRSVDRILGNPFYCGTVVWNGMEFEGNHEVRLSRERYEKRQKLITSRRRPVKARNVSACKHWLSGLLKCSVCGATLSYTGNNKCPYFQCWKYAKGFHKTSVALSVKKAEEAVISYFDQILDGAEFTYVCKKKKTDHSLQIEQLQREISKLTMRESRIKEAYEAGVDTLEEYKNNKDRLVSDRLELTAALSQLLQEEQADQPDTEEILKEIRSVADVLKNPDVGYEEKGNLIRSVVEQIIYDKESGKMSFDIIIS

SEQ ID NO: 7513 - protein, 471 aa, Unknown
  Description of Unknown: Integrase B7514 sequence
  IPR036162,PS51737,IPR011109,PTHR30461,PS00397, PF00239,G3DSA:1.10.10.2600,IPR006119,SSF53041,cd00338, SM00857,IPR025827,IPR038109,PS51736,IPR006118, PF13408,G3DSA:3.40.50.1390,PF07508,Coil
MSSKVACLYIRVSTEDQTELSPDAQKRLLLDYAQKNDMIVSGDFIFTESVSGRHAQKRPEFQKMIALAKQPSHPIDVILVWKFSRFARNQEESIVYKSMLKKDNVDVISVSEPLIEGPFGSLIERIIEWMDEYYSIRLSGEVLRGMKEKALQKGYQTSPCLGYTAVGHGKPYVINEAEYAIVSYIMDLYDNQNLDETAIARRCNDLGYRTKRGKLFERRSVDRILGNPFYCGTVVWNGVEFEGSHEVRLSRERYEKRQKLITSRKRPVKARNVSACKHWLSGLLKCSVCGATLSYTGNNKCPYFQCWKYAKGFHKTSVALSVKKAEEAVISYFDQILDGAEFTYVCKKKKTDHSLQIEQLQKEISKLTMRESRIKEAYEAGVDTLEEYKNNKDRLVSDRLELTAALSQLLQEEQAEQPDAEEILKEIRSVADVLKNPDVGYEEKGNLIRSVVEQIIYDKESGKMSFDIIVS

SEQ ID NO: 7514 - protein, 471 aa, Unknown
  Description of Unknown: Integrase B7515 sequence
  IPR036162,PS51737,IPR011109,PTHR30461,PS00397, PF00239,G3DSA:1.10.10.2600,IPR006119,SSF53041,cd00338, SM00857,IPR025827,IPR038109,PS51736,IPR006118, PF13408,G3DSA:3.40.50.1390,PF07508,Coil
MIPAIVYARASTDHQEYSVNDQLKYIKDWAKHHGYKIIKVYIDDGISGAFVAKRPGFLSMIEDVTTNLSGAKALLIWDSYRFARNMVEFLTYKQMIRQHGVSVIAVTEPIVEDEDAQLYIDAINGASGELYLRKLSKDSKRGIRAKVVERHEHLGFAPYGYRMDRNTGQLEIQSEEAQWVQYIFQSVIDGAPYLQICEALRKAGVKTRKGCAWTNTQVKYTLTNKTYCGLLEVHLDGKHGVYEGKHEPIIDQETFDKVQAIIEERAAKHKKYARNTNKYKHWLSGLMRCPYCGGALSYVQGSGGRADRYRCNSRTDGKGCVNTSVKVNVAADFVLDQLQQIYDRPEILCTLKTTTPQPANRIDYDGEIKKLRGQLTRAKKAYMEEIDTLEEYRENKARITAAIEDMEAQKNAAAAGIIKFDPAAFQEKCLSALSVLQSDVDTEKKVAVSHNLIEKIDCDNLKKVLTIYFYS

SEQ ID NO: 7515 - protein, 471 aa, Unknown
  Description of Unknown: Integrase B7516 sequence
  IPR036162,PS51737,IPR011109,PTHR30461,PS00397, PF00239,G3DSA:1.10.10.2600,IPR006119,SSF53041,cd00338, SM00857,IPR025827,IPR038109,PS51736,IPR006118, PF13408,G3DSA:3.40.50.1390,PF07508,Coil
MENRVGALYVRVSTDDQTDLSPDAQRRLLLEYAKKNGIIVPSEFIFSESVSGRHALKRPEFQRMIALAKQSSHPIDVILVWKFSRFARNQEESIVYKSMLKKDNVEVVSVSEPLVDGPFGSLIERIIEWMDEYYSIRLSGEVLRGMKEKALQHGYQSVPSLGYRAVGGGKPFVIDEGEYAIVALIMDLYDNGNLDPTAIARRCNDLGYRTRRGTPFERRTVMRILQNAFYCGTVAWNGIEFEGSHEVRLSKERFQHRQELIAARHRPAKARSVSACKHWLSGLLRCSTCGGTLARNGCRGYSYFQCWKYTKGFHKGSSAIRIEEAEKAVINYFDEILAGADFSYVRKSQSTIDNTAAIEQLQRELSRLSVKEDRIRDAYENGIDTLEEYKDNKMRLADSRHRLEQELQNLQSVKELPIDREKILEEIRSVNDVLKDPDVSYEEKGNLIRTIVEQIVYDKKTGKMYFDIIVP

SEQ ID NO: 7516 - protein, 471 aa, Unknown
  Description of Unknown: Integrase B7517 sequence
  IPR036162,PS51737,IPR011109,PTHR30461,PS00397, PF00239,G3DSA:1.10.10.2600,IPR006119,SSF53041,cd00338, SM00857,IPR025827,IPR038109,PS51736,IPR006118, PF13408,G3DSA:3.40.50.1390,PF07508,Coil
MSSKVACLYIRVSTEDQTELSPDAQKRLLLDYAQKNDMIVSGDFIFTESVSGRHAQKRPEFQKMIALAKQPSHPIDVILVWKFSRFARNQEESIVYKSMLKKDNVDVISVSEPLIEGPFGSLIERIIEWMDEYYSIRLSGEVLRGMKEKALQKGYQTSPCLGYTAVGHGKPYIINEAEYAIVSYIMDLYDNQNLDETAIARRCNDLGYRTKRGKLFERRSVDRILGNPFYCGTVVWNGVEFEGSHEVRLSRERYEKRQKLITSRKRPVKARNVSACKHWLSGLLKCSVCGATLSYTGNNKCPYFQCWKYAKGFHKTSVALSVKKAEEAVISYFDQILDGAEFTYVCKKKKTDHSLQIEQLQKEISKLTMRENRIKEAYEAGVDTLEEYKSNKDRLVSDRLELTAALSQLLQEEQSEQPNTEEILKEIRSVADVLKNPDVGYEEKGNLIRSIVEQIIYDKESGKMSFDIIIS

SEQ ID NO: 7517 - protein, 471 aa, Unknown
  Description of Unknown: Integrase B7518 sequence
  IPR036162,PS51737,IPR011109,PTHR30461,PS00397, PF00239,G3DSA:1.10.10.2600,IPR006119,SSF53041,cd00338, SM00857,IPR025827,IPR038109,PS51736,IPR006118, PF13408,G3DSA:3.40.50.1390,PF07508,Coil
MSSKVAALYIRVSTEDQTELSPDAQKRLLLDYAQKNDMIVSGDFIFTESVSGRHAQKRPEFQKMIALAKQPSHPIDVILVWKFSRFARNQEESIVYKSMLKKDNVDVISVSEPLIEGPFGSLIERIIEWMDEYYSIRLSGEVLRGMKEKALQKGYQTSPCLGYTAVGHGKPYIINEAEYAIVSYIMDLYDNQNLDETAIARRCNDLGYRTKRGKLFERRSVDRILGNPFYCGTVVWNGVEFEGNHEVRLSRERYEKRQKLITSRKRPVKARNVSACKHWLSGLLKCSVCGATLSYTGNNKCPYFQCWKYAKGFHKTSVALSVKKAEEAVISYFDQILDGAEFTYVCKKKKTDHSLQIEQLQKEIGKLTMRESRIKEAYEAGVDTLEEYKNNKDRLVSDRLELTAALSQLLQEEQAEQPDTEEILKEIRSVADVLKNPDVGYEEKGNLIRSVVEQIIYDKESRKMSFDIIIS

SEQ ID NO: 7518 - protein, 471 aa, Unknown
  Description of Unknown: Integrase B7519 sequence
  IPR036162,PS51737,IPR011109,PTHR30461,PS00397, PF00239,G3DSA:1.10.10.2600,IPR006119,SSF53041,cd00338, SM00857,IPR025827,IPR038109,PS51736,IPR006118, PF13408,G3DSA:3.40.50.1390,PF07508,Coil
MSSKVAALYIRVSTEDQTELSPDAQKRLLLDYAQKNDMIVSGDFIFTESVSGRHAQKRPEFQKMIALAKQPSHPIDVILVWKFSRFARNQEESIVYKSMLKKDNVDVISVSEPLIEGPFGSLIERIIEWMDEYYSIRLSGEVLRGMKEKALQKGYQTSPCLGYTAVGHGKPYVINEAEYAIVSYIMDLYDNQNLDETAIARRCNDLGYRTKRGKLFERRSVDRILGNPFYCGTVVWNGVEFEGNHEVRLSRERYEKRQKLITSRKRPVKARNVSACKHWLSGLLKCSVCGATLSYTGNNKCPYFQCWKYAKGFHKTSVALSVKKAEEAVISYFDQILDGAEFTYVCKKKKTDHSLQIDQLQREISKLAMREGRIKEAYEAGVDTLAEYKNNKDRLVSDRLELTAALSQLLQEEQSEQPNTEEVLKEIRSVADVLKNPDVGYEEKGNLIRSVVEQIIYDKESGKMSFDIIIS

SEQ ID NO: 7519 - protein, 471 aa, Unknown
  Description of Unknown: Integrase B7520 sequence
  IPR036162,PS51737,IPR011109,PTHR30461,PS00397, PF00239,G3DSA:1.10.10.2600,IPR006119,SSF53041,cd00338, SM00857,IPR025827,IPR038109,PS51736,IPR006118, PF13408,G3DSA:3.40.50.1390,PF07508,Coil
MSSKVACLYIRVSTEDQTELSPDAQKRLLLDYAQKNDMIVSGDFIFTESVSGRHAQKRPEFQKMIALAKQPSHPIDVILVWKFSRFARNQEESIVYKSMLKKDNVDVISVSEPLIEGPFGSLIERIIEWMDEYYSIRLSGEVLRGMKEKALQKGYQTSPCLGYTAVGHGKPYIINEAEYAIVSYIMDLYDNQNLDETAIARRCNDLGYRTKRGKLFERRSVDRILGNPFYCGTVVWNGVEFEGSHEVRLSRERYEKRQKLIASRRRPVKARNVSACKHWLSGLLKCSVCGATLSYTGNNKCPYFQCWKYAKGFHKTSVALSVKKAEEAVISYFDQILDGAEFTYVCKKKKTDHSLQIEQLQKEISKLTMRESRIKEAYEAGVDTLEEYKNNKDRLVSDRLELTAALSQLLQEEQAEQPDTEEILKEIRSVADVLKNPDVGYEEKGNLIRSVVEQIIYDKESGKMSFDIIIS

SEQ ID NO: 7520 - protein, 471 aa, Unknown
  Description of Unknown: Integrase B7521 sequence
  PTHR30461:SF3,IPR036162,PS51737,IPR011109,PTHR30461, PS00397,PF00239,G3DSA:1.10.10.2600,IPR006119,SSF53041, cd00338,SM00857,IPR025827,IPR038109,PS51736, IPR006118,PF13408,G3DSA:3.40.50.1390,PF07508,Coil
MIPAIVYARASTDHQEYSVNDQLKYIKDWAKHHGYKIIKVYIDDGISGAFVAKRPGFLSMIEDVTTNLSGAKALLIWDSYRFARNMVEFLTYKQMIRQHGVSVIAVTEPIVEDEDAQLYIDAINGASGELYLRKLSKDSKRGIRAKVVERREHLGFAPYGYRMNRNTRQLEIQPEEAKWVKYIFQCVIDGLPYLAICQKLREAGVKTRKGCAWTNTQVKYTLTNKTYCGLLEVTLDGKHGIYDGKHEPIIDRETFDNVKTIIEERQAKHKKYQRSSYQYKHWLSGLMRCPYCGGALSYVQGSGGRADRYRCNSKTDGKGCVNLSVKVKVAADFVLDQLQQIYDSPEMLCTLKTVTPQPANQIDYDGEIKKLRGQLTRAKKAYMEEIDTLEEYRENKTRLTAAIEEMEAQKNAAAAGVIQFDPVAFQEKCLSALSVLQSDVDVEKKVAVSHNLIEKIDCDNINKVLTIYFYS

SEQ ID NO: 7521 - protein, 471 aa, Unknown
  Description of Unknown: Integrase B7522 sequence
  IPR036162,PS51737,IPR011109,PTHR30461,PS00397, PF00239,G3DSA:1.10.10.2600,IPR006119,SSF53041,cd00338, SM00857,IPR025827,IPR038109,PS51736,IPR006118, PF13408,G3DSA:3.40.50.1390,PF07508,Coil
MSSKVACLYIRVSTEDQTELSPDAQKRLLLDYAQKNDMIVSGDFIFTESVSGRHAQKRPEFQKMIALAKQPSHPIDVILVWKFSRFARNQEESIVYKSMLKKDNVDVISVSEPLIEGPFGSLIERIIEWMDEYYSIRLSGEVLRGMKEKALQKGYQTSPCLGYTAVGHGKPYIINEAEYAIVSYIMDLYDNQNLDETAIARRCNDLGYRTKRGKLFERRSVDRILGNPFYCGTVVWNGVEFEGNHEVRLSRERYEKRQKLITSRKRPVKARNVSACKHWLSGLLKCSVCGATLSYTGNNKCPYFQCWKYAKGFHKTSVALSVKKAEEAVISYFDQILDGAEFTYVCKKKKTNHSLQIEQLQKEISKLTMRESRIKEAYEAGVDTLEEYKNNKDRLVSDRLELTAALSQLLQEEQADQPDTEEILKEIRSVADVLKNPDVGYEEKGNLIRSVVEQIIYDKESGKMSFDIIIS

SEQ ID NO: 7522 - protein, 471 aa, Unknown
  Description of Unknown: Integrase B7523 sequence
  PTHR30461:SF3,cd00338,SM00857,G3DSA:1.10.10.2600,IPR036162, PF13408,IPR025827,PS51737,G3DSA:3.40.50.1390,IPR006119, IPR038109,PF07508,SSF53041,IPR011109,PTHR30461, PS51736,Coil,PF00239
MDGKLKEIDKNCGDIMRNKEIAPALVRVALYIRVSGEEQKIKGLSLEAQQERLEAYARERGWVIVGIYIDAAKTARKNIHKRTEFQRMMDSVKRDEVDILLFARLDRWFRSVADYYKVMEVLQAHNCDWKTTDEEYDTTTANGRLYINVKLSIAQNEADIDGERIDVVFDSKIAHGTVVSGSAPFGFRVNEEKRLEVVPENAAIVQDAFNYFENTVSQRATVRYVRETYGVNWCDATFRRMLKEKLYTGVYDRGGRYNDQFCPAIINRHQFDRVQALLTRNVRSAPSGKVYIFTSILTCAECGHKLVGYKSSDYFYYRCNQHFQRGRCSHNHSAREDVVEAWLFDHLGEELERCQLEWDVEAAKKKASVARTDKAALKRKLTKLKELYVNDLIDIEDYKKDYQIYVSALNQIPEPAQEAPPDFAAVRRLLDNSFRTIYDTLTREEKRTLWRSVIKEIRIDNDQNITGVVFG

SEQ ID NO: 7523 - protein, 471 aa, Unknown
  Description of Unknown: Integrase B7524 sequence
  IPR036162,PS51737,IPR011109,PTHR30461,PS00397, PF00239,G3DSA:1.10.10.2600,IPR006119,SSF53041,cd00338, SM00857,IPR025827,IPR038109,PS51736,IPR006118, PF13408,G3DSA:3.40.50.1390,PF07508,Coil
MSSKVAALYIRVSTEDQTELSPDAQKRLLLDYAQKNDMIVSGDFIFTESVSGRHAQKRPEFQKMIALAKQPSHPIDVILVWKFSRFARNQEESIVYKSMLKKDNVDVISVSEPLIEGPFGSLIERIIEWMDEYYSIRLSGEVLRGMKEKALQKGYQTSPCLGYTAVGHGKPYIINEAEYAIVSYIMDLYDNQNLDETAIARRCNDLGYRTKRGKLFERRSVDRILGNPFYCGTVVWNGVEFEGSHEVRLSRERYEKRQKLITSRKRPVKARNVSACKHWLSGLLKCSVCGATLSYTGNNKCPYFQCWKYAKGFHKTSVALSVKKAEEAVISYFDQILDGAEFTYVCKKKKTDHSLQIEQLQREIGKLTMRESRIKEAYEAGVDTLEEYKNNKDRLVSDRLELTAALSQLLQEEQAEQPDTEEILKEIRSVADVLKNPDVGYEEKGNLIRSVVEQIIYDKESGKMSFDIIIS

SEQ ID NO: 7524 - protein, 471 aa, Unknown
  Description of Unknown: Integrase B7525 sequence
  IPR036162,PS51737,IPR011109,PTHR30461,PS00397, PF00239,G3DSA:1.10.10.2600,IPR006119,SSF53041,cd00338, SM00857,IPR025827,IPR038109,PS51736,IPR006118, PF13408,G3DSA:3.40.50.1390,PF07508,Coil
MIPAIVYARASTDHQEYSVKDQLKYIKDWAKHHGYKIIKVYIDDGISGAFVAKRPGFLSMIEDVTTNISGAKALLIWDSYRFARNMVEFLTYKQMIRQHGVSVIAVTEPIVEDEDAQLYIDAINGASGELYLRKLSKDSKRGLRAKVVERHEHLGFAPYGYRMDRNTGQLEIQPEEARWVQYIFQSVIDGAPYLQICEALRKAGVKTRKGCAWTNTQVKYTLTNKTYCGLLEVHLDGKHGVYDGKHEPIIDRETFDNVQTIIEERAAKHKKYARNTNKYKHWLSGLMRCPYCGGALSYVQGSGGRADRYRCNSRTDGKGCVNTSVKVNVAADFVLDQLQQIYDRPEILCTLKTTTPQPANRVDYDAEIKKLRGQLTRAKKAYMEEIDTLEEYRENKTRITAAIEDMETQKNAAAAGIIKFDPAAFQKKCLSALSVLQSDVDTEKKVAVSHNLIEKIDCDNLNKVLTIYFYS

SEQ ID NO: 7525 - protein, 471 aa, Unknown
  Description of Unknown: Integrase B7526 sequence
  IPR036162,PS51737,IPR011109,PTHR30461,PS00397, PF00239,G3DSA:1.10.10.2600,IPR006119,SSF53041,cd00338, SM00857,IPR025827,IPR038109,PS51736,IPR006118, PF13408,G3DSA:3.40.50.1390,PF07508,Coil
MSSKVACLYIRVSTEDQTELSPDAQKRLLLDYAQKNDMIVSGDFIFTESVSGRHAQKRPEFQKMIALAKQPSHPIDVILVWKFSRFARNQEESIVYKSMLKKDNVDVISVSEPLIEGPFGSLIERIIEWMDEYYSIRLSGEVLRGMKEKALQKGYQTSPCLGYTAVGHGKPYVINEAEYAIVSYIMDLYDNQNLDETAIARRCNDLGYRTKRGKLFERRSVDRILGNPFYCGTVVWNGVEFEGNHEVRLSREQYEKRQKLITSRKRPVKARNVSACKHWLSGLLKCSVCGATLSYTGNNKCPYFQCWKYAKGFHKTSVALSVKKAEEAAISYFDQILDGAEFTYVCKKKKTDHSLQIEQLQREISKLTMRESRIKEAYEAGVDTLEEYKNNKDRLVSDRLELTAALSQLLQEEQADQPDTEEILKEIRSVADVLKNPDVGYEEKGNLIRSVVEQIIYDKESGKMSFDIIIS

SEQ ID NO: 7526 - protein, 471 aa, Unknown
  Description of Unknown: Integrase B7527 sequence
  IPR036162,PS51737,IPR011109,PTHR30461,PS00397, PF00239,G3DSA:1.10.10.2600,IPR006119,SSF53041,cd00338, SM00857,IPR025827,IPR038109,PS51736,IPR006118, PF13408,G3DSA:3.40.50.1390,PF07508,Coil
MSSKVACLYIRVSTEDQTELSPDAQKRLLLDYAQKNDMIVSGDFIFTESVSGRHAQKRPEFQKMIALAKQPSHPIDVILVWKFSRFARNQEESIVYKSMLKKDNVDVISVSEPLIEGPFGSLIERIIEWMDEYYSIRLSGEVLRGMKEKALQKGYQTSPCLGYTAVGHGKPYIINEAEYAIVSYIMDLYDNQNLDETAIARRCNDLGYRTKRGKLFERRSVDRILGNPFYCGTVVWNGVEFEGNHEVRLSRERYEKRQKLITSRKRPVKARNVSACKHWLSGLLKCSVCGATLSYTGNNKCPYFQCWKYAKGFHKTSVALSVKKAEEAVISYFDQILDGAEFTYVCKKKKTDHSLQIDQLQREISKLAMREGRIKEAYEAGVDTLAEYKNNKDRLVSDRLELTAALSQLLQEEQSEQPNTEEVLKEIRSVADVLKNPDVGYEEKGNLIRSVVEQIIYDKESGKMSFDIIIS

SEQ ID NO: 7527 - protein, 471 aa, Unknown
  Description of Unknown: Integrase B7528 sequence
  IPR036162,PS51737,IPR011109,PTHR30461,PS00397, PF00239,G3DSA:1.10.10.2600,IPR006119,SSF53041,cd00338, SM00857,IPR025827,IPR038109,PS51736,IPR006118, PF13408,G3DSA:3.40.50.1390,PF07508,Coil
MSSKVAALYIRVSTEDQTELSPDAQKRLLLDYAQKNDMIVSGDFIFTESVSGRHAQKRPEFQKMIALAKQPSHPIDVILVWKFSRFARNQEESIVYKSMLKKDNVDVISVSEPLIEGPFGSLIERIIEWMDEYYSIRLSGEVLRGMKEKALQKGYQTSPCLGYTAVGHGKPYVINEAEYAIVSYIMDLYDNQNLDETAIARRCNDLGYRTKRGKLFERRSVDRILGNPFYCGTVVWNGVEFEGNHEVRLSRERYEKRQKLITSRKRPVKARNVSACKHWLSGLLKCSVCGATLSYTGNNKCPYFQCWKYAKGFHKTSVALSVKKAEEAVISYFDQILDGAEFTYVCKKKKTDHSLQIEQLQREIGKLTMRESRIKEAYEAGVDTLEEYKNNKDRLVSDRLELTAALSQLLQEEQAEQPDTEEILKEIRSVADVLKNPDVGYEEKGNLIRSVVEQIIYDKESGKMSFDIIIS

SEQ ID NO: 7528 - protein, 471 aa, Unknown
  Description of Unknown: Integrase B7529 sequence
  IPR036162,PS51737,IPR011109,PTHR30461,PS00397, PF00239,G3DSA:1.10.10.2600,IPR006119,SSF53041,cd00338, SM00857,IPR025827,IPR038109,PS51736,IPR006118, PF13408,G3DSA:3.40.50.1390,PF07508,Coil
MSSKVACLYIRVSTEDQTELSPDAQKRLLLDYAQKNDMIVSGDFIFTESVSGRHAQKRPEFQKMIALAKQPSHPIDVILVWKFSRFARNQEESIVYKSMLKKDNVDVISVSEPLIEGPFGSLIERIIEWMDEYYSIRLSGEVLRGMKEKALQKGYQTSPCLGYTAVGHGKPYIINEAEYAIVSYIMDLYDNQNLDETAIARRCNDLGYRTKRGKLFERRSVDRILGNPFYCGTVVWNGVEFEGNHEVRLSRERYEKRQKLITSRKRPVKARNVSACKHWLSGLLKCSVCGATLSYTGNNKCPYFQCWKYAKGFHKTSVALSVKKAEEAVISYFDQILDGAEFTYVCKKKKTDHSLQIDQLQREISKLAMREGRIKEAYEAGVDTLAEYKNNKDRLVSDRLELTAALSQLLQEEQAEQPDAEEILKEIRSVADVLKNPDVGYEEKGNLIRSVVEQIIYDKESGKMSFDIIIS

SEQ ID NO: 7529 - protein, 471 aa, Unknown
  Description of Unknown: Integrase B7530 sequence
  IPR036162,PS51737,IPR011109,PTHR30461,PS00397, PF00239,G3DSA:1.10.10.2600,IPR006119,SSF53041,cd00338, SM00857,IPR025827,IPR038109,PS51736,IPR006118, PF13408,G3DSA:3.40.50.1390,PF07508,Coil
MSSKVACLYIRVSTEDQTELSPDAQKRLLLDYAQKNDMIVSGDFIFTESVSGRHAQKRPEFQKMIALAKQPSHPIDVILVWKFSRFARNQEESIVYKSMLKKDNVDVISVSEPLIGGPFGSLIERIIEWMDEYYSIRLSGEVLRGMKEKALQKGYQTSPCLGYTAVGHGKPFVINESEYAIVSYIMDLYDNQNLDETAIARRCNDLGYRTKRGNLFERRSVDRILGNPFYCGTVVWNGVEFEGSHEVRLSRERYEKRQKLITSRKRPVKARNVSACKHWLSGLLKCSVCGATLSYTGNNKCPYFQCWKYAKGFHKTSVALSVKKAEEAVISYFDQILDGAEFTYVCKKKKTDHSLQIEQLQREISKLTMRESRIKEAYEAGVDTLEEYKNNKDRLVSDRLELTAALSQLLQEEQAEQPDAEEILKEIRSVTDVLKNPDVGYEAKGNLIRSVVEQIIYDKESGKMSFDIIIS

SEQ ID NO: 7530 - protein, 471 aa, Unknown
  Description of Unknown: Integrase B7531 sequence
  IPR036162,PS51737,IPR011109,PTHR30461,PS00397, PF00239,G3DSA:1.10.10.2600,IPR006119,SSF53041,cd00338, SM00857,IPR025827,IPR038109,PS51736,IPR006118, PF13408,G3DSA:3.40.50.1390,PF07508,Coil
MSSKVACLYIRVSTEDQTELSPDAQKRLLLDYAQKNDMIVSGDFIFTESVSGRHAQKRPEFQKMIALAKQPSHPIDVILVWKFSRFARNQEESIVYKSMLKKDNVDVISVSEPLIEGPFGSLIERIIEWMDEYYSIRLSGEVLRGMKEKALQKGYQTSPCLGYTAVGHGKPYVINEAEYAIVSYIMDLYDNQNLDETAIARRCNDLGYRTKRGKLFERRSVDRILGNPFYCGTVVWNGVEFEGNHEVRLSRERYEKRQKLITSRKRPVKARNVSACKHWLSGLLKCSVCGATLSYTGNNKCPYFQCWKYAKGFHKTSVALSVKKAEDAVITYFEQILDGAEFTYVCKKKKTDHSLQIDQLQREISKLAMREGRIKEAYEAGVDTLEEYKNNKDRLVSDRLELTAALSQLLQEEQAEQPNTEEVLKEIRSVADVLKNPDVGYEEKGNLIRSVVEQIIYDKESGKMSFDIIIS

SEQ ID NO: 7531 - protein, 471 aa, Unknown
  Description of Unknown: Integrase B7532 sequence
  IPR036162,PS51737,IPR011109,PTHR30461,PS00397, PF00239,G3DSA:1.10.10.2600,IPR006119,SSF53041,cd00338, SM00857,IPR025827,IPR038109,PS51736,IPR006118, PF13408,G3DSA:3.40.50.1390,PF07508,Coil
MSSKVAALYIRVSTEDQTELSPDAQKRLLLDYAQKNDMIVSGDFIFTESVSGRHAQKRPEFQKMIALAKQPSHPIDVILVWKFSRFARNQEESIVYKSMLKKDNVDVISVSEPLIEGPFGSLIERIIEWMDEYYSIRLSGEVLRGMKEKALQKGYQTSPCLGYTAVGHGKPYIINEAEYAIVSYIMDLYDNQNLDETAIARRCNDLGYRTKRGKLFERRSVDRILGNPFYCGTVVWNGVEFEGNHEVRLSRERYEKRQKLITSRRRPVKARNVSACKHWLSGLLKCSVCGATLSYTGNNKCPYFQCWKYAKGFHKTSVALSVKKAEEAVISYFEQILDGAEFTYVCKKKKTDHSLQIEQLQKEISKLSMRESRIKEAYEAGVDTLEEYKSNKDRLVSDRLELTAALSQLLQEEQSEQPNTEEILKEIRSVADVLKNPNVGYEEKGNLIRSVVEQIIYDKESGKMSFDIIIS

SEQ ID NO: 7532 - protein, 471 aa, Unknown
  Description of Unknown: Integrase B7533 sequence
  IPR036162,PS51737,IPR011109,PTHR30461,PS00397, PF00239,G3DSA:1.10.10.2600,IPR006119,SSF53041,cd00338, SM00857,IPR025827,IPR038109,PS51736,IPR006118, PF13408,G3DSA:3.40.50.1390,PF07508,Coil
MSSKVAALYIRVSTEDQTELSPDAQKRLLLDYAQKNDMIVSGDFIFTESVSGRHAQKRPEFQRMIALAKQPSHPIDVILVWKFSRFARNQEESIVYKSMLKKDNVDVISVSEPLVEGPFGTLIERIIEWMDEYYSIRLSGEVLRGMKEKALQKGYQTSPCLGYTAVGHGKPYIINEAEYAIVSYIMDLYDNQNLDETAIARRCNDLGYRTKRGKLFERRSVDRILGNPFYCGTVVWNGVEFEGSHEVRLSRERYEKRQKLITSRKRPVKVRNVSACKHWLSGLLKCSVCGATLSYTGNNKCPYFQCWKYAKGFHKTSVALSVKKAEEAVISYFDQILDGAEFTYVCKKKKTDHSLQIEQLQREISKLTMRESRIKEAYEAGVDTLEEYKNNKDRLVSDRLELTAALSQLLQEEQAEQPDAKEVLKEIRSVADVLKNPDVGYEAKGNLIRSVVEQIIYDKESGKMSFDIIIS

SEQ ID NO: 7533 - protein, 471 aa, Unknown
  Description of Unknown: Integrase B7534 sequence
  IPR036162,PS51737,IPR011109,PTHR30461,PS00397, PF00239,G3DSA:1.10.10.2600,IPR006119,SSF53041,cd00338, SM00857,IPR025827,IPR038109,PS51736,IPR006118, PF13408,G3DSA:3.40.50.1390,PF07508,Coil
MSSKVAALYIRVSTEDQTELSPDAQKRLLLDYAQKNDMIVSGDFIFTESVSGRHAQKRPEFQKMIALAKQPSHPIDVILVWKFSRFARNQEESIVYKSMLKKDNVDVISVSEPLIEGPFGSLIERIIEWMDEYYSIRLSGEVLRGMKEKALQKGYQMSPCLGYTAVGHGKPYIINEAEYAIVSYIMDLYDNQNLDETAIARRCNDLGYRTKRGKLFERRSVDRILGNPFYCGTVVWNGVEFEGSHEVRLSRERYEKRQKLITSRKRPVKARNVSTCKHWLSGLLKCSVCGATLSYTGNNKCPYFQCWKYAKGFHKTSVALSVKKAEEAVISYFDQILDGAEFTYVCKKKKTDHSLQIEQLQKEISKLTMRESRIKEAYEAGVDTLEEYKNNKDRLVSDRLELTAALSQLLQEEQADQPDTEEILKEIRSVADVLKNPDVGYEEKGNLIRSVVEQIIYDKESGKMSFDIIIS

SEQ ID NO: 7534 - protein, 471 aa, Unknown
  Description of Unknown: Integrase B7535 sequence
  IPR036162,PS51737,IPR011109,PTHR30461,PS00397, PF00239,G3DSA:1.10.10.2600,IPR006119,SSF53041,cd00338, SM00857,IPR025827,IPR038109,PS51736,IPR006118, PF13408,G3DSA:3.40.50.1390,PF07508,Coil
MSSKVAALYIRVSTEDQTELSPDAQKRLLLDYAQKNDMIVSGDFIFTESVSGRHAQKRPEFQKMIALAKQPSHPIDVILVWKFSRFARNQEESIVYKSMLKKDNVDVISVSEPLIEGPFGSLIERIIEWMDEYYSIRLSGEVLRGMKEKALQKGYQTSPCLGYTAVGHGKPYVINEAEYAIVSYIMDLYDNQNLDETAIARRCNDLGYRTKRGKLFERRSVDRILGNPFYCGTVVWNGVEFEGSHEVRLSRERYEKRQKLITSRKRPVKARNVSACKHWLSGLLKCSVCGATLSYTGNNKCPYFQCWKYAKGFHKTSVALSVKKAEEAVISYFDQILDGAEFTYVCKKKKTDHSLQIEQLQKEIGKLTMRESRIKEAYEAGVDTLEEYKNNKDRLVSDRLELTAALSQLLQEEQAEQPDTEKILIEIRSVADVLKNPDVGYEEKGNLIRSVVEQIIYDKESGKMSFDIIIS

SEQ ID NO: 7535 - protein, 471 aa, Unknown
  Description of Unknown: Integrase B7536 sequence
  PTHR30461:SF3,IPR036162,PS51737,IPR011109,PTHR30461, PS00397,PF00239,G3DSA:1.10.10.2600,IPR006119,SSF53041, cd00338,SM00857,IPR025827,IPR038109,PS51736, IPR006118,PF13408,G3DSA:3.40.50.1390,PF07508,Coil
MKRVALYIRVSSDEQAKFGDSIREQQETLTEYVERHDDMKIVSTYIDDGISGQKLNRDEFAQLITDVQGDQIDLIIFTKLDRWFRSLKHYLNTQDILEAHNVYWFAVSQPYYDTRTAQGRAFIAQSMTWAELEAQQTSERTIAINISKVKNGEVITGSTPFGYSIKDKHLFPDDNAPIALAIFEYFDQTSSIAGTAKYLKETFGISRTRPGIRNMLKNRMYIGKYRQNNNYCPAIIPEALFASVQRKLPLNVKSNNKNDYIFQGLMMCGCCGRKMSAGQATRYGRPRKDGTKKHYPSVSVYKCRYHISDKRDCPNKKTIKETVLEEYLLDHIKEMIQFEIVAIENKKKQVIDTKARRRKIEEKLDRLKAAYLDDVIGLDEYKKDRQELQETLATFKNKPSADISNKKSDLEELLYSGLFDHYPVLTKLEKKEFWRSFIDSITMDGERNITVKFLESTYVLTDTDGRASFRR

SEQ ID NO: 7536 - protein, 471 aa, Unknown
  Description of Unknown: Integrase B7537 sequence
  IPR036162,PS51737,IPR011109,PTHR30461,PS00397, PF00239,G3DSA:1.10.10.2600,IPR006119,SSF53041,cd00338, SM00857,IPR025827,IPR038109,PS51736,IPR006118, PF13408,G3DSA:3.40.50.1390,PF07508,Coil
MSSKVACLYIRVSTEDQTELSPDAQKRLLLDYAQKNDMIVSGDFIFTESVSGRHAQKRPEFQKMIALAKQPSHPIDVILVWKFSRFARNQEESIVYKSMLKKDNVDVISVSEPLIEGPFGSLIERIIEWMDEYYSIRLSGEVLRGMKEKALQKGYQTSPCLGYTAVGHGKPYIINEAEYAIVSYIMDLYDNQNLDETAIARRCNDLGYRTKRGKLFERRSVDRILGNPFYCGTVVWNGVEFEGNHEVRLSRERYEKRQKLITSRKRPVKARNVSACKHWLSGLLKCSVCGATLSYTGNNKCPYFQCWKYAKGFHKTSVALSVKKAEEAVISYFDQILDGAEFTYVCKKKKTDHSLQIEQLQREIGKLTMRESRIKEAYEAGVDTLEEYKNNKDRLVSDRLELTAALSQLLQEEQAEQTDAEEILKEIRSVADVLKNPDVGYEAKGNLIRSVVEQIIYDKESGKMSFDIIIS

SEQ ID NO: 7537 - protein, 471 aa, Unknown
  Description of Unknown: Integrase B7538 sequence
  IPR036162,PS51737,IPR011109,PTHR30461,PS00397, PF00239,G3DSA:1.10.10.2600,IPR006119,SSF53041,cd00338, SM00857,IPR025827,IPR038109,PS51736,IPR006118, PF13408,G3DSA:3.40.50.1390,PF07508,Coil
MSSKVAALYIRVSTEDQTELSPDAQKRLLLDYAQKNDMIVSGDFIFTESVSGRHAQKRPEFQKMIALAKQPSHPIDVILVWKFSRFARNQEESIVYKSMLKKDNVDVISVSEPLIEGPFGSLIERIIEWMDEYYSIRLSGEVLRGMKEKALQKGYQTSPCLGYTAVGHGKPYVINEAEYAIVSYIMDLYDNQNLDETAIARRCNDLGYRTKRGKLFERRSVDRILGNPFYCGTVVWNGVEFEGNHEVRLSRERYEKRQKLITSRKRPVKARNVSACKHWLSGLLKCSVCGATLSYTGNNKCPYFQCWKYAKGFHKTSVALSVKKAEDAVITYFEQILDGAEFTYVCKKKKTDHSLQIDQLQREISKLAMREGRIKEAYEAGVDTLEEYKNNKDRLVSDRLELTAALSQLLQEEQAEQPDTEKILKEIRSVADVLKNPDVGYEEKGNLIRSVVEQIIYDKESGKMSFDIIIS

SEQ ID NO: 7538 - protein, 471 aa, Unknown
  Description of Unknown: Integrase B7539 sequence
  IPR036162,PS51737,IPR011109,PTHR30461,PS00397, PF00239,G3DSA:1.10.10.2600,IPR006119,SSF53041,cd00338, SM00857,IPR025827,IPR038109,PS51736,IPR006118, PF13408,G3DSA:3.40.50.1390,PF07508,Coil
MSSKVAALYIRVSTEDQTELSPDAQKRLLLDYAQKNDMIVSGDFIFTESVSGRHAQKRPEFQKMIALAKQPSHPIDVILVWKFSRFARNQEESIVYKSMLKKDNVDVISVSEPLIEGPFGSLIERIIEWMDEYYSIRLSGEVLRGMKEKALQKGYQTSPCLGYTAVGHGKPYIINEAEYAIVSYIMDLYDNQNLDETAIARRCNDLGYRTKRGKLFERRSVDRILGNPFYCGIVVWNGVEFEGSHEVRLSRERYEKRQKLITSRKRPVKARNVSACKHWLSGLLKCSVCGATLSYTGNNKCPYFQCWKYAKGFHKTSVALSVKKAEEAVISYFDQILDGAEFTYVCKKKKTDHSLQIEQLQREISKLTMRENRIKEAYEAGVDTLEEYKNNKDHLVSDRLELTAALSQLLQEEQSEQPNTEEILKEIRSVADVLKNPNVGYEEKGNLIRSIVEQIIYDKESGKMSFDIIIS

SEQ ID NO: 7539 - protein, 471 aa, Unknown
  Description of Unknown: Integrase B7540 sequence
  IPR036162,PS51737,IPR011109,PTHR30461,PS00397, PF00239,G3DSA:1.10.10.2600,IPR006119,SSF53041,cd00338, SM00857,IPR025827,IPR038109,PS51736,IPR006118, PF13408,G3DSA:3.40.50.1390,PF07508,Coil
MSSKVAALYIRVSTEDQTELSPDAQKRLLLDYAQKNDMIVSGDFIFTESVSGRHAQKRPEFQKMIALAKQPSHPIDVILVWKFSRFARNQEESIVYKSMLKKDNVDVISVSEPLIEGPFGSLIERIIEWMDEYYSIRLSGEVLRGMKEKALQKGYQTSPCLGYTAVGHGKPYIINEAEYAIVSYIMDLYDNQNLDETAIARRCNDLGYRTKRGKLFERRSVDRILGNPFYCGTVVWNGVEFEGNHEVRLSRERYEKRQKLITSRKRPVKARNVSACKHWLSGLLKCSVCGATLSYTGNNKCPYFQCWKYAKGFHKTSVALSVKKAEEAVISYFDQILDGAEFTYVCKKKKTDHSLQIEQLQKEISKLTMRESRIKEAYEAGVDTLEEYKNNKDRLVSDRLELTAALSQLLQEEQADQPDTEEILKEIRSVADVLKNPDVGYEEKGNLIRSVVEQIIYDKESGKMSFDIIIS

SEQ ID NO: 7540 - protein, 471 aa, Unknown
  Description of Unknown: Integrase B7541 sequence
  IPR036162,PS51737,IPR011109,PTHR30461,PS00397, PF00239,G3DSA:1.10.10.2600,IPR006119,SSF53041,cd00338, SM00857,IPR025827,IPR038109,PS51736,IPR006118, PF13408,G3DSA:3.40.50.1390,PF07508,Coil
MSSKVACLYIRVSTEDQTELSPDAQKRLLLDYAQKNDMIVSGDFIFTESVSGRHAQKRPEFQKMIALAKQPSHPIDVILVWKFSRFARNQEESIVYKSMLKKDNVDVISVSEPLIEGPFGSLIERIIEWMDEYYSIRLSGEVLRGMKEKALQKGYQTSPCLGYTAVGHGKPYVINEAEYAIVSYIMDLYDNQNLDETAIARRCNDLGYRTKRGKLFERRSVDRILGNPFYCGTVVWNGVEFEGSHEVRLSRERYEKRQKLITSRKRPVKARNVSACKHWLSGLLKCSVCGATLSYTGNNKCPYFQCWKYAKGFHKTSVALSVKKAEEAVISYFDQILDGAEFTYVCKKKKTDHSLQIEQLQKEISKLTMRESRIKEAYEAGVDTLEEYKNNKDRLVSDRLELTAALSQLLQEEQAEQPDAEEILKEIRSVADVLKNPDVGYEEKGNLIRSVVEQIIYDKESGKMSFDIIIS

SEQ ID NO: 7541 - protein, 471 aa, Unknown
  Description of Unknown: Integrase B7542 sequence
  IPR036162,PS51737,IPR011109,PTHR30461,PS00397, PF00239,G3DSA:1.10.10.2600,IPR006119,SSF53041,cd00338, SM00857,IPR025827,IPR038109,PS51736,IPR006118, PF13408,G3DSA:3.40.50.1390,PF07508,Coil
MSSKVACLYIRVSTEDQTELSPDAQKRLLLDYAQKNDMIVSGDFIFTESVSGRHAQKRPEFQKMIALAKQPSHPIDVILVWKFSRFARNQEESIVYKSMLKKDNVDVISVSEPLIGGPFGSLIERIIEWMDEYYSIRLSGEVLRGMKEKALQKGYQTSPCLGYTAVGHGKPYIINEAEYAIVSYIMDLYDNQNLDETAIARRCNDLGYRTKRGKLFERRSVDRILGNPFYCGTVVWNGVEFEGSHEVRLSRERYEKRQKLITSRKRPVKARNVSACKHWLSGLLKCSVCGATLSYTGNNKCPYFQCWKYAKGFHKTSVALSVKKAEEAVISYFDQILDGAEFTYVCKKKKTDHSLQIEQLQKEISKLTMRESRIKEAYEAGVDTLEEYKNNKDRLVSDRLELTAALSQLLQEEQAEQPDAEEILKEIRSVADVLKNPDVGYEEKGNLIRSVVEQIIYDKESGKMSFDIIIS

SEQ ID NO: 7542 - protein, 471 aa, Unknown
  Description of Unknown: Integrase B7543 sequence
  PTHR30461:SF3,IPR036162,PS51737,IPR011109,PTHR30461, PS00397,PF00239,G3DSA:1.10.10.2600,IPR006119,SSF53041, cd00338,SM00857,IPR025827,IPR038109,PS51736, IPR006118,PF13408,G3DSA:3.40.50.1390,Coil
MKKKGKRVACYIRVSTQEQKLHGLSLDAQRFTLKAFCEHNSLNIVAWYEDEGISGRKLIKKRPALQQMLNDAPNDMFDRIIFIKLDRYFRSVGEYYECQKILERYNIVWTATEEKYDLTTANGRFWVNQKLSMAEYEADQTGERIRLVNEYKVRTGQPLTGSQNLSLAFKVGFDEKTGLKNVIHDKENEQRVYDLIDTFLKKKSLHRTVEEINIKYSVKTTYNVYRKVLKNSMLYGFYRGNSEYCEPYVSKEKFEQIQECLEKNIKARKNKRFYLFSGLIKCPECGRMLIGNNSCKRTTKRGDKIYINTKKLYHYRCNNYRINRLCDFNKSVNEEKLEKKLLNIFDSEIASYVEKIKISEQENDTISIKKEIQDLKSELSRLNNIFQKGRMSEKDYDSEYSKIEKKINDLEKSVTKTIKKDMSKYNELLASTSWQDLYLQLNRENKQAFWHRYIKQILLTENGEIDKIIFF

SEQ ID NO: 7543 - protein, 471 aa, Unknown
  Description of Unknown: Integrase B7544 sequence
  IPR036162,PS51737,IPR011109,PTHR30461,PS00397, PF00239,G3DSA:1.10.10.2600,IPR006119,SSF53041,cd00338, SM00857,IPR025827,IPR038109,PS51736,IPR006118, PF13408,G3DSA:3.40.50.1390,PF07508,Coil
MSSKVAALYIRVSTEDQTELSPDAQKRLLLDYAQKNDMIVSGDFIFTESVSGRHAQKRPKFQKMIALAKQPSHPIDVILVWKFSRFARNQEESIVYKSMLKKDNVDVISVSEPLIEGPFGSLIERIIEWMDEYYSIRLSGEVLRGMKEKALQKGYQTSPCLGYTAVGHGKPYIINEAEYAIVSYIMDLYDNQNLDETAIARRCNDLGYRTKRGKLFERRSVDRILGNPFYCGTVVWNGMEFEGNHEVRLSKERYEKRQKLITSRRRPVKARNVSACKHWLSGLLKCSVCGATLSYTGNNKCPYFQCWKYAKGFHKTSVALSVKKAEEAVISYFDQILDGAEFTYVCKKKKTDHSLQIEQLQKEIGKLTMRESRIKEAYEAGVDTLEEYKNNKDRLVSDRLELTAALSQLLQEEQSEQPDTEEVLKEIRSVADVLKNPDVGYEEKGNLIRSVVEQIIYDKESGKMSFDIIIS

SEQ ID NO: 7544 - protein, 471 aa, Unknown
  Description of Unknown: Integrase B7545 sequence
  IPR036162,PS51737,IPR011109,PTHR30461,PS00397, PF00239,G3DSA:1.10.10.2600,IPR006119,SSF53041,cd00338, SM00857,IPR025827,IPR038109,PS51736,IPR006118, PF13408,G3DSA:3.40.50.1390,PF07508,Coil
MSSKVACLYIRVSTEDQTELSPDAQKRLLLDYAQKNDMIVSGDFIFTESVSGRHAQKRPEFQKMIALAKQPSHPIDVILVWKFSRFARNQEESIVYKSMLKKDNVDVISVSEPLIEGPFGSLIERIIEWMDEYYSIRLSGEVLRGMKEKALQKGYQTSPCLGYTAVGHGKPYIINEAEYAIVSYIMDLYDNQNLDETAIARRCNDLGYRTKRGKLFERRSVDRILGNPFYCGTVVWNGVEFEGNHEVRLSRERYEKRQKLITSRKRPVKARNVSACKHWLSGLLKCSVCGATLSYTGNNKCPYFQCWKYAKGFHKTSVALSVKKAEEAVISYFDQILDGAEFTYVCKKKKTDHSLQIEQLQREIGKLTMRESRIKEAYEAGVDTLEEYKNNKDRLVSDRLELTAALSQLLQEEQSEQPDTEEILKEIRSVADVLKNPDVGYEEKGNLIRSVVEQIIYDKESGKMSFDIIIS

SEQ ID NO: 7545 - protein, 471 aa, Unknown
  Description of Unknown: Integrase B7546 sequence
  IPR036162,PS51737,IPR011109,PTHR30461,PS00397, PF00239,G3DSA:1.10.10.2600,IPR006119,SSF53041,cd00338, SM00857,IPR025827,IPR038109,PS51736,IPR006118, PF13408,G3DSA:3.40.50.1390,PF07508,Coil
MIPAIVYARASTDHQEYSVNDQLKYIKDWAKHHGYKIIKVYIDDGISGAFVAKRPGFLSMIEDVTTNLSGAKALLIWDSYRFARNMVEFLTYKQMIRQHGVSVIAVTEPIVEDEDAQLYIDAINGASGELYLRKLSKDSKRGIRAKVVERHEHLGFAPYGYRMDRNTGQLEIQPEEAQWVQYIFQSVIDGAPYLQICEALRKAGVKTRKGCAWTNTQVKYTLTNKTYCGLLEVHLDGKHGVYEGKHEPIIDRETFDKVQAIIEERAAKHKKYARNTNKYKHWLSGLMRCPYCGGALSYVQGSGGRADRYRCNSRMDGKGCVNTSVKVNVAADFVLNQLQQIYDRPEILCTLKTTTPQPANRIDYDGEIKKLRGQLTRAKKAYMEEIDTLEEYRENKARITAAIEDMEAQKNAAAAGIIKFDPAAFQEKCLSALSVLQSDVDTEKKVAVSHNLIEKIDCDNLKKVLTIYFYS

SEQ ID NO: 7546 - protein, 470 aa, Unknown
  Description of Unknown: Integrase B7547 sequence
  PTHR30461:SF3,IPR036162,PS51737,IPR011109,PTHR30461, PS00397,PF00239,G3DSA:1.10.10.2600,IPR006119,SSF53041, SM00857,IPR025827,IPR038109,PS51736,cd03768, IPR006118,PF13408,G3DSA:3.40.50.1390,PF07508,Coil
MKKAAIYVRVSTQEQAQEGFSIPEQTERLTKYCEAHGWTIGNIYTDPGFSGANTNRPALKCLFKDCERKRFDIVVVYKLDRLSRSQKDTLYIIEDVFLKNSISFISMNENFDTGSPFGRAMIGILSVFAQLEREQIKERMAMGREGRAKQGKWHGGGNVPIGYTSVDGNLIPDEYEAMQVRKVFSLALEGHSFIQITRMMAAAGYTHKYGAYKAGYVTVSKMLHNPIYIGMIKNGDDYVSGIHDPLIDQQTFDAVQKRLQQISDDYQKNHRKNQPVAYMLSGLCHCALCGSEYSGFYVGAKGYRKKYYRCKKRAYHWREKKETCTAPNIRVEQLDAAVIEEIRKIQTDPAYFEKVSKPQTSINNELQTLNNRFSEIQKRIQRTIKLYSLGNIEDDDIDDQMKQLYCERDSIQNEIDRLSGSQPDVDYIKEVLSLAVLEDMSTLELRQLCQTLIDHIIIKEDESIEIYWAF

SEQ ID NO: 7547 - protein, 470 aa, Unknown
  Description of Unknown: Integrase B7548 sequence
  PTHR30461:SF3,IPR036162,PS51737,IPR011109,PTHR30461, PS00397,PF00239,G3DSA:1.10.10.2600,IPR006119,SSF53041, SM00857,IPR025827,IPR038109,PS51736,cd03768, IPR006118,PF13408,G3DSA:3.40.50.1390,PF07508,Coil
MKKAAIYVRVSTQEQAQEGFSIPEQTERLTKYCEAHGWTIGNIYTDPGFSGANTNRPALKCLFKDCERKRFDIVVVYKLDRLSRSQKDTLYIIEDVFLKNSIGFISMNENFDTGSPFGRAMIGILSVFAQLEREQIKERMAMGREGRAKQGKWHGGGNVPIGYTSVDGNLIPDEYEAMQVRKVFSLALEGHSFMQITRMMAAAGYTHKYGAYKAGYVTVSKMLHNPIYIGMIKNGDDYVSGIHDPLIDQQTFDAVQKRLQQISDDYQKNHRKNQPVAYMLSGLCHCALCGSEYSGFYVGAKGYRKKYYRCKKRAYHWREKKETCTAPNIRVEQLDAAVIEEIRKIQTDPAYFEKVSKPQTSINNELQTLNNRFSEIQKRIQRTIKLYSLGNIEDDDIDDQMKQLYCERDSIQNEIDRLSGSQPDVDYIKEVLSLAVLEDMSTLELRQLCQTLIDHIIIKEDESIEIYWAF

SEQ ID NO: 7548 - protein, 470 aa, Unknown
  Description of Unknown: Integrase B7549 sequence
  PTHR30461:SF3,IPR036162,PS51737,IPR011109,PTHR30461, PS00397,PF00239,G3DSA:1.10.10.2600,IPR006119,SSF53041, SM00857,IPR025827,IPR038109,PS51736,cd03768, IPR006118,PF13408,G3DSA:3.40.50.1390,PF07508,Coil
MKKAAIYVRVSTQEQAQEGFSIPEQTERLTKYCEAHGWTIGNIYTDPGFSGANTNRPALKCLFKDCERKRFDIVVVYKLDRLSRSQKDTLYIIEDVFLKNSISFISMNENFDTGSPFGRAMIGILSVFAQLEREQIKERMAMGREGRAKQGKWHGGGNVPIGYTSVDGNLIPDEYEAMQVRKVFSLALEGHSFMQITRMMAAAGYTHKYGAYKAGYVTVSKMLHNPIYIGMIKNGDDYVSGIHDPLIDQQTFDAVQKRLQQISDDYQKNHRKNQPVAYMLSGLCHCALCGSEYSGFYVGAKGYRKKYYRCKKRAYHWREKKETCTAPNIRVEQLDAAVIEEIRKIQTDPAYFEKVSKPQTSINNELQTLNNRFSEIQKRIQRTIKLYSLGNIEDDDIDDQMKQLYCERDSIQNEIDRLSGSQPDVDYIKEVLSLAVLEDMSTLELRQLCQTLIDHIIIKEDESIEIYWAF

SEQ ID NO: 7549 - protein, 470 aa, Unknown
  Description of Unknown: Integrase B7550 sequence
  PTHR30461:SF3,SM00857,G3DSA:1.10.10.2600,IPR036162,PF13408, IPR025827,G3DSA:3.40.50.1390,PS51737,IPR006119,IPR038109, PF07508,IPR011109,SSF53041,PTHR30461,PS51736, cd00338,PF00239
MARSVTCIPARQTIATEGNTIEIPKKRVAAYCRVSTDEDGQLSSYQNQVQFYTEHIKSNRAYEFAGVYADEGISGTNTKKREQFNKMIQDCKNGKIDLIITKSISRFARNTLDCLQYVRELKEIEVEIFFEKEHIFTLDSKGEVLLTILSSLAQDESRSISENTTWGVRRRFEQGRVTVNEKKFLGYDKDEEGNLIINKQQAKIVRRIYTEYLNGKGPTRIAKELERDKVKGVTGTTKWYASTIDKILRNEKYKGDALLQKTYTVDFLTKKRVKNDEGKVTQYYVQESHPAIIEHEMWEAVQLEIERRKQYVEKHKLQKYDYGLEDTAFAGRIICGECGRGYYRKTWHSNSKPIKLWQCGAKYQEKGKIGCTNSHIYAQKLNEVFINAFNALVENKKAFLSKWKGELQGADVLKAYRLRQFIELIAEADMIEEVDKELVFKVLDKIAVIDKGQVIVKFLDGTELECKMES

SEQ ID NO: 7550 - protein, 470 aa, Unknown
  Description of Unknown: Integrase B7551 sequence
  PTHR30461:SF3,cd00338,SM00857,IPR036162,PF13408, IPR025827,G3DSA:3.40.50.1390,IPR006119,SSF53041,PTHR30461, PS51736,Coil,PF00239
MRKKIRVAQYERVSHEDQKKFGSSIAAQRQHLNKFLDEHPEMVLIDEYCDEGISADKLNKRTELQRMLKDIEEGKIDLVIFTKLDRWFRSVAKYYKIQEILEANNVAWQAVLEDYETVTANGKFKVNIMLSVAQQERDRDSERIKDVFAYKVSQGEAIVPSSSLHFPFIVKEIDGVKRVVHNPETEAMTYDWIEHLKTYNSQSRAAAYINEKYNKDFDYNSLVKTSKDTLLYGCYRGNENYCEPYMTKEEFMQLQENLKKNIRVKKNNHVYIFSSKMKCPRCGQSLVGGWTMYKTKESDKNYSYYYKCNFAHHKRKIKSAKACSYTRAIGENYLEQKMITNLKKYIIDFISEKEANVKKDVPKNTKNIKRKLQDEIERLNKMYQKGRINEEDYDAEYDRIEKKINALEEEKKESYDSTKLEELLKTDVIEQYYNSDRLTRQGFWNTLVKEIEIDENKEIVRVDFFRLTSM

SEQ ID NO: 7551 - protein, 470 aa, Unknown
  Description of Unknown: Integrase B7552 sequence
  PTHR30461:SF3,IPR036162,PS51737,IPR011109, PTHR30461,PS00397,PF00239,G3DSA:1.10.10.2600, IPR006119,SSF53041,cd00338,SM00857,IPR025827,IPR038109 ,PS51736,IPR006118,PF13408,G3DSA:3.40.50.1390,PF07508,Coil
MKGESELDKKAAIYIRVSTQEQATEGYSIQAQTDRLIKYVEAKDFILYKKYIDAGYSASKLERPAMQELIQDVQSKKVDVVIVYKLDRLSRSQKDTMYLIEDIFRPNDVELISMQESFDTSTAFGSATVGMLSVFAQLERKSISERMITGRVERAKKGFYHTGGQDRPPAGYQFNSDNQLIINEYEAAAIKDLFRLYNDGLGKSSISEYLKKNYPGKNKWLPSSIDRMLKNSLYIGKVKFSGVEYDGIHEPIIDEVTFYKTQKEIARRKQTNTKRYNYVALLGGLCECGICGAKMANRRSVGRKGKVYRYYRCYSKKGSPKHMMKTDGCSSKAQQQFIIDEAVINNLKNIDVEAELKRRSAPQTNTSLISSQIESIDKQINKLIDLFQVDSMPLDVISEKIDKLNKEKQSMEKLLERKNKLDKTELQHRFDVLKSFDWDNSSIESKRVVIEMLVQKVIIHDNSIEIILVE

SEQ ID NO: 7552 - protein, 470 aa, Unknown
  Description of Unknown: Integrase B7553 sequence
  PTHR30461:SF3,SM00857,G3DSA:1.10.10.2600,IPR036162,PF13408, PS51737,G3DSA:3.40.50.1390,IPR025827,IPR006119,IPR038109, PF07508,IPR011109,SSF53041,PTHR30461,Coil, cd00338,PF00239
MKNGFVVVNEYIDRAISGKTDNRPSFQRLIKDSDKGHFDAVIMYTLDRFARNRYDSAIYKAKLKKNGVRVFYAKQPMPDTPEGIILESVLEGYAEYYSENLARSIKRGMKENALHTIAMGSLGLGYKIGEDRKYEIDPVGAKAVRAIFTMYAEGKSKTEIVNWLNEHGFKTSQGNQFNKNSLSRILRNDKYIGVYRYADVVVENAIPPIIDKHLFDKVQALLKHNFASRARNKAKEDYLLSTKLFCGHCGSPMIGESGTSKLGRVYHYYKCSKRKRERDCSKKVEKKDWLEELVVRYTVHHVLTDENIELIATKAMELIEKDLQDTSVLVGLQGMLKDVNKKIKNLMSAIEQGIITSSTKERLEELELERLNIEGQIAREEMKKPLLSKERIVYWLTSFKSGDIQDIEYQRRIIDTLVNSVFVYDDDGNGRRIVLTFNISGNNTLTIECSDIEGIAPPKKGLAFQQVLFP

SEQ ID NO: 7553 - protein, 470 aa, Unknown
  Description of Unknown: Integrase B7554 sequence
  cd00338,SM00857,G3DSA:1.10.10.2600,IPR036162,PF13408, IPR025827,G3DSA:3.40.50.1390,PS51737,IPR006119,IPR038109, PF07508,IPR011109,SSF53041,PTHR30461,PS51736, Coil,PF00239
MRVGLYTRVSTQEQAQEGYSIDAQLERLTAYCKAKDWHIVHTYTDAGFSGSNLNRPAMQQLINDIDSDTFDTVLVYKLDRISRSQKDTLFLIEDVFLKNNISFISVNENFDTSTAFGRAMIGILSVFAQLEREQIKERTRMGLEERVRKGKHHSFAPFGYRLKDKELVICEPEADVVRIVYDMTLQNKTAKVINDYVVENYPEYKALFTTKNNKVYDIIHNITYGGYVKFGDKISKGSHEAIIDDITYAKVQKLLKKKAEIWETSRTKRTGTRSYYLLTGFVFCGNCGARLRVIKPSSGGKYSCYSRIGNPSYMVKDPNCRLKVYELSELDNIVLDELKKLKSDEEYFNSLCRPNIVENKADKISKELNRIEIQINKLLDLYQMDDIDVSLLTNRMKQLNNKKKKLENEISASKQDSLPKLTYRQALDILSDLDSYIEKGATDQLRELLQMLIDRITVYDDRVEIKWSFS

SEQ ID NO: 7554 - protein, 470 aa, Unknown
  Description of Unknown: Integrase B7555 sequence
  PTHR30461:SF3,SM00857,G3DSA:1.10.10.2600,IPR036162,PF13408, IPR025827,PS51737,G3DSA:3.40.50.1390,IPR006119,IPR038109, PF07508,IPR011109,SSF53041,PTHR30461,Coil, PS51736,cd00338,PF00239
MTIIGEYCDKAISGKTDNRPSFQRLIKDSEKGQFEAVIMYTLDRFARNRYDSAIYKAKLKKNGVRVYYAKQPMPDTPEGIILESVLEGYAEYYSENLSRNIKRGMKENALQCIANGGAGMPLGYTVGEDRRYKIDPVGARIVQEIFQMYADGMSATQIINECNKRGYKTARGNAFNKNSLRTMLKNDRYIGVYRFADVVVEGGVPPIISRELFDKVQATLKHNYSARARNKAKDDYLLTAKLFCGHCGSSMVGESGTSKSGKLHHYYKCIERKRKHKCNKAVEKKDWMEELVVRFTVQKVLTDENIERIAVKAMEIIEKESADTTYIDGLRNELKEVKKKIKNLMTAIEQGIITPSTKERMDELELEKNEIEGRIASEEMKKPLLTKERIMYWLYSFKSGNIDDVEYKRRVIDTLVNSVYVYDEGDKGRRIVFTFNISGQNTATLSCSDIACFAPPRDCEQILFTHRINP

SEQ ID NO: 7555 - protein, 470 aa, Unknown
  Description of Unknown: Integrase B7556 sequence
  cd00338,SM00857,G3DSA:1.10.10.2600,IPR036162,PF13408, PS51737,G3DSA:3.40.50.1390,IPR025827,IPR006119,IPR038109, PF07508,IPR011109,SSF53041,PTHR30461,PS51736, Coil,PF00239
MRVGLYTRVSTQEQAQEGYSIDAQLERLTAYCKAKDWHIVHTYTDAGFSGSNLNRPAMQQLINDIDSDTFDTVLVYKLDRISRSQKDTLFLIEDVFLKNNISFISVNENFDTSTAFGRAMIGILSVFAQLEREQIKERTRMGLEERVRKGKHHSFAPFGYRLKDKELVICEPEADVVRIVYDMTLQNKTAKVINDYVVENYPEYKALFTTKNNKVYDIIHNITYGGYVKFGDKISKGTHEAIIDDITYAKVQKILQKKAEIWETSRTKRTGTRSYYLLTGFVFCGNCGARLRVIKPSSGGKYSCYSRIGNPSYMVKDPNCRLKVYELSELDNIVLDELKKLKSDEEYFNSLCRPNIVENKADKISKELNRIEIQINKLLDLYQMDDIDISMLTNRMKQLNNKKKKLENEISASKQDSLPKLTYRQALDILSDLDSYIEKGATDQLRELLQMLIDRITVYDDRVEIKWSFS

SEQ ID NO: 7556 - protein, 470 aa, Unknown
  Description of Unknown: Integrase B7557 sequence
  IPR036162,PS51737,IPR011109,PTHR30461,PS00397, PF00239,G3DSA:1.10.10.2600,IPR006119,SSF53041,cd00338, SM00857,IPR025827,IPR038109,PS51736,IPR006118, PF13408,G3DSA:3.40.50.1390,PF07508,Coil
MKTGALYIRVSTDDQAELSPDAQKRLLLDYAKKNDIIVSKDFIFSESVSGRHVQKRPEFQRMIATAKQPSHPIDVILVWKFSRFARNQEESIVYKSMLKKDRVDVVSVSEPLIEGPFGSLIERIIEWMDEYYSIRLSGEVLRGMKEKALQHGYQSTPCLGYDAVGHGKPFVINEAEYAMVSYIMDLYDNQNMDETAIARRCNDLGYRTKRGNLFERRTVDRILENPFYCGTVIWNGVEFEGTHEVRLSRERFEKRQELIASRKRPIKARNVSACKHWLSGLIKCSICGATLSYTGNNACPYFQCWKYAKGFHKTSVALSVKKAEEAVTDYFDQILSGAEFSYVRKSQPKDNNDLEIERLQKELSKLEIREKRIREAYESEIDTLEEYKTNKDRLTASRLKLNSQIKNLLHDQEEPEIDTEKVLREIKSVNDILKNPDVGYEEKGLLIRSVVDQIVYDKEEGKMYFDIIVS

SEQ ID NO: 7557 - protein, 470 aa, Unknown
  Description of Unknown: Integrase B7558 sequence
  PTHR30461:SF3,IPR036162,PS51737,IPR011109,PTHR30461, PS00397,PF00239,G3DSA:1.10.10.2600,IPR006119,SSF53041, cd00338,SM00857,IPR025827,IPR038109,PS51736, IPR006118,PF13408,G3DSA:3.40.50.1390,PF07508,Coil
MKGESELDKKAAIYIRVSTQEQATEGYSIQAQTDRLIKYVEAKDFILYNKYIDAGYSASKLERPAMQELIQDVQSKKVDVVIVYKLDRLSRSQKDTMYLIEDIFRPNDVELISMQESFDTSTAFGSATVGMLSVFAQLERKSISERMITGRVERAKKGFYHTGGQDRPPAGYQFNSDNQLIINEYEAAAIKDLFRLYNDGLGKSSISEYLKKNYPGKNKWLPSSIDRMLKNSLYIGKVKFSGAEYDGIHEPIIDEVTFYKTQKEIARRKQTNTKRYNYVALLGGLCECGICGAKMANRRAVGRKGKVYRYYRCYSKKGSPKHMMKTDGCSSKAQQQFIIDEAVINNLKNIDVEAELKRRSAPQTNTSLISSQIESIDKQINKLIDLFQVDSMPLDVISEKIDKLNKEKQSMEKLLERKNRLDKTELQHRFDVLKSFDWDNSSIESKRVVIEMLVQKVIIHDNSIEIILVE

SEQ ID NO: 7558 - protein, 469 aa, Unknown
  Description of Unknown: Integrase B7559 sequence
  SM00857,G3DSA:1.10.10.2600,IPR036162,PF13408,IPR025827, G3DSA:3.40.50.1390,PS51737,IPR006119,IPR038109,PF07508, SSF53041,IPR011109,PF00239,PTHR30461,PS51736, Coil,cd00338
MRAGLQIRVSTLEQAIEGYSLAAQEKKLREYAQFKGYEIVGVYRDDGYSGASLNRPGLRRLMSDIEADKLDIVLIYKQDRLTRSVKDLLNLLDVFDKHNVALFSITENIDLSSPFGRAALKMSATFSELERETIIERSKMGKDQKARQGELMGSGNSPFGYRYDKLTKRFEIIPEEAEIVRNIYSLYIKGMSIRQLNAYCRDTYNHPHFGNPMSCKALLHRPMYAGYFDWKGDLIKGVNFDPIITYEDYLKVQNILKQNTFRRNRLTSPYMLTGLLVCGDCGNRYVGKYKKSYQINREGKRVQYGNKYYGCTARIKRDKNYHPAKCSNKMWRVEELDEIVLNAVKNIDFADLKSPKATEGSFDLLRGEIADAKNKIDKLLDLYMNDLVTREAYEQRLYEYEKKIKQTEAVIEQEQEKLGDSPELPTNYLKEQQARIDDMSLDERRLYLKMIIKHIVLKNDEIYIEWRIK

SEQ ID NO: 7559 - protein, 469 aa, Unknown
  Description of Unknown: Integrase B7560 sequence
  PTHR30461:SF3,IPR036162,PS51737,IPR011109,PTHR30461, PS00397,PF00239,G3DSA:1.10.10.2600,IPR006119,SSF53041, SM00857,IPR025827,IPR038109,PS51736,cd03768, IPR006118,PF13408,G3DSA:3.40.50.1390,Coil
MAKSKMKKIVAPEQLTQSIVALYIRVSTDKQREEGFSIDIQKERLRAYATSMFPGAVVKEYVDDGFSGGSLDRPQMKMLIEDVKEKRVTHVVVLKLDRLSRSQKDTLYLIEDVFLPHNVAFISMGESFNTATPFGRAVVGILSVFAQLERENIFERTRSGMQKRVELGYWPGGGRTPFGYDYDETQGILVPNKDADTVRKIYDLYLGGMSLQNIADLCGLSYERLASQIIKRKSNTGVIVYNGEEYKGRHQPLVSEETYNKAMLMMQERSSARCTVFPDHLLSGLVYCGVCGAKMRYQKWGKAGTKLVCYSQQKSKRYLIRDENCDNIKPWADDVEAAVLDAVFARVSDPAPVDEGTTDRTMSDILKEQKSQAERKLRRLYDLYSDNPNDILLASITDLTDQIKDIEHKLDIEQKRSAVTERAHNVQIKLEEIESCWPYMTPTEKQSVLRELINKISVEKGHVHVDFRY

SEQ ID NO: 7560 - protein, 469 aa, Unknown
  Description of Unknown: Integrase B7561 sequence
  cd00338,SM00857,G3DSA:1.10.10.2600,IPR036162,PF13408, IPR025827,G3DSA:3.40.50.1390,PS51737,IPR006119,IPR038109, PF07508,SSF53041,IPR011109,PTHR30461,PS51736, Coil,PF00239
MMKKIAVLYMRMSTDMQEHSIESQERVLMEYAKRNGYVVIRKYIDRGISGQHASKRPDFLKMIDDSETGEFQFVLIYDSSRFARNLVESLTYKSILKENCVRLISMTEPNLEDDEMSLYIDAMQGATNEIYVRKLSKSVKRGHNDRALRGDLPGDVQFGLKRLKDGSIVLDEVKAPIMRWMYEAIYYDDSSYYSICETLAAKGIKSQRGNIIDSRQVKRMLMNIKNKAYHWAEKDGKPILKKGNYPAIVDEEIFDAVQEIIAERAKHYKKNEKPAEFRKHWLSGLLVCPHCGAGYSYNTRKPPQHDAFRCGNQTRGACKKGSSILVDVAVEMVLDKLSEVYAGPLAPYVKNITVSQPEPQIDYDKEIKLLEAQLKRAKQAYLAEIDTIDEYAQNKRRIASNIKELQEAKNQAQEGAALNEPQFKVKLLNAITLLKSDCPMSEKIPAARSIIEKILVDPRNKTMDIYFFA

SEQ ID NO: 7561 - protein, 469 aa, Unknown
  Description of Unknown: Integrase B7562 sequence
  PTHR30461:SF3,SM00857,G3DSA:1.10.10.2600,IPR036162,PF13408, IPR025827,PS51737,G3DSA:3.40.50.1390,IPR006119,IPR038109, PF07508,IPR011109,SSF53041,PTHR30461,PS51736, cd00338,PF00239
MARSITHIPARQTVVTTNNNLQIPKKKVAAYCRVSTDQLEQLSSYQNQLIYYREYISNNKAYEFVGIYADEGISGTNTKKREQFNKMIADCKSGKIDMIMTKSISRFARNTLDCLQYVRLLKDLGIEVFFEKENINTLDSKGEILLTLLSSLAQEESNNLSQITTWGIRRRFEQGKVTVNEKKFLGYDKDGEGNLIINRQQAKIVKRIYQEYLNGKGPTRIMRELEHDKVKGVTGSIKWYTTTIDKILRNEKYKGDALLQKTYTTNFLNKTRAKNEGQVTQYYVEESHPAIIPPIMWDAVQLEIERRKQYVEEHKLQKYDYGFEDTAFAGHIICGECGRSYQRKIWHSNSKPVRLWQCGSKYQEKGKVGCNNSHIYDQKLNEIFISAFNALVKNKETFLSKWRGELQGADVLKAYRMKQFIELIAEINTIEEVDKELVFKVLDKITVIDKGKVIVKFLDGTELECLMES

SEQ ID NO: 7562 - protein, 469 aa, Unknown
  Description of Unknown: Integrase B7563 sequence
  PTHR30461:SF3,SM00857,IPR006118,IPR036162,PF13408, IPR025827,G3DSA:3.40.50.1390,PS51737,IPR006119,SSF53041, IPR011109,PTHR30461,PS00397,PS51736,cd00338, PF00239
MLEKILRVALYIRVSTQEQVMHGYSLEAQEAALYDWCKNFKNDRAYKDYDSIEIVDIFKDEGKSAFKPCKKRPEFMRLINDFVIPEKVDLIIFIRLDRWFRRVGEYHEMQKILEDHNVHWKAILEEYETATSNGRFMVNIKISTAENEAENTRNRILDVNRYKRRIGKVMSGNQPFGYTVGIVDGSKRPVIHEIKGKIYRDMISYFFLSGSVGKTADYCNQKYHMNSNYSWYSKVLNNIDTYLGYSEGIGGYRPPLLSLDEAEKLRNLLGNNARRPRSQRIYIFSGLLTCPVCGNRLTSCISVYTNSNGKKKYYKRYRCQNAKVSHLCSFGTSFSERKIEAALLKGVGSAFADFETACQKNMKKSRDSAEELKKIQGQLDRLNKIFLMGNIQEDEYEATSFSLKKRMESLRLSPSRIDKKTADLLKTGEFIDYYRLLDDEHKQFFWRGIIKSVTLCNDHSNMISSILFL

SEQ ID NO: 7563 - protein, 469 aa, Unknown
  Description of Unknown: Integrase B7564 sequence
  G3DSA:1.10.10.2600,IPR036162,PF13408,PS51737,G3DSA:3.40.50.1390, IPR025827,IPR006119,IPR038109,PF07508,IPR011109, SSF53041,PF00239,PTHR30461,Coil,cd00338
MLENKFDIIVIKDQSRLMRNVLDWYLFVDRLNRTKKKLYLYLDHAFYTPDDALITGIKAMMAEEYSKDLSRKILSAAKRSQKGGTVYGNNRLWGYDQKDGKLFINEKEAEIVRFVFSSYVSGNGFRKIVTQLDDMGIKSSTGTIFSISVLKRMIRNEKYKGVLVGGKTHKDFYTKKTTFTDEDEWVEIPGGVPAIVSEEIWEQANHILNERRKKKIESDKGAAKEVYIGHFSGPYCLSGKMRCGVCGEIMWHTSYTTQKSKIKHEIWICRKYKMYGKSTKRGCNARTVFEEDIIPIIKTCIFEALNNEKDAIEAVIANIKLVTQRNAPTLFSENIEQRVRSLRQKTEKILDLYVDGVLNKYEYKTKKEEIDSQIADLERKQVGAFGVEEITRKQDERIVNLRKVLASKFESPEKLPDSFIRNFVYDVTVYDDKIKITLYDGSEYMRELIERKHRNKGGENTENFTNVSA

SEQ ID NO: 7564 - protein, 469 aa, Unknown
  Description of Unknown: Integrase B7565 sequence
  G3DSA:1.10.10.2600,IPR036162,PF13408,PS51737, G3DSA:3.40.50.1390,IPR025827,IPR006119,IPR038109, PF07508,IPR011109,SSF53041,PF00239, PTHR30461,Coil,cd00338
MLENKFDIIVIKDQSRLMRNVLDWYLFVDRLNRTKKKLYLYLDHAFYTPDDALITGIKAMMAEEYSKDLSRKILSAAKRSQKGGTVYGNNRLWGYDQKDGKLFINEKEAEIVRFVFSSYVSGNGFRKIVTQLDDMGIKSSTGTIFSISVLKRMIRNEKYKGVLVGGKTHKDFYTKKTTFTDEDEWVEIPGGVPAIVSEEIWEQANHILNERRKKKIESDKGAAKEVYIGHFSGPYCLSGKMRCGVCGEIMWHTSYTTQKSKIKHEIWICRKYKMYGKSTKRGCNARTVFEEDIIPIIKTCIFEALNNEKDAIEAVIANIKLVTQRNAPTLFSENIEQRVRSLRQKTEKIFDLYVDGVLNKYEYKTKKEEIDSQIADLERKQVGAFGVEEITRKQDERIVNLRKVLASKFESPEKLPDSFIRNFVYDVTVYDDKIKITLYDGSEYMRELIERKHRNKGGENTENFTNVSA

SEQ ID NO: 7565 - protein, 469 aa, Unknown
  Description of Unknown: Integrase B7566 sequence
  cd03768,PTHR30461:SF3,SM00857,G3DSA:1.10.10.2600,IPR036162, PS51737,G3DSA:3.40.50.1390,IPR006119,IPR038109,PF07508, IPR011109,SSF53041,PTHR30461,PS51736,Coil, PF00239
MYYERSYLRSCQVSSYEQATEGYSIHEQERKLKAFCEVQNWHDFKVFTDAGVSGGSMNRPALKRIMDNLEYYDLVLVYKLDRLTRNVKDLLEMLEKFEKYNVAFKSATEVFDTTTAIGKLFITMVGAMAEWERATIRERALFGSRAAVREGNYIREAPFCYDNVDGKLVPNKHKWVIDYLVEQFKHGVSGNEIARQMNLKKVNVPKVKKWNRTSIIRLMKNPVLRGHTKYGDMYIENTHEPVLSESDYKRIIDVIENKTHRSKVKHHAIFRGVLTCPQCHNKLHLYAGKITDKKGYSYEVRRYKCDTCSKDKNVQTISFNESEVEDKFIELLKTYDVNKFKVDIVEESTPELDYDIDKIMKQREKLTRSWSLGYIEDDEYFSLMDETKEILDKVERAGAEVESTQTVTNEQLNMIDNILIKGWSKLNVEQKEELILSTVKEIAFDFVPRKYNENGKVNTLNIREITFKF

SEQ ID NO: 7566 - protein, 469 aa, Unknown
  Description of Unknown: Integrase B7567 sequence
  cd03768,PTHR30461:SF3,SM00857,G3DSA:1.10.10.2600,IPR036162, PS51737,G3DSA:3.40.50.1390,IPR006119,IPR038109,PF07508, IPR011109,SSF53041,PTHR30461,PS51736,Coil, PF00239
MYYERSYLRSCQVSSYEQATEGYSIHEQERKLKAFCEVQNWHEFKVFTDAGVSGGSMNRPALKRIMDNLEYYDLVLVYKLDRLTRNVKDLLEMLETFEKYNVAFKSATEVFDTTTAIGKLFITMVGAMAEWERATIRERALFGSRAAVREGNYIREAPFCYDNVDGKLVPNKHKWVIDYLVEQFKHGVSGNEIARQMNLKKVNVPKVKKWNRTSIIRLMKNPVLRGHTKYGDMYIENTHEPVLSESDYKRIIDVIENKTHRSKVKHHAIFRGVLTCPQCHNKLHLYAGKITDKKGYSYEVRRYKCDTCSKDKNVQTISFNESEVEDKFIELLKTYDMNKFKVDIVEESTPKLDYDIDKIMKQREKLTRSWSLGYIEDNEYFSLMDETKEILDKVEHSNSEVESTQTVTNEQLNMIDDILIKGWSKLNVEQKEELILSTVKEIVFDFVPRKYNENGKVNTLNISEITFKF

SEQ ID NO: 7567 - protein, 469 aa, Unknown
  Description of Unknown: Integrase B7568 sequence
  cd00338,SM00857,G3DSA:1.10.10.2600,IPR036162,PF13408, PS51737,G3DSA:3.40.50.1390,IPR025827,IPR006119,IPR038109, PF07508,IPR011109,SSF53041,PTHR30461,PS51736, Coil,PF00239
MMKKIAVLYMRMSTDMQEHSIESQERVLMEYAKRNGYVVIRKYIDRGISGQHASKRPDFLKMIDDSETGEFQFVLIYDSSRFARNLVESLTYKSILKENCVRLISMTEPNLEDDEMSLYIDAMQGATNEIYVRKLSKSVKRGHNDRALRGDLPGDVQFGLKRLKDGSIVLDEVKAPIMRWMYEAIYYDDSSYYSIWETLAAKGIKSQRGNIIDSRQVKRMLMNIKNKAYHWAEKDGKPILKKGNYPAIVDEEIFDAVQEIIAERAKHYKKNEKPAEFRKHWLSGLLVCPHCGAGYSYNTRKPPQHDAFRCGNQTRGACKKGSSILVDVAVEMVLDKLSEVYAGPLAPYVKNITVSQPEPQIDYDKEIKLLEAQLKRAKQAYLAEIDTIDEYAQNKRRIASNIKELQEAKNQAQEGAALNEPQFKVKLLNAITLLKSDCPMSEKIPAARSIIEKILVDPRNKTMDIYFFA

SEQ ID NO: 7568 - protein, 469 aa, Unknown
  Description of Unknown: Integrase B7569 sequence
  SM00857,G3DSA:1.10.10.2600,IPR036162,PF13408,IPR025827, G3DSA:3.40.50.1390,PS51737,IPR006119,IPR038109,PF07508, IPR011109,SSF53041,PF00239,PTHR30461,PS51736, Coil,cd00338
MRAGLQIRVSTLEQAIDGYSLAAQEKKLKEYAQFKGYEIVGIYRDDGYSGASLNRPGLRRMMSDIEADKLDIVLIYKQDRLTRSVKDLLNLLDIFDRHNVALYSITENIDLSSPFGRAALKMSATFSELERETIIERSKMGKDQKARQGELMGNGKSPFGYKYDKSIKRFEIVPEEAEIVRNIYSLYIKGMSIRQLNAHCRETYNHPYFGNPMSCKAILHRPMYAGYFQWKGELIKGVNFEPIISYEDYLKVQNILKQNTFRRNRLTSPYLLTGLLLCGECGNRYVGKYKKSCQTNSEGQRIQYGNKYYGCTARIKRDKNYHPAKCTNKLWRVDILDEIIVNAVKNIDFEDIKTVKSPEGLFDSLRAEIADAKNKIDKLLDLYMSDLITREAYEQRLYEYEKKIRQAETVIEQEQIKLGDSPDIPTNYLKEQQLRLDDMTLDEKRLYLKMLIKHIILKQDEIYIEWRIK

SEQ ID NO: 7569 - protein, 469 aa, Unknown
  Description of Unknown: Integrase B7570 sequence
  PTHR30461:SF3,cd00338,G3DSA:1.10.10.2600,IPR036162,PF13408, IPR025827,PS51737,G3DSA:3.40.50.1390,IPR006119,IPR038109, PF07508,SSF53041,IPR011109,PTHR30461,Coil, PF00239
MLENKFDIIVIKDQSRLMRNVLDWYLFVDRLNRTKKKLYLYLDHAFYTPDDALITGIKAMMAEEYSKDLSRKILSAAKRSQKGGTVYGNNRLWGYDQKDGKLFINEKEAEIVRFVFSSYVSGNGFRKIVTQLDDMGIKSSTGTIFSISVLKRMIRNEKYKGVLVGGKTHKDFYTKKTTFTDEDEWVEIPGGVPAIVSEEIWEQANRILNERRKKKIESDKGAAKEVYIGHFSGPYCLSGKMRCGVCGEIMWHTSYTTQKSKIKHEIWICRKYKMYGKNTKRGCNARTVFEEDIIPIIKTCIFEALNNEKDAIEAVIANIKLATQRNAPTLFSENIEQRVRSLKQKGEKLLDLYVDGILNKYEYKTKKEEIDSQIAELERKQAGVFDVDEITRKQDERIVNLQKVLASKFESPEKLPDSFIRNFVYDVTVYDDKIKITLYDGSEYMRELIERKHRNKGGENTENFTNVSA

SEQ ID NO: 7570 - protein, 469 aa, Unknown
  Description of Unknown: Integrase B7571 sequence
  SM00857,G3DSA:1.10.10.2600,IPR036162,PF13408,PS51737, IPR025827,G3DSA:3.40.50.1390,IPR006119,IPR038109,PF07508, IPR011109,SSF53041,PF00239,PTHR30461,PS51736, Coil,cd00338
MRAGLQIRVSTLEQAIEGYSLAAQEKKLREYAKFKGYEIVGVYRDDGYSGASLNRPGLRRLMSDIEADKLDIVLIYKQDRLTRSVKDLLNLLDVFDKHNVALYSITENIDLSSPFGRAALKMSATFSELERETIIERSKMGKDQKARQGELMGSGNSPFGYKYDKLTKRFEIVPEEAEIVRNIYSLYIRGMSIRQLNAYCRDTYNHPHFGNPMSCKALLHRPMYAGYFEWKGDLIKGVNFDPIITYEDYLKVQNILKQNTFRRNRLTSPYMLTGLLVCGDCGNRYVGKYKKSYQINREGKRVQYGSKYYGCTARIKRDKNYHPAKCSNKMWRVEELDEIVLNAVKNIDFADLKSPKTVEGSFDLLRGEIADAKNKIDKLLDLYMNDLVTREAYEQRLYEYEKRIKQTEAVIEQEQEKLGDSPELPTNYLKEQQARIDELSLDERRLYLKMIIKHIVLKNDEIYIEWRIK

SEQ ID NO: 7571 - protein, 469 aa, Unknown
  Description of Unknown: Integrase B7572 sequence
  PTHR30461:SF3,SM00857,G3DSA:1.10.10.2600,IPR036162,PF13408, PS51737,G3DSA:3.40.50.1390,IPR025827,IPR006119,IPR038109, PF07508,SSF53041,IPR011109,PTHR30461,Coil, PS51736,cd00338,PF00239
MVDEYIDRAISGKTDNRPSFQRLIKDSEKGHFDAVIMYTLDRFARNRYDSAIYKAKLKRNGVKIFYAKQPMPDTPEGIILESVLEGYAEYYSENLARSIKRGMKENALHGIAMGSPVLGYKIGNDRQYEIDPVGAKAVRTIFTMYAEGKSKTQIVNWLNEHGFKTSRGNAFNKNSLSRILRNDKYIGVYRYDDVVLEDAVPPIIDKTLFEKVQATFRHNYTARAKAKAIEDYLLTTKVFCGHCGEPMVGESGTSKTGKVHHYYKCVNRKRKHNCKKKVEKKEWLERTVVEFTVQQVLTDENIEKISTRAMELIEKELQDTSILIGLQERLKETNKRIKNLMSAIEQGIITPTTKERLEELEEERRDLEGQIAREEMKKPLLTKERIMYWLESFKRGDIKDVEYQRRIIDTLVNSVYVYDDGDKGRKLVLTFNISGNNTLTISSSDIERTAPPKSSTSQEVELFSFYYTL

SEQ ID NO: 7572 - protein, 469 aa, Unknown
  Description of Unknown: Integrase B7573 sequence
  cd00338,SM00857,G3DSA:1.10.10.2600,IPR036162,PF13408, IPR025827,G3DSA:3.40.50.1390,PS51737,IPR006119,IPR038109, PF07508,SSF53041,IPR011109,PTHR30461,PS51736, Coil,PF00239
MMKKIAVLYMRMSTDMQEHSIESQERVLMEYAKRNGYVVIRKYIDRGISGQHASKRPDFLKMIDDSETGEFQFVLIYDSSRFARNLVESLTYKSILKENCVRLISMTEPNLEDDEMSLYIDAMQGATNEIYVRKLSKSVKRGHNDRALRGDLPGDVQFGLKRLKDGSIVLDEVKAPIMRWMYEAIYYDDSSYYSICETLAAKGIKSQRGNIIDSRQVKRMLMNIKNKAYHWAEKDGKPILKKGNYPAIVDEEIFDAVQEIIAERAKHYKKNEKPAEFRKHWLSGLLVCPHCGAGYSYNTRKPPQHDAFRCGNQTRGACKKGSSILVDVAVEMVLDKLSEVYAGPLAPYVKNITVSQPEPQIDYDKEIKLLEAQLKRAKQAYLAEIDTIDEYAQNKRRIASNIKELHEAKNQAQEGAALNEPQFKVKLLNAITLLKSDCPMSEKIPAARSIIEKILVDPRNKTMDIYFFA

SEQ ID NO: 7573 - protein, 469 aa, Unknown
  Description of Unknown: Integrase B7574 sequence
  PTHR30461:SF3,IPR036162,PS51737,IPR011109,PTHR30461, PS00397,PF00239,G3DSA:1.10.10.2600,IPR006119,SSF53041, SM00857,IPR025827,IPR038109,PS51736,cd03768, IPR006118,PF13408,G3DSA:3.40.50.1390,Coil
MAKSKMKKIVAPEHLAQSIVALYIRVSTDKQREEGFSIDIQKERLRAYATSMFPGAVVKEYVDDGFSGGSLDRPQMKMLIEDVKEKRVTHVVVLKLDRLSRSQKDTLYLIEDVFLPHNVAFISMGESFNTATPFGRAVVGILSVFAQLERENIFERTRSGMQKRVELGYWPGGGRTPFGYDYDETQGILVPNKDADTVRKIYDLYLGGMSLQNIADLCGLSYERLASQIIKRKSNTGVIVYNGEEYKGRHQPLVSEETYNKAMLMMQERSSARCTVFPNHLLSGLVYCGVCGAKMRYQKWGKAGTKLVCYSQQKSKRYLIRDENCDNIKPWADDVEAAVLDAVFARASGPAPVDEGTPDRTMSDILKEQKSQAERKLRRLYDLYSDNPNDILLASITDLTDQIRDIEHKLDIEQKRSAVTERAHNIQIKLEEIESCWPYMTPTEKQSVLRELINKISVEKDHIHVDFRY

SEQ ID NO: 7574 - protein, 468 aa, Unknown
  Description of Unknown: Integrase B7575 sequence
  PTHR30461:SF3,IPR036162,PS51737,IPR011109,PTHR30461, PS00397,PF00239,G3DSA:1.10.10.2600,IPR006119,SSF53041, cd00338,SM00857,IPR025827,IPR038109,PS51736, IPR006118,PF13408,G3DSA:3.40.50.1390,PF07508,Coil
MSVKYAYGYIRVSTHDQEEISPDSQEHLLWDYAAKNNIVILKIFTDLGISGRKANKRPGFQEMIGLAKGDDHPVDQILVWKFSRFARNQEESIVYKSLLKKQHNVDVVSVSEPLSDNPFGSLIERIIAWLDEYYSIRLSGEVYRGMKENALRGAYQARPPLGYKVVEHGKPPVIVPEEAKIVRTIFEKYTNEGMSFFDIARYLNSLGLKTSHGKPFERRSVEYIIQNPSYCGMIRWNRTENSTNRIKDKDEWIVTEGQQPAIISKELFESAQKRFKATYKPVGKRPSSTYKHWLSGLLKCPDCGRTLTSTTMKRVNGEKYSYFSCYGYSKGKCKKPNGISSLVLEKEVLASIKEILDTKDIVYELREYQPTEQFDERKAITEQLESLTGKEERIKASYREGIDTLEEYKANKAIIQKEQESLEQQLKELKKAAHKSDQDPADACCRRSGVCMIFSSPTIIHTCKRTNP

SEQ ID NO: 7575 - protein, 468 aa, Unknown
  Description of Unknown: Integrase B7576 sequence
  PTHR30461:SF3,SM00857,IPR006118,G3DSA:1.10.10.2600,IPR036162, PS51737,G3DSA:3.40.50.1390,IPR006119,IPR038109,PF07508, IPR011109,SSF53041,PTHR30461,PS00397,PS51736, cd00338,PF00239
MLYGKPQNYAWYRARVILYIRVSTDEQARHGYSLGAQREALREFCDTFQCQIVAEYSDDGVSARKEIQRRPGLLRVLEAVKAGGVDYVLFIKLDRWFRSVREYYRVQDVLDAAGTNWKAILEDYDTSTTNGRLNLNIRLSVAQDESDRTADRIKFVFSERVKNGGAIFGSKSLPYGLEVRDHRVQIVEDQAVIVRAFFEHYEAAHSTRSTQVWLRDQYGVDLPRNAIGRMLRNGLYCGQYRDNKNYCPAIISPDQFQRVQEILARQASGHTRQSKYSYVFTGLLRCPVCGCTLKAFPQFDHKLNRLYLRYRCTQHWIEKRCSWKTTPWEPRLEGWLLDHVQPQLDAYVAQFDVQEAQRRQAVVDVGAIQRKLSRLQDLYVDGVIDRAAYDEKYHALIQQQDAAEAVRAAQSAGRDFGPLRQLLAGDFRSIYATLSPQERHTLWASVIDRIVVKDGRYGHLDLDVIFLP

SEQ ID NO: 7576 - protein, 468 aa, Unknown
  Description of Unknown: Integrase B7577 sequence
  PTHR30461:SF3,SM00857,IPR006118,G3DSA:1.10.10.2600,IPR036162, PS51737,G3DSA:3.40.50.1390,IPR006119,IPR038109,PF07508, SSF53041,IPR011109,PTHR30461,PS00397,PS51736, cd00338,PF00239
MLYGKPQNYSWYRARVVLYIRVSTDEQARHGYSLGAQREALREFCDTFQCQIVAEYSDDGVSARKEIQRRPGLLRVLEAVKAGGVDYVLFIKLDRWFRSVREYYRVQDVLDAAGTNWKAILEDYDTSTTNGRLNLNIRLSVAQDESDRTADRIKFVFSERVKNGGAIFGSKSLPYGLEVRDHRVQIVEDQAVIVRAFFDHYEAAQSARSTQVWLRDQYGVDLPRNTIGRMLRNGLYCGQYRDNKNYCPAIISPDQFRRVQEILARQASGHTRQSKYSYVFTGLLRCPVCGCTLKAFPQFDYKWNRLYLRYRCTQHWIENRCSWKTTPWEPRLEGWLLDHIQPQLDAYIAQFDVQEAQRRRAVVDVGAIQRKLSRLQDLYVDGMIDRAAYDEKYQALIRQQEVAQAAQQSQSAGRDLEPLRQLLAGDFRSIYATLSPQERHTLWASVIDHIVVKDGRYGHFDLDVIFLP

SEQ ID NO: 7577 - protein, 468 aa, Unknown
  Description of Unknown: Integrase B7578 sequence
  PTHR30461:SF3,SM00857,IPR006118,G3DSA:1.10.10.2600,IPR036162, PS51737,G3DSA:3.40.50.1390,IPR006119,IPR038109,PF07508, IPR011109,SSF53041,PTHR30461,PS00397,PS51736, cd00338,PF00239
MLYGKPQNYAWYRARVILYIRVSTDEQARHGYSLGAQREALREFCDTFQCQIVAEYSDDGVSARKEIQRRPGLLRVLEAVKAGGVDYVLFIKLDRWFRSVREYYRVQDVLDAAGTNWKAILEDYDTSTTNGRLNLNIRLSVAQDESDRTADRIKFVFSERVKNGGAIFGSKSLPYGLEVRDHRVQIVEGQAVIVRAFFDHYEAAHSTRSTQVWLRDQYGVDLPRATIGRMLRNGLYCGQYRDNKNYCPAIISPDQFQRVQEILARQASGHTRQSKYSYVFTGLLRCPVCGCTLKAFPQFDYKWNRLYLRYRCTQHWIERRCSWKTTPWEPRLEGWLLDHIQPQLDAYVAQFDVQEAQRRQAVVDVSAIQRKLSRLQDLYVDGVIDRAAYDEKYRALIQQQDAAEAARAAQSAGRDLEPLRQLLAGDFRSIYATLSPQERHTLWASVIDHIVVKDGRYGHYDLDVIFLP

SEQ ID NO: 7578 - protein, 468 aa, Unknown
  Description of Unknown: Integrase B7579 sequence
  PTHR30461:SF3,SM00857,IPR006118,G3DSA:1.10.10.2600,IPR036162, PS51737,G3DSA:3.40.50.1390,IPR006119,IPR038109,PF07508, IPR011109,SSF53041,PTHR30461,PS00397,PS51736, cd00338,PF00239
MLYGKPQNYAWYRARVILYIRVSTDEQARHGYSLGAQREALREFCDTFQCQIVAEYSDDGVSARKEIQRRPGLLRVLEAVKAGGVDYVLFIKLDRWFRSVREYYRVQDVLDAAGTNWKAILEDYDTSTTNGRLNLNIRLSVAQDESDRTADRIKFVFSERVKNGGAIFGSKSLPYGLEVRDHRVQIVEDQAVIVRAFFDHYEAAHSTRSTQVWLRDQYGVDLPRATIGRMLRNGLYCGQYRDNKNYCPAIISPDQFQRVQEILARQASGHTRQSKYSYVFTGLLRCPVCGCTLKAFPQFDYKWNRLYLRYRCTQHWIERRCSWKTTPWEPRLEGWLLDHIQPQLDAYVAQFDVQEAQRRQAVVDVGAIQRKLSRLQDLYVDGVIDRAAYDEKYRVLIQQQDAAEAARAAQSAGRDLEPLRQLLAGDFRSIYATLSPQERHTLWASVIDHIVVKDGRYGHFDLDVIFLP

SEQ ID NO: 7579 - protein, 468 aa, Unknown
  Description of Unknown: Integrase B7580 sequence
  PTHR30461:SF3,IPR036162,PS51737,IPR011109,PTHR30461, PS00397,PF00239,G3DSA:1.10.10.2600,IPR006119,SSF53041, cd00338,SM00857,IPR025827,IPR038109,PS51736, IPR006118,PF13408,G3DSA:3.40.50.1390,PF07508
MLYGKPQNYSWYRARVVLYIRVSTDEQARHGYSLGAQREALREFCDTFQCQIVAEYSDDGVSARKEIRRRPGLLRVLEAVKAGGVDYVLFIKLDRWFRSVREYYRVQDVLEAAGTNWKAILEDYDTSTTNGRLNLNIRLSVAQDESDRTADRIKFVFAERVKNGGAIFGSKSLPYGLEVADHRVQIVESQADAVRGMFDHYEATNSTRETHAWLRDQCGVDLPYNTIRNMLRNSLYCGEYRGNVNYCPAIISREQFQNIQKIVSRQGANRTRQSKYSYVFTGLLRCPVCGCTLKAFPQTDYKFHRVYLRYRCTQHWIDKRCTWKTTPWEPRLEDWLLDHIQPQLDAYIAQFDVQEAQRRRAVVDVGAIQRKLSRLQDLYVDGMIGRAAYDEKYQALIRQQEAAHAAQQGQSAGRDLEPLRQLLAGDFRSVYATLSPQERHTLWASVIDHIVVKDGRYGRFDLDVIFLP

SEQ ID NO: 7580 - protein, 468 aa, Unknown
  Description of Unknown: Integrase B7581 sequence
  SM00857,IPR006118,G3DSA:1.10.10.2600,IPR036162,PS51737, G3DSA:3.40.50.1390,IPR006119,IPR038109,PF07508,IPR011109, SSF53041,PF00239,PTHR30461,PS00397,PS51736, Coil,cd00338
MKKLRAIAYCRVSTVTQEEGRSLEFQIKKCQDYCEFNNYELIEIIQDVESGGNDERKGFQDLNNKIKAKLFDVLVVFESSRISRITLTMLNFVLELQKSNIHFISISQPELNTTTPTGMLFFQIQSSLSEYERKQISVRVKSNKWARAREGIWQGGKLPLGYKKDPQNNDIILIDEDNAIIVKSIFDYYLRTQSIAKTSKYFNKPMESIRWILTNPFYKGLFRYGKKENNINTGIVKINKDYQYFEGSHSPIISDEIFDKVQSILSLRKKNISVSFKLLFTGLVTCSCGGKYFSAKNGHKYNYRCSDCGKAISYRKMEGNIIKEILKLSELEELNEVDLKIENYSLQIDSISQLIEKDKKAREKVMQLFKNDLISIDELKKEVNDIDDSILYKEKEIKRIKNFIDNQKTNSEKVNNLKLLKEAIEYMEDEDREDIHDLFKLMIKEIVILNKDEINVKTENINLKIFLK

SEQ ID NO: 7581 - protein, 468 aa, Unknown
  Description of Unknown: Integrase B7582 sequence
  PTHR30461:SF3,SM00857,IPR006118,IPR036162,PF13408, PS51737,G3DSA:3.40.50.1390,Coil,IPR025827,IPR006119, IPR011109,SSF53041,PTHR30461,PS00397,PS51736, cd00338,PF00239
MSEKIKRCAIYIRVSTSEQLVHGKSLEAQKDYLTSYAKDHGMIPVGVYADEGKTARKELKKRKAIHALLEDVKAGKIDVILFWRLDRWFRNMSDFYKVQDILDEYKVYWISASEPGINMETRDGRLQLNVVLSIGQNEVDTTSERIKFVNEASIRQKKVIFGEANMPRGYKIGVVNGQKCMVKDPDQEELVNAFFDYFEKHQGKQATLRYIQSHYDPSFSYSCLRTMLSSEFYKGTYRGIPYCPSYVSEVRWARLQKISKKNIKNTPSGRIYYFTGMIRCPECGQILAGTGCRSIINRKTGEKRDYCYYRCNRAMIDRICTNRHKVSQNLIETYLLENLEREFEEYKIRVDEIQKKNKQKPKVRTEEQIEKEMSRLNLLFQKDRITWDYYSKEYDALESEKNGLKAIIIEPESDYSSVESLLQKDFLAIYHSLAEENRRTFWRNIIRQIHLKSDYTINYVDFVQSVSV

SEQ ID NO: 7582 - protein, 468 aa, Unknown
  Description of Unknown: Integrase B7583 sequence
  PTHR30461:SF3,SM00857,IPR006118,IPR036162,PF13408, PS51737,G3DSA:3.40.50.1390,Coil,IPR025827,IPR006119, IPR011109,SSF53041,PTHR30461,PS00397,PS51736, cd00338,PF00239
MSEKIKRCAIYIRVSTSEQLVHGKSLEAQKDYLTSYAKDHGMIPVGVYADEGKTARKELKKRKAIHALLEDVKAGKIDVILFWRLDRWFRNMSDFYKVQDILDEYKVYWISASEPGINMETRDGRLQLNVVLSIGQNEVDTTSERIKFVNEASIRQKKVIFGEANMPRGYKIGVVNGQKCMVKDPDQEELVNAFFDYFEKHQGKQATLRYIQSHYDPSFSYSCLRTMLSSEFYKGTYRGIPYCPSYVSEVRWARLQKISKKNIKNTPSGRIYYFTGMIRCPECGQILAGTGCRSIINRKTGEKRDYCYYRCNRAMIDRICTNRHKVSQNLIETYLLENLEREFEEYKIRVDEIQKKNKQKPKVRTEEQIEKEMSRLNLLFQKDRITWDYYSKEYDALESEKNGLKAIIIEPESDYSSVESLLQKDFLAIYHSLAEENRRTFWRNIIRQIHLKPDYTINYVDFVQSVSV

SEQ ID NO: 7583 - protein, 468 aa, Unknown
  Description of Unknown: Integrase B7584 sequence
  PTHR30461:SF3,IPR036162,PS51737,IPR011109,PTHR30461, PS00397,PF00239,G3DSA:1.10.10.2600,IPR006119,SSF53041, cd00338,SM00857,IPR025827,IPR038109,PS51736, IPR006118,PF13408,G3DSA:3.40.50.1390,PF07508
MLYGKPQNYSWYRARVVLYIRVSTDEQARHGYSLGAQREALREFCDTFQCQIVAEYSDDGVSARKEIQRRPGLLRVLEAVKAGGVDYVLFIKLDRWFRSVREYYRVQDVLDAAGTNWKAILEDYDTSTTNGRLNLNIRLSVAQDESDRTADRIKFVFSERVKNGGAIFGSKSLPYGLEVRDHRVQIVEDQAVIVRAFFDHYEAAHSTRSTQVWLRDQYGVDLPRATIGRMLRNGLYCGQYRDNKNYCPAIISLDQFQRVQEILARQASGHTRQSKYSYVFTGLLRCPVCGCTLKAFPQFDYKWNRLYLRYRCTQHWIERRCSWKTTPWEPRLEDWLLDHIQPQLDAYIAQFDVQEAQRRRAVVDVCAIQRKLSRLQDLYVDGMIDRAAYDEKYQALIRQQEAAQAAQQSQSAGRDLEPLRQLLAGDFRSIYATLSPQERHTLWASVIDHIVVKDGRYGHYDLDVIFLP

SEQ ID NO: 7584 - protein, 468 aa, Unknown
  Description of Unknown: Integrase B7585 sequence
  PTHR30461:SF3,SM00857,IPR006118,G3DSA:1.10.10.2600,IPR036162, PS51737,G3DSA:3.40.50.1390,IPR006119,IPR038109,PF07508, IPR011109,SSF53041,PTHR30461,PS00397,PS51736, cd00338,PF00239
MLYGKPQNYAWYRARVILYIRVSTDEQARHGYSLGAQREALREFCDTFQCQIVAEYSDDGVSARKEIQRRPGLLRVLEAVKAGGVDYVLFIKLDRWFRSVREYYRVQDVLDAAGTNWKAILEDYDTSTTNGRLNLNIRLSVAQDESDRTADRIKFVFSERVKNGGAIFGSKSLPYGLEVRDHRVQIVEDQAVIVRAFFDHYEAAHSTRSTQVWLRDQYGVDLPRATIGRMLRNGLYCGQYRDNKNYCPAIISPDQFQRVQEILARQASGHTRQSKYSYVFTGLLRCPVCGCTLKAFPQFDYKWNRLYLRYRCTQHWIERRCSWKTTPWEPRLEGWLLDHIQPQLDAYVAQFDVQEAQRRQAVVDVGAIQRKLSRLQDLYVDGVIDRAAYDEKYRALIQQQDAAEAARAAQSAGRDLEPLRQLLAGDFRSIYATLSPQERHTLWASVIDHIVVKDGRYGHYDLDVIFLP

SEQ ID NO: 7585 - protein, 468 aa, Unknown
  Description of Unknown: Integrase B7586 sequence
  PTHR30461:SF3,SM00857,IPR006118,G3DSA:1.10.10.2600,IPR036162, PS51737,G3DSA:3.40.50.1390,IPR006119,IPR038109,PF07508, IPR011109,SSF53041,PTHR30461,PS00397,PS51736, cd00338,PF00239
MLYGKPQNYSWYRARVVLYIRVSTDEQARHGYSLGAQREALREFCDTFQCQIVAEYSDDGVSARKEIQRRPGLLRVLEAVKAGGVDYVLFIKLDRWFRSVREYYRVQDVLDAAGTNWKAILEDYDTSTTNGRLNLNIRLSVAQDESDRTADRIKFVFSERVKNGGAIFGSKSLPYGLEVRGHRVQIVEDQAVIVRAFFDHYEAVHSARSTQVWLRDQCGVDLPRNAIGRMLRNGLYCGQYRDNKNYCPAIISPDQFQRVQEILARQASGHTRQSKYSYVFTGLLRCPVCGCTLKAFPQFDHKLNRLYLRYRCTQHWIEKRCSWKTTPWEPRLEGWLLDHIQPQLDAYIAQFDVQEAQRRQAVVDVGAIQRKLSRLQDLYVDGVIDRAAYDEKYRALIQQQDAAEAARAAQSAERDLGPLRQLLAGDFRSIYATLSPQERHTLWASVIDRIVVKDGRYGHFDLDVIFLP

SEQ ID NO: 7586 - protein, 468 aa, Unknown
  Description of Unknown: Integrase B7587 sequence
  PTHR30461:SF3,cd00338,SM00857,IPR036162,PF13408, PS51737,G3DSA:3.40.50.1390,IPR025827,IPR006119,IPR011109, SSF53041,PTHR30461,PS51736,Coil,PF00239
MASNFFAPQPELFGRRVVKYIRCSSEGQVLHGETLETQNMLLDDFIRVNRLVLVDTFVDEALTARKRYTKRKEFVRLLDGVQAHNFDLILFTKLDRWFRNIGDYHQIQAILEENGVQWKAILESYDTTTSNGRLHINIRMSVAQDECDRCSERIKDVFAYKLRNKTFVAGKVPRGLMLDEEKHIVHDPEWKQWALDLFDSIEATGSVYSARALMAEKYGFSLTEQGFVRASKNRLYKGQYRDDPEFCEPLIDPERFDRIQDLIARNKRFGKTKYSYSFSGLLICSSCRHKLVGATYSTKNLDGTVRQYTCYRCNVHTSQPSLNLCDRSHAIREERVEEYLLEHIRPALSEYLSSYNVSAQESKRNTHQADAAKIRRKIEKLYDLFMDDLIEKEEYREKYEDLQKQLKECQIAPVPAPAPNLGQLQDLLSQDWEAVYATFSKPEKNAFWKSFVHSVVVYDDEHMDISFL

SEQ ID NO: 7587 - protein, 468 aa, Unknown
  Description of Unknown: Integrase B7588 sequence
  cd03768,PTHR30461:SF3,SM00857,IPR006118, G3DSA:1.10.10.2600,IPR036162,PS51737,G3DSA:3.40.50.1390, IPR006119,IPR038109,PF07508,IPR011109, SSF53041,PTHR30461,PS00397,PS51736,Coil,PF00239
MYQDITTVCGYVRVSTENQLENYSIEEQTVRIRSYCQAKGWHLVQIYTDGGYSGGNTNRPALQRMLSDIRQGKMQAVVVYKLDRLSRSQKDTLTLIEDHMLSAGVDFISINENFDTSSPFGRAMIGILSVFAQLEKDQITERFTMGRIGRSKAGYYHGGPNAPRGYQYVDGTLIVDEFKASQVKEIFRLFLDGKSINRIARQMEQKYGGRWNAAGVRVILLNSTYIGKVKFAGVEYDGRHQPLISKEDFETAQKLLFSPARDAKKNSAQKNPFRAETLLSGLILCSRCGARYSGCHGHYKCYSRAKGNPRYVKDPNCKNDNWIISELDSLTISSIRELLDNNDLLDAAIENARPSLEDSANEIEITTHLKEIEAQINRLLDLYQIGSIPTETLSSRIQTLDQEKTALTTLLENKEDSFEERKQAFLENIQNFRDHFDDSDLDTQRLLIRSIIESISVDGRNISIQWRI

SEQ ID NO: 7588 - protein, 468 aa, Unknown
  Description of Unknown: Integrase B7589 sequence
  PTHR30461:SF3,SM00857,IPR006118,G3DSA:1.10.10.2600,IPR036162, PS51737,G3DSA:3.40.50.1390,IPR006119,IPR038109,PF07508, IPR011109,SSF53041,PTHR30461,PS00397,PS51736, cd00338,PF00239
MLYGKPQNYSWYRARVVLYIRVSTDEQARHGYSLGAQREALREFCDTFQCQIVAEYSDDGVSARKEIQRRPGLLRVLEAVKAGGVDYVLFIKLDRWFRSVREYYRVQDVLDAAGTNWKAILEDYDTSTTNGRLNLNIRLSVAQDESDRTADRIKFVFSERVKNGGAIFGSKSLPYGLEVRNHRVQIVEDQAVIVRAFFDHYEAVHSARSTQVWLRDQCGVDLPRNAIGRMLRNGLYCGQYRDNKNYCPAIISPDQFQRVQEILARQASGHTRQSKYSYVFTGLLRCPVCGCTLKAFPQFDHKLNRLYLRYRCTQHWIEKRCTWKTTPWEPRLEGWLLDHVQPQLDAYVAHFDVQEAQRRQAVVDVGAIQRKLSRLQDLYVDGVIDRAAYDEKYHALIQQQDAAEAVRAAQSAGRDLGPLRQLLVGDFRSIYATLSPQERHTLWASVIDRIVVKDGRYGHFDLDVIFLP

SEQ ID NO: 7589 - protein, 468 aa, Unknown
  Description of Unknown: Integrase B7590 sequence
  PTHR30461:SF3,SM00857,IPR006118,G3DSA:1.10.10.2600,IPR036162, PS51737,G3DSA:3.40.50.1390,IPR006119,IPR038109,PF07508, SSF53041,IPR011109,PTHR30461,PS00397,PS51736, cd00338,PF00239
MLYGKPQNYSWYRARVVLYIRVSTDEQARHGYSLGAQREALREFCDTFQCQIVAEYSDDGVSARKEIQRRPGLLRVLEAVKAGGVDYVLFIKLDRWFRSVREYYRVQDVLDAAGTNWKAILEDYDTSTTNGRLNLNIRLSVAQDESDRTADRIKFVFSERVKNGGAIFGSKSLPYGLEVRDHRVQIVEDQAVIVRAFFDHYEAVHSARSTQVWLRDQCGVDLPRNAIGRMLRNGLYCGQYRDNKNYCPAIISPDQFQRVQEILARQASGHTRQSKYSYVFTGLLRCPVCGCTLKAFPQFDHKLNRLYLRYRCTQHWIEKRCSWKTTPWEPRLEGWLLDHIQPQLDAYIAQFDVQEAQRRQAVVDVGAIQRKLSRLQDLYVDGVIDRAAYDEKYRALIQQQDAAEAARAAQRAERDLGPLRQLLAGDFRSIYATLSPQERHTLWASVIDRIVVKDGRYGHFDLDVIFLA

SEQ ID NO: 7590 - protein, 468 aa, Unknown
  Description of Unknown: Integrase B7591 sequence
  PTHR30461:SF3,SM00857,IPR006118,G3DSA:1.10.10.2600,IPR036162, PS51737,G3DSA:3.40.50.1390,IPR006119,IPR038109,PF07508, SSF53041,IPR011109,PTHR30461,PS00397,PS51736, cd00338,PF00239
MLYGKPQNYAWYRARVILYIRVSTDEQARHGYSLGAQREALREFCDTFQCQIVAEYSDDGVSARKEIQRRPGLLRVLEAVKAGGVDYVLFIKLDRWFRSVREYYRVQDVLDAAGTNWKAILEDYDTSTTNGRLNLNIRLSVAQDESDRTADRIKFVFSERVKNGGAIFGSKSLPYGLEVRDHRVQIVEDQAVIVRAFFDHYEAVHSARSTQVWLRDQCGVDLPRNAIGRMLRNGLYCGQYRDNKNYCPAIISPDQFQRVQEILARQASGHTRQSKYSYVFTGLLRCPVCGCTLKAFPQFDHKLNRLYLRYRCTQHWIEKRCSWKTTPWEPRLEGWLLDHVQPQLDAYVAQFDVQEAQRRQAVVDVGAIQRKLSRLQDLYVDGVIDRAAYDEKYHALIQQQDAAEAVRAAQSAGRDLGPLRQLLAGDFRSIYATLSPQERHTLWASVIDRIVVKDGRYGHFDLDVIFLP

SEQ ID NO: 7591 - protein, 468 aa, Unknown
  Description of Unknown: Integrase B7592 sequence
  PTHR30461:SF3,SM00857,IPR006118,G3DSA:1.10.10.2600,IPR036162, PS51737,G3DSA:3.40.50.1390,IPR006119,IPR038109,PF07508, IPR011109,SSF53041,PTHR30461,PS00397,PS51736, cd00338,PF00239
MLYGKPQNYSWYRARVVLYIRVSTDEQARHGYSLGAQREALREFCDTFQCQIVAEYSDDGVSARKEIQRRPGLLRVLEAVKAGGVDYVLFIKLDRWFRSVREYYRVQDVLDAAGTNWKAILEDYDTSTTNGRLNLNIRLSVAQDESDRTADRIKFVFSERVKSGGAIFGSKSLPYGLEVRGHRVQIVEDQAVIVRAFFDHYEAVHSARSTQVWLRDQCGVDLPRNAIGRMLRNGLYCGQYRDNKNYCPAIISPDQFQRVQEILARQASGHTRQSKYSYVFTGLLRCPVCGCTLKAFPQFDHKLNRLYLRYRCTQHWIEKRCSWKTTPWEPRLEGWLLDHIQPQLDAYIAQFDVQEAQRRQAVVDVGAIQRKLSRLQDLYVDGVIDRAAYDEKYRALIQQQDAAEAARAAQSAERNLGPLRQLLAGDFRSIYATLSPQERHTLWASVIDRIVVKDGRCGHFDLDVIFLP

SEQ ID NO: 7592 - protein, 468 aa, Unknown
  Description of Unknown: Integrase B7593 sequence
  PTHR30461:SF3,SM00857,IPR006118,G3DSA:1.10.10.2600,IPR036162, PS51737,G3DSA:3.40.50.1390,IPR006119,IPR038109,PF07508, IPR011109,SSF53041,PTHR30461,PS00397,PS51736, cd00338,PF00239
MLYGKPQNYAWYRARVILYIRVSTDEQARHGYSLGAQREALREFCDTFQCQIVAEYSDDGVSARKEIQRRPGLLRVLEAVKAGGVDYVLFIKLDRWFRSVREYYRVQDVLDAAGTNWKAILEDYDTSTTNGRLNLNIRLSVAQDESDRTADRIKFVFSERVKNGGAIFGSKSLPYGLEVRDHRVQIVEDQAVIVRAFFDHYEAAHSTRSTQVWLRDQYGVDLPRATIGRMLRNGLYCGQYRDNKNYCPAIISPDQFQRVQEILARQASGHTRQSKYSYVFTGLLRCPVCGCTLKAFPQFDYKWNRLYLRYRCTQHWIERRCSWKTTPWEPRLEGWLLDHVQPQLDAYIAQFDVQEAQRRQAVVDVGAIQRKLSRLQDLYVDGVIDRAAYDEKYRALIQQQDAAEAARAAQSAGRDLEPLRQLLAGDFRSIYATLSPQERHTLWASVIDHIVVKDGRYGHYDLDVTFLP

SEQ ID NO: 7593 - protein, 468 aa, Unknown
  Description of Unknown: Integrase B7594 sequence
  PTHR30461:SF3,IPR036162,PS51737,IPR011109,PTHR30461, PS00397,PF00239,G3DSA:1.10.10.2600,IPR006119,SSF53041, SM00857,IPR025827,IPR038109,PS51736,cd03768, IPR006118,PF13408,G3DSA:3.40.50.1390,PF07508,Coil
MKKVAIYVRVSTQEQAVEGYSISEQIDRLTKFCEAHSWKIYKVYTDPGFSGGNMNRPSLQKLFADCTQKRFDTVLVYKLDRLSRSQKDTLYIIEDLFLTNHVDFISMSENFDTSTPFGRAMIGILSVFAQLEREQIKERMAMGREGRAKQGKWHGGGNVPIGYDFINDYLIPNEYEAAQVKQIFDLAIRGYSYSDIARSMSGYTTKYGPYKVGYNTISLILQNPIYIGKIKTNTGYINGIHEPLIDETTFNEVQKKVTQIAEYYKKEHTGHYGQYLLSGLCRCASCGATYSAHYVGTKKHRYKYYKCRNRAYNWRDGSPKCMSPNIRVEVLDNAVLNEIRHLQLDPDYFDEVSNSPAADSSSLVETLNKRLENIQKQIARTIRLYSLGSVEEKDIENQLQILYSERDTLSLEIENATADQKDTADVKSILSMSNIDELDDTEKHNLVCLLINHIMINSNGDFEIHWTF

SEQ ID NO: 7594 - protein, 468 aa, Unknown
  Description of Unknown: Integrase B7595 sequence
  PTHR30461:SF3,SM00857,IPR006118,G3DSA:1.10.10.2600,IPR036162, PS51737,G3DSA:3.40.50.1390,IPR006119,IPR038109,IPR011109, SSF53041,PTHR30461,PS00397,PS51736,cd00338, PF00239
MLYGKPQNYSWYRARVVLYIRVSTDEQARHGYSLGAQREALHEFCDTFQCQIVAEYSDDGVSARKEIRRRPGLLRVLEAVKAGGVDYVLFIKLDRWFRSVREYYRVQDVLEAAGTNWKAILEDYDTGTTNGRLNLNIRLSVAQDESDRTADRIKFVFAERVKNGGAIYGSKSLPYGLEVADHRVQIVESQADAVRGMFAHYEATASARDTQFWLRDQYGVDLPYNTVGRMLRNSLYCGEYRGNASYCPAIIPPDQFRRVQEILARQTTSHTRQSKYSYVFSGLLRCPVCGCTLKAFPQMDYKFNRVYLRYRCAQCWIEKRCTWKTTPWEPRLEDWLLDHIQPQLDAYIAQFDVQEAQRRRAVVDVGAIQRKLSRLQDLYVDGMIDRAAYDEKYQALIRQQEAAQAAQQSQSAGRDLEPLRQLLAGDFRSIYATLSPQERHTLWASVIDHIVVKDGRYGHFDLDVIFLP

SEQ ID NO: 7595 - protein, 468 aa, Unknown
  Description of Unknown: Integrase B7596 sequence
  PTHR30461:SF3,SM00857,IPR006118,G3DSA:1.10.10.2600,IPR036162, PS51737,G3DSA:3.40.50.1390,IPR006119,IPR038109,PF07508, SSF53041,IPR011109,PTHR30461,PS00397,PS51736, cd00338,PF00239
MLYGKPQNYAWYRARVILYIRVSTDEQARHGYSLGAQREALREFCDTFQCQIVAEYSDDGVSARKEIQRRPGLLRVLEAVKAGGVDYVLFIKLDRWFRSVREYYRVQDVLDAAGTNWKAILEDYDTSTTNGRLNLNIRLSVAQDESDRTADRIKFVFSERVKNGGAIFGSKSLPYGLEVRDHRVQIVEDQAVIVRAFFDHYEAAHSTRSTQVWLRDQYGVDLPRTTIGRMLRNGLYCGQYRDNKNYCPAIISPDQFRRVQEILARQASGHTRQSKYSYVFTGLLRCPVCGCTLKAFPQFDYKWNRLYLRYRCTQHWIERRCSWKTTPWEPRLEGWLLDHVQPQLDAYIAQFDVQEAQRRQAVVDVGAIQRKLSRLQDLYVDGVIDRAAYDEKYRALIQQQDAAEAARAAQRAERDLGPLRQLLAGDFRSIYATLSPQERHTLWASVIDRIVVKDGRYGHFDLDVIFLP

SEQ ID NO: 7596 - protein, 468 aa, Unknown
  Description of Unknown: Integrase B7597 sequence
  PTHR30461:SF3,SM00857,IPR006118,G3DSA:1.10.10.2600,IPR036162, PS51737,G3DSA:3.40.50.1390,IPR006119,IPR038109,PF07508, SSF53041,IPR011109,PTHR30461,PS00397,PS51736, cd00338,PF00239
MLYGKPQNYSWYRARVVLYIRVSTDEQARHGYSLGAQREALREFCDTFQCQIVAEYSDDGVSARKEIQRRPGLLRVLEAVKAGGVDYVLFIKLDRWFRSVREYYRVQDVLDAAGTNWKAILEDYDTSTTNGRLNLNIRLSVAQDESDRTADRIKFVFSERVKNGGAIFGSKSLPYGLEVRDHRVQIVEDQAVIVRAFFDHYEAAQSARSTQVWLRDQCGVDLPRNTIGRMLRNGLYCGQYRDNKNYCPAIISPDQFQRVQEILARQASGHTRQSKYSYVFTGLLRCPVCGCTLKAFPQFDYKWNRLYLRYRCTQHWIENRCSWKTTPWEPRLEGWLLDHIQPQLDAYIAQFDVQEAQRRRAVVDVGAIQRKLSRLQDLYVDGMIDRAAYDEKYQALIRQQEAAQAAQQSQSAGRDLEPLRQLLAGDFRSIYATLSPQERHTLWASVIDHIVVKDGRYGHFDLDVIFLP

SEQ ID NO: 7597 - protein, 468 aa, Unknown
  Description of Unknown: Integrase B7598 sequence
  PTHR30461:SF3,IPR036162,PS51737,IPR011109,PTHR30461, PS00397,PF00239,G3DSA:1.10.10.2600,IPR006119,SSF53041, cd00338,SM00857,IPR025827,IPR038109,PS51736, IPR006118,PF13408,G3DSA:3.40.50.1390,PF07508,Coil
MVKEINNNMNDFTKKVEEVALYIRVSTEEQAINGDSLRTQREALTKFALANHYHIYGIYEDDGFSATNLNRPALQRLLEDVRKNKINRILLTKLDRLSRGVRNYYKVLDVLDAHCVFWQTIFEKYDSSTASGRLHINIMLSVAENESAQTSERIRSVFNNKIHQKEIISGKIPIGYKKEEKKLVVDEDKKALVIDAFNFYLKSGSVYKTFEYLALFDPSINYPRTARLLANPLYIGTKVCKYGSIENYCEPIISKETFDEVQNLLKKNQRKRDNSDHEFLFSGLLRCNECGYKMSGKYCKNFPTNCTFYYLCSNARLKKKCNMLKQLNETKIEKKLLEQIVPEINKYIDKNNILEQEKVQIRDISKERDKVNKQLEKLRDLYVNDLIQIDHYEKQYKELTSKLDSLKEEEKPVEEKKTVNYDEFKSFLSRDFVALYNNLSRTEKRLIWASAIDTIYIDDNYNLRIVFI

SEQ ID NO: 7598 - protein, 468 aa, Unknown
  Description of Unknown: Integrase B7599 sequence
  PTHR30461:SF3,IPR036162,PS51737,IPR011109,PTHR30461, PS00397,PF00239,G3DSA:1.10.10.2600,IPR006119,SSF53041, cd00338,SM00857,IPR025827,IPR038109,PS51736, IPR006118,PF13408,G3DSA:3.40.50.1390,PF07508,Coil
MDKKINNNMNDFTKKVEEVALYIRVSTEEQAINGDSLRTQREALTKFALANHYHIYGIYEDDGFSATNLNRPALQRLLEDVRKNKINRILLTKLDRLSRGVRNYYKVLDVLDAHCVFWQTIFEKYDSSTASGRLHINIMLSVAENESAQTSERIRSVFNNKIHQKEIISGKIPIGYKKEEKKLVVDEDKKALVIDAFNFYLKIGSVYKTFEYLALFDPSMNYPRTARLLANPLYIGTKVCKYGSIENYCEPIISKETFDEVQNLLKKNQRKRDNSDHEFLFSGLLRCNECGYKMSGKYCKNFPPNCTFYYLCSNARLKKKCNMLKQLNETKIEKKLLEQIVPEINKYIDKNNILEQEKVQTRDISKERDKVNKQLEKLRDLYVNDLIQIDHYEKQYKELTSKLDNLKEEEKPVEKKKTVNYDEFKSFLSRDFVSLYNNLSRTEKRLIWASAIDTIYIDDNYNLRIVFI

SEQ ID NO: 7599 - protein, 468 aa, Unknown
  Description of Unknown: Integrase B7600 sequence
  PTHR30461:SF3,IPR036162,PS51737,IPR011109,PTHR30461, PS00397,PF00239,G3DSA:1.10.10.2600,IPR006119,SSF53041, cd00338,SM00857,IPR025827,IPR038109,PS51736, IPR006118,PF13408,G3DSA:3.40.50.1390,PF07508
MLYGKPQNYAWYRARVILYIRVSTDEQARHGYSLGAQREALREFCDTFQCQIVAEYSDDGVSARKEIQRRPGLLRVLEAVKAGGVDYVLFIKLDRWFRSVREYYRVQDVLDAAGTNWKAILEDYDTSTTNGRLNLNIRLSVAQDESDRTADRIKFVFSERVKNGGAIFGSKSLPYGLEVRDHRVQIVEDQAVIVRAFFDHYEAAHSTRSTQVWLRDQYGVDLPRATIGRMLRNGLYCGQYRDNKNYCPAIISPDQFQRVQEILARQASGHTRQSKYSYVFTGLLRCPVCGCTLKAFPQFDYKWNRLYLRYRCTQHWIERRCSWKTTPWEPRLEDWLLDHIQPQLDAYIAQFDVQEAQRRRAVVDVGTIQRKLSRLQDLYVDGMIDRAAYDEKYQALIRQQEAAQAAQQSQSAGRDLEPLRQLLAGDFRSIYATLSPQERHTLWASVIDHIVVKDGRYGHYDLDVIFLP

SEQ ID NO: 7600 - protein, 468 aa, Unknown
  Description of Unknown: Integrase B7601 sequence
  PTHR30461:SF3,SM00857,IPR006118,G3DSA:1.10.10.2600,IPR036162, PS51737,G3DSA:3.40.50.1390,IPR006119,IPR038109,PF07508, IPR011109,SSF53041,PTHR30461,PS00397,PS51736, cd00338,PF00239
MLYGKPQNYAWYRARVILYIRVSTDEQARHGYSLGAQREALREFCDTFQCQIVTEYSDDGVSARKEIRRRPGLLRVLEAVKAGGVDYVLFIKLDRWFRSVREYYRVQDVLEAAGTNWKAILEDYDTSTTNGRLNLNIRLSVAQDESDRTADRIKFVFSERVKNGGAIFGSKSLPYGLEVRGHRVQIVEDQAVIVRAFFDHYEAVHSARSTQVWLRDQCGVDLPRNAIGRMLRNGLYCGQYRDNKNYCPAIISPDQFQRVQEILARQASGHTRQSKYSYVFTGLLRCPVCGCTLKAFPQFDHKLNRLYLRYRCTQHWIEKRCSWKTTPWEPRLEGWLLDHIQPQLDAYIAQFDVQEAQRRQAVVDVGAIQRKLSRLQDLYVDGVIDRAAYDEKYRALIQQQDAAEAARAAQRAERDLGPLRQLLAGDFRSIYATLSPQERHTLWASVIDRIVVKDGRYGHFDLDVIFLP

SEQ ID NO: 7601 - protein, 468 aa, Unknown
  Description of Unknown: Integrase B7602 sequence
  PTHR30461:SF3,IPR036162,PS51737,IPR011109,PTHR30461, PS00397,PF00239,G3DSA:1.10.10.2600,IPR006119,SSF53041, cd00338,SM00857,IPR025827,IPR038109,PS51736, IPR006118,PF13408,G3DSA:3.40.50.1390,PF07508,Coil
MDKKINNNMNDFTKKVEEVALYIRVSTEEQAINGDSLRTQREALTKFALANHYHIYGIYEDDGFSATNLNRPALQRLLEDVRKNKINRILLTKLDRLSRGVRNYYKVLDVLDAHCVFWQTIFEKYDSSTASGRLHINIMLSVAENESAQTSERIRSVFNNKIHQKEIISGKIPIGYKKEEKKLVVDDDKKALVIDAFNFYLKSGSVYKTFEYLALFDPSMNYPRTARLLANPLYIGTKVCKYGSIENYCEPIISKETFDEVQNLLKKNQRKRDNSDHEFLFSGLLRCNECGYKMSGKYCKNFPTNCTFYYLCSNARLKKKCNMLKQLNETKIEKKLLEQIVPEINKYIDNNNILEQEKVQIRDISKERDKVNKQLEKLRDLYVNDLIQIDHYEKQYKELTSKLDSLKEEEKPVEEKKTVNYDEFKSFLSRDFVSLYNNLSRTEKRLIWASAIDTIYIDDNYNLRIVFI

SEQ ID NO: 7602 - protein, 468 aa, Unknown
  Description of Unknown: Integrase B7603 sequence
  PTHR30461:SF3,IPR036162,PS51737,IPR011109,PTHR30461, PS00397,PF00239,G3DSA:1.10.10.2600,IPR006119,SSF53041, cd00338,SM00857,IPR025827,IPR038109,PS51736, IPR006118,PF13408,G3DSA:3.40.50.1390,Coil
MNKIIRVGIYIRVSTEEQAKHGYSIDSQKTRLITWAKEHNYQIVDVYADEGKSARTKIFNRKELLRLLDDVKDDKIDRIIIWRLDRWFRNVADYYRIQDILDKHNVDWECSDEDFNTSTSNGRLYLNIKLSIAQNESDQTSDRIKFNFENMVRNKRPISGALPVGYMVAGEKQNKRVVKDPALSQMAIDMFEKFEETLSLRATTQYLNETYPHRPIGYERVKKMLQNSMYHGVYRDVEDYCEPYITKERQDNIIKLIKKNHRPNKPSGHVFIFSGLIRCYDCGRRMGGSRASRKHTKRGVVTEIIRYGTYKCCNHFLDCRCSNNHTINEDKLERWMIDNFLAKLNEHVISIETAEEKKTKTNNINKITNLKDKLERLNELYLDGRISREKYDNDYLDTKNKIKELKIDDELDSNRNLYKYKEIIKDANVVDIYNKLDRKHKRLFWYEYIDHIEQDFDNINDNWLVFFK

SEQ ID NO: 7603 - protein, 468 aa, Unknown
  Description of Unknown: Integrase B7604 sequence
  PTHR30461:SF3,SM00857,IPR006118,G3DSA:1.10.10.2600,IPR036162, PS51737,G3DSA:3.40.50.1390,IPR006119,IPR038109,PF07508, IPR011109,SSF53041,PTHR30461,PS00397,PS51736, cd00338,PF00239
MLYGKPQNYAWYRARVILYIRVSTDEQARHGYSLGAQREALREFCDTFQCQIVAEYSDDGVSARKEIQRRPGLLRVLEAVKAGGVDYVLFIKLDRWFRSVREYYRVQDVLDAAGTNWKAILEDYDTSTTNGRLNLNIRLSVAQDESDRTADRIKFVFSERVKNGGAIFGSKSLPYGLEVRDHRVQIVEDQAVIVRAFFEHYEAAHSTRSTQVWLRDQYGVDLPRATIGRMLRNGLYCGQYRDNKNYCPAIISPDQFQRVQEILARQASGHTRQSKYSYVFTGLLRCPVCGCTLKAFPQFDYKWNRLYLRYRCTQHWIERRCSWKTTPWEPRLEGWLLDHIQPQLDAYIAQFDVQEAQRRRAVVDVGAIQRKLSRLQDLYVDGMIDRAAYDEKYQALIRQQEAAQAAQQSQSAGRDLEPLRQLLAGDFRSIYATLSPQERHTLWASVIDHIVVKDGRYGHFDLDVIFLP

SEQ ID NO: 7604 - protein, 468 aa, Unknown
  Description of Unknown: Integrase B7605 sequence
  PTHR30461:SF3,SM00857,IPR006118,IPR036162,PF13408, PS51737,G3DSA:3.40.50.1390,Coil,IPR025827,IPR006119, IPR011109,SSF53041,PTHR30461,PS00397,PS51736, cd00338,PF00239
MSEKIKRCAIYIRVSTSEQLVHGKSLEAQKDYLTSYAKDHGMIPVGVYADEGKTARKELKKRKAIHALLEDVKAGKIDVILFWRLDRWFRNMSDFYKVQDILDEYKVYWISASEPGINMETRDGRLQLNVVLSIGQNEVDTTSERIKFVNEASIRQKKVIFGEANMPRGYKIGVVNGQKCMVKDPDQEELVNAFFDYFEKHQGKQATLRYIQSHYDPSFSYSCLRTMLSSEFYKGTYRGIPYCPSYVSEVRWARLQKISKKNIKNTPSGRIYYFTGMIRCPECGQILAGTGCRSIINRKTGEKRDYFYYRCNRAMIDRICTNRHKVSQNLIETYLLENLEREFEEYKIRVDEIQKKNKQKPKVRTEEQIEKEMSRLNLLFQKDRITWDYYSKEYDALESEKNGLKAIIIEPESDYSSVESLLQKDFLAIYHSLAEENRRTFWRNIIRQIHLKPDYTINYVDFVQSVSV

SEQ ID NO: 7605 - protein, 468 aa, Unknown
  Description of Unknown: Integrase B7606 sequence
  PTHR30461:SF3,SM00857,IPR006118,G3DSA:1.10.10.2600,IPR036162, PS51737,G3DSA:3.40.50.1390,IPR006119,IPR038109,PF07508, IPR011109,SSF53041,PTHR30461,PS00397,PS51736, cd00338,PF00239
MLYGKPQNYSWYRARVVLYIRVSTDEQARHGYSLGAQREALREFCDTFQCQIVAEYSDDGVSARKEIRRRPGLLRVLEAVKAGGVDYVLFIKLDRWFRSVREYYRVQDVLEAAGTNWKAILEDYDTSTTNGRLNLNIRLSVAQDESDRTADRIKFVFAERVKNGGAIFGSKSLPYGLEVRNHRVQIVEDQAVIVRAFFDHYEAVHSARSTQVWLHDQCGVDLPRNAIGRMLRNGLYCGQYRDNKNYCPAIISPDQFQRVQEILARQASGHTRQSKYSYVFTGLLRCPVCGCTLKAFPQFDHKLNRLYLRYRCTQHWIEKRCSWKTTPWEPRLEGWLLDHVQPQLDTYVAHFDVQEAQRRQAVVDVGAIQRKLSRLQDLYVDGVIDRAAYDEKYHALIQQQDAAEAVRAAQSAGRDLGPLRQLLAGDFRSIYATLSPQERHTLWASVIDRIVVKDGRYGHFDLDVIFLP

SEQ ID NO: 7606 - protein, 468 aa, Unknown
  Description of Unknown: Integrase B7607 sequence
  PTHR30461:SF3,IPR036162,PS51737,IPR011109,PTHR30461, PS00397,PF00239,G3DSA:1.10.10.2600,IPR006119,SSF53041, cd00338,SM00857,IPR025827,IPR038109,PS51736, IPR006118,PF13408,G3DSA:3.40.50.1390,PF07508,Coil
MVKEINNNMNDFTKKVEEVALYIRVSTEEQAINGDSLRTQREALTKFALANHYHIYGIYEDDGFSATNLNRPALQRLLEDVRKNKINRILLTKLDRLSRGVRNYYKVLDVLDAHCVFWQTIFEKYDSSTASGRLHINIMLSVAENESAQTSERIRSVFNNKIHQKEIISGKIPIGYKKEEKKLVVDEDKKALVIDAFNFYLKSGSVYKTFEYLALFDPSINYPRTARLLANPLYIGTKVCKYGSIENYCEPIISKETFDEVQNLLKKNQRKRDNSDHEFLFSGLLRCNECGYKMSGKYCKNFPTNCTFYYLCSNARLKKKCNMLKQLNETKIEKKLLEQIVPEINKYIDKNNILELEKAQIRDISKERDKVNKQLEKLRDLYVNDLIQIDHYEKQYKELTSKLDSLKEEEKPVEEKKTVNYDEFKSFLSRDFVSLYNNLSRTEKRLIWASAIDTIYIDDNYNLRIVFI

SEQ ID NO: 7607 - protein, 468 aa, Unknown
  Description of Unknown: Integrase B7608 sequence
  PTHR30461:SF3,IPR036162,PS51737,IPR011109,PTHR30461, PS00397,PF00239,G3DSA:1.10.10.2600,IPR006119,SSF53041, cd00338,SM00857,IPR025827,IPR038109,PS51736, IPR006118,PF13408,G3DSA:3.40.50.1390,PF07508
MLYGKPQNYAWYRARVVLYIRVSTDEQARHGYSLGAQREALREFCDTFQCQIVAEYSDDGVSARKEIRRRPGLLRVLEAVKAGGVDYVLFIKLDRWFRSVREYYRVQDVLEAAGTNWKAILEDYDTSTTNGRLNLNIRLSVAQDESDRTADRIKFVFSERVKNGGAIFGSKSLPYGLETRDHRVQIVEDQAVAVRAFFDHYEATHSARDTQVWLRDQYGVDLPRNTIGRMLRNSLYCGEYRGNVNYCPAIISREQFQNIQKIVSRQGANRTRQSKYSYVFTGLLRCPVCGCTLKAFPQFDYKWNRVYLRYRCSQHWIEKRCTWKTTPWEPRLEDWLLDHIQPQLDAYIAQFDVQEAQRRRAVVDVGAIQRKLSRLQDLYVDGMIDRAAYDEKYQALIQQQEAAQAAQQSQSAGRDLEPLRQLLAGDFRSVYATLSPQERHTLWASVIDHIVVKDGRYGHFDLDVIFLP

SEQ ID NO: 7608 - protein, 468 aa, Unknown
  Description of Unknown: Integrase B7609 sequence
  PTHR30461:SF3,IPR036162,PS51737,IPR011109,PTHR30461, PS00397,PF00239,G3DSA:1.10.10.2600,IPR006119,SSF53041, cd00338,SM00857,IPR025827,IPR038109,PS51736, IPR006118,PF13408,G3DSA:3.40.50.1390,PF07508,Coil
MVKEINNNMNDFTKKVEEVALYIRVSTEEQAINGDSLRTQREALTKFALANHYHIYGIYEDDGFSATNLNRPALQRLLEDVRKNKINRILLTKLDRLSRGVRNYYKVLDVLDAHCVFWQTIFEKYDSSTASGRLHINIMLSVAENESAQTSERIRSVFNNKIHQKEIISGKIPIGYKKEEKKLVVDEDKKALVIDAFNFYLKSGSVYKTFEYLALFDPSMNYPRTARLLANPLYIGTKVCKYGSIENYCEPIISNKTFNEVQNLLKKNQRKRDNSDHEFLFSGLLRCNECGYKMSGKYCKNFPTNCTFYYLCSNARLKKKCNMLKQLNETKIEKKLLEQIVPEINKYIDNNNILEQEKVQIRDISKERDKVNKQLEKLRDLYVNDLIQIDHYEKQYKELTSKLDSLKEEEKPVEEKKTVNYDEFRSFLSRDFVTLYNSLSRTEKRLIWASVIDTIYIDDNYNLRIVFI

SEQ ID NO: 7609 - protein, 468 aa, Unknown
  Description of Unknown: Integrase B7610 sequence
  PTHR30461:SF3,SM00857,IPR006118,G3DSA:1.10.10.2600,IPR036162, PS51737,G3DSA:3.40.50.1390,IPR006119,IPR038109,PF07508, SSF53041,IPR011109,PTHR30461,PS00397,PS51736, cd00338,PF00239
MLYGKPQNYAWYRARVILYIRVSTDEQARHGYSLGAQREALREFCDTFQCQIVAECSDDGVSARKEIQRRPGLLRVLEAVKAGGVDYVLFIKLDRWFRSVREYYRVQDVLDAAGTNWKAILEDYDTSTTNGRLNLNIRLSVAQDESDRTADRIKFVFSERVKNGGAIFGSKSLPYGLEVRDHRVQIVEDQAVIVRAFFDHYEAAQSARSTQVWLRDQCGVDLPRNTIGRMLRNGLYCGQYRDNKNYCPAIISPDQFQRVQEILARQASGHTRQSKYSYVFTGLLRCPVCGCTLKAFPQFDYKWNRLYLRYRCTQHWIENRCSWKTTPWEPRLEGWLLDHIQPQLDAYIAQFDVQEAQRRRAVVDVGAIQRKLSRLQDLYVDGMIDRAAYDEKYQALIRQQEAAQAAQQSQIAGRDLEPLRQLLAGDFRSIYATLSPQERHTLWASVIDHIVVKDGRYGHFDLDVIFLP

SEQ ID NO: 7610 - protein, 468 aa, Unknown
  Description of Unknown: Integrase B7611 sequence
  PTHR30461:SF3,IPR036162,PS51737,IPR011109,PTHR30461, PS00397,PF00239,G3DSA:1.10.10.2600,IPR006119,SSF53041, cd00338,SM00857,IPR025827,IPR038109,PS51736, IPR006118,PF13408,G3DSA:3.40.50.1390,PF07508
MLYGKPQNYAWYRARVILYIRVSTDEQARHGYSLGAQREALREFCDTFQCQIVAEYSDDGVSARKEIQRRPGLLRVLEAVKAGGVDYVLFIKLDRWFRSVREYYRVQDVLDAAGTNWKAILEDYDTSTTNGRLNLNIRLSVAQDESDRTADRIKFVFSERVKNGGAIFGSKSLPYGLEVRGHRVQIVEDQAVIVRAFFDHYEAVHSARSTQVWLRDQCGVDLPRNAIGRMLRNGLYCGQYRDNKNYCPAIISPDQFQRVQEILARQASGHTRQSKYSYVFTGLLRCPVCGCTLKAFPQFDHKLNRLYLRYRCTQHWIEKRCTWKTTPWEPRLEDWLLDHIQPQLDAYIAQFDVQEAQRRRAVVDVGAIQRKLSRLQDLYVDGVIDRAAYDEKYRALIQQQDAAGAARAAQSAERDLGPLRQLLAGDFRSIYATLSPQERHTLWASVIDRIVVKDGRYGHIDLDVIFLP

SEQ ID NO: 7611 - protein, 468 aa, Unknown
  Description of Unknown: Integrase B7612 sequence
  PTHR30461:SF3,IPR036162,PS51737,IPR011109,PTHR30461, PS00397,PF00239,G3DSA:1.10.10.2600,IPR006119,SSF53041, cd00338,SM00857,IPR025827,IPR038109,PS51736, IPR006118,PF13408,G3DSA:3.40.50.1390,PF07508
MLYGKPQNYSWYRARVVLYIRVSTDEQARHGYSLGAQREALREFCDTFQCQIVAEYSDDGVSARKEIRRRPGLLRVLEAVKAGGVDYVLFIKLDRWFRSVREYYRVQDVLEAAGTNWKAILEDYDTSTTNGRLNLNIRLSVAQDESDRTADRIKFVFAERVKNGGAIFGSKSLPYGLEVADHRVQIVESQADAVRGMFDHYEATNSTRETHAWLRDQYGVDLPYNTIRNMLRNSLYCGEYRGNVNYCPAIISREQFQNIQKIVSRQGANRTRQSKYSYVFTGLLRCPVCGCTLKAFPQTDYKFHRVYLRYRCTQHWIDKRCTWKTTPWEPRLEDWLLDHIQPQLDAYIAQFDVQEAQRRRAVVDVGAIQRKLSRLQDLYVDGMIDRAAYDEKYQALIRQQEAAQAAQQSQSAGRDLEPLRQLLAGDFRSIYATLSPQERHTLWASVIDHIVVKDGRYGHFDLDVIFLP

SEQ ID NO: 7612 - protein, 468 aa, Unknown
  Description of Unknown: Integrase B7613 sequence
  PTHR30461:SF3,SM00857,IPR006118,IPR036162,PF13408, PS51737,G3DSA:3.40.50.1390,IPR025827,PS00397,IPR006119, IPR011109,SSF53041,PTHR30461,Coil,PS51736, cd00338,PF00239
MSEKIKRCAIYIRVSTSEQLVHGKSLEAQKDYLTSYAKDHGMIPVGVYADEGKTARKELKKRKAIHALLEDVKAGKIDVILFWRLDRWFRNMSDFYKVQDILDEYKVYWISASEPGINMETRDGRLQLNVVLSIGQNEVDTTSERIKFVNEASIRQKKVIFGEANMPRGYKIGVVNGQKCMVKDPDQEELVNAFFDYFEKHQGKQATLRYIQSHYDPSFSYSCLRTMLSSEFYKGTYRGIPYCPSYVSEVRWARLQKISKKNIKNTPSGRIYYFTGMIRCPECGQILAGTGCRSIINRKTGEKRDYCYYRCNRAMIDRICTNRHKVSQNLIETYLLENLEREFEEYKIRVDEIQKKNKQKPKVRTEEQIEKEMSRLNLLFQKDRITWDYYSKEYDALESEKNGLKAIIIEPESDYSSVESLLQKDFLAIYHSLAEENRRTFWRNIIRQIHLKSDYTINYIDFVQSVSV

SEQ ID NO: 7613 - protein, 468 aa, Unknown
  Description of Unknown: Integrase B7614 sequence
  PTHR30461:SF3,SM00857,IPR006118,G3DSA:1.10.10.2600,IPR036162, PS51737,G3DSA:3.40.50.1390,IPR006119,IPR038109,PF07508, IPR011109,SSF53041,PTHR30461,PS00397,PS51736, cd00338,PF00239
MLYGKPQNYAWYRARVVLYIRVSTDEQARHGYSLGAQREALHEFCDTFQCQIVAEYSDDGVSARKEIRRRPGLLRVLEAVKAGGVDYVLFIKLDRWFRSVREYYRVQDVLEAAGTNWKAILEDYDTSTTNGRLNLNIRLSVAQDESDRTADRIKFVFSERVKNGGAIFGSKSLPYGLEVRDHRVQIVEDQAVIVRAFFDHYEAAQSARSTQVWLRDQCGVDLPRNTIGRMLRNGLYCGQYRDNKNYCPAIISPDQFQRVQEILARQASGHTRQSKYSYVFTGLLRCPVCGCTLKAFPQFDYKWNRLYLRYRCTQHWIENRCSWKTTPWEPRLEGWLLDHIQPQLDAYIAQFDVQEAQRRRAVVDVGVIQRKLSRLQDLYVDGMIDRAAYDEKYQALIRQQEAAQAAQQSQSAGRDLEPLRQLLAGDFRSIYATLSPQERHTLWASVIDHIVVKDGRYGHFDLDVIFLP

SEQ ID NO: 7614 - protein, 467 aa, Unknown
  Description of Unknown: Integrase B7615 sequence
  PTHR30461:SF3,IPR036162,PS51737,IPR011109,PTHR30461, PS00397,PF00239,G3DSA:1.10.10.2600,IPR006119,SSF53041, cd00338,SM00857,IPR025827,IPR038109,PS51736, IPR006118,PF13408,G3DSA:3.40.50.1390,PF07508,Coil
MLKAALYARVSSEEQAKRENSIPAQLRALREYCRKNNIEIFKEYKDEGITGQISKRPAFQQMLSAAFSGKINVILVHKFDRFARKAELSRSVKNSLQAAKVNVVSITEPIEDSPMGFFMEGLYELMAEYYVRNLSAEVFKGMNERALKGKHMGQMPYGYYCKDGNVYVNETQAEVIHKIYRFYDEGWGHMKIAKWLNESKIPTYKGIIGGWQTFQVKQILKNSKYIGENLWNGTVYPADFPAILEPALFHRVQEKSNLMTRTHTYRGNNYTKHHLLGLLYCGECGSIMRVKPNQDWQRRKFDTYTCRDASQYRGDCRFTKIFDATKLESEVDAYLRSVLAGAPISLIVSKDAEKVKPADASKSQIEKINAELKRAKDAYLSGVFDLDEYREIRQGLENNKKIIEAETKNVPAPLRANEKEDILRKKIKSAWDLYKNVQTAEEKRTILKTFIHKILIYRDRWEVVFYI

SEQ ID NO: 7615 - protein, 467 aa, Unknown
  Description of Unknown: Integrase B7616 sequence
  PTHR30461:SF3,IPR036162,PS51737,IPR011109,PTHR30461, PS00397,PF00239,G3DSA:1.10.10.2600,IPR006119,SSF53041, SM00857,IPR025827,IPR038109,PS51736,cd03768, IPR006118,PF13408,G3DSA:3.40.50.1390,PF07508
MRRAALYIRVSTLEQAQEGYSVGEQRERLIAYCKAQDWLIADIYVDGGYTGSNLNRPGIQKLMSETEKFDVVLVYKLDRLSRSQRDTLYLIEEIFRPNKVDFVSMQESFDTSSPFGKAMIGLLAVFAQLEREQIKERTWMGRVARAKTGLHHGGGNIPIGYDYEDGKLIVNPYEAEQVRKIYEWYLSGSSLKAITDKLQDAGYTNKYSSYNSWSSVRNILENETYIGRLHFGDVVVDHAHEAIITEEQFNAAQILRGKRREQFGSHAFQSKHVLTGLLFCGHCGGRYYLRNTGKYSYYACYSRTKQMKNMIKDPNCQNKIWRAQDLEPIIEEKILALLRNPKIAEELAAGKPKAAAPVSKNTDIERRIREIDRQIGKLMELYQQDDIPPELLGEKINRLYGEKTALENSIAPVEETNAMPLDLVAELITNAAEIWDFADENQKRRILQSLISRIVLTDDQVDIEWAF

SEQ ID NO: 7616 - protein, 467 aa, Unknown
  Description of Unknown: Integrase B7617 sequence
  PTHR30461:SF3,IPR036162,PS51737,IPR011109,PTHR30461, PS00397,PF00239,G3DSA:1.10.10.2600,IPR006119,SSF53041, SM00857,IPR025827,IPR038109,PS51736,cd03768, IPR006118,PF13408,G3DSA:3.40.50.1390,PF07508
MRRAALYIRVSTLEQAQEGYSVGEQRERLIAYCKAQDWLIADIYVDGGYTGSNLNRPGIQKLMSETEKFDVVLVYKLDRLSRSQRDTLYLIEEIFRPNKVDFVSMQESFDTSSPFGKAMIGLLAVFAQLEREQIKERTWMGRVARAKTGLHHGGGNIPIGYDYEDGKLIVNPYEAEQVRKIYEWYLSGASLKAITDKLQDAGYTNKYSSYNSWSSVRNILENETYIGRLHFGGVVVDHAHEAIITEEQFNAAQILRGKRREQFGSHAFQSKHVLTGLLFCGHCGGRYYLRNTGKYSYYACYSRTKQMKNMIKDPNCQNKIWRAQDLEPIIEEKILALLRNPQIAEELAAGKPKTAAPVSKNTDIERRIREIDRQIGKLMELYQQDDIPPELLGEKINRLYGEKTALENSIAPVKETDAMPLDLVAELITNAAEIWDFADENQKRRILQSLISRIVLTDDQVDIEWAF

SEQ ID NO: 7617 - protein, 467 aa, Unknown
  Description of Unknown: Integrase B7618 sequence
  PTHR30461:SF3,SM00857,G3DSA:1.10.10.2600,IPR036162,PF13408, IPR025827,G3DSA:3.40.50.1390,PS51737,IPR006119,IPR038109, PF07508,SSF53041,IPR011109,PF00239,PTHR30461, PS51736,Coil,cd00338
MDKAVFIYTRVSTREQADEGYSLGEQEERLKKYSEAMGWKVIGIYTDPGYSGSNMERPALQQMLSDISKKHPDIVLVDKLDRLSRSQYDTLYLIKKVFAAAGISFVSRAEAFDTSTAFGRAMLGILSTFAELERERIKERMMEGRQGRAKDGLYMGSQAPLGYNYSPENGLTINENEAEIIRFIFEQAAQRRPFACIAGDCANMYDIDFFWSLASITRILNSKLYIGQVLFCGKWTQGKHAPIISEETFEKTQEVLGERKENFSKFTGKKTKNLLSGLIYCEYCKKRFHKIQTGTYIYYVCYSRSRVKGSMVVNRDCSAKRLNLRKTDALVLDQIKRIRTDVAFYDSVKQAKGSADQTVESLGKKIASINTRINRLISLYSLEQIDIEQVKAQIDPLTAQKKELQKKLDAAESKKNDYVKREDAMTLSQAVEEAYNSGNINEARALISQLIKYISVNADSISIHWRF

SEQ ID NO: 7618 - protein, 467 aa, Unknown
  Description of Unknown: Integrase B7619 sequence
  PTHR30461:SF3,IPR036162,PS51737,IPR011109,PTHR30461, PS00397,PF00239,G3DSA:1.10.10.2600,IPR006119,SSF53041, cd00338,SM00857,IPR025827,IPR038109,PS51736, IPR006118,PF13408,G3DSA:3.40.50.1390,PF07508,Coil
MLKAALYARVSSEEQAKRENSIPAQLRALREYCRKNNIEIFKEYKDEGITGQISKRPAFQQMLSAAFSGKINVILVHKFDRFARKVELSRSVKNSLQAAKVNVVSITEPIEDSPMGFFMEGLYELMAEYYVRNLSAEVFKGMNERALKGKHMGQMPYGYYCKDGNVYVNETQAEVIHKIYRFYDEGWGHMKIAKWLNESKIPTYKGIIGGWQTFQVKQILKNSKYIGENLWNGTVYPADFPAILEPALFHRVQEKSNLMTRTHTYRGNNYTKHHLLGLLYCGECGSIMRVKPNQDWQRRKFDTYTCRDASQYRGDCRFTKIFDATKLESEVDAYLRSVLAGAPISLIVSKDAEKVKPADASKSQIEKINAELKRAKDAYLSGVFDLDEYREIRQGLENNKKIIEAETKNVPAPLRANEKEDILRKKIKSAWDLYKNVQTAEEKRTILKTFIHKILIYRDRWEVVFYI

SEQ ID NO: 7619 - protein, 467 aa, Unknown
  Description of Unknown: Integrase B7620 sequence
  PTHR30461:SF3,IPR036162,PS51737,IPR011109,PTHR30461, PS00397,PF00239,G3DSA:1.10.10.2600,IPR006119,SSF53041, SM00857,IPR025827,IPR038109,PS51736,cd03768, IPR006118,PF13408,G3DSA:3.40.50.1390,PF07508
MRRAALYIRVSTLEQAQEGYSVGEQRERLIAYCKAQDWLIADIYVDGGYTGSNLNRPGIQKLMSETEKFDVVLVYKLDRLSRSQRDTLYLIEEIFRPNKVDFVSMQESFDTSSPFGKAMIGLLAVFAQLEREQIKERTWMGRVARAKTGLHHGGGNIPIGYDYEDGKLIVNPYEAEQVRKIYEWYLSGASLKAITDKLQDAGYTNKYSSYNSWSSVRNILENETYIGRLHFGGVVVDHAHEAIITEEQFNAAQILRGKRREQFGSHAFQSKHVLTGLLFCGHCGGRYYLRNTGKYSYYACYSRTKQMKNMIKDPNCQNKIWRAQDLEPIIEEKILALLRNPQIAEELAAGKPKTAAPVSKNTDIERRIREIDRQIGKLMELYQQDDIPPELLGEKINRLYSEKTALENSIAPVEETNAMPLDLVAELITNAAEIWDFADENQKRRILQSLISRIVLTDDQVDIEWAF

SEQ ID NO: 7620 - protein, 467 aa, Unknown
  Description of Unknown: Integrase B7621 sequence
  PTHR30461:SF3,IPR036162,PS51737,IPR011109,PTHR30461, PS00397,PF00239,G3DSA:1.10.10.2600,IPR006119,SSF53041, cd00338,SM00857,IPR025827,IPR038109,PS51736, IPR006118,PF13408,G3DSA:3.40.50.1390,PF07508,Coil
MLKAALYARVSSEEQAKRENSIPAQLRALREYCRKNNIEIFKEYKDEGITGQISKRPAFQQMLSAAFSGKINVILVHKFDRFARKVELSRSVKNSLQAAKVNVVSITEPIEDSPMGFFMEGLYELMAEYYVRNLSAEAFKGMNERALKGKHMGQMPYGYYCKDGNVYVNETQAEVIHKIYRFYDDGWGHMKIAKWLNESKIPTYKGIIGGWQTFQVKQILKNSKYIGENLWNGTVYPADFPAILEPALFHRVQEKSNLMTRTHTYRGNNYTKHHLLGLLYCGECGSIMRVKPNQDWQRRKFDTYTCRDASQYRGDCRFTKIFDAAKLESEVDAYLRSVLAGAPISLIVSKDAEKVKPADASKSQIEKINAELKRAKDAYLSGVFDLDEYREIRQGLEKNKKILEAKTEDAPAPLQANEKEDILRKKIKSAWDLYENVQTAEEKRTILKTFIHKILIYRDKWEVVFYI

SEQ ID NO: 7621 - protein, 467 aa, Unknown
  Description of Unknown: Integrase B7622 sequence
  PTHR30461:SF3,IPR036162,PS51737,IPR011109,PTHR30461, PS00397,PF00239,G3DSA:1.10.10.2600,IPR006119,SSF53041, cd00338,SM00857,IPR025827,IPR038109,PS51736, IPR006118,PF13408,G3DSA:3.40.50.1390,PF07508,Coil
MLKAALYARVSSEEQAKRENSIPAQLRALREYCQKNNIEIFKEYKDEGITGQISKRPAFQQMLSAAFSGKINVILVHKFDRFARKVELSRSVKNSLQAAKVNVVSITEPIEDSPMGFFMEGLYELMAEYYVRNLSAEVFKGMNERALKGKHMGQMPYGYYCKDGNVYVNETQAEVIHKIYRFYDDGWGHMKIAKWLNESKIPTYKGIIGGWQTFQVKQILKNSKYIGENLWNGTVYPADFPAILEPALFHRVQEKSNLMTRTHTYRGNNYTKHHLLGLLYCGECGSIMRVKPNQDWQRRKFDTYTCRDASQYRGDCRFTKIFDAAKLESEVDAYLRSVLAGAPISLIVSKDAEKVKPADASKSQIEKINAELKRAKDAYLSGVFDLDEYREIRQGLEKNKKILEAKTEDAPAPLQANEKEDILRKKIKSAWDLYENVQTAEEKRTILKTFIHKILIYRDKWEVVFYI

SEQ ID NO: 7622 - protein, 467 aa, Unknown
  Description of Unknown: Integrase B7623 sequence
  PTHR30461:SF3,IPR036162,PS51737,IPR011109,PTHR30461, PS00397,PF00239,G3DSA:1.10.10.2600,IPR006119,SSF53041, SM00857,IPR025827,IPR038109,PS51736,cd03768, IPR006118,PF13408,G3DSA:3.40.50.1390,PF07508,Coil
MKRAAVYIRVSTQEQAQEGYSVGEQKERLIAYCKAQDWLIADIYVDGGYSGSNLNRPGIQKLMGETDKFDVVLVYKLDRLSRSQRDTLYLIEEVFLPHDVDFVSMQESFDTATPFGKAMIGLLAVFAQLEREQIKERTRMGRIARAKSGLHHGGGFAPIGYDYADGKLTINPYEAEQVRKIFQWYIEGESLRGIMLRMNEAGFTNRYSSYKSWTCIRNILDNPLYTGQLHFGEVIVENAHEPIISKETFQMAQSLRKKKRGKFGVTSFSSKHLLTGMVFCGKCGARYYVKSNGVYKYYCCYSRTKQLPTMVKDPNCKNKYWRAQDLETVVEKEVRKVLKSPKLAKEIAEANAPRAIVPNKNASIEKRVHEIDKQIGKLMELYQTDSIPADILGDSINKLYNEKTSLESMTEKEEKDSVLPFDLAKELLSDAAQVWDFADGEQRRRILQSLVNRIIVTDDKVDIEWSF

SEQ ID NO: 7623 - protein, 467 aa, Unknown
  Description of Unknown: Integrase B7624 sequence
  PTHR30461:SF3,SM00857,G3DSA:1.10.10.2600,IPR036162,PF13408, PS51737,G3DSA:3.40.50.1390,IPR025827,IPR006119,IPR038109, PF07508,SSF53041,IPR011109,PF00239,PTHR30461, PS51736,Coil,cd00338
MDKAVFIYTRVSTREQADEGYSLGEQEERLKKYSEAMGWKVIGIYTDPGYSGSNMERPALQQMLSDISKKHPDIVLVDKLDRLSRSQYDTLYLIKKVFAAAGASFVSRAEAFDTSTAFGRAMLGILSTFAELERERIKERMMEGRQGRAKDGLYMGSQAPLGYDYSPENGLTINESEAGIVRFVFEQAAQRRPFTCIAEDCANMYDIDFFWSLASITRILNSKLYIGQVLFCGKWTQGKHAPIISEETFEKAQEVLGERKENFSKFTGKKTKNLLSGLIYCEYCKKRFHKIQTGTYIYYVCYSRSRVKGSMVVNRDCSAKRLNLRKTDALVLDQIKRIRTDVAFYDSVKQAKGSADQTVESLGKKIASINTRINRLISLYSLEQIDIEQVKAQIDPLTAQKKELQKKLDAAESKKNDYVKREDAVTLSQAVEEAYNSGNINEARALISQLIKYISVNADYISIHWRF

SEQ ID NO: 7624 - protein, 467 aa, Unknown
  Description of Unknown: Integrase B7625 sequence
  SM00857,G3DSA:1.10.10.2600,IPR036162,PF13408,PS51737, G3DSA:3.40.50.1390,IPR025827,IPR006119,IPR038109,IPR011109, SSF53041,PF00239,PTHR30461,PS51736,Coil, cd00338
MNLELNKIIKVALYTRVSTIQQVEEGFSLEAQKEHLLKYSDNNNYQVYKIYEELGRSGKNINRPAFQEMMQDMRNKKFEKIVVLKLDRISRSVVDLETIIQELQSNNCGFESASEKIDTTSAMGLMFIRLLGIFAQFERERISERIKDVFAEKIQRGLAITGSLPLGYKIGYNENNEKIVVKDLEKEEFVNAIFDTYETTSSLIKTCQYLNTTYPNFVYAGGFNTIDLKRIMLNTMYYGKLKDNDNYCEPYLTYERWKKINDMRESKNIKNNKRHVYLFSGIIKGACGHRLAGTHFISSRIHKTIKYSYRCSKYAHSGQCKNLNITEEAIERKVLEMLPKTIDEFINNYEKEYVKTNVKDNSKKIKELESEKKRIINSYNKGWMSESDAENEIDKINEKLKKYSEVPIKKDYSYLKELKNLNWIDYYKGLTRENKQLFFHKIIDLITVDVEAYRVGKEDFIKIELVK

SEQ ID NO: 7625 - protein, 467 aa, Unknown
  Description of Unknown: Integrase B7626 sequence
  PTHR30461:SF3,IPR036162,PS51737,IPR011109,PTHR30461, PS00397,PF00239,G3DSA:1.10.10.2600,IPR006119,SSF53041, SM00857,IPR025827,IPR038109,PS51736,cd03768, IPR006118,PF13408,G3DSA:3.40.50.1390,PF07508,Coil
MKRAALYIRVSTLEQAQEGYSVGEQRERLIAYCKAQDWLIADIYVDGGYTGSNLNRPGIQKLIGETEKFDVVLVYKLDRLSRSQRDTLYLIEEIFRPNNVDFVSMQESFDTSSPFGKAMIGLLAVFAQLEREQIKERTWMGRVARAKTGLHHGGGNIPIGYDYSDGKLIVNPYEAEQVRKIYEWYLAGDSLKAITDKLQDAGYTNRYSSYNSWTSVRNILENETYIGRLHFGDVVVDHAHEAIITEEQFNAAQILRGKRREQFGSHAFQSKHVLTGLLFCGHCGGRYYLRNTGKYSYYACYSRTKQMKNMIKDPNCQNKIWRAQDLEPIIEEKILALLRNPKLAEELSASRRKAPAPVSKNTDIEKRIRDIDRQISKLMELYQQDDIPPELLGERINRLYGEKTALENTLTPVVEQNAVPLDLVSELIEDAAEIWDFADEGQKRRILQSLVSRIVLTDDQVDIEWAF

SEQ ID NO: 7626 - protein, 467 aa, Unknown
  Description of Unknown: Integrase B7627 sequence
  PTHR30461:SF3,IPR036162,PS51737,IPR011109,PTHR30461, PS00397,PF00239,G3DSA:1.10.10.2600,IPR006119,SSF53041, SM00857,IPR025827,IPR038109,PS51736,cd03768, IPR006118,PF13408,G3DSA:3.40.50.1390,PF07508
MRRAALYIRVSTLEQAQEGYSVGEQRERLIAYCKAQDWLIADIYVDGGYTGSNLNRPGIQKLMSETEKFDVVLVYKLDRLSRSQRDTLYLIEEIFRPNKVDFVSMQESFDTSSPFGKAMIGLLAVFAQLEREQIKERTWMGRVARAKTGLHHGGGNIPIGYDYEDGKLIVNPYEAEQVRKIYEWYLSGASLKAITDKLQDAGYTNKYSSYNSWSSVRNILENETYIGRLHFGGVVVDHAHEAIITEEQFNAAQILRGKRREQFGSHAFQSKHVLTGLLFCGHCGGRYYLRNTGKYSYYACYSRTKQMKNMIKDPNCQNKIWRAQDLEPIIEEKILALLRNPQIAEELAAGKPKAAAPVSKNTDIERRIREIDRQIGKLMELYQQDDIPPELLGEKINRLYGEKTALENSIAPVKETDAMPLDLVAELITNAAEIWDFADENQKRRILQSLISRIVLTDDQVDIEWAF

SEQ ID NO: 7627 - protein, 467 aa, Unknown
  Description of Unknown: Integrase B7628 sequence
  PTHR30461:SF3,IPR036162,PS51737,IPR011109,PTHR30461, PS00397,PF00239,G3DSA:1.10.10.2600,IPR006119,SSF53041, SM00857,IPR025827,IPR038109,PS51736,cd03768, IPR006118,PF13408,G3DSA:3.40.50.1390,PF07508
MRRAALYIRVSTLEQAQEGYSVGEQRERLIAYCKAQDWLIADIYVDGGYTGSNLNRPGIQKLMSETEKFDVVLVYKLDRLSRSQRDTLYLIEEIFRPNKVDFVSMQESFDTSSPFGKAMIGLLAVFAQLEREQIKERTWMGRVARAKTGLHHGGGNIPIGYDYEDGKLIVNPYEAEQVRKIYEWYLSGASLKAITDKLQDAGYTNKYSSYNSWSSVRNILENETYIGRLHFGDVVVDHAHEAIITEEQFNAAQILRGKRREQFGSHAFQSKHVLTGLLFCGHCGGRYYLRNTGKYSYYACYSRTKQMKNMIKDPNCQNKIWRAQDLEPIIEEKILALLRNPKIAKELAAGKPKAAAPISKNTDIERRIREIDRQIGKLMELYQQDDIPPELLGEKINRLYGEKTALENSIAPVEETNAMPLDLVAELISNAAEMWDFADENQKRRILQSLISRIVLTDDQVDIEWAF

SEQ ID NO: 7628 - protein, 467 aa, Unknown
  Description of Unknown: Integrase B7629 sequence
  PTHR30461:SF3,SM00857,G3DSA:1.10.10.2600,IPR036162,PF13408, PS51737,G3DSA:3.40.50.1390,IPR025827,IPR006119,IPR038109, PF07508,SSF53041,IPR011109,PF00239,PTHR30461, PS51736,Coil,cd00338
MDKAVFIYTRVSTREQADEGYSLGEQEERLKKYSEAMGWKVIGIYTDPGYSGSNMERPALQQMLSDISKKHPDIVLVDKLDRLSRSQYDTLYLIKKVFAAAGASFVSRAEAFDTSTAFGRAMLGILSTFAELERERIKERMMEGRQGRAKDGLYMGSQAPLGYDYSPENGLTINESEAGIVRFVFEQAAQRRPFTCIAEDCANMYDIDFFWSLASITRILNSKLYIGQVLFCGKWTQGKHAPIISEETFEKAQEVLGERKENFSKFTGKKTKNLLSGLIYCEYCKKRFHKIQTGTYIYYVCYSRSRVKGSMVVNRDCSAKRLNLRKTDALVLDQIKRIRTDVAFYDSVKQAKGSADQTVESLGKKIASINTRINRLISLYSLEQIDIEQVKAQIDPLTAQKKELQKKLDAAESKKNDYVKREDAVTLSQAVEEAYNSGNINEARALISQLIKYISVNADSISIHWRF

SEQ ID NO: 7629 - protein, 467 aa, Unknown
  Description of Unknown: Integrase B7630 sequence
  PTHR30461:SF3,cd00338,SM00857,G3DSA:1.10.10.2600,IPR036162, PF13408,PS51737,IPR025827,G3DSA:3.40.50.1390,IPR006119, IPR038109,PF07508,IPR011109,SSF53041,PTHR30461, PS51736,Coil,PF00239
MKEIDKKCGDIVYKKELAPDLVRVALYIRVSGEEQKIKGLSLEAQQERLEAYARERGWVIVGIYIDAAKTARKNIHKRTEFQRMMDSVKRDEVDILLFARLDRWFRSVADYYKVMEILQAHNCDWKTTDEEYDTTTANGRLYINVKLSIAQNEADIDGERIDVVFDSKIAHGTVVSGSAPFGFRVNEEKRLEVVPEDAAIVQDAFNYFENTVSQRATVRYVRETYGVNWCDATFRRMLKEKLYTGVYDRGGRYNDQFCPAIINRHQFDRVQALLTRNVRSAPSGKVYIFTSILTCAECGHKLVGYKSSDYYYYRCNQHFQRGRCSHNHSAREDVVEAWLFDHLGEELERCQLEWDVEAAKKKASVARTDKAALKRKLTKLKELYVNDLIDIEDYKKDYQIYVSALNQIPEPAQEAPPDFAAVRRLLDNSFRTIYDTLTREEKRTLWRSVIKEIRIDNDQNITGVVFG

SEQ ID NO: 7630 - protein, 467 aa, Unknown
  Description of Unknown: Integrase B7631 sequence
  PTHR30461:SF3,SM00857,G3DSA:1.10.10.2600,IPR036162,PF13408, PS51737,G3DSA:3.40.50.1390,IPR025827,IPR006119,IPR038109, PF07508,IPR011109,SSF53041,PTHR30461,PS51736, cd00338,PF00239
MQRAVIYARFSSDMQREESIDAQVRACKAYAKNKGYIVVDTYADEAKSGRDVTKRDAYNQMLADAMEDKFDVIIFHKIDRNSRNELNYFTFKDKLEKLGIRYEYAAQPIDALSPEGQMMETMMVGMAAYYSRNLAKETKKGLNENAYKALFNGGCPPLGYKIVDKKYVIDEQEAAAVRLIFELYLNGYGYAAICRELSAKGYTTKAGKAFAKNSLHDILCNEKYIGTYTFNKIPRKKGGRNSHAAERPEDFISIENAFPAIISKDDWALVRAKMDRNRHRAASYTAKEKYLLSGKVFCGHCGSAMVGHRIRKRYCYYGCTRKEQTPTSKCPQKMIRAEILEHWVLQILERVVFTVGGMRRIADAIVVAYEADQKEQAGSQATLLQRKAVAEKKLNNLYKIFEEGNADEFDRQRLNQIKAELREINKSICETSVKPAKLLSKQKIAAILAAMKDEIFVKKIVTMSNKL

SEQ ID NO: 7631 - protein, 467 aa, Unknown
  Description of Unknown: Integrase B7632 sequence
  PTHR30461:SF3,IPR036162,PS51737,IPR011109,PTHR30461, PS00397,PF00239,G3DSA:1.10.10.2600,IPR006119,SSF53041, SM00857,IPR025827,IPR038109,PS51736,cd03768, IPR006118,PF13408,G3DSA:3.40.50.1390,PF07508
MRRAALYIRVSTLEQAQEGYSVGEQRERLIAYCKAQDWLIADIYVDGGYTGSNLNRPGIQKLMSETEKFDVVLVYKLDRLSRSQRDTLYLIEEIFRPNKVDFVSMQESFDTSSPFGKAMIGLLAVFAQLEREQIKERTWMGRVARAKTGLRHGGGNIPIGYDYEDGKLIVNPYEAEQVRKIYEWYLSGASLKAITDKLQDAGYTNKYSSYNSWSSVRNILENETYIGRLHFGDVVVDHAHEAIITEEQFNAAQILRGKRREQFGSHAFQSKHVLTGLLFCGHCGGRYYLRNTGKYSYYACYSRTKQMKNMIKDPNCQNKIWRAQDLEPIIEEKILALLRNPKIAEELAAGKPKAPAPVSKNTDIGRRIREIDRQIGKLMELYQQDDIPPELLGEKINRLYGEKTALENSIAPVEETNAMPLDLVAELITNAAEIWDFADENQKRRILQSLISRIVLTDDQVDIEWAF

SEQ ID NO: 7632 - protein, 467 aa, Unknown
  Description of Unknown: Integrase B7633 sequence
  PTHR30461:SF3,cd00338,SM00857,IPR036162,PF13408, IPR025827,G3DSA:3.40.50.1390,IPR006119,SSF53041,PTHR30461, PS51736,Coil,PF00239
MAQSRSATEKILRVALYPRVSTEEQFLRGYSLQTQEEVLTQYAHDHGYKIVGVYRDEGHSARKPALKRKVMQELLSDVQAGKIDRILFIKLDRWFRNVREYHKIQEILEANNVTWQATMEDYNTATADGRLKVNIMLSVAENESDRTSERIKFVFDGKRRRKEWCFTGGPDQWPYGYMPQVIDGAKRCVKNPETEMIVQDFWDYVVKYSSVRKAGMFCCEKYGITRNYRTWMTTARNELYTGIFHGVEDYCPAYINRADWERIILGHEVIKKTQRPDRVYLFTGLIRCPGCGATMKATFKTYPNDRSKEYNGYRCNNSKLRTCACRHQLSERKIEKYLLGNIKSQLENYIVQAEAQETQKRRQPKIQSLMALNEQLRRLNVIFIAGNIGDEEYAAETKRIKAEIEKAKQQESENRPANLDWIKSFLESDFLSTYESLDKEEQRRLWRSIIEEIYIDGTEVTGIKPRI

SEQ ID NO: 7633 - protein, 467 aa, Unknown
  Description of Unknown: Integrase B7634 sequence
  cd03768,PTHR30461:SF3,SM00857,G3DSA:1.10.10.2600, IPR036162,PF13408,PS51737,IPR025827, G3DSA:3.40.50.1390,IPR006119,IPR038109,PF07508, IPR011109,SSF53041,PTHR30461,PS51736,Coil,PF00239
MDKAVFIYTRVSTREQADEGYSLGEQEERLKKYSDAMRWKVAGIYTDPGYSGSNMERPALQQMLSDISKKHPDIVLVDKLDRLSRSQYDTLYLIKKVFAAAGASFVSRAEAFDTSTAFGRAMLGILSTFAELERERIKERMMEGRQGRAKDGLYMGSQAPLGYDYSPENGLTINESEAEIVRFIFEQAAQRRPFACIAGDCANMYDVDFFWSLSSITRILNSKLYIGQVLFCGKWTQGKHAPIISEETFEKAQEVLDERKENFSKFAGKKTKNLLSGLIYCEYCKTRFHKIQTGKYIYYVCYSRSRVKGSMIVNRDCSAKRLNLRKTDALVLEQIKRIRTDVAFYDSVKQAKGGADQALENLEKKMASINTRINRLISLYSLEQIDMEQVKAQIDPLSAQKKELQKKLDAAKSKKNDYVKREDAMTLSQAVEEAYNSGNISEARALISQLIKYISVNADSISIHWRF

SEQ ID NO: 7634 - protein, 467 aa, Unknown
  Description of Unknown: Integrase B7635 sequence
  IPR036162,PS51737,PS00398,IPR011109,PTHR30461, PF00239,G3DSA:1.10.10.2600,IPR006119,SSF53041,cd00338, SM00857,IPR025827,IPR038109,PS51736,IPR006118, PF13408,G3DSA:3.40.50.1390,PF07508,Coil
MKRVISYIRFSSERQAKGDSLRRQSKMVNDWLKAHPEYYLDQDLSFRDLGVSGFTGKHLKGGLGDFLTAIEKGLVKAGDTLLIESLDRLSRQDVDQASELLRNILRSGVDVVTLSDGEHYTRESLKDPLALIKSILIMQRSHEESLRKSERIQAAWDAKKEAAKAGIKISRRCPAWLKLNDDRKSFSVIPEKVETVRRCFQLRLEGKSIWEIVRILNDEGHQTLNQYKAGKFGQTSVQDLLKNRSVIGYFTPKGCEEIVGYFPPIIPETDFYKVQQLSYSRYGRKPASDKPLSVNLFKGVIRCSECGHALIITGFSDTRSGIYRCPSRNENRCNAKGLSRKQTDGTLLALLSRIDRFDSDMTNTIDTLKLHREHISSNIEKLVQLSLEIEDLSAITSKLKQLKGELSQVDADIEKETQRLKSIDVGCLSDCDLTTKAGRIEAQLIIKSAVKEVVLNTAKRRCNFSQR

SEQ ID NO: 7635 - protein, 467 aa, Unknown
  Description of Unknown: Integrase B7636 sequence
  PTHR30461:SF3,IPR036162,PS51737,IPR011109,PTHR30461, PF00239,G3DSA:1.10.10.2600,IPR006119,SSF53041,cd00338, cd09609,SM00857,IPR025827,IPR038109,PS51736, PF13408,G3DSA:3.40.50.1390,PF07508,Coil
MDKAVFIYTRVSTREQADEGYSLGEQEERLKKYSEAMGWKVTGIYTDPGYSGSNMERPALQQMLSDISKKHPDIVLVDKLDRLSRSQYDTLYLIKKVFAAAGVSFVSRAEAFDTSTAFGRAMLGILSTFAELERERIKERMMEGRQGRAKDGLYMGSQAPLGYDYSPEDGLTINENEAGIVRFIFEQAAQRRPFTCIAEDCANMYDIDFFWSLASITRILNSKLYIGQVLFCGKWTQGKHAPIISEETFEKAQEVLSERKENFSKFTGKKTKNLLSGLIYCEYCKTRFHKIQTGKYIYYVCYSRSRVKGSMIVNRDCSAKRLNLRKTDALVLEQIKRIRTDVAFYDSIKQAADGTDQALANLEKKMASINTRINRLISLYSLEQIDIEQVKAQIDPLSAQKKELQKKLDAAESKKNDYVKREDAVTLSQAVEEAYNSGNINEARALISQLIKYISVNADSISIHWRF

SEQ ID NO: 7636 - protein, 467 aa, Unknown
  Description of Unknown: Integrase B7637 sequence
  SM00857,IPR006118,G3DSA:1.10.10.2600,IPR036162,PF13408, PS51737,G3DSA:3.40.50.1390,Coil,IPR025827,IPR006119, IPR038109,SSF53041,IPR011109,PTHR30461,PS00397, PS51736,cd00338,PF00239
MKKIVKNITETIIRVVLYIRVSSEEQVKHGYSLQSQRERLIEYCKQKGYQVVEIYVDEGKSARSKLKNRTELLRLIEDAKLKKFDRIVFWRLDRWFRNIADYYKVQEILDNNKIDWECSDEEYSTTTSNGRLHLNIKLSIAQNESDQTSDRIKFNFDNMVKNGRAITGSQGVPLGYMVSGEEKNKKVVKNPETEPIAIDMLEYVKKCGSVRKTVIYINQKYNLKICYDSMRHYLMNEKYYGYYRGIENYCEPYITKQEFDEIQSLIKRNVKCNKKYDYIFSGLLKCPICGCKLAGYQQIQNKVKYNKIYKYPSYRCRHTQYDKLCHYHKYPHENAIENYMINNIKNEMLQLIKNSESPLEKNDIKIKKLDKEKIKTKLARLTDLYIDGMILREKYDQEFKKLNSLLQEADENIIEEKRDLSQYKEFLNSDALSIYNKLNNSSKRMFWAKYIEYIIYNEDGTYEIKFK

SEQ ID NO: 7637 - protein, 467 aa, Unknown
  Description of Unknown: Integrase B7638 sequence
  PTHR30461:SF3,IPR036162,PS51737,IPR011109,PTHR30461, PS00397,PF00239,G3DSA:1.10.10.2600,IPR006119,SSF53041, cd00338,SM00857,IPR025827,IPR038109,PS51736, IPR006118,PF13408,G3DSA:3.40.50.1390,PF07508,Coil
MLKAALYARVSSEEQAKRENSIPAQLRALREYCQKNNIEIFKEYKDEGITGQISKRPAFQQMLSAAFSGKINVILVHKFDRFARKVELSRSVKNSLQAAKVNVVSITEPIEDSPMGFFMEGLYELMAEYYVRNLSAEVFKGMNERALKGKHMGQMPYGYYCKDGNVYVNETQAEVIHKIYRFYDKGWGHMKIAKWLNESKIPTYKGIIGGWQTFQVKQILKNSKYIGENLWNGTVYPADFPAILEPALFHRVQEKSNLMTRTHTYRGNNYTKHHLLGLLYCGECGSIMRVKPNQDWQRRKFDTYTCRDASQYRGDCRFTKIFDAAKLESEVDAYLRSVLAGAPISLIVSKDAEKVKPADSSKSQIEKINAELKRAKDAYLSGVFDLDEYREIRQGLEKNKKILEAKTEDAPAPLQANEKEDILRKKIKSAWDLYENVQTAEEKRTILKTFIHKILIYRDKWEVVFYI

SEQ ID NO: 7638 - protein, 467 aa, Unknown
  Description of Unknown: Integrase B7639 sequence
  PTHR30461:SF3,cd00338,SM00857,IPR036162,PF13408, IPR025827,G3DSA:3.40.50.1390,IPR006119,SSF53041,PTHR30461, PS51736,Coil,PF00239
MAQSRSATEKILRVALYPRVSTEEQFLRGYSLQTQEEVLTQYAHDHGYKIVGVYRDEGHSARKPALKRKVMQELLSDVQAGKIDRILFIKLDRWFRNVREYHKIQEILEANNVTWQATMEDYNTATADGRLKVNIMLSVAENESDRTSERIKFVFDGKRRRKEWCFTGGPDQWPYGYMPQIIDGAKRCVKNPETEMIVQDFWDYVVKYSSVRKAGMYCCEKYGITRNYRTWMTTARNELYTGIFHGVEDYCPAYINRADWERIILGHEVIKKTQRPDRVYLFTGIIRCPGCGATMKATFKTYPNDRSKEYNGYRCNNSKLRTCAYRHQLSERKIEKYLLGNIKSQLGNYIVQAEAQETQKRRQPKIQSLVALNEQLRRLNVIFIAGNIGDEEYAAETKRIKAEIEKAKQQESENRPANLDWIKSFLESDFLSTYESLDKEDQRRLWRSIIEEIYIDGTEVTGIKPRI

SEQ ID NO: 7639 - protein, 467 aa, Unknown
  Description of Unknown: Integrase B7640 sequence
  PTHR30461:SF3,IPR036162,PS51737,IPR011109, PTHR30461,PS00397,PF00239,G3DSA:1.10.10.2600, IPR006119,SSF53041,SM00857,IPR025827,IPR038109,PS51736 ,cd03768,IPR006118,PF13408,G3DSA:3.40.50.1390,PF07508
MRRAALYIRVSTLEQAQEGYSVGEQRERLIAYCKAQDWLIADIYVDGGYTGSNLNRPGIQKLMSETEKFDVVLVYKLDRLSRSQRDTLYLIEEIFRPNKVDFVSMQESFDTSSPFGKAMIGLLAVFAQLEREQIKERTWMGRVARAKTGLHHGGGNIPIGYDYEDGKLIVNPYEAEQVRKIYEWYLSGASLKAITDKLQDAGYTNKYSSYNSWSSVRNILENETYIGRLHFGDVVVDHAHEAIITEEQFNAAQILRGKRREQFGSHAFQSKHVLTGLLFCGHCGGRYYLRNTGKYSYYACYSRTKQMKNMIKDPNCQNKIWRAQDLKPIIEEKILALLRNPQIAEELAAGKPKAAAPVSKNTDIERRIREIDRQIGKLMELYQQDDIPPELLGEKINRLYSEKTALENSIAPVEETNAMPLDLVAELITNAAEIWDFADENQKRRILQSLISRIVLTDDQVDIEWAF

SEQ ID NO: 7640 - protein, 467 aa, Unknown
  Description of Unknown: Integrase B7641 sequence
  PTHR30461:SF3,IPR036162,PS51737,IPR011109,PTHR30461, PS00397,PF00239,G3DSA:1.10.10.2600,IPR006119,SSF53041, SM00857,IPR025827,IPR038109,PS51736,cd03768, IPR006118,PF13408,G3DSA:3.40.50.1390,PF07508,Coil
MKRAALYIRVSTLEQAQEGYSVGEQRERLIAYCKAQDWLIADIYVDGGYTGSNLNRPGIQKLIGETEKFDVVLVYKLDRLSRSQRDTLYLIEEIFRPNNVDFVSMQESFDTSSPFGKAMIGLLAVFAQLEREQIKERTWMGRVARAKTGLHHGGGNIPIGYDYSDGKLIVNPYEAEQVRKIYEWYLAGASLKAITDKLQDAGYTNRYSSYNSWTSVRNILENETYIGRLHFGDVVVDHAHEAIITEEQFNAAQILRGKRKEQFGSHAFQSKHVLTGLLFCGHCGGRYYLRNTGKYSYYACYSRTKQMKNMIKDPNCQNKIWRAQDLEPIIEEKIIALLHNPKLAEELSASRRKAPAPVSKNTEIEKRIRDIDRQISKLMELYQQDDIPPELLGERINRLYGEKTALENTLAPVVEQNTMPLDLVSELIEDATEIWDFADEGQKRRILQSLVSRIVLTDDQVDIEWAF

SEQ ID NO: 7641 - protein, 467 aa, Unknown
  Description of Unknown: Integrase B7642 sequence
  PTHR30461:SF3,cd00338,SM00857,IPR036162,PF13408, IPR025827,G3DSA:3.40.50.1390,IPR006119,SSF53041,PTHR30461, PS51736,Coil,PF00239
MAQSRSATEKILRVALYPRVSTEEQFLRGYSLQTQEEVLTQYSNDHGYKIVGVYRDEGHSARKPALKRKVMQELLADVQAGKIDRILFIKLDRWFRNVREYHKIQEILEANNVTWQATMEDYNTATADGRLKVNIMLSVAENESDRTSERIKFVFDGKRRRKEWCFTGGPDQWPYGYMPQVIDGAKRCVKNPETEVIVQDFWDYVVKYSSVRKAGMYCCEKYGITRNYRTWMTTARNELYTGIFHGVEDYCPAYINRADWERIILGHEVIKKTQRPDRVYLFTGLIRCPGCGATMKATFKTYPNDRSKEYNGYRCNNSKLRTCAYRHQLSERKIEKYLLGNIKSQLENYIVQAEAQETQKRRQPKIQSLVALNEQLRRLNVIFIAGNIGDEEYAAETKRIKAEVEKAKQQESENRPANLDWIKSFIESDFLSTYESLDKEDQRRLWRSIIEEIYIDGTEVTGIKPRI

SEQ ID NO: 7642 - protein, 467 aa, Unknown
  Description of Unknown: Integrase B7643 sequence
  PTHR30461:SF3,SM00857,G3DSA:1.10.10.2600,IPR036162, PF13408,IPR025827,G3DSA:3.40.50.1390,PS51737, IPR006119,IPR038109,PF07508,IPR011109, SSF53041,PTHR30461,Coil,cd00338,PF00239
MTIIGEYCDRAISGKTDNRPNFQKLIKDSEKGQFEAVIMYTLDRFARNRYDSAIYKAKLKKNGVKVYYAKQPMPDTPEGIILESVLEGYAEYYSENLSRNIKRGMKENALQCLANGGAGMPLGYTVGEDRKYQIDPVGAKIVQEIFQMYADGMSATQIINECNRRGYKTSRGNTFNKNSLRTMLKNDRYIGVYRFADVIVEDGVPPIISRELFDKVQATLRHNYSARARNKAKDDYLLTTKLFCGHCGSSMVGESGTSKSGKLHHYYKCIDRKRKRKCKKAVEKKDWIEELVVRFTVQNVLTDKNIERISVKAMEIIEKESADTSYLDGLQSELKDIKKKIKNLMTAIEQGIITASTKERMDELESEKNEIEGKIAREEMKKPLLTKERIMYWLYSFKSGDIDNIEYRRRVIDTLVNSVYVYDDGEKGRRIVFTFNISGQNTATLSCSDIACVAPPQVKKSEHYHQW

SEQ ID NO: 7643 - protein, 467 aa, Unknown
  Description of Unknown: Integrase B7644 sequence
  PTHR30461:SF3,IPR036162,PS51737,IPR011109,PTHR30461, PS00397,PF00239,G3DSA:1.10.10.2600,IPR006119,SSF53041, SM00857,IPR025827,IPR038109,PS51736,cd03768, IPR006118,PF13408,G3DSA:3.40.50.1390,PF07508
MRRAALYIRVSTLEQAQEGYSVGEQRERLIAYCKAQDWLIADIYVDGGYTGSNLNRPGIQKLMSETEKFDVVLVYKLDRLSRSQRDTLYLIEEIFRPNKVDFVSMQESFDTSSPFGKAMIGLLAVFAQLEREQIKERTWMGRVARAKTGLHHGGGNIPIGYDYEDGKLIVNPYEAEQVRKIYEWYLSGASLKAITDKLQDAGYTNKYSSYNSWSSVRNILENETYIGRLHFGDVVVDHAHEAIITEEQFNAAQILRGKRREQFGSHAFQSKHVLTGLLFCGHCGGRYYLRNTGKYSYYACYSRTKQMKNMIKDPNCQNKIWRAQDLEPIIEEKILALLRNPKIAEELAAGKPKAPAPVSKNTDIGRRIREIDRQIGKLMELYQQDDIPPELLGEKINRLYGEKTALENSIAPVEETNAMPLDLVAELITNAAEIWDFADENQKRRILQSLISRIVLTDDQVDIEWAF

SEQ ID NO: 7644 - protein, 466 aa, Unknown
  Description of Unknown: Integrase B7645 sequence
  PTHR30461:SF3,IPR036162,PS51737,IPR011109,PTHR30461, PS00397,PF00239,G3DSA:1.10.10.2600,IPR006119,SSF53041, SM00857,IPR025827,IPR038109,PS51736,cd03768, IPR006118,PF13408,G3DSA:3.40.50.1390,PF07508,Coil
MNRAALYIRVSTLEQAQEGYSVGEQKERLIAYCKAKDWIIADIYVDGGYTGSNLNRPGIQKLISETDKFDLVLVYKLDRLSRSQRDTLYLIEEVFRPKGVDFISMQESFDTSTPFGKAMIGLLAVFAQLEREQIKERTWMGRVARAKTGLHHGGGHIPIGYEYEDGHLVINPYEAKQVRKIYEWYLAGDSLKTITDKLQEAGYTNKYSSYNSWTSVRNILGNETYTGRLHFGDVIVDNAHEPIISKEQFDAAQVLRGKRQEQYGGQAFQSKHLLAGLIYCGHCGGRYYLRNTGKYSYYACYSRTKQMKSMVKDPNCMNKIWKGAELEAIVDARIRELLSSPEMAAEIAASRSKPTPVSKNADIEKRLREIDKQIGKLMELYQHDDIPPELLGERINKLYNERTALESTLAPVVEDEAMPFDLVEALISDAAQVWDFADESQKRRILQSLVSRIVLTDDDVKIEWAF

SEQ ID NO: 7645 - protein, 466 aa, Unknown
  Description of Unknown: Integrase B7646 sequence
  PTHR30461:SF3,IPR036162,PS51737,IPR011109,PTHR30461, PS00397,PF00239,G3DSA:1.10.10.2600,IPR006119,SSF53041, SM00857,IPR025827,IPR038109,PS51736,cd03768, IPR006118,PF13408,G3DSA:3.40.50.1390,PF07508,Coil
MNRAALYIRVSTLEQAQEGYSVGEQKERLIAYCKAKDWIIADIYVDGGYTGSNLNRPGIQKLISETDKFDLVLVYKLDRLSRSQRDTLYLIEEVFRPKGVDFISMQESFDTSTPFGKAMIGLLAVFAQLEREQIKERTWMGRVARAKTGLHHGGGHIPIGYEYEDGHLVINPYEAEQVRKIYEWYLAGDSLKTITDKLQEAGYTNKYSSYNSWSSVRNILGNETYTGRLHFGDVTVDNAHEPIITKEQFDAAQVLRGKRQEQYGGQAFQSKHLLAGLIYCGHCGGRYYLRNTGKYSYYACYSRTKQMKSMVKDPNCKNKIWKGSELEPIIDAKVRELLSSPEMAAEIAASHSKPVPVSKNADIEKRLREIDKQIGRLMELYQHDDIPPELLGERINKLYNERTALESTLTPVVENEVMPFDLVEALIADAAQVWDFADESQKRRILQSLVSRIVLTDDDVKIEWAF

SEQ ID NO: 7646 - protein, 466 aa, Unknown
  Description of Unknown: Integrase B7647 sequence
  PTHR30461:SF3,IPR036162,PS51737,IPR011109,PTHR30461, PS00397,PF00239,G3DSA:1.10.10.2600,IPR006119,SSF53041, SM00857,IPR025827,IPR038109,PS51736,cd03768, IPR006118,PF13408,G3DSA:3.40.50.1390,PF07508,Coil
MNRAALYIRVSTLEQAQEGYSVGEQKERLIAYCKAKDWIVADIYVDGGYTGSNLNRPGIQKLISETDKFDLVLVYKLDRLSRSQRDTLYLIEEVFRPKGVDFISMQESFDTSTPFGKAMIGLLAVFAQLEREQIKERTWMGRVARAKTGLHHGGGHIPIGYEYEDGHLVINPYEAEQVRKIYEWYLAGDSLKTITDKLQEAGYTNKYSSYNSWTSVRNILGNETYTGRLHFGDVIVDNAHEPIISKEQFDAAQVLRGKRQEQYGGQAFQSKHLLAGLIYCGHCGGRYYLRNTGKYSYYACYSRTKQMKSMVKDPNCMNKIWKGAELEAIVDARIRELLSSPEMAAEIAASRSKPTPVSKNADIEKRLREIDKQIGKLMELYQHDDIPPELLGERINKLYNERTALESTLAPVVEDEAVPFDLVEALISDAAQVWDFADESQKRRILQSLVSRIVLTDDAVKIEWAF

SEQ ID NO: 7647 - protein, 466 aa, Unknown
  Description of Unknown: Integrase B7648 sequence
  PTHR30461:SF3,IPR036162,PS51737,cd16859,IPR011109, PTHR30461,PS00397,PF00239,G3DSA:1.10.10.2600,IPR006119, SSF53041,cd00338,cd06456,SM00857,IPR025827,IPR038109 ,PS51736,IPR006118,PF13408,G3DSA:3.40.50.1390,PF07508,Coil
MKKAGLYIRVSTPQQEKEGYSIEAQTEKLNAYAVAKDYKVFKTYTDAAFSGAKLERPALNEMIEDIENNKIDVVIVYKLDRLSRSQKNTMYLIEDVFLKNNVDFISMQESFDTTTSFGRAMIGILSVFAQLERDNITERMSMGKLERVKRGYYMGGGNVPFGYEYNQITGELEIQETQALAVKRMFELFLSGQAINKIVSILKKEFPVFEDSFMDSTVRRRLQSHYYCGKQKYQNKVYDAKHEPIVSIKEFNKVQRLISNRPHSNAFNHSYLFSGLIMCHKCGKPYNGYESVRTANGKKYKHKYYRCSCRTYKHKQKYGWACSGKSYRCDFLDAAIMSEIKKRAENSKFALKENNNEIDNKPIIREIARLNAQQSKLLDLYLSDKISTIILDSKTDELKDKIEKLELQLNQTVSKKDKEEFEKSLEELVDHFEEMDFSTRRSLIENIIEKIEVIDNEITIYFYVSI

SEQ ID NO: 7648 - protein, 466 aa, Unknown
  Description of Unknown: Integrase B7649 sequence
  PTHR30461:SF3,IPR036162,PS51737,IPR011109,PTHR30461, PS00397,PF00239,G3DSA:1.10.10.2600,IPR006119,SSF53041, SM00857,IPR025827,IPR038109,PS51736,cd03768, IPR006118,PF13408,G3DSA:3.40.50.1390,PF07508,Coil
MRRAALYIRVSTLEQAQEGYSVGEQKERLIAYCKAKDWIIADIYVDGGYTGSNLNRPGIQKLISETDKFDLVLVYKLDRLSRSQRDTLYLIEEVFRPKGVDFISMQESFDTSTPFGKAMIGLLAVFAQLEREQIKERTWMGRVARAKTGLHHGGGHIPIGYEYEDGHLVINPYEAEQVRKIYEWYLAGDSLKTITDKLQEAGYTNKYSSYNSWTSVRNILGNETYTGRLHFGDVIVDNAHEPIISKEQFDAAQVLRGKRQEQYGGQAFQSKHLLAGLIYCGHCGGRYYLRNTGKYSYYACYSRTKQMKSMVKDPNCMNKIWKGAELEAIVDARIRELLSSPEMAAEIATSRSKPAPVSKNADIEKRLREIDKQISKLMELYQHDDIPPELLGERINKLYNERTALESTLAPVVEDEAMPFDLVEALISDAAQVWDFADESQKRRILQSLVSRIVLTDDDVKIEWAF

SEQ ID NO: 7649 - protein, 466 aa, Unknown
  Description of Unknown: Integrase B7650 sequence
  PTHR30461:SF3,IPR036162,PS51737,IPR011109,PTHR30461, PS00397,PF00239,G3DSA:1.10.10.2600,IPR006119,SSF53041, SM00857,IPR025827,IPR038109,PS51736,cd03768, IPR006118,PF13408,G3DSA:3.40.50.1390,PF07508,Coil
MNRAALYIRVSTLEQAQEGYSVGEQKERLIAYCKAKDWIIADIYVDGGYTGSNLNRPGIQKLISETDKFDLVLVYKLDRLSRSQRDTLYLIEEVFRPKGVDFISMQESFDTSTPFGKAMIGLLAVFAQLEREQIKERTWMGRVARAKTGLHHGGGHIPIGYEYEDGHLVINPYEAEQVRKIYEWYLAGDSLKTITDKLQEVGYTNKYSSYNSWTSVRNILGNETYTGRLHFGDVIVDNAHEPIISKEQFDAAQVLRGKRQEQYGGQAFQSKHLLAGLIYCGHCGGRYYLRNTGKYSYYACYSRTKQMKSMVKDPNCMNKIWKGAELEAIVDAQIRELLSSPEMAAEIATSRSKPAPVSKNADIEKRLREIDKQIGKLMELYQHDDIPPELLGERINKLYNERTALESTLAPVVEDEAMPFDLVEALISDAAQVWDFADESQKRRILQSLVSRIVLTDDDVKIEWAF

SEQ ID NO: 7650 - protein, 466 aa, Unknown
  Description of Unknown: Integrase B7651 sequence
  PTHR30461:SF3,IPR036162,PS51737,IPR011109,PTHR30461, PS00397,PF00239,G3DSA:1.10.10.2600,IPR006119,SSF53041, SM00857,IPR025827,IPR038109,PS51736,cd03768, IPR006118,PF13408,G3DSA:3.40.50.1390,PF07508,Coil
MNRAALYIRVSTLEQAQEGYSVGEQKERLIAYCKAKDWIIADIYVDGGYTGSNLNRPGIQKLISETDKFDLVLVYKLDRLSRSQRDTLYLIEEVFRPKGVDFISMQESFDTSTPFGKAMIGLLAVFAQLEREQIKERTWMGRVARAKTGLHHGGGHIPIGYEYEDGHLVINPYEAEQVRKIYEWYLAGDSLKTITDKLQEAGYTNKYSSYNSWTSVRNILGNETYTGRLHFGDVIVDNAHEPIISKEQFDAAQVLRGKRQEQYGGQAFQSKHLLAGLIYCGHCGGRYYLRNTGKYSYYACYSRTKQMKSMVKDPNCMNKIWKGAELEAIVDARIRELLSSPEMAAEIAASRSKPTPVSKNADIEKRLREIDKQIGKLMELYQHDDIPPELLGERINKLYNERTALESTLAPVVEDEAMPFDLVEALISDAAQVWDFADESQKRRILQSLVSRIVLTDDDVKIEWAF

SEQ ID NO: 7651 - protein, 466 aa, Unknown
  Description of Unknown: Integrase B7652 sequence
  PTHR30461:SF3,IPR036162,PS51737,IPR011109,PTHR30461, PS00397,PF00239,G3DSA:1.10.10.2600,IPR006119,SSF53041, SM00857,IPR025827,IPR038109,PS51736,cd03768, IPR006118,PF13408,G3DSA:3.40.50.1390,PF07508,Coil
MNRAALYIRVSTLEQAQEGYSVGEQKERLIAYCKAKDWIIADIYVDGGYTGSNLNRPGIQKLISETDKFDLVLVYKLDRLSRSQRDTLYLIEEVFRPKGVDFISMQESFDTSTPFGKAMIGLLAVFAQLEREQIKERTWMGRVARAKTGLHHGGGHIPIGYEYEDGHLVINPYEAEQVRKIYEWYLAGDSLKTITDKLQEVGYTNKYSSYNSWTSVRNILGNETYTGRLHFGDVIVDNAHEPIISKEQFDAAQVLRGKRQEQYGGQAFQSKHLLAGLIYCGHCGGRYYLRNTGKYSYYACYSRTKQMKSMVKDPNCMNKIWKGAELEALVDARIRELLSSPEMAAEIATSRSKPAPVSKNADIEKRLREIDKQIGKLMELYQHDDIPPELLGERINKLYNERTALESTLAPVVEDEAMPFDLVEALISDAAQVWDFADESQKRRILQSLVSRIVLTDDDVKIEWAF

SEQ ID NO: 7652 - protein, 466 aa, Unknown
  Description of Unknown: Integrase B7653 sequence
  PTHR30461:SF3,IPR036162,PS51737,IPR011109,PTHR30461, PS00397,PF00239,G3DSA:1.10.10.2600,IPR006119,SSF53041, SM00857,IPR025827,IPR038109,PS51736,cd03768, IPR006118,PF13408,G3DSA:3.40.50.1390,PF07508,Coil
MNRAALYIRVSTLEQAQEGYSVGEQKERLIAYCKAKDWIIADIYVDGGYTGSNLNRPGIQKLISETDKFDLVLVYKLDRLSRSQRDTLYLIEEIFRPKGVDFISMQESFDTSTPFGKAMIGLLAVFAQLEREQIKERTWMGRVARAKTGLHHGGGYIPIGYEYEDGHLVVNPYEAEQVRKIYEWYLAGASLKTITDRLQEAGYTNKYSSYTSWSSVRNILGNETYTGRLHFGDVVVDHAHEAIISTEQFNAAQVLRGKKQEQYGTAFQSKHLLTGLIFCGHCGGRYYLRNTGKYTYYACYSRTKQIKSMVKDPNCKNKIWKGSELEPIIDAKIRELLSSPQMAAEIAAARKPKPATGSRNTEVEKRLREIDKQIGKLMELYQHDDIPAELLGERINKLYNERTALESSLTPVVEDEVTPFDLAEALISDAAQVWDFADENQKRRILQSLISRIVLTDDDVEIEWAF

SEQ ID NO: 7653 - protein, 466 aa, Unknown
  Description of Unknown: Integrase B7654 sequence
  PTHR30461:SF3,SM00857,IPR036162,G3DSA:3.40.50.1390,IPR006119, SSF53041,PTHR30461,Coil,PS51736,cd00338, PF00239
MAPYNVLNKNKILRAGLFERVSTEEQSRFGYSIATQVEALEEHAAKNRMKIVDHYCDAGVSGGIAYKKRPEMMRLLQDVEAGKIDIILFTRLDRWFRNIKEYFKVQEILEEHNVEWKAIWEDYDTRTANGRMAITIFLAIAQNEREKTSERIQVVFENKRKNKESFFGKSSTPFGYMEQKDEEGITRLVKDPELEPVLQMFWDIAVKYENVNKAAKMVNLEYGIKKNKNKWMELSKKEIYTGNYKGVEGYCPSYVSVEDWLKLQNRKIPRQSKSDRVYLFTGLIECPVCHNNLASTYCVHKQPDGSKREYHNYRCQFKESYVCKYNHTFSELKVEKWLLKNIRNLMHNEIARVEIEKTKPRPRPKTNVAALKEQLRRLEVVYMTGNKPDEEYIKEQKELNNAIKKAENETPKTDADKDLSMLHEILSTDFESVYKTLSAEDRRRFWRGLINRIYLDGNKISHVDFN

SEQ ID NO: 7654 - protein, 466 aa, Unknown
  Description of Unknown: Integrase B7655 sequence
  PTHR30461:SF3,IPR036162,PS51737,IPR011109, PTHR30461,PS00397,PF00239,G3DSA:1.10.10.2600, IPR006119,SSF53041,SM00857,IPR025827,IPR038109,PS51736 ,cd03768,IPR006118,PF13408,G3DSA:3.40.50.1390,PF07508,Coil
MNRAALYIRVSTLEQAQEGYSVGEQKERLIAYCKAKDWIIADIYVDGGYTGSNLNRPGIQKLISETDKFDLVLVYKLDRLSRSQRDTLYLIEEVFRPKGVDFISMQESFDTSTPFGKAMIGLLAVFAQLEREQIKERTWMGRVARAKTGLHHGGGHIPIGYEYEDGHLVINPYEAEQVRKIYEWYLAGDSLKTITDKLQEAGYTNKYSSYNSWTSVRNILGNETYTGRLHFGDVIVDNAHEPIIGKEQFDAAQVLRGKRQEQYGGQAFQSKHLLAGLIYCGHCGGRYYLRNTGKYSYYACYSRTKQMKSMVKDPNCMNKIWKGAELEAIVDARIRELLSSPEMATEIAASRSKPTPVSKNADIEKRLREIDKQIGKLMELYQHDDIPPELLGERINKLYNERTALESTLAPVVEDEAMPFDLVEALISDAAQVWDFADESQKRRILQSLVSRIVLTDDDVQIEWAF

SEQ ID NO: 7655 - protein, 466 aa, Unknown
  Description of Unknown: Integrase B7656 sequence
  PTHR30461:SF3,SM00857,IPR036162,G3DSA:3.40.50.1390,IPR006119, SSF53041,PTHR30461,Coil,PS51736,cd00338, PF00239
MAPYNVLNKNKILRAGLFERVSTEEQSKFGYSIAAQVEALEEHAAKNRMKIVDHYCDAGVSGGIAYKKRPEMMRLLQDVADGKIDIILFTRLDRWFRNIKEYFKVQEILEEHNVEWLAIWEDYRTDTANGRMAITIFLAIAQNEREKTSERIQVVFENKRKNKESFFGKSSTPFGYVEQKDEDGITRLVKDPELEPALQMFWDIAVKYENVNKAAKMVNLEYGIKKNKNKWMELSKKEIYTGNYRGVEGYCPAYVSVEDWLKLQNRKIPRQSKSDRVYLFTGLIECPVCHNNLASTYCVHKQPDGSKREYHNYRCQFKESYVCKYNHTFSELKIEKWLLKNIRNLMHEEVARVEIEKTKPRPKPKTNIAALKEQLRRLEVVYMTGNKPDEEYIKEQKELNNAIKKAESETPKTDADKDLTMLHEILSTDFESVYKTLSAEDRRRFWRGLINRIYLDGNKISYVDFN

SEQ ID NO: 7656 - protein, 466 aa, Unknown
  Description of Unknown: Integrase B7657 sequence
  PTHR30461:SF3,IPR036162,PS51737,IPR011109, PTHR30461,PS00397,PF00239,G3DSA:1.10.10.2600, IPR006119,SSF53041,SM00857,IPR025827,IPR038109,PS51736 ,cd03768,IPR006118,PF13408,G3DSA:3.40.50.1390,PF07508,Coil
MNRAALYIRVSTLEQAQEGYSVGEQKERLIAYCKAKDWIIADIYVDGGYTGSNLNRPGIQKLMSETDKFDLVLVYKLDRLSRSQRDTLYLIEEVFRPKGVDFISMQESFDTSTPFGKAMIGLLAVFAQLEREQIKERTWMGRVARAKTGLHHGGGHIPIGYEYEDGHLVINPYEAEQVRKIYEWYLAGDSLKTITDKLQEAGYTNKYSSYNSWTSVRNILGNETYTGRLHFGDVIVDNAHEAIISKEQFNAAQVIRGKRQEQYGGQAFQSKHLLAGLIYCGHCGGRYYLRNTGKYSYYACYSRTKQMKSMVKDPNCMNKIWKGAELEAIVDARIRELLRSPEMAADITASRSKPVPVSKNADIEKRLREIDKQIGKLMELYQHDDIPPELLGERINKLYNERTALESTLAPVVEDEAMPFDLVEALIADAAQVWDFADEGQKRRILQSLVSRIILTDDDVKIEWAF

SEQ ID NO: 7657 - protein, 466 aa, Unknown
  Description of Unknown: Integrase B7658 sequence
  PTHR30461:SF3,SM00857,IPR036162,G3DSA:3.40.50.1390,IPR006119, SSF53041,PTHR30461,Coil,PS51736,cd00338, PF00239
MAPYNVLNKNKILRAGLFERVSTEEQSRFGYSIATQVEALEEHAAKNRMKIVDHYCDAGVSGGIAYKKRPEMMRLLQDVEAGKIDIILFTRLDRWFRNIKEYFKVQEILEEHNVEWKAIWEDYDTRTANGRMAITIFLAIAQNEREKTSERIQVVFENKRKNKESFFGKSSTPFGYMEQKDEEGITRLVKDPELEPALQMFWDIAVKYENVNKAAKMVNLEYGIKKNKNKWMELSKKEIYTGNYRGVEGYCPSYVSVEDWLKLQNRKIPRQSKSDRVYLFTGLIECPVCHNNLASTYCVHKQPDGSKREYHNYRCQFKESYVCKYNHTFSELKVEKWLLKNIRNLMHNEIARVEIEKTKPRPRPKTNVAALKEQLRRLEVVYMTGNKPDEEYIKEQKELNNAIKKAENETPKTDADKDLSMLHEILSTDFESVYKTLSAEDRRRFWRGLINRIYLDGNKISHVDFN

SEQ ID NO: 7658 - protein, 466 aa, Unknown
  Description of Unknown: Integrase B7659 sequence
  PTHR30461:SF3,IPR036162,PS51737,IPR011109, PTHR30461,PS00397,PF00239,G3DSA:1.10.10.2600, IPR006119,SSF53041,SM00857,IPR025827,IPR038109,PS51736 ,cd03768,IPR006118,PF13408,G3DSA:3.40.50.1390,PF07508,Coil
MNRAALYIRVSTLEQAQEGYSVGEQKERLIAYCKAKDWIIADIYVDGGYTGSNLNRPGIQKLISETDKFDLVLVYKLDRLSRSQRDTLYLIEEVFRPKGVDFISMQESFDTSTPFGKAMIGLLAVFAQLEREQIKERTWMGRVARAKTGLHHGGGHIPIGYEYEDGHLVINPYEAEQVRKIYEWYLAGDSLKTITDKLQEAGYTNKYSSYNSWTSVRNILGNETYTGRLHFGDVIVDNAHEPIISKEQFDAAQVLRGKRQEQYGGQAFQSKHLLAGLIYCGHCGGRYYLRNTGKYSYYACYSRTKQMKSMVKDPNCMNKIWKGAELEAIVDAQIRELLSSPEMAAEIATSRSKPAPVSKNADIEKRLREIDKQIGKLMELYQHDDIPPELLGERINKLYNERTALESTLAPVVEDEAIPFDLVEALISDAAQVWDFADESQKRRILQSLVSRIVLTDDDVKIEWAF

SEQ ID NO: 7659 - protein, 466 aa, Unknown
  Description of Unknown: Integrase B7660 sequence
  PTHR30461:SF3,IPR036162,PS51737,IPR011109,PTHR30461, PS00397,PF00239,G3DSA:1.10.10.2600,IPR006119,SSF53041, SM00857,IPR025827,IPR038109,PS51736,cd03768, IPR006118,PF13408,G3DSA:3.40.50.1390,PF07508
MKRVGIYCRVSTDGQRENTSIPEQKEKLLAFCKAKGWICVDMFIDPGYSGASLERPAMERLMQSVIDKKIDVVLVTKLDRLSRSQKDTLYLIEDLFIPNDVDFVSVAESFDTTTSYGRAMLGILSAFSQLERELISERTFSGRVGRAKQGKWHGGGTEPIGYDYVDGELVVNRKEADQVRRVYELYASGVSITAICERMEGEKTKHGDWHHPETVANVLDNPLYSGTVHFDEIKNPGLHTAIIPKDLEETVRTIRSRIGKYPMKESQYMLTGLVYCHKCGARYFVKKNPNGNKFYCCHSRAKVNKKMVRDPLCKNKNWPIKDLEKIVYKEIKRLAKNPNLIRNMKKEPPKVGSSSNAVHEEIDGINTEIGRLMDLYQQNDQLLQVGEIAERIDDLYQRKVSLLKVSPSEGVCVRGFSKERAVLVVSDLLAAMRESNIDFVRYSLLQLIDRIEVDEENVYFSWSFAD

SEQ ID NO: 7660 - protein, 466 aa, Unknown
  Description of Unknown: Integrase B7661 sequence
  PTHR30461:SF3,IPR036162,PS51737,IPR011109,PTHR30461, PS00397,PF00239,G3DSA:1.10.10.2600,IPR006119,SSF53041, SM00857,IPR025827,IPR038109,PS51736,cd03768, IPR006118,PF13408,G3DSA:3.40.50.1390,PF07508,Coil
MNRAALYIRVSTLEQAQEGYSVGEQKERLIAYCKAKDWIIADIYVDGGYTGSNLNRPGIQKLISETNKFDLVLVYKLDRLSRSQRDTLYLIEEVFRPKGVDFISMQESFDTSTPFGKAMIGLLAVFAQLEREQIKERTWMGRVARAKTGLHHGGGHIPIGYEYEDGHLVINPYEAEQVRKIYEWYLAGDSLKTITDKLQEAGYTNKYSSYNSWTSVRNILGNETYTGRLHFGDVIVDNAHEPIISKEQFDAAQVLRGKRQEQYGGQAFQSKHLLAGLIYCGHCGGRYYLRNTGKYSYYACYSRTKQMKSMVKDPNCMNKIWKGAELEAIVDARIRELLSSPEMATEIAASRSKPTPVSKNADIEKRLREIDKQIGKLMELYQHDDIPPELLGERINKLYNERTALESTLAPVVEDEAMPFDLVEALISDAAQVWDFADESQKRRILQSLVSRIVLTDDDVKIEWAF

SEQ ID NO: 7661 - protein, 466 aa, Unknown
  Description of Unknown: Integrase B7662 sequence
  PTHR30461:SF3,IPR036162,PS51737,IPR011109,PTHR30461, PS00397,PF00239,G3DSA:1.10.10.2600,IPR006119,SSF53041, cd00338,SM00857,IPR025827,IPR038109,PS51736, IPR006118,PF13408,G3DSA:3.40.50.1390,Coil
MEKIIKKIIRVVLYIRVSSEEQARWGYSLEAQKERLIEYCKEKGYKIIAIYIDAGKTARTKIKNRKELMKLVDDSKKDMFDRVIIWKLDRWFRNVADYYKIQEVLESNNVDWECSDEDYNTTTAQGRYALNLKLADAQNESDKTSERIKFVNKSMVQNKRPIQGSQCFPMGLKVVGEKRNKKVVKDEEKEVVVNDMFDSIENTMCLRQTLIYINNKYDLTIRYANMKSYLRNTLYYGFYRGVEDYCPAYLTKERWDRIQEILDKNSKDNKNKFSYIFSGLVRCKKCGCSMSGCTHRNIRINKSGKRVINDYPYYRCNKANTSALCENKKRLSQNKLEKWLLEHFHEELAKEIDSIESITEEKKPTKKIDVEKVRAKIERLNDLYIIGRITKEKYDSDYKKYNEEIESANIIKEEVGDLSKYKEILANNSVLDIYNKLNDNAKRVFWSNYIDYIIQDDVNEFKIIFK

SEQ ID NO: 7662 - protein, 466 aa, Unknown
  Description of Unknown: Integrase B7663 sequence
  PTHR30461:SF3,IPR036162,PS51737,IPR011109,PTHR30461, PS00397,PF00239,G3DSA:1.10.10.2600,IPR006119,SSF53041, SM00857,IPR025827,IPR038109,PS51736,cd03768, IPR006118,PF13408,G3DSA:3.40.50.1390,PF07508,Coil
MNRAALYIRVSTLEQAQEGYSVGEQKERLIAYCKAKDWIIADIYVDGGYTGSNLNRPGIQKLISETDKFDLVLVYKLDRLSRSQRDTLYLIEEIFRPKGVDFISMQESFDTSTPFGKAMIGLLAVFAQLEREQIKERTWMGRVARAKTGLHHGGGYIPIGYEYEDGHLVINPYEAEQVRKIYEWYLAGASLKTITDRLQEAGYTNKYSSYTSWSSVRNILGNETYTGRLHFGDVVVDHAHEAIISTEQFNAAQVLRGKKQEQYGTAFQSKHLLTGLIFCGHCGGRYYLRNTGKYTYYACYSRTKQIKSMVKDPNCKNKIWKGSELEPIIDAKIRELLSSPQMAAEIAAARKPKPATGSRNTEVEKRLREIDKQIGKLMELYQHDDIPAELLGERINKLYNERTALESSLTPVVEDEVTPFDLAEALISDAAQVWDFADENQKRRILQSLISRIVLTDDDVKIEWAF

SEQ ID NO: 7663 - protein, 466 aa, Unknown
  Description of Unknown: Integrase B7664 sequence
  PTHR30461:SF3,IPR036162,PS51737,IPR011109,PTHR30461, PS00397,PF00239,G3DSA:1.10.10.2600,IPR006119,SSF53041, SM00857,IPR025827,IPR038109,PS51736,cd03768, IPR006118,PF13408,G3DSA:3.40.50.1390,PF07508,Coil
MNRAALYIRVSTLEQAQEGYSVGEQKERLIAYCKAKDWIIADIYVDGGYTGSNLNRPGIQKLISETDKFDLVLVYKLDRLSRSQRDTLYLIEEVFRPKGVDFISMQESFDTSTPFGKAMIGLLAVFAQLEREQIKERTWMGRVARAKTGLHHGGGHIPIGYEYEDGHLVINPYEAEQVRKIYEWYLAGDSLKTITDKLQEVGYTNKYSSYNSWTSVRNILGNETYTGRLHFGDVIVDNAHEPIISKEQFDAAQVLRGKRQEQYGGQAFQSKHLLAGLIYCGHCGGRYYLRNTGKYSYYACYSRTKQMKSMVKDPNCMNKIWKGAELEAIVDAQIRELLSSPEMAAEITTSRSKPAPVSKNADIEKRLREIDKQIGKLMELYQHDDIPPELLGERINKLYNERTALESTLAPVVEDEAMPFDLVEALISDAAQVWDFADESQKRRILQSLVSRIVLTDDDVKIEWAF

SEQ ID NO: 7664 - protein, 466 aa, Unknown
  Description of Unknown: Integrase B7665 sequence
  PTHR30461:SF3,IPR036162,PS51737,IPR011109,PTHR30461, PS00397,PF00239,G3DSA:1.10.10.2600,IPR006119,SSF53041, SM00857,IPR025827,IPR038109,PS51736,cd03768, IPR006118,PF13408,G3DSA:3.40.50.1390,PF07508,Coil
MNRAALYIRVSTLEQAQEGYSVGEQKERLIAYCKAKDWIIADIYVDGGYTGSNLNRPGIQKLISETDKFDLVLVYKLDRLSRSQRDTLYLIEEVFRPKGVDFISMQESFDTSTPFGKAMIGLLAVFAQLEREQIKERTWMGRVARAKTGLHHGGGHIPIGYEYEDGHLVINPYEAEQVRKIYEWYLSGDSLKTITDKLQEAGYTNKYSSYNSWTSVRNILGNETYTGRLHFGDVIVDNAHEPIISKEQFDTAQVLRGKRQEQYGGQAFQSKHLLAGLIYCGHCGGRYYLRNTGKYSYYACYSRTKQMKSMVKDPNCMNKIWKGAELEAIVDAQIRELLSSPEMAAEIATSRSKPAPVSKNADIEKRLREIDKQIGKLMELYQHDDIPPELLGERINKLYNERTALESTLAPVVEDEAMPFDLVEALISDAAQVWDFADESQKRRILQSLVSRIVLTDDDVKIEWAF

SEQ ID NO: 7665 - protein, 466 aa, Unknown
  Description of Unknown: Integrase B7666 sequence
  PTHR30461:SF3,IPR036162,PS51737,IPR011109,PTHR30461, PS00397,PF00239,G3DSA:1.10.10.2600,IPR006119,SSF53041, SM00857,IPR025827,IPR038109,PS51736,cd03768, IPR006118,PF13408,G3DSA:3.40.50.1390,PF07508,Coil
MNRAALYIRVSTLEQAQEGYSVGEQKERLIAYCKAKDWIIADIYVDGGYTGSNLNRPGIQKLISETDKFDLVLVYKLDRLSRSQRDTLYLIEEVFRPKGVDFISMQESFDTSTPFGKAMIGLLAVFAQLEREQIKERTWMGRVARAKTGLHHGGGHIPIGYEYEDGHLVINPYEAEQVRKIYEWYLAGDSLKTITDKLQEVGYTNKYSSYNSWTSVRNILGNETYTGRLHFGDVTVDNAHEPIITKEQFDAAQVLRGKRQEQYGGQAFQSKHLLAGLIYCGHCGGRYYLRNTGKYSYYACYSRTKQMKSMVKDPNCKNKIWKGAELEAIVDARIRELLSSPEMAAEIATSRSKPAPVSKNADIEKRLREIDKQIGKLMELYQHDDIPPELLGERINKLYNERTALESTLAPVVEDEAMPFDLVEALISDAAQVWDFADESQKRRILQSLVSRIVLTDDDVQIEWAF

SEQ ID NO: 7666 - protein, 466 aa, Unknown
  Description of Unknown: Integrase B7667 sequence
  PTHR30461:SF3,IPR036162,PS51737,IPR011109,PTHR30461, PS00397,PF00239,G3DSA:1.10.10.2600,IPR006119,SSF53041, SM00857,IPR025827,IPR038109,PS51736,cd03768, IPR006118,PF13408,G3DSA:3.40.50.1390,PF07508,Coil
MNRAALYIRVSTLEQAQEGYSVGEQKERLIAYCKAKDWIIADIYVDGGYTGSNLNRPGIQKLISETDKFDLVLVYKLDRLSRSQRDTLYLIEEVFRPKGVDFISMQESFDTSTPFGKAMIGLLAVFAQLEREQIKERTWMGRVARAKTGLHHGGGHIPIGYEYEDGHLVINPYEAKQVRKIYEWYLAGDSLKTITDKLQEAGYMNKYSSYNSWTSVRNILGNETYTGRLHFGDVIVDNAHEPIISKEQFDAAQVLRGKRQEQYGGQAFQSKHLLAGLIYCGHCGGRYYLRNTGKYSYYACYSRTKQMKSMVKDPNCMNKIWKGAELEAIVDARIRELLSSPEMAAEIAASRSKPTPVSKNADIEKRLREIDKQIGKLMELYQHDDIPPELLGERINKLYNERTALESTLAPVVEDEAMPFDLVEALISDAAQVWDFADESQKRRILQSLVSRIVLTDDDVKIEWAF

SEQ ID NO: 7667 - protein, 466 aa, Unknown
  Description of Unknown: Integrase B7668 sequence
  PTHR30461:SF3,IPR036162,PS51737,IPR011109,PTHR30461, PS00397,PF00239,G3DSA:1.10.10.2600,IPR006119,SSF53041, SM00857,IPR025827,IPR038109,PS51736,cd03768, IPR006118,PF13408,G3DSA:3.40.50.1390,PF07508,Coil
MNRAALYIRVSTLEQAQEGYSVGEQKERLIAYCKAKDWIIADIYVDGGYTGSNLNRPGIQKLISETDKFDLVLVYKLDRLSRSQRDTLYLIEEVFRPKGVDFISMQESFDTSTPFGKAMIGLLAVFAQLEREQIKERTWMGRVARAKTGLHHGGGHIPIGYEYEDGHLVINPYEAEQVRKIYEWYLAGDSLKTITDKLQEAGYTNKYSSYNSWTSVRNILGNETYTGRLHFGDVIVDNAHEPIISKEQFDAAQVLRGKRQEQYGGQAFQSKHLLAGLIYCGHCGGRYYLRNTGKYSYYACYSRTKQMKSMVKDPNCMNKIWKGAELEAIVDAQIRELLSSPEMAAEIATSRSKPAPVSKNADIEKRLREIDKQIGKLMELYQHDDIPPELLGERINKLYNERTALESTLAPVVEDEAMPFDLVEALISDAAQVWDFADESQKRRILQSLISRIVLTDDDVKIEWAF

SEQ ID NO: 7668 - protein, 466 aa, Unknown
  Description of Unknown: Integrase B7669 sequence
  PTHR30461:SF3,IPR036162,PS51737,IPR011109,PTHR30461, PS00397,PF00239,G3DSA:1.10.10.2600,IPR006119,SSF53041, SM00857,IPR025827,IPR038109,PS51736,cd03768, IPR006118,PF13408,G3DSA:3.40.50.1390,PF07508,Coil
MNRAALYIRVSTLEQAQEGYSVGEQKERLIAYCKAKDWIIADIYVDGGYTGSNLNRPGIQKLISETDKFDLVLVYKLDRLSRSQRDTLYLIEEVFRPKGVDFISMQESFDTSTPFGKAMIGLLAVFAQLEREQIKERTWMGRVARAKTGLHHGGGHIPIGYEYEDGHLVINPYEAEQVRKIYEWYLAGDSLKTITDKLQEAGYTNKYSSYNSWTSVRNILGNETYTGRLHFGDVIVDNAHEPIISKEQFDAAQVLRGKRQEQYGGQAFQSKHLLAGLIYCGHCGGRYYLRNTGKYSYYACYSRTKQMKSMVKDPNCMNKIWKGAELEAIVDARIRELLSSPEMAAEIATSRSKPAPVSKNADIEKRLREIDKQIGKLMELYQHDDIPPELLGERINKLYNERTALESTLAPVVEDEAMPFDLVEALISDAAQVWDFADESQKRRILQSLVSRIVLTDDDVKIEWAF

SEQ ID NO: 7669 - protein, 466 aa, Unknown
  Description of Unknown: Integrase B7670 sequence
  PTHR30461:SF3,IPR036162,PS51737,IPR011109,PTHR30461, PS00397,PF00239,G3DSA:1.10.10.2600,IPR006119,SSF53041, SM00857,IPR025827,IPR038109,PS51736,cd03768, IPR006118,PF13408,G3DSA:3.40.50.1390,PF07508,Coil
MNRAALYIRVSTLEQAQEGYSVGEQKERLIAYCKAKDWIIADIYVDGGYTGSNLNRPGIQKLISETDKFDLVLVYKLDRLSRSQRDTLYLIEEVFRPKGVDFISMQESFDTSTPFGKAMIGLLAVFAQLEREQIKERTWMGRVARAKTGLHHGGGHIPIGYEYEDGHLVINPYEAEQVRKIYEWYLAGDSLKTITDKLQEVGYTNKYSSYNSWTSVRNILGNETYTGRLHFGDVIVDSAHEPIISKEQFDAAQVLRGKRQEQYGGQAFQSKHLLAGLIYCGHCGGRYYLRNTGKYSYYACYSRTKQMKSMVKDPNCMNKIWKGAELEAIVDAQIRELLSSPEMAAEIATSRSKPAPVSKNADIEKRLREIDKQIGKLMELYQHDDIPPELLGERINKLYNERTALESTLAPVVEDEAMPFDLVEALISDAAQVWDFADESQKRRILQSLVSRIVLTDDDVKIEWAF

SEQ ID NO: 7670 - protein, 466 aa, Unknown
  Description of Unknown: Integrase B7671 sequence
  PTHR30461:SF3,IPR036162,PS51737,IPR011109,PTHR30461, PS00397,PF00239,G3DSA:1.10.10.2600,IPR006119,SSF53041, SM00857,IPR025827,IPR038109,PS51736,cd03768, IPR006118,PF13408,G3DSA:3.40.50.1390,PF07508,Coil
MPQKTLVFGYVRVSTENQLENYSIEEQISRLKSYCAAKDMVLLKIYTDGGYSGGNTDRPALKQMLADIKTVNVDAVLVYKLDRLSRSQKDTLTLIEDEFLAHDVDFISINENFDTSTPFGKAMIGMLSVFAQLEKDQITERFTMGRIGRCKAGYFHGGGNAPYGYTYENGDLVINYTEAENVKKVYSMFLSGKSINAIYREMENINGKGWSARKVSNILSNVIYIGKVKFAKNEYDGNHEPIISADTFEAAQKLLNSPDRENAKTSAQKTPFRANYLLSSLVYCSRCGARYSANHGYYKCYSRSKSSKQFITDPNCKNDNWKIEELDKLVLSEIYNLIKKPQLINKLASKAKQNNTPYDRKKLEKRLRELERQMENLLDLYQLGNIPMELLSTRIHNIDVEKGIIQKQLETSSGNSSTSIEAFKASLASFSELFDISPIETQRLIVSSLIQAVNVDGQQVSVVWRI

SEQ ID NO: 7671 - protein, 466 aa, Unknown
  Description of Unknown: Integrase B7672 sequence
  PTHR30461:SF3,IPR036162,PS51737,IPR011109,PTHR30461, PS00397,PF00239,G3DSA:1.10.10.2600,IPR006119,SSF53041, SM00857,IPR025827,IPR038109,PS51736,cd03768, IPR006118,PF13408,G3DSA:3.40.50.1390,PF07508,Coil
MNRAALYIRVSTLEQAQEGYSVGEQKERLIAYCKAKDWIIADIYVDGGYTGSNLNRPGIQKLISETDKFDLVLVYKLDRLSRSQRDTLYLIEEVFRPKGVDFISMQESFDTSTPFGKAMIGLLAVFAQLEREQIKERTWMGRVARAKTGLHHGGGHIPIGYEYEDGHLVINPYEAEQVRKIYEWYLAGDSLKTITDKLQEAGYTNKYSSYNSWTSVRNILGNETYTGRLHFGDVIVDNAHEPIISKEQFDAAQVLRGKRQEQYGGQAFQSKHLLAGLIYCGHCGGRYYLRNTGKYSYYACYSRTKQMKSMVKDPNCMNKIWKGAELEAIVDARIRELLSSPEMSAEIAASRSKPTPVSKNADIEKRLREIDKQIGKLMELYQHDDIPPELLGERINKLYNERTALESTLAPVVEDEAMPFDLVEALISDAAQVWDFADESQKRRILQSLVSRIVLTDDDVKIEWAF

SEQ ID NO: 7672 - protein, 466 aa, Unknown
  Description of Unknown: Integrase B7673 sequence
  PTHR30461:SF3,IPR036162,PS51737,IPR011109,PTHR30461, PS00397,PF00239,G3DSA:1.10.10.2600,IPR006119,SSF53041, SM00857,IPR025827,IPR038109,PS51736,cd03768, IPR006118,PF13408,G3DSA:3.40.50.1390,PF07508
MMKGACYVRVSTENQLENYSIEEQTERLTAYCKAKDITIVKFYTDGGYSGGNVNRPGLQQMLGDIAAGIIDTVIVYKLDRLSRSQKDTLMLIEDKFLANHVDFVSINENFDTSTPFGRAMIGILSVFAQLEKDQITERFTMGRVGRARNGYFHGGAYAPTGYDYADGNLVVNEYEALQVRELYERFASGHTLHSCWIYMQDKYTTKYGGWKSETLVRNVLKNEVYLGKVKFKGKLYSGNHTPIISQDLYDRVQQMFLNSSKSDAAQTGRTYTRSPFKAKTLLSNLIYCQKCGARFHGEHGNYSCYSRTKGDKRYVIDPDCKNKKWKIEELDALVIHYITNLDFNELQPEPDALQEQQPLKPDYNARITEIDKQVEKLIELYQIGGIPINVISERIQSLAKEKNTLTEILEAPQPEALTLQDLRAAKDRFVNLLESGDLQEKRYCLTILIDKILIDDDAINIILRKI

SEQ ID NO: 7673 - protein, 465 aa, Unknown
  Description of Unknown: Integrase B7674 sequence
  PTHR30461:SF3,SM00857,G3DSA:1.10.10.2600,IPR036162,PF13408, PS51737,G3DSA:3.40.50.1390,IPR025827,IPR006119,IPR038109, PF07508,IPR011109,SSF53041,PTHR30461,PS51736, cd00338,PF00239
MKGNAGDTIVKKIDLSPELVRVALYIRVSGEEQKIKGLSLEAQQERLEAYARERGWVIVGIYIDAAKTARKNIHKRTDFQRMMDSVKRDEVDILLFCRLDRWFRSVADYYKIMEVLEAHNCDWKTTDEEYDTTTANGRLYINVKLSIAQNEADIDGERIDVVFDSKIAHGTVVSGSAPFGFRVNEEKRLEVVPEDAAIVQDAFNYFETSISQRATVRYIRETYGVNWCDATFRRMLKEKLYTGVYDRGGRFNDHFCPAIISKQQFDRVQALLERNARSVPSGKVYIFTSILTCAECGHKLVGYKSSDYYYYRCNQHFQRGRCSHNHSAREDVVEKWLFEHLVEELERCQLEWEVAAAKKKASVARTDKAALKRKLTKLKELYVNDLIDIEDYKRDYQIYTAALKQIPEPSIEPPPDFAAVRRLLDNDFKTIYENLTREEKRTLWRSVIKEIRIDNDQNITGVVFG

SEQ ID NO: 7674 - protein, 465 aa, Unknown
  Description of Unknown: Integrase B7675 sequence
  PTHR30461:SF3,IPR036162,PS51737,IPR011109,PTHR30461, PS00397,PF00239,G3DSA:1.10.10.2600,IPR006119,SSF53041, SM00857,IPR025827,IPR038109,PS51736,cd03768, IPR006118,PF13408,G3DSA:3.40.50.1390,PF07508
MIKGACYVRVSTENQLENYSIEEQTERLTAYCKAKDITIVKFYTDGGYSGGNVNRPGLQQMLGDIAAGIIDTVIVYKLDRLSRSQKDTLMLIEDKFLANHVDFVSINENFDTSTPFGRAMIGILSVFAQLEKDQITERFTMGRVGRARNGYFHGGAYAPTGYDYADGNLVVNEYEALQVRELYERFASGHTLHSCWIYMQDKYTTKYGGWKSETLVRNVLKNEVYLGKVKFKGKLYSGNHTPIISQDLYDRVQQMFLNSSKSDAAIGRTYTRSPFKAKTLLSNLIYCQKCGARFHGEHGNYSCYSRTKGDKRYVIDPDCKNKKWKIEELDALVIHYITNLDFNELQPEPDALQEHQPLKPDYKARITEIDKQVEKLIELYQIGGIPINVISERIQSLAKEKNTLTEILEAPQPEALTLQDLRAAKDRFVNLLESGDLQEKRYCLTILIDKILIDDDAINIILRKI

SEQ ID NO: 7675 - protein, 465 aa, Unknown
  Description of Unknown: Integrase B7676 sequence
  PTHR30461:SF3,SM00857,G3DSA:1.10.10.2600,IPR036162,PF13408, PS51737,IPR025827,G3DSA:3.40.50.1390,IPR006119,IPR038109, PF07508,IPR011109,SSF53041,PTHR30461,PS51736, cd00338,PF00239
MKGNAGDTIVKKIDLSPELVRVALYIRVSGEEQKIKGLSLEAQQERLEAYARERGWVIVGIYIDAAKTARKNIHKRTDFQRMMDSVKRDEVDILLFCRLDRWFRSVADYYKIMEVLEAHNCDWKTTDEEYDTTTANGRLYINVKLSIAQNEADIDGERIDVVFDSKIAHGTVVSGSAPFGFRVNEGKRLEVVPEDAAIVQDAFNYFETSISQRATVRYIRETYGVNWCDATFRRMLKEKLYTGVYDRGGRFNDHFCPAIISKQQFDRVQALLERNARSVPSGKVYIFTSILTCAECGHKLVGYKSSDYYYYRCNQHFQRGRCSHNHSAREDVVEKWLFEHLAEELERCQLEWEVAAAKKKASVARTDKAALKRKLTKLKELYVNDLIDIEDYKRDYQIYTAALKQIPEPSIEPPPDFAAVRRLLDNDFKTIYENLTREEKRTLWRSVIKEIRIDNDQNITGVVFG

SEQ ID NO: 7676 - protein, 465 aa, Unknown
  Description of Unknown: Integrase B7677 sequence
  PTHR30461:SF3,SM00857,G3DSA:1.10.10.2600,IPR036162,PF13408, IPR025827,G3DSA:3.40.50.1390,PS51737,IPR006119,IPR038109, PF07508,SSF53041,IPR011109,PTHR30461,Coil, PS51736,cd00338,PF00239
MKRAKAYMRMSTDKQEHSIESQWRLIKEFADRNGYTIVGKYEDEGISGRAAEKRPAFMQMIDDSDSGDFDTVLIYDSSRFARNLKDAIVYKSILKQNGVDLISITEPILDDDNALITDALLGAMNEMYSRKLSKNVRRGQEQKILRGEVFTKPPFGYIRPAPGATFEIVPDEAKIVEYIFDQYRDGKTAFRLAVELSGAGVMTRRGNPFDSRQVEYILTNVIYKGYMRVKSNGTEYCIKADHPAIIPEDVFDRTQELYADRKSKLGKKQMPREMHRHWLSGKIRCGVCGGAYSYNRSYGGRKDNFRCTNRMKGKCMQSPCIRVPILENLFLQALHDTIKNPELFDAFLIPSECPVTRDYDADIRRLTLSLKRAKDAYLSGIDSLEEYKTNKKHFESEIAKTKEEKEKSSLPPKPDFDRLRERLLSAYHLLTSDADLEAKQACMENLVSKIIINGPDKSITPCFYY

SEQ ID NO: 7677 - protein, 465 aa, Unknown
  Description of Unknown: Integrase B7678 sequence
  PTHR30461:SF3,SM00857,G3DSA:1.10.10.2600,IPR036162,PF13408, PS51737,IPR025827,G3DSA:3.40.50.1390,IPR006119,IPR038109, PF07508,IPR011109,SSF53041,PTHR30461,PS51736, cd00338,PF00239
MKGNAGDTIVKKIDLSPELVRVALYIRVSGEEQKIKGLSLEAQQERLEAYARERGWVIVGIYIDAAKTARKNIHKRTDFQRMMDSVKRDEVDILLFCRLDRWFRSVADYYKIMEVLEAHNCDWKTTDEEYDTTTANGRLYINVKLSIAQNEADIDGERIDVVFDSKIAHGTVVSGSAPFGFRVNEEKRLEVVPEDAAIVQDAFNYFETSISQRATVRYIRETYGVNWCDATFRRMLKEKLYTGVYDRGGRFNDHFCPAIISKQQFDRVQALLERNARSVPSGKVYIFTSILTCAECGHKLVGYKSSDYYYYRCNQHFQRGRCSHNHSAREDVVEKWLFEHLAEELERCQLEWEVAAAKKKASVARTDKAALKRKLTKLKELYVNDLIDIEDYKRDYQIYTAALKQIPEPSIEPPPDFAAVRRLLDNDFKTIYENLTREEKRTLWRSVIKEIRIDNDQNITGVVFG

SEQ ID NO: 7678 - protein, 465 aa, Unknown
  Description of Unknown: Integrase B7679 sequence
  PTHR30461:SF3,SM00857,G3DSA:1.10.10.2600,IPR036162,PF13408, PS51737,G3DSA:3.40.50.1390,IPR025827,IPR006119,IPR038109, PF07508,IPR011109,SSF53041,PTHR30461,PS51736, cd00338,PF00239
MKGNAGDTIVKKIDLSPELVRVALYIRVSGEEQKIKGLSLEAQQERLEAYARERGWVIVGIYIDAAKTARKNIHKRTEFQRMMDSVKRDEVDILLFARLDRWFRSVADYYKVMEILQAHNCDWKTTDEEYDTTTANGRLYINVKLSIAQNEADIDGERIDVVFDSKIAHGTVVSGSAPFGFRVNEEKRLEVVPEDAAIVQDAFNYFESTVSQRATVRYVRETYGVNWCDATFRRMLKEKLYTGVYDRGGRYNDQFCPAIINRQQFDRVQALLTRNVRSAPSGKVYIFTSILTCAECGHKLVGYKSSDYFYYRCNQHFQRGRCSHNHSAREDVVEQWLFEHLGEELERCQLEWDVEATKKKASVARTDKAALKRKLTKLKELYVNDLIDIEDYKKDYQIYVSALNQIPEPAQEAPPDFAAVRRLLDNSFRTIYDTLTREEKRTLWRSVIKEIRIDNDQNITGVVFG

SEQ ID NO: 7679 - protein, 465 aa, Unknown
  Description of Unknown: Integrase B7680 sequence
  PTHR30461:SF3,SM00857,G3DSA:1.10.10.2600,IPR036162,PF13408, PS51737,G3DSA:3.40.50.1390,IPR025827,IPR006119,IPR038109, PF07508,IPR011109,SSF53041,PTHR30461,PS51736, cd00338,PF00239
MKGNAGDTIVKKIDLSPELVRVALYIRVSGEEQKIKGLSLEAQQERLEAYARERGWVIVGIYIDAAKTARKNIHKRTDFQRMMDSVKRDEVNILLFCRLDRWFRSVADYYKIMEVLEAHNCDWKTTDEEYDTTTANGRLYINVKLSIAQNEADIDGERIDVVFDSKIAHGTVVSGSAPFGFRVNEEKRLEVVPEDAAIVQDAFNYFETSISQRATVRYIRETYGVNWCDATFRRMLKEKLYTGVYDRGGRFNDHFCPAIISKQQFDRVQALLERNARSVPSGKVYIFTSILTCAECGHKLVGYKSSDYYYYRCNQHFQRGRCSHNHSAREDVVEKWLFEHLAEELERCQLEWEVAAAKKKASVARTDKAALKRKLTKLKELYVNDLIDIEDYKRDYQIYTAALKQIPEPSIEPPPDFAAVRRLLDNDFKTIYENLTREEKRTLWRSVIKEIRIDNDQNITGVVFG

SEQ ID NO: 7680 - protein, 465 aa, Unknown
  Description of Unknown: Integrase B7681 sequence
  PTHR30461:SF3,SM00857,IPR006118,IPR036162,PF13408, PS51737,G3DSA:3.40.50.1390,Coil,IPR025827,IPR006119, IPR011109,SSF53041,PTHR30461,PS00397,PS51736, cd00338,PF00239
MPEKILRCAIYIRVSTFEQSVHGKSLQAQKECLEQYATDNNMSIVGVYADEGKTARKELKKRKAIHALVEDVKRDKIDVIIFWRLDRWFRNLSDFYKVQDVLDEHGVRWISVSEPGINMETRDGRLQLNVVLSIGQNEVDTTSERIKFVNEASIRQRKLIFGDANMPFGYKTGVVDGKKCMVKDPETEHMVEDFFNYFRIHNSKKGAVRYMQEVYGIDFSYGMLRTMLSSEFYKGTYRGYPYCPAYLSEKEWNEMQTISKRNIKSTPSGRVYLFTGLMRCPVCGQKLVGTGCSSIINRKTGEKRTYCYYRCNRALKDHICTYRHRVSQNLIEKYLLENLEREYEKYKVRTNQISEELKKQKKAKDPKKLRKEMERLNLLFQKGRISFEYYDTEYNRLEEEYVHSSNPCQQKEEARNTRYIEELLQTDFRQMYNSLSLENRRSFWRSTIQEIYLNDDNTIKAVDFL

SEQ ID NO: 7681 - protein, 465 aa, Unknown
  Description of Unknown: Integrase B7682 sequence
  PTHR30461:SF3,SM00857,G3DSA:1.10.10.2600,IPR036162,PF13408, PS51737,IPR025827,G3DSA:3.40.50.1390,IPR006119,IPR038109, PF07508,IPR011109,SSF53041,PTHR30461,PS51736, cd00338,PF00239
MKGNAGDTIVKKIDLSPELVRVALYIRVSGEEQKIKGLSLEAQQERLEAYARERGWVIVGIYIDAAKTARKNIHKRTDFQRMMDSVKRDEVDILLFCRLDRWFRSVADYYKIMEVLEAHNCDWKTTDEEYDTTTANGRLYINVKLSIAQNEADIDGERIDVVFDSKIAHGTVVSGSAPFGFRVNEGKRLEVVPEDAAIVQDAFNYFETSISQRATVRYIRETYGVNWCDATFRRMLKEKLYTGVYDRGGRFNDHFCPAIISKQQFDRVQALLERNARSVPSGKVYIFTSILTCAECGHKLVGYKSSDYYYYRCNQHFQRGRCSHNHSAREDVVEKWLFEHLAEELECCQLEWEVAAAKKKASVARTDKAALKRKLTKLKELYVNDLIDIEDYKRDYQIYTAALKQIPEPSIEPPPDFAAVRRLLDNDFKTIYENLTREEKRTLWRSVIKEIRIDNDQNITGVVFG

SEQ ID NO: 7682 - protein, 465 aa, Unknown
  Description of Unknown: Integrase B7683 sequence
  PTHR30461:SF3,SM00857,G3DSA:1.10.10.2600,IPR036162,PF13408, PS51737,IPR025827,G3DSA:3.40.50.1390,IPR006119,IPR038109, PF07508,IPR011109,SSF53041,PTHR30461,PS51736, cd00338,PF00239
MKGNAGDTIVKKIDLSPELVRVALYIRVSGEEQKIKGLSLEAQQERLEAYARERGWVIVGIYIDAAKTARKNIHKRTDFQRMMDSVKRDEVDILLFCRLDRWFRSVADYYKIMEVLEAHNCDWKTTDEEYDTTTANGRLYINVKLSIAQNEADIDGERIDVVFDSKIAHGTVVSGSAPFGFRVNEEKRLEVVPEDAAIVQDAFNYFETSISQRATVRYIRETYGVNWCDATFRRMLKEKLYTGVYDRGGRFNDHFCPAIISKQQFDRVQALLERNARSAPSGKVYIFTSILTCAECGHKLVGYKSSDYYYYRCNQHFQRGRCSHNHSAREDVVEKWLFEHLAEELERCQLEWEVAAAKKKASVARTDKAALKRKLTKLKELYVNDLIDIEDYKRDYQIYTAALKQIPEPSIEPPPDFAAVRRLLDNDFKTIYENLTREEKRTLWRSVIKEIRIDNNQNITGVVFG

SEQ ID NO: 7683 - protein, 465 aa, Unknown
  Description of Unknown: Integrase B7684 sequence
  PTHR30461:SF3,SM00857,G3DSA:1.10.10.2600,IPR036162,PF13408, PS51737,G3DSA:3.40.50.1390,IPR025827,IPR006119,IPR038109, PF07508,SSF53041,IPR011109,PTHR30461,Coil, PS51736,cd00338,PF00239
MTNYRKLRVATYTRVSTLEQAEEGYSIQEQQDKLEKYCELKDWTITHRYSDPGFSGSNIKRPGIRELIAAAKQGDFDLVLVYKLDRLSRSQKDTLYLIEDVFQANQVDFVSLSENFDTSTPFGKAMIGILSVFAQLEREQIKERMTMGKIGRAKSGKAMGWSNVPFGYNLVGDVYEVDEFQATIVKRIFSEYLSGDSPITIAKRLNDEGHLGKGTRWSWKTVRDILMNIVYTGYISFKGELYPGMHKPIIDMETYKNAQTQLEIRRVNADNPRPFRAKYMLSGLLKCYYCGSTLRIGVSINQRTKARSYRYNCPSSHPRKKSTYKQKATCPSKLVRKGEIEKQVIEEIEKLPKNFKHKKAPTVDVDAVKKQIKAIKSKQSKLMDLYLIDGIDMEELNRRNGEFNKQIEALNKNLSAVPTEPDVAEALSQAKNISELSYDEQKKLVRLLISEIEVANDSIKIHWRF

SEQ ID NO: 7684 - protein, 465 aa, Unknown
  Description of Unknown: Integrase B7685 sequence
  PTHR30461:SF3,SM00857,G3DSA:1.10.10.2600,IPR036162,PF13408, PS51737,IPR025827,G3DSA:3.40.50.1390,IPR006119,IPR038109, PF07508,IPR011109,SSF53041,PTHR30461,PS51736, cd00338,PF00239
MKGNAGDTIVKKIDLSPELVRVALYIRVSGEEQKIKGLSLEAQQERLEAYARERGWVIVGIYIDAAKTARKNIHKRTDFQRMMDSVKRDEVNILLFCRLDRWFRSVADYYKIMEVLEAHNCGWKTTDEEYDTTTANGRLYINVKLSIAQNEADIDGERIDVVFDSKIAHGTVVSGSAPFGFRVNEEKRLEVVPEDAAIVQDAFNYFETSISQRATVRYIRETYGVNWCDATFRRMLKEKLYTGVYDRGGRFNDHFCPAIISKQQFDRVQALLERNARSVPSGKVYIFTSILTCAECGHKLVGYKSSDYYYYRCNQHFQRGRCSHNHSAREDVVEKWLFEHLAEELERCQLEWEVAAAKKKASVARTDKAALKRKLTKLKELYVNDLIDIEDYKRDYQIYTAALKQIPEPSIEPPPDFAAVRRLLDNSFRTIYDTLTREEKRTLWRSVIKEIRIDNDQNITGVVFG

SEQ ID NO: 7685 - protein, 465 aa, Unknown
  Description of Unknown: Integrase B7686 sequence
  PTHR30461:SF3,IPR036162,PS51737,IPR011109,PTHR30461, PS00397,PF00239,G3DSA:1.10.10.2600,IPR006119,SSF53041, cd00338,SM00857,IPR025827,IPR038109,PS51736, IPR006118,PF13408,G3DSA:3.40.50.1390,Coil
MKGNYIETVAAYVRVSTQEQKLHGLSLDAQKMKLQEYADNHNMHIVEWYLDEGVSGRKLIKKRPALQQMINDAEQGKFTRIIFIKLDRFFRSVAEYHECMKRISPVVWTTTEEQYDLSTANGRMLVNMKLTIAELEADQTGERITLVNEYKRSTGQPLTGSMPLGYMIETDPATGRKKIVKNPDEAPIVEDLLQYTFTHQSKRKTLKYLKDKYNLGISYNTLSLLLKNTFLYGEYRGNTAYTEGYITKEQFLKLQDITRRNVKSNSDNEPYIFSGLIKCPYCGRRLAGRRATVKNPNGNIFKYKTYGCANNRSNFRCSFNKSIYESTLERLILDNIEQYFEELKVKNAEIQDSKTVKTQGESIDDINNQIDRLNYSWQTGKIRKVEQYEQQYNKLIERLKEAEKGQQEVVTRDYSKIDSILQSGWKGIYQALDAEHKRAFWRSFIQSIEVTWTTEIKRIDKVNFF

SEQ ID NO: 7686 - protein, 465 aa, Unknown
  Description of Unknown: Integrase B7687 sequence
  PTHR30461:SF3,SM00857,G3DSA:1.10.10.2600,IPR036162,PF13408, PS51737,G3DSA:3.40.50.1390,IPR025827,IPR006119,IPR038109, PF07508,IPR011109,SSF53041,PTHR30461,Coil, PS51736,cd00338,PF00239
MTSYRKLRVATYTRVSTLEQAEEGYSIQEQQDKLEKYCELKDWTITHRYSDPGFSGSNIKRPGIRELIAAAKQGDFDLVLVYKLDRLSRSQKDTLYLIEDVFQANQVDFVSLSENFDTSTPFGKAMIGILSVFAQLEREQIKERMTMGKIGRAKSGKAMGWSNVPFGYNLAGDVYEVDEFQATIVKRIFAEYLSGDSPVTIAKRLNDEGHLGKGTRWSWKTVRDILMNVVYTGYISFKGELYPGMHKPIIDMETYKNAQTQLEIRRVNADNPRPFRAKYMLSGLLKCHYCGSTLVIGVSINQRTKARSYRYNCPSSHPRKNSTYKQKASCPSKFIYKETVEKQVIEEIEKLPKNFKHKKAPTVDVDAVKKQIKTIKSKQSKLMDLYLIDGIDMEELNRRNDEFNKQIEALNKNLSTVPTEPDVTEALNQAKNISELSYDEQKKLVRLLISEIEVANDSIKIHWRF

SEQ ID NO: 7687 - protein, 465 aa, Unknown
  Description of Unknown: Integrase B7688 sequence
  PTHR30461:SF3,SM00857,G3DSA:1.10.10.2600,IPR036162,PF13408, PS51737,G3DSA:3.40.50.1390,IPR025827,IPR006119,IPR038109, PF07508,IPR011109,SSF53041,PTHR30461,PS51736, cd00338,PF00239
MKGNAGDTIVKKIDLSPELVRVALYIRVSGEEQKIKGLSLEAQQERLEAYARERGWVIVGIYIDAAKTARKNIHKRTDFQRMMDSVKRDEVNILLFCRLDRWFRSVADYYKIMEVLEAHNCDWKTTDEEYDTTTANGRLYINVKLSIAQNEADIDGERIDVVFDSKIAHGTVVSGSAPFGFRVNEEKRLEVVPEDAAIVQDAFNYFETSISQRATVRYIRETYGVNWCDATFRRMLKEKLYTGVYDRGGRFNDHFCPAIISKQQFDRVQALLERNARSVPSGKVYIFTSILTCAECGHKLVGYKSSDYYYYRCNQHFQRGRCSHNHSAREDVVEKWLFEHLAEELERCQLEWEVAAAKKKASVARTDKAALKRKLTKLKELYVNDLIDIEDYKRDYQIYTAALKQIPEPSIEPPPDFAAVRRLLDNDFKTIYENLTREEKRTLWRSAIKEIRIDNDQNITGVVFG

SEQ ID NO: 7688 - protein, 465 aa, Unknown
  Description of Unknown: Integrase B7689 sequence
  PTHR30461:SF3,SM00857,IPR006118,IPR036162,PF13408, PS51737,G3DSA:3.40.50.1390,IPR025827,PS00397,IPR006119, IPR011109,SSF53041,PTHR30461,Coil,PS51736, cd00338,PF00239
MPEKILRCAIYIRVSTFEQSVHGKSLQAQKEYLEHYAKEHNLSVVGVYADEGKTARKELKKRKAIHALIEDVKQEKIDVILFWRLDRWFRSLADFYKVQDVLDEYGVRWISASEPGINMETRDGRLQLNVVLSFGQNEVDTTSERIKFVNEASIKNGRLIFGEANMPFGYKSGVVDGKKCMIKDPETERMVIDFFRHYKKHQGKQDALKYMQRTYGIYFSYGMLKTMLSSEFYKGTYRGYPYCPAYLTEKEWNEIQEISVRNVKRAPSGRVYLFTSLMRCPSCGQKLVGTGCSSISNRKTGKKRTYCYYRCNKALADHLCPNRHRVSQNLIEQYLLENLSSEYEKYKIRSNKINEEKKKVRKAKNPAQLSKEMERLNLLFQKGRISFDYYDEEYQRLEEELAFAASDPSLEEPKRNYSELEKLLRTDFKEMYDSLSLENRRAFWRSIIKQIHLNDDCTIKEVDFL

SEQ ID NO: 7689 - protein, 465 aa, Unknown
  Description of Unknown: Integrase B7690 sequence
  PTHR30461:SF3,SM00857,G3DSA:1.10.10.2600,IPR036162,PF13408, PS51737,IPR025827,G3DSA:3.40.50.1390,IPR006119,IPR038109, PF07508,IPR011109,SSF53041,PTHR30461,PS51736, cd00338,PF00239
MKGNAGDTIVKKIDLSPELVRVALYIRVSGEEQKIKGLSLEAQQERLEAYARERGWVIVGIYIDAAKTARKNIHKRTDFQRMMDSVKRDEVDILLFCRLDRWFRSVADYYKIMEVLEAHNCDWKTTDEEYDTTTANGRLYINVKLSIAQNEADIDGERIDVVFDSKIAHGTVVSGSAPFGFRVNEGKRLEVVPEDAAIVQDAFNYFETSISQRATVRYIRETYGVNWCDATFRRMLKEKLYTGVYDRGGRFNDHFCPAIISKQQFDRVQALLERNARSVPSGKVYIFTSILTCAECGHKLVGYKSSDYYYYRCNQHFQRGRCSHNHSAREDVVEKWLFEHLTEELERCQLEWEVAAAKKKASVARTDKAALKRKLTKLKELYVNDLIDIEDYKRDYQIYTAALKQIPEPSIEPPPDFAAVRRLLDNDFKTIYENLTREEKRTLWRSVIKEIRIDNDQNITGVVFG

SEQ ID NO: 7690 - protein, 465 aa, Unknown
  Description of Unknown: Integrase B7691 sequence
  PTHR30461:SF3,SM00857,G3DSA:1.10.10.2600,IPR036162,PF13408, IPR025827,G3DSA:3.40.50.1390,PS51737,IPR006119,IPR038109, PF07508,IPR011109,SSF53041,PTHR30461,PS51736, cd00338,PF00239
MKGNAGDTIVKKIDLSPELVRVALYIRVSGEEQKIKGLSLEAQQERLEAYARERGWVIVGIYIDAAKTARKNIHKRTDFQRMMDSVKRDEVDILLFCRLDRWFRSVADYYKIMEVLEAHNCDWKTTDEEYDTTTANGRLYINVKLSIAQNEADIDGERIDVVFDSKIAHGTVVSGSAPFGFRVNEEKRLEVVPEDAAIVQDAFNYFETSISQRATVRYIRETYGVNWCDATFRRMLKEKLYTGVYDRGGRYNDQFCPAIISRQQFDRVQALLTRNVRSAPSGKVYIFTSILTCAECGHKLVGYKSSDYYYYRCNQHFQRGRCSHNHSAREDVVEKWLFEHLVEELERCQLEWEVAAAKKKASVARTDKAALKRKLTKLKELYVNDLIDIEDYKRDYQIYTAALKQIPEPSIEPSPDFAAVRRLLDNDFKTIYENLTREEKRTLWRSVIKEIRIDNDQNITGVVFG

SEQ ID NO: 7691 - protein, 465 aa, Unknown
  Description of Unknown: Integrase B7692 sequence
  PTHR30461:SF3,SM00857,G3DSA:1.10.10.2600,IPR036162,PF13408, IPR025827,G3DSA:3.40.50.1390,PS51737,IPR006119,IPR038109, PF07508,SSF53041,IPR011109,PTHR30461,PS51736, cd00338,PF00239
MKGNAGDTIVKKIDLSPELVRVALYIRVSGEEQKIKGLSLEAQQERLEAYARERGWVIVGIYIDAAKTARKNIHKRTDFQRMMDSVKRDEVDILLFCRLDRWFRSVADYYKIMEVLEAHNCDWKTTDEEYDTTTANGRLYINVKLSIAQNEADIDGERIDVVFDSKIAHGTVVSGSAPFGFRVNEEKQLEVVPEDAAIVQDAFNYFETSISQRATVRYIRETYGVNWCDATFRRMLKEKLYTGVYDRGGRFNDHFCPAIISKQQFDRVQALLERNARSVPSGKVYIFTSILTCAECGHKLVGYKSSDYYYYRCNQHFQRGRCSHNHSAREDVVEKWLFEHLAEELERCQLEWEVAAAKKKASIARTDKAALKRKLTKLKELYVNDLIDIEDYKRDYQIYTAALKQIPEPSIEPPPDFAAVRRLLDNDFKTIYENLTREEKRTLWRSVIKEIRIDNDQNITGVVFG

SEQ ID NO: 7692 - protein, 465 aa, Unknown
  Description of Unknown: Integrase B7693 sequence
  PTHR30461:SF3,SM00857,G3DSA:1.10.10.2600,IPR036162,PF13408, IPR025827,PS51737,G3DSA:3.40.50.1390,IPR006119,IPR038109, PF07508,IPR011109,SSF53041,PF00239,PTHR30461, PS51736,Coil,cd00338
MKGNAGDTIVKKIVLSPELVRVALYIRVSGEEQKIKGLSLEAQQERLEAYARERGWVIVGIYIDAAKTARKNIHKRTEFQRMMDSVKRDEVDILLFARLDRWFRSVADYYKVMEILQAHNCDWKTTDEEYDTTTANGRLYINVKLSIAQNEADIDGERIDVVFDSKIAHGTVVSGSAPFGFRVNEEKRLEVVPEDAAIVQDAFNYFENTVSQRATVRYVRETYGVNWCDATFRRMLKEKLYTGVYDRGGRYNDQFCPAIIDRQQFDRVQALLTRNVRSAPSGKVYIFTSILTCAECGHKLVGYKSSDYFYYRCNQHFQRGRCSHNHSAREDVVEQWLFEHLGEELERCQLEWDVEAAKKKASVARTDKAALKRKLTKLKELYVNDLIDIEDYKKDYQIYVSALNQIPEPAQEAPPDFAAVRRLLDNSFRTIYDTLTREEKRTLWRSVIKEIRIDNDQNITGVVFG

SEQ ID NO: 7693 - protein, 465 aa, Unknown
  Description of Unknown: Integrase B7694 sequence
  PTHR30461:SF3,SM00857,G3DSA:1.10.10.2600,IPR036162,PF13408, PS51737,IPR025827,G3DSA:3.40.50.1390,IPR006119,IPR038109, PF07508,IPR011109,SSF53041,PTHR30461,PS51736, cd00338,PF00239
MKGNAGDTIVKKIDLSPELVRVALYIRVSGEEQKIKGLSLEAQQERLEAYARERGWVIVGIYIDAAKTARKNIHKRTDFQRMMDSVERDEVDILLFCRLDRWFRSVADYYKIMEVLEAHNCDWKTTDEEYDTTTANGRLYINVKLSIAQNEADIDGERIDVVFDSKIAHGTVVSGSAPFGFRVNEEKRLEVVPEDAAIVQDAFNYFETSISQRATVRYIRETYGVNWCDATFRRMLKEKLYTGVYDRGGRFNDHFCPAIISKQQFDRVQALLERNARSVPSGKVYIFTSILTCAECGHKLVGYKSSDYYYYRCNQHFQRGRCSHNHSAREDVVEKWLFEHLAEELERCQLEWEVAAAKKKASIARTDKAALKRKLTKLKELYVNDLIDIEDYKRDYQIYTAALKQIPEPSIEPPPDFAAVRRLLDNDFKTIYENLTREEKRTLWRSVIKEIRIDNDQNITGVVFG

SEQ ID NO: 7694 - protein, 465 aa, Unknown
  Description of Unknown: Integrase B7695 sequence
  PTHR30461:SF3,SM00857,G3DSA:1.10.10.2600,IPR036162,PF13408, PS51737,IPR025827,G3DSA:3.40.50.1390,IPR006119,IPR038109, PF07508,IPR011109,SSF53041,PTHR30461,PS51736, cd00338,PF00239
MKGNAGDTIVKKIDLSPELVRVALYIRVSGEEQKIKGLSLEAQQERLEAYARERGWVIVGIYIDAAKTARKNIHKRTDFQRMMDSVKRDEVDILLFCRLDRWFRSVADYYKIMEVLEAHNCDWKTTDEEYDTTTANGRLYINVKLSIAQNEADIDGERIDVVFDSKIAHGTVVSGSAPFGFRVNEEKRLEVVPEDAAIVQDAFNYFETSISQRATVRYIRETYGVNWCDATFRRMLKEKLYTGVYDRGGRFNDHFCPAIISKQQFDRVQALLERNARSVPSGKVYIFTSILTCAECGHKLVGYKSSDYYYYRCNQHFQRGRCSHNHSAREDVVEKWLFEHLAEELERCQLEWEVAAAKKKASVARTDKAALKRKLTKLKELYVNDLIDIEDYKRDYQIYTAALKQIPEPSIEPPPDFAAVRKLLDNDFKTIYENLTREEKRTLWRSVIKEIRIDNDQNITGVVFG

SEQ ID NO: 7695 - protein, 465 aa, Unknown
  Description of Unknown: Integrase B7696 sequence
  PTHR30461:SF3,SM00857,G3DSA:1.10.10.2600,IPR036162,PF13408, IPR025827,G3DSA:3.40.50.1390,PS51737,IPR006119,IPR038109, PF07508,IPR011109,SSF53041,PTHR30461,PS51736, cd00338,PF00239
MKGNAGDTIVKKIDLSPELVRVALYIRVSGEEQKIKGLSLEAQQERLEAYARERGWVIVGIYIDAAKTARKNIHKRTDFQRMMDSVKRDEVDILLFCRLDRWFRSVADYYKIMEVLEAHNCDWKTTDEEYDTTTANGRLYINVKLSIAQNEADIDGERIDVVFDSKIAHGTVVSGSAPFGFRVNEGKRLEVVPEDAAIVQDAFNYFETSISQRATVRYIREAYGVNWCDATFRRMLKEKLYTGVYDRGGRFNDHFCPAIISKQQFDRVQALLERNARSVPSGKVYIFTSILTCAECGHKLVGYKSSDYYYYRCNQHFQRGRCSHNHSAREDVVEKWLFEHLAEELERCQLEWEVAAAKKKASVARTDKAALKRKLTKLKELYVNDLIDIEDYKRDYQIYTAALKQIPEPSIEPPPDFAAVRRLLDNDFKTIYENLTREEKRTLWRSVIKEIRIDNDQNITGVVFG

SEQ ID NO: 7696 - protein, 465 aa, Unknown
  Description of Unknown: Integrase B7697 sequence
  PTHR30461:SF3,SM00857,G3DSA:1.10.10.2600,IPR036162,PF13408, PS51737,G3DSA:3.40.50.1390,IPR025827,IPR006119,IPR038109, PF07508,IPR011109,SSF53041,PTHR30461,Coil, PS51736,cd00338,PF00239
MKGNAGDTIVKKIDLSPELVRVALYIRVSGEEQKIKGLSLEAQQERLEAYARERGWVIVGIYIDAAKTARKNIHKRTDFQRMMDSVKRDEVNILLFCRLDRWFRSVADYYKIMEVLEAHNCDWKTTDEEYDTTTANGRLYINVKLSIAQNEADIDGERIDVVFDSKIAHGTVVSGSAPFGFRVNEEKRLEVVPEDAAIVQDAFNYFETSISQRATVRYIRETYGVNWCDATFRRMLKEKLYTGVYDRGGRFNDHFCPAIISKQQFDRVQALLERNARSVPSGKVYIFTSILTCAECGHKLVGYKSSDYYYYRCNQHFQRGRCSHNHSAREDVVEKWLFEHLAEELERCQLEWEVAAAKKKASVARTDKAALKRKLAKLKELYVNDLIDIEDYKRDYQIYTAALKQIPEPSIEPPPDFAAVRRLLDNDFKTIYENLTREEKRTLWRSAIKEIRIDNDQNITGVVFG

SEQ ID NO: 7697 - protein, 465 aa, Unknown
  Description of Unknown: Integrase B7698 sequence
  PTHR30461:SF3,SM00857,G3DSA:1.10.10.2600,IPR036162,PF13408, PS51737,IPR025827,G3DSA:3.40.50.1390,IPR006119,IPR038109, PF07508,IPR011109,SSF53041,PTHR30461,PS51736, cd00338,PF00239
MKGNAGGTIVKKIDLSPELVRVALYIRVSGEEQKIKGLSLEAQQERLEAYARERGWVIVGIYIDAAKTARKNIHKRTDFQRMMDSVKRDEVDILLFCRLDRWFRSVADYYKIMEVLEAHNCDWKTTDEEYDTTTANGRLYINVKLSIAQNEADIDGERIDVVFDSKIAHGTVVSGSAPFGFRVNEGKRLEVVPEDAAIVQDAFNYFETSISQRATVRYIRETYGVNWCDATFRRMLKEKLYTGVYDRGGRFNDHFCPAIISKQQFDRVQALLERNARSVPSGKVYIFTSILTCAECGHKLVGYKSSDYYYYRCNQHFQRGRCSHNHSAREDVVEKWLFEHLAEELERCQLEWEVAAAKKKASVARTDKAALKRKLTKLKELYVNDLIDIEDYKRDYQIYTAALKQIPEPSIEPPPDFAAVRRLLDNDFKTIYENLTREEKRTLWRSVIKEIRIDNDQNITGVVFG

SEQ ID NO: 7698 - protein, 465 aa, Unknown
  Description of Unknown: Integrase B7699 sequence
  PTHR30461:SF3,SM00857,G3DSA:1.10.10.2600,IPR036162,PF13408, IPR025827,G3DSA:3.40.50.1390,PS51737,IPR006119,IPR038109, PF07508,SSF53041,IPR011109,PTHR30461,PS51736, cd00338,PF00239
MKGNAGDTIVKKIDLSPELVRVALYIRVSGEEQKIKGLSLEAQQERLEAYARERGWVIVGIYIDAAKTARKNIHKRTDFQRMMDSVKRDEVDILLFCRLDRWFRSVADYYKIMEVLEAHNCDWKTTDEEYDTTTANGRLYINVKLSIAQNEADIDGERIDVVFDSKIAHGTVVSGSAPFGFRVNEGKRLEVVPEDASIVQDAFNYFETSISQRATVRYIRETYGVNWCDATFRRMLKEKLYTGVYDRGGRFNDHFCPAIISKQQFDRVQALLERNARSVPSGKVYIFTSILTCAECGHKLVGYKSSDYYYYRCNQHFQRGRCSHNHSAREDVVEKWLFEHLAEELERCQLEWEVAAAKKKASVARTDKAALKRKLTKLKELYVNDLIDIEDYKRDYQIYTAALKQIPEPSIEPPPDFAAVRRLLDNDFKTIYENLTREEKRTLWRSVIKEIRIDNDQNITGVVFG

SEQ ID NO: 7699 - protein, 465 aa, Unknown
  Description of Unknown: Integrase B7700 sequence
  PTHR30461:SF3,SM00857,G3DSA:1.10.10.2600,IPR036162,PF13408, PS51737,IPR025827,G3DSA:3.40.50.1390,IPR006119,IPR038109, PF07508,IPR011109,SSF53041,PTHR30461,PS51736, cd00338,PF00239
MKGNAGDTIVKKIDLSPELVRVALYIRVSGEEQKIKGLSLEAQQERLEAYARERGWVIVGIYIDAAKTARKNIHKRTDFQRMMDSVKRDEVDILLFCRLDRWFRSVADYYKIMEVLEAHNCDWKTTDEEYDTTTANGRLYINVKLSIAQNEADIDGERIDVVFDSKIAHGTVVSGSAPFGFRVNEGKRLEVVPEDAAIVQDAFNYFETSISQRATVRYIRETYGVNWCDATFRRMLKEKLYTGVYDRGGRFNDHFCPAIISKQQFDRVQALLERNARSVPSGKVYIFTSILTCAECGHKLVGYKSSDYYYYRCNQHFQRGRCSHNHSAREDVVEKWLFEHLAEELERCQLEWEVAAAKKKASVARTDKAALKRKLTKLKELYVNDLIDIEDYKRDYQIYTAALKQIPEPSIEPPPDFAAVRRLLDNDFKTIYENLTREEKRTLWRSVIKEIRIDNDRNITGVVFG

SEQ ID NO: 7700 - protein, 465 aa, Unknown
  Description of Unknown: Integrase B7701 sequence
  PTHR30461:SF3,SM00857,IPR006118,IPR036162,PF13408, PS51737,G3DSA:3.40.50.1390,IPR025827,PS00397,IPR006119, IPR011109,SSF53041,PTHR30461,Coil,PS51736, cd00338,PF00239
MPEKILRCAIYIRVSTFEQSVHGKSLQAQKEYLEHYAKEHNMSVVGVYADEGKTARKELKKRKAIHALIEDVTQEKIDVILFWRLDRWFRSLADFYKVQDVLDEYGVRWISASEPGINMETRDGRLQLNVVLSFGQNEVDTTSERIKFVNEASIKNGRLIFGEANMPFGYKSGVVDGKKCMIKDPETERMVIDFFRHYKKHQGKQDALKYMQRTYGIYFSYGMLKTMLSSEFYKGTYRGYPYCPAYLTEKEWNEIQEISVRNVKRAPSGRVYLFTSLMRCPSCGQKLVGTGCSSISNRKTGKKRTYCYYRCNKALADHLCPNRHRVSQNLIEQYLLENLSSEYEKYKIRSNKINEEKKKVRKAKNPAQLSKEMERLNLLFQKGRISFDYYDEEYQRLEEELAFAASDPSLEEPKRNYSELEKLLRTDFKEMYDSLSLENRRAFWRSIIKQIHLNDDCTIKEVDFL

SEQ ID NO: 7701 - protein, 465 aa, Unknown
  Description of Unknown: Integrase B7702 sequence
  PTHR30461:SF3,SM00857,G3DSA:1.10.10.2600,IPR036162,PF13408, PS51737,G3DSA:3.40.50.1390,IPR025827,IPR006119,IPR038109, PF07508,IPR011109,SSF53041,PTHR30461,PS51736, cd00338,PF00239
MKGNAGDTIVKKIDLSPELVRVALYIRVSGEEQKIKGLSLEAQQERLEAYARERGWVIVGIYIDAAKTARKNIHKRTDFQRMMDSVKRDEVNILLFCRLDRWFRSVADYYKIMEVLEAHNCDWKTTDEEYDTTTANGRLYINVKLSIAQNEADIDGERIDVVFDSKIAHGTVVSGSAPFGFRVNEEKRLEVVPEDAAIVQDAFNYFETSISQRATVRYIRETYGVNWCDATFRRMLKEKLYTGVYDRGGRFNDHFCPAIISKQQFDRVQALLERNARSVPSGKVYIFTSILTCAECGHKLVGYKSSDYYYYRCNQHFQRGRCSHNHSAREDVVEKWLFEHLAEELERCQLEWEVAAAKKKASVARTDKAALKRKLTKLKELYVNDLIDIEDYKRDYQIYTAALKQIPEPSIEPPPDFAAVRRLLDNDFKTIYENLTREEKRTLWRSVIKEIRIDNDQNIAGVVFG

SEQ ID NO: 7702 - protein, 465 aa, Unknown
  Description of Unknown: Integrase B7703 sequence
  PTHR30461:SF3,SM00857,G3DSA:1.10.10.2600,IPR036162,PF13408, IPR025827,G3DSA:3.40.50.1390,PS51737,IPR006119,IPR038109, PF07508,SSF53041,IPR011109,PF00239,PTHR30461, PS51736,Coil,cd00338
MKGNAGDTIVKKIDLSPELVRVALYIRVSGEEQKIKGLSLEAQQERLEAYARERGWVIVGIYIDAAKTARKNIHKRTDFQRMMDSVKRDEVDILLFCRLDRWFRSVADYYKIMEVLEAHNCDWKTTDEEYDTTTANGRLYINVKLSIAQNEADIDGERIDVVFDSKIAHGTVVSGSAPFGFRVNEEKRLEVVPEDAAIVQDAFNYFETSISQRATVRYIRETYGVNWCDATFRRMLKEKLYTGVYDRGGRFNDHFCPAIISKQQFDRVQALLERNARSVPSGKVYIFTSILTCAECGHKLVGYKSSDYFYYRCNQHFQRGRCSHNHSAREDVVEQWLFEHLGEELDRCQLEWDVEAAKKKASVARTDKAALKRKLTKLKELYVNDLIDIEDYKKDYQIYVSALNQIPEPAQEAPPDFAAVRRLLDNSFRTIYDTLTREEKRTLWRSVIKEIRIDNDQNITGVVFG

SEQ ID NO: 7703 - protein, 465 aa, Unknown
  Description of Unknown: Integrase B7704 sequence
  PTHR30461:SF3,SM00857,G3DSA:1.10.10.2600,IPR036162,PF13408, PS51737,IPR025827,G3DSA:3.40.50.1390,IPR006119,IPR038109, PF07508,IPR011109,SSF53041,PTHR30461,PS51736, cd00338,PF00239
MKGNAGDTIVKKIDLSPELVRVALYIRVSGEEQKIKGLSLEAQQERLEAYARERGWVIVGIYIDAAKTARKNIHKRTDFQRMMDSVKRDEVDILLFCRLDRWFRSVADYYKIMEVLEAHNCDWKTTDEEYDTTTANGRLYINVKLSIAQNEADIDGERIDVVFDSKIAHGTVVSGSAPFGFRVNEEKRLEVVPEDAAIVQDAFNYFETSISQRATVRYIRETYGVNWCDATFRRMLKEKLYTGVYDRGGRFNDHFCPAIISKQQFDRVQALLERNARSVPSGKVYIFTSILTCAECGHKLVGYKSSDYYYYRCNQHFQRGRCSHNHSAREDVVEKWLFEHLAEELERCQLEWEVAAAKKKASIARTDKAALKRKLTKLKELYVNDLIDIEDYKRDYQIYTAALKQIPEPSIEPPPDFAAVRRLLDNDFKTIYENLTREEKRTLWRSVIKEIRIDNDQNITGVVFG

SEQ ID NO: 7704 - protein, 465 aa, Unknown
  Description of Unknown: Integrase B7705 sequence
  PTHR30461:SF3,SM00857,G3DSA:1.10.10.2600,IPR036162,PF13408, PS51737,G3DSA:3.40.50.1390,IPR025827,IPR006119,IPR038109, PF07508,IPR011109,SSF53041,PTHR30461,PS51736, cd00338,PF00239
MKGNAGDTIVKKIDLSPELVRVALYIRVSGEEQKIKGLSLEAQQERLEAYARERGWVIVGIYIDAAKTARKNIHKRTDFQRMMDSVKRDEVDILLFCRLDRWFRSVADYYKIMEVLEAHNCDWKTTDEEYDTTTANGRLYINVKLSIAQNEADIDGERIDVVFDSKIAHGTVVSGSAPFGFRVNEGKRLEVVPEDAAIVQDAFNYFETSISQRATVRYIRETYGVNWCDATFRRMLKEKLYTGVYDRGGRFNDHFCPAIISKQQFDRVQALLERNARSVPSGKVYIFTSILTCTECGHKLVGYKSSDYYYYRCNQHFQRGRCSHNHSAREDVVEKWLFEHLAEELERCQLEWEVAAAKKKASVARTDKAALKRKLTKLKELYVNDLIDIEDYKRDYQIYTAALKQIPEPSIEPPPDFAAVRRLLDNDFKTIYENLTREEKRTLWRSVIKEIRIDNDQNITGVVFG

SEQ ID NO: 7705 - protein, 465 aa, Unknown
  Description of Unknown: Integrase B7706 sequence
  PTHR30461:SF3,SM00857,IPR006118,IPR036162,PF13408, IPR025827,G3DSA:3.40.50.1390,PS51737,IPR006119,SSF53041, IPR011109,PF00239,PTHR30461,PS00397,PS51736, Coil,cd00338
MPEKILRCAIYIRVSTFEQSVHGKSLQAQKEYLEHYAKEHNMSVVGVYADEGKTARKELKKRKAIHALIEDVKQEKIDVILFWRLDRWFRSLADFYKVQDVLDEYGVRWISASEPGINMETRDGRLQLNVVLSFGQNEVDTTSERIKFVNEASIKNGRLIFGEANMPFGYKSGVVDGKKCMIKDPETERMVIDFFRHYKKHQGKQDALKYMQRTYGIYFSYAMLKTMLSSEFYKGTYRGYPYCPAYLTEKEWNEIQEISVRNVKRAPSGRVYLFTSLMRCPSCGQKLVGTGCSSISNRKTGKKRTYCYYRCNKALADHLCPNRHRVSQNLIEQYLLENLSSEYEKYKIRSNKINEEKKKVRKAKNPAQLSKEMERLNLLFQKGRISFDYYDEEYQRLEEELAFAASDPSLEEPKRNYSELEKLLRTDFKEMYDSLSLENRRAFWRSIIKQIHLNDDCTIKEVDFL

SEQ ID NO: 7706 - protein, 465 aa, Unknown
  Description of Unknown: Integrase B7707 sequence
  PTHR30461:SF3,SM00857,G3DSA:1.10.10.2600,IPR036162,PF13408, IPR025827,G3DSA:3.40.50.1390,PS51737,IPR006119,IPR038109, PF07508,SSF53041,IPR011109,PTHR30461,Coil, PS51736,cd00338,PF00239
MELVTKNRVIIYNRVSTIMQDKNESLTEQTDECIRYCNEKGYNIIKILKDVKSGTKDDREGYLELKKHIKRRDFDILVVLETSRIARKMKELVLFFSLLNENNIDYVSIREPNYNTTTPDGKFAMNIRLGLIQFERDNTAERVTDRLYFKASKGQWVNGKPPIGYKLVNKRLEIDEEKAEIVRNIYEDFLNGYSLNQINNKLQFSWGSKQVKRILTNPTYKGYIRYGTRNNRKKNNREAFIVKGWHEAIITEDKWEKVQEMYKSLNRKASNTKPTLLGGLLKCKECGNNYIRKRGGSYDKNLYYGCNLNNLRYSDKFFYKDIPECSSATIKGDLLEKAVIDTLKKQINDLNFNDIEIEKKRQVNIKQIDSSINKFKNRLNKIYELYIEDEISKDKYLKDKKDIEARIISLEKQKKSFGEIEVEKSNNEMIQEYFSKIEENKNIHIKTHVDTCAPINLFIFLFSIK

SEQ ID NO: 7707 - protein, 465 aa, Unknown
  Description of Unknown: Integrase B7708 sequence
  PTHR30461:SF3,SM00857,G3DSA:1.10.10.2600,IPR036162,PF13408, IPR025827,G3DSA:3.40.50.1390,PS51737,IPR006119,IPR038109, PF07508,SSF53041,IPR011109,PTHR30461,PS51736, cd00338,PF00239
MKGNAGDTIVKKIDLSPELVRVALYIRVSGEEQKIKGLSLEAQQERLEAYARERGWVIVGIYIDAAKTARKNIHKRTDFQRMMDSVKRDEVDILLFCRLDRWFRSVADYYKIMEVLEAHNCDWKTTDEEYDTTTANGRLYINVKLSIAQNEADIDGERIDVVFDSKIAHGTVVSGSAPFGFRVNEEKRLEVVPEDAAIVQDAFNYFETSISQRATVRYIRETYGVNWCDATFRRILKEKLYTGVYDRGGRFNDHFCPAIISKQQFDRVQALLERNARSVPSGKVYIFTSILTCAECGHKLVGYKSSDYYYYRCNQHFQRGRCSHNHSAREDVVEKWLFEHLAEELERCQLEWEVAAAKKKASVARTDKAALKRKLTKLKELYVNDLIDIEDYKRDYQIYTAALKQIPEPSIEPPPDFAAVRRLLDNDFKTIYENLTREEKRTLWRSVIKEIRIDNDQNITGVVFG

SEQ ID NO: 7708 - protein, 465 aa, Unknown
  Description of Unknown: Integrase B7709 sequence
  PTHR30461:SF3,SM00857,G3DSA:1.10.10.2600,IPR036162,PF13408, PS51737,G3DSA:3.40.50.1390,IPR025827,IPR006119,IPR038109, PF07508,IPR011109,SSF53041,PTHR30461,PS51736, cd00338,PF00239
MKGNAGDTIVKKIDLSPELVRVALYIRVSGEEQKIKGLSLEAQQERLEAYARERGWVIVGIYIDAAKTARKNIHKRTDFQRMMDSVKRDEVDILLFCRLDRWFRSVADYYKIMEVLEAHNCDWKTTDEEYDTTTANGRLYINVKLSIAQNEADIDGERIDVVFDSKIAHGTVVSGSAPFGFRVNEGKRLEVVPEDAAIVQDAFNYFETSISQRATVRYIRETYGVNWCDATFRRMLKEKLYTGVYDRGGRFNDHFCPAIISKQQFDRVQALLERNARSVPSGKVYIFTSILACAECGHKLVGYKSSDYYYYRCNQHFQRGRCSHNHSAREDVVEKWLFEHLAEELERCQLEWEVAAAKKKASVARTDKAALKRKLTKLKELYVNDLIDIEDYKRDYQIYTAALKQIPEPSIEPPPDFAAVRRLLDNDFKTIYENLTREEKRTLWRSVIKEIRIDNDQNITGVVFG

SEQ ID NO: 7709 - protein, 465 aa, Unknown
  Description of Unknown: Integrase B7710 sequence
  PTHR30461:SF3,SM00857,IPR006118,IPR036162,PF13408, IPR025827,PS51737,Coil,G3DSA:3.40.50.1390,IPR006119, IPR011109,SSF53041,PTHR30461,PS00397,PS51736, cd00338,PF00239
MPEKILRCAIYIRVSTFEQSVHGKSLQAQKEYLEHYAKEHNMSVVGVYADEGKTARKELKKRKAIHALIEDVKQEKIDVILFWRLDRWFRSLADFYKVQDVLDEYDVRWISASEPGINMETRDGRLQLNVVLSFGQNEVDTTSERIKFVNEASIKNGRLIFGEANMPFGYKSGVVDGKKCMIKDPETERMVIDFFRHYKKHQGKQDALKYMQRTYGIYFSYGMLKTMLSSEFYKGTYRGYPYCPAYLTEKEWNEIQEISVRNVKRAPSGRVYLFTSLMRCPSCGQKLVGTGCSSISNRKTGKKRTYCYYRCNKALADHLCPNRHRISQNLIEQYLLENLSSEYEKYKIRSNKINEEKKKVRKAKNPAQLSKEMERLNLLFQKGRISFDYYDEEYQRLEEELAFAASDPSLEEPKRNYSELEKLLRTDFKEMYDSLSLENRRAFWRSIIKQIHLNDDCTIKEVDFL

SEQ ID NO: 7710 - protein, 465 aa, Unknown
  Description of Unknown: Integrase B7711 sequence
  PTHR30461:SF3,IPR036162,PS51737,IPR011109,PTHR30461, PS00397,PF00239,G3DSA:1.10.10.2600,IPR006119,SSF53041, SM00857,IPR025827,IPR038109,PS51736,cd03768, IPR006118,PF13408,G3DSA:3.40.50.1390,PF07508,Coil
MARRKTALKNVSASARVTKVAIYIRVSTIHQVDKDSIPMQKKDLIAYCQLILGTDNYEIFEDAGYSGKNTDRPAFQDMMGRIRKGEFTHVLVWKIDRISRNLLDFAEMYEELQSLRVTFVSKNEQFDTSTAIGEAMLKIVLVFAELERNMTSERVTATMISRANNGQWNGGRVPFGYSYDSETSTFSIREDEAPICRKLKDLYLGNKFLVYTARALNAAGYKTRSGADWTATTVWIIASSPFYAGIYRYNRYKGTENRTLNPEDEWVMIPNHHPAIFTLEEHEAMKTSLKINSKNIDNPVGRMHTTSNVHIFQRIAYCGKCRNKMVSTPGRKHADGYRPSNYSCPLRRKSNKCDNATVSDMIVGEFIINYILNMLNAKKTFSNIDTPEELQKHLLIGSTFSDISSIKKDGLNDFFNLLSRYGSDNSYFFAIKKPRKKKASVDPELASLRKEKEKQERALQRLQDL

SEQ ID NO: 7711 - protein, 465 aa, Unknown
  Description of Unknown: Integrase B7712 sequence
  PTHR30461:SF3,SM00857,G3DSA:1.10.10.2600,IPR036162,PF13408, IPR025827,G3DSA:3.40.50.1390,PS51737,IPR006119,IPR038109, PF07508,SSF53041,IPR011109,PTHR30461,PS51736, cd00338,PF00239
MKGNAGDTIVKKIDLSPELVRVALYIRVSGEEQKIKGLSLEAQQERLEAYARERGWVIVGIYIDAAKTARKNIHKRTDFQRMMDSVKRDEVDILLFCRLDRWFRSVADYYKIMEVLEAHNCDWKTTDEEYDTTTANGRLYINVKLSIAQNEADIDGERIDVVFDSKIAHGTVVSGSAPFGFRVNDGKRLEVVPEDAAIVQDAFNYFETSISQRATVRYIRETYGVNWCDATFRRMLKEKLYTGVYDRGGRFNDHFCPAIISKQQFDRVQALLERNARSVPSGKVYIFTSILTCAECGHKLVGYKSSDYYYYRCNQHFQRGRCSHNHSAREDVVEKWLFEHLAEELERCQLEWEVAAAKKKASVARTDKAALKRKLTKLKELYVNDLIDIEDYKRDYQIYTAALKQIPEPSIEPPPDFAAVRRLLDNDFKTIYENLTREEKRTLWRSVIKEIRIDNDQNITGVVFG

SEQ ID NO: 7712 - protein, 465 aa, Unknown
  Description of Unknown: Integrase B7713 sequence
  SM00857,G3DSA:1.10.10.2600,IPR036162,PS51737,G3DSA:3.40.50.1390, IPR006119,IPR038109,PF07508,IPR011109,SSF53041, PF00239,PTHR30461,PS51736,Coil,cd00338
MKETKKAIAYFRVSTDMQRDDLSLETQEKGGEIFARDNGIEVIKKFTDVMSGGNRNRKGFLEAQKYLEEHKDEIDYFIAYDVSRIARDAFAFLSLFNKLNILGVKLKLINNPNLDSDSPMGKLILTILAAIFEFFRFDNADRVRDNMIIRVKEGKRMNNAPFGYKMIDKKMVVVPEEAELIKFIYNEYLKGHGIVALERMTGKDRSSIKQWLNNKVYAGYNVFGARKMNKTTFKPMKNPDTNKIVEAKGDWEAIIDLETWEKVATRMNNNKEFRIRNTEKTSYLLSGLLFHTCGSKFRGNAGRKGTNYYRCIGCNRSIKTDTIDEKVLNELFNNEFLKELNKSTGKVENKKEKELIKLKNYKISLKNKEKKLIDLYTEDLISKDEYINRKNEIKNSIIDTEAKTILLESEKEEKKQNIDFAKMFVIALSNLKNTESKQEANKILKMIIKKIEIDDNKEVFIHLNF

SEQ ID NO: 7713 - protein, 465 aa, Unknown
  Description of Unknown: Integrase B7714 sequence
  PTHR30461:SF3,SM00857,IPR006118,IPR036162,PF13408, PS51737,G3DSA:3.40.50.1390,IPR025827,PS00397,IPR006119, IPR011109,SSF53041,PTHR30461,Coil, PS51736,cd00338,PF00239
MPEKILRCAIYIRVSTFEQSVHGKSLQAQKEYLEHYAKEHNMSVVGVYADEGKTARKELKKRKAIHALIEDVKQEKIDVILFWRLDRWFRSLADFYKVQDVLDEYGVRWISASEPGINMETRDGRLQLNVVLSFGQNEVDTTSERIKFVNEASIKNGRLIFGEANMPFGYKSGVVDGKKCMIKDPETERMVIDFFRHYKKHQGKQDALKYMQRTYGIYFSYGMLKTMLSSEFYKGTYRGYPYCPAYLTEKEWNEIQEISVRNVKRAPSGRVYLFTSLMRCPSCGQKLVGTGCSSISNRKTGKKRTYCYYRCNKALADHLCPNRHRVSQNLIEQYLLENLSSEYEKYKIRSNKINEEKKKVRKAKNPAQLSKEMERLNLLFQKGRISFDYYDEEYQRLEEELAFAASDPSLEEPKRNYSELEKLLRTDFKEMYDSLSLENRRAFWRSIIKQIHLNDDCTIKEVDFL

SEQ ID NO: 7714 - protein, 465 aa, Unknown
  Description of Unknown: Integrase B7715 sequence
  PTHR30461:SF3,SM00857,G3DSA:1.10.10.2600,IPR036162,PF13408, PS51737,IPR025827,G3DSA:3.40.50.1390,IPR006119,IPR038109, PF07508,IPR011109,SSF53041,PTHR30461,PS51736, cd00338,PF00239
MKGNAGDTIVKKIDLSPELVRVALYIRVSGEEQKIKGLSLEAQQERLEAYARERGWVIVGIYIDAAKTARKNMHKRTDFQRMMDSVKRDEVDILLFCRLDRWFRSVADYYKIMEVLEAHNCDWKTTDEEYDTTTANGRLYINVKLSIAQNEADIDGERIDVVFDSKIAHGTVVSGSAPFGFRVNEEKRLEVVPEDAAIVQDAFNYFETSISQRATVRYIRETYGVNWCDATFRRMLKEKLYTGVYDRGGRFNDHFCPAIISKQQFDRVQALLERNARSVPSGKVYIFTSILTCAECGHKLVGYKSSDYYYYRCNQHFQRGRCSHNHSAREDVVEKWLFEHLAEELERCQLEWEVAAAKKKASIARTDKAALKRKLTKLKELYVNDLIDIEDYKRDYQIYTAALKQIPEPSIEPPPDFAAVRRLLDNDFKTIYENLTREEKRTLWRSVIKEIRIDNDQNITGVVFG

SEQ ID NO: 7715 - protein, 465 aa, Unknown
  Description of Unknown: Integrase B7716 sequence
  PTHR30461:SF3,SM00857,IPR006118,IPR036162,PF13408, IPR025827,PS51737,G3DSA:3.40.50.1390,IPR006119,IPR011109, SSF53041,PF00239,PTHR30461,PS00397,PS51736, Coil,cd00338
MPEKILRCAIYIRVSTFEQSVHGKSLQAQKECLEQYATDNNMSIVGVYADEGKTARKELKKRKAIHALVEDVKRDKIDVIIFWRLDRWFRNLSDFYKVQDVLDEHGVRWISVSEPGINMETRDGRLQLNVVLSIGQNEVDTTSERIKFVNEASIRQRKLIFGDANMPFGYKTGVVDGKKCMVKDSETEHMVEDFFNYFRIHNSKKGAVRYMQEAYGIDFSYGMLRTMLSSEFYKGTYRGYPYCPAYLSEKEWNEMQTISKRNIKSTPSGRVYLFTGLMRCPVCGQKLVGTGCSSIINRKTGEKRTYCYYRCNRALIDHICTYRHRVSQNLIEKYLLENLEREYEKYKVRTNQISEELKKQKKAKDPKKLRKEMERLNLLFQKGRISFEYYDTEYNRLEEEYVHSSNPCQQKEEARNTRYIEELLQTDFRQMYNSLSLENRRSFWRSTIQEIYLNDDNTIKAVDFL

SEQ ID NO: 7716 - protein, 465 aa, Unknown
  Description of Unknown: Integrase B7717 sequence
  PTHR30461:SF3,SM00857,IPR006118,IPR036162,PF13408, PS51737,IPR025827,Coil,G3DSA:3.40.50.1390,IPR006119, IPR011109,SSF53041,PTHR30461,PS00397,PS51736, cd00338,PF00239
MPEKILRCAIYIRVSTFEQSVHGKSLQAQKEYLEHYAKEHNMSVVGVYADEGKTARKELKKRKAIHALIEDVKQEKIDVILFWRLDRWFRSLADFYKVQDVLDDYGVRWISASEPGINMETRDGRLQLNVVLSFGQNEVDTTSERIKFVNEASIKNGRLIFGEANMPFGYKSGVVDGKKCMIKDPETERMVIDFFRHYKKHQGKQDALKYMQRTYGIYFSYGMLKTMLSSEFYKGTYRGYPYCPAYLTEKEWNEIQEISVRNVKRAPSGRVYLFTSLMRCPSCGQKLVGTGCSSISNRKTGKKRTYCYYRCNKALADHLCPNRHRVSQNLIEQYLLENLSSEYEKYKIRSNKINEEKKKVRKAKNPAQLSKEMERLNLLFQKGRISFDYYDEEYQRLEEELAFAASDPSLEEPKRNYSELEKLLRTDFKEMYDSLSLENRRAFWRSIIKQIHLNDDCTIKEVDFL

SEQ ID NO: 7717 - protein, 465 aa, Unknown
  Description of Unknown: Integrase B7718 sequence
  SM00857,G3DSA:1.10.10.2600,IPR036162,PS51737,G3DSA:3.40.50.1390, IPR006119,IPR038109,PF07508,IPR011109,SSF53041, PF00239,PTHR30461,PS51736,Coil,cd00338
MKETKKAIAYFRVSTDMQRDDLSLETQEKGGEIFARDNGIEIVKKFTDVMSGGNRNRKGFLEAQKYLEDHKNEIDYFIAYDVSRIARDAFAFLSLFNKLNILGVKLKLINNPNLDSDSPMGKLILTILAAIFEFFRFDNADRVRDNMIIRVKEGKRMNNAPFAYRMVNKKMVVVPEEAELIKFIYNEYLKGHGIVALERMTGKDRSSIKQWLNNKVYAGYNVFGARKMNKTTFKPMKNPDTNKIVEAKGDWEPIIDIETWEKVAARMNNNREFRIRNVEKTSYLLSGLLFHTCGSKFRGNAGRKGTNYYRCIGCNKSIKTDTIDEKVLNELFNNEFLKELNKSTGKVENKKEKALIKLRNYKASLKNKEKKLIDLYTEDLISKDEYINRKNEIKNSIINTEAELILLENEKEEKKQNIDFAKMFIAALSNLKNAESKQEANKILKIIIKKIEIDENKEVFIHLNF

SEQ ID NO: 7718 - protein, 465 aa, Unknown
  Description of Unknown: Integrase B7719 sequence
  PTHR30461:SF3,SM00857,G3DSA:1.10.10.2600,IPR036162,PF13408, PS51737,G3DSA:3.40.50.1390,IPR025827,IPR006119,IPR038109, PF07508,IPR011109,SSF53041,PTHR30461, PS51736,cd00338,PF00239
MKGNAGDTIVKKIDLSPELVRVALYIRVSGEEQKIKGLSLEAQQERLEAYARERGWVIVGIYIDAAKTARKNIHKRTDFQRMMDSVKRDEVDILLFCRLDRWFRSVADYYKIMEVLEAHNCDWKTTDEEYDTTTANGRLYINVKLSIAQNEADIDGERIDVVFDSKIAHGTVVSGSAPFGFRVNEEKRLEVVPEDAAIVQDAFNYFETSISQRATVRYIRETYGVNWCDATFRRMLKEKLYTGVYDRGGRFNDHFCPAIISKQQFDRVQALLERNARSVPSGKVYIFTSILTCAECGHKLVGYKSSDYYYYRCSQHFQRGRCSHNHSAREDVVEKWLFEHLAEELERCQLEWEVAAAKKKASIARTDKAALKRKLTKLKELYVNDLIDIEDYKRDYQIYTAALKQIPEPSIEPPPDFAAVRRLLDNDFKTIYENLTREEKRTLWRSVIKEIRIDNDQNITGVVFG

SEQ ID NO: 7719 - protein, 465 aa, Unknown
  Description of Unknown: Integrase B7720 sequence
  SM00857,G3DSA:1.10.10.2600,IPR036162,PS51737,G3DSA:3.40.50.1390, IPR006119,IPR038109,PF07508,SSF53041,IPR011109, PF00239,PTHR30461,PS51736,Coil,cd00338
MKETKKAIAYFRVSTDMQRDDLSLETQEKGGEIFARDNGIEVIKKFTDVMSGGNRNRKGFLEAQKYLEEHKDEIDYFIAYDVSRIARDAFAFLSLFNKLNILGVKLKLITNPNLDSDSPMGKLILTILAAIFEFFRFDNADRVRDNMIIRVKEGKRMNNAPFAYRMVNKKMVVVPEEAELIKFIYAEYLKGHGIVALERMTGKDRSSIKQWLNNKVYAGYNVFGARKMNKTTFKPMKNPDTNKIVEAKGDWEAIIDIETWEKVAARMNNNREFRIRNVEKTSYLLSGLLFHSCGSKFRGNAGRKGTYYYRCIGCNRSIKTDIIDEKVLDELFNNEFLQELNKSTGKVENKKEKELIKLKNYKISLKNKEKKLIDLYTEDLISKDEYINRKNEIKNSIINTEAELILLENEKEEKKQNIDFAKMFIAALSNLKNAESKQEANKILKMIIKKIEIDDNKEVFIHLNF

SEQ ID NO: 7720 - protein, 465 aa, Unknown
  Description of Unknown: Integrase B7721 sequence
  PTHR30461:SF3,SM00857,IPR006118,IPR036162,PF13408, PS51737,G3DSA:3.40.50.1390,IPR025827,Coil,IPR006119, IPR011109,SSF53041,PTHR30461,PS00397, PS51736,cd00338,PF00239
MPEKILRCAIYIRVSTFEQSVHGKSLQAQKEYLEHYAKEHNMSVVGVYADEGKTARKELKKRKAIHALIEDVKQEKIDVILFWRLDRWFRSLADFYKVQDVLDEYGVRWISASEPGINMETRDGRLQLNVVLSFGQNEVDTTSERIKFVNEASIKNGRLIFGEANMPFGYKSGVVDGKKCMIKDPETERMVIDFFRHYKKHQGKQDALKYMQRTYGIYFSYGMLKTMLSSEFYKGTYRGYPYCPAYLTEKEWNEIQEISVRNVKRAPSGRVYLFTSLMRCPSCGQKLVGTGCSSISNRKTGKKRTYCYYRCNKALADHLCPNRHRVSQNLIEQYLLENLSSEYEKCKIRSNKINEEKKKVRKAKNPAQLSKEMERLNLLFQKGRISFDYYDEEYQRLEEELAFAASDPSLEEPKRNYSELEKLLRTDFKEMYDSLSLENRRAFWRSIIKQIHLNDDCTIKEVDFL

SEQ ID NO: 7721 - protein, 465 aa, Unknown
  Description of Unknown: Integrase B7722 sequence
  PTHR30461:SF3,SM00857,G3DSA:1.10.10.2600,IPR036162,PF13408, PS51737,IPR025827,G3DSA:3.40.50.1390,IPR006119,IPR038109, PF07508,SSF53041,IPR011109,PTHR30461,PS51736, cd00338,PF00239
MKGNAGDTIVKKIDLSPELVRVALYIRVSGEEQKIKGLSLEAQQERLEAYARERGWVIVGIYIDAAKTARKNIHKRTDFQRMIDSVKRDEVDILLFCRLDRWFRSVADYYKIMEVLEAHNCDWKTTDEEYDTTTANGRLYINVKLSIAQNEADIDGERIDVVFDSKIAHGTVVSGSAPFGFRVNEEKRLEVVPEDAAIVQDAFNYFETSISQRATVRYIRETYGVNWCDATFRRMLKEKLYTGVYDRGGRFNDHFCPAIISKQQFDRVQALLERNARSVPSGKVYIFTSILTCAECGHKLVGYKSSDYYYYRCNQHFQRGRCSHNHSAREYVVEKWLFEHLAEELERCQLEWEVAAAKKKASVARTDKAALKRKLTKLKELYVNDLIDIEDYKRDYQIYTAALKQIPEPNIEPPPDFAAVRRLLDNDFKTIYENLTREEKRTLWRSVIKEIRIDNDQNITGVVFG

SEQ ID NO: 7722 - protein, 465 aa, Unknown
  Description of Unknown: Integrase B7723 sequence
  PTHR30461:SF3,SM00857,G3DSA:1.10.10.2600,IPR036162,PF13408, PS51737,IPR025827,G3DSA:3.40.50.1390,IPR006119,IPR038109, PF07508,IPR011109,SSF53041,PTHR30461,Coil, PS51736,cd00338,PF00239
MANYRKLRVATYTRVSTLEQAEEGYSIQEQQDKLEKYCDLKDWTITHRYSDPGFSGSNIKRPGIRELIAAAKQGDFDLVLVYKLDRLSRSQKDTLYLIEDVFQANQVDFVSLSENFDTSTPFGKAMIGILSVFAQLEREQIKERMTMGKIGRAKSGKAMGWSNVPFGYNLVGDIYEIDEFQATVVKRIFSEYLSGDSPITIAKRLNDEGHLGKGTRWSWKTVRDILMNIVYTGYISFKGELYPGMHKPIIDMETYKNAQTQLEIRRVNADNPRPFRAKYMLSGLLKCHYCGSTLRIGVSINQRTKARSYRYNCPSSHPRKKSTYKKKAACPSKLVRKGEIEKQVIEEIEKLPKNFEHKKAPTVDVDAIKKQIKAIKGKQSKLMDLYLIDGIDMEELNRRNGEFNKQIEALNKNLSAVPTEPDVTEALNQAKNISELSYDEQKKLVRLLISEIEVANDSIKIHWRF

SEQ ID NO: 7723 - protein, 465 aa, Unknown
  Description of Unknown: Integrase B7724 sequence
  PTHR30461:SF3,SM00857,G3DSA:1.10.10.2600,IPR036162,PF13408, PS51737,G3DSA:3.40.50.1390,IPR025827,IPR006119,IPR038109, PF07508,IPR011109,SSF53041,PTHR30461,PS51736, cd00338,PF00239
MKGNAGDTIVKKIDLSPELVRVALYIRVSGEEQKIKGLSLEAQQERLEAYARERGWVIVGIYIDAAKTARKNIHKRTDFQRMMDSVKRDEVDILLFCRLDRWFRSVADYYKIMEVLEAHNCDWKTTDEEYDTTTANGRLYINVKLSIAQNEADIDGERIDVVFDSKIAHGTVVSGSAPFGFRVNEEKRLEVVPEDAAIVQDAFNYFETSISQRATVRYIRETYGVNWCDATFRRMLKEKLYTGVYDRGGRFNDHFCPAIISKQQFDRVQALLERNARSVPSGKVYIFTSILTCAECGHKLVGYKSSDYYYYRCNQHFQRGRCSHNHSAREDVVEKWLFEHLVEELERCQLEWEVAAAKKKASVARTDKAALKRKLTKLKELYVNDLIDIEDYKRDYQIYTAALKQIPEPSIEPPPDFAAVRRLLDNDFKTIYENLTREEKRTLWRSAIKEIRIDNDQNITGVVFG

SEQ ID NO: 7724 - protein, 465 aa, Unknown
  Description of Unknown: Integrase B7725 sequence
  PTHR30461:SF3,SM00857,G3DSA:1.10.10.2600,IPR036162,PF13408, PS51737,G3DSA:3.40.50.1390,IPR025827,IPR006119,IPR038109, PF07508,IPR011109,SSF53041,PTHR30461,PS51736, cd00338,PF00239
MKGNAGDTIVKKIDLSPELVRVALYIRVSGEEQKIKGLSLEAQQERLEAYARERGWVIVGIYIDAAKTARKNIHKRTDFQRMMDSVKRDEVDILLFCRLDRWFRSVADYYKIMEVLEAHNCNWKTTDEEYDTTTANGRLYINVKLSIAQNEADIDGERIDVVFDSKIAHGTVVSGSAPFGFRVNEEKRLKVVPEDAAIVQDAFNYFETSISQRATVRYIRETYGVNWCDATFRRMLKEKLYTGVYDRGGRFNDHFCPAIISKQQFDRVQALLERNARSVPSGKVYIFTSILTCAECGHKLVGYKSSDYYYYRCNQHFQRGRCSHNHSAREDVVEKWLFEHLVEELERCQLEWEVAAAKKKASVARTDKAALKRKLTKLKELYVNDLIDIEDYKRDYQIYTAALKQIPEPSIEPPPDFAAVRRLLDNDFKTIYENLTREEKRTLWRSVIKEIRIDNDQNITGVVFG

SEQ ID NO: 7725 - protein, 465 aa, Unknown
  Description of Unknown: Integrase B7726 sequence
  PTHR30461:SF3,SM00857,G3DSA:1.10.10.2600,IPR036162,PF13408, PS51737,IPR025827,G3DSA:3.40.50.1390,IPR006119,IPR038109, PF07508,IPR011109,SSF53041,PTHR30461,PS51736, cd00338,PF00239
MKGNAGDTIVKKIDLSPELVRVALYIRVSGEEQKIKGLSLEAQQERLEAYARERGWVIVGIYIDAAKTARKNIHKRTDFQRMMDSVKRDEVNILLFCRLDRWFRSVADYYKIMEVLEAHNCGWKTTDEEYDTTTANGRLYINVKLSIAQNEADIDGERIDVVFDSKIAHGTVVSGSAPFGFRVNEEKRLEVVPEDAAIVQDAFNYFETSISQRATVRYIRETYGVNWCDATFRRMLKEKLYTGVYDRGGRFNDHFCPAIISKQQFDRVQALLERNARSVPSGKVYIFTSILTCAECGHKLVGYKSSDYYYYRCNQHFQRGRCSHNHSAREDVVEKWLFEHLAEELERCQLEWEVAAAKKKASVARTDKAALKRKLTKLKELYVNDLIDIEDYKRDYQIYTAALKQIPEPSIEPPPDFAAVRRLLDNDFKTIYENLTREEKRTLWRSVIKEIRIDNDQNITGVVFG

SEQ ID NO: 7726 - protein, 465 aa, Unknown
  Description of Unknown: Integrase B7727 sequence
  PTHR30461:SF3,SM00857,G3DSA:1.10.10.2600,IPR036162,PF13408, PS51737,IPR025827,G3DSA:3.40.50.1390,IPR006119,IPR038109, PF07508,IPR011109,SSF53041,PTHR30461,PS51736, cd00338,PF00239
MKGNAGDTIVKKIDLSPELVRVALYIRVSGEEQKIKGLSLEAQQERLEAYARERGWVIVGIYIDAAKTARKNIHKRTDFQRMMDSVKRDEVDILLFCRLDRWFRSVADYYKIMEVLEAHNCDWKTTDEEYDTTTANGRLYINVKLSIAQNEADIDGERIYVVFDSKIAHGTVVSGSAPFGFRVNEEKRLEVVPEDAAIVQDAFNYFETSISQRATVRYIRETYGVNWCDATFRRMLKEKLYTGVYDRGGRFNDHFCPAIISKQQFDRVQALLERNARSVPSGKVYIFTSILTCAECGHKLVGYKSSDYYYYRCNQHFQRGRCSHNHSAREDVVEKWLFEHLVEELERCQLEWEVAAAKKKASVARTDKAALKRKLTKLKELYVNDLIDIEDYKRDYQIYTAALKQIPEPSIEPPPDFAAVRRLLDNDFKTIYENLTREEKRTLWRSVIKEIRIDNDQNITGVVFG

SEQ ID NO: 7727 - protein, 465 aa, Unknown
  Description of Unknown: Integrase B7728 sequence
  PTHR30461:SF3,SM00857,G3DSA:1.10.10.2600,IPR036162,PF13408, IPR025827,G3DSA:3.40.50.1390,PS51737,IPR006119,IPR038109, PF07508,SSF53041,IPR011109,PTHR30461,Coil, PS51736,cd00338,PF00239
MKGNAGDTIVKKIDLSPELVRVALYIRVSGEEQKIKGLSLEAQQERLEAYARERGWVIVGIYIDAAKTARKNIHKRTEFQRMMDSVKRDEVDILLFARLDRWFRSVADYYKVMEVLQAHNCDWKTTDEEYDTTTANGRLYINVKLSIAQNEADIDGERIDVVFDSKIAHGTVVSGSAPFGFRVNEEKRLEVVPEDAAIVQDAFNYFENTVSQRATVRYVRETYGVNWCDATFRRMLKEKLYTGVYDRGGRYNDQFCPAIIDRQQFDRVQALLTRNVRSAPSGKVYIFTSILTCAECGHKLVGYKSSDYFYYRCNQHFQRGRCSHNHSAREDVVEAWLFDHLGEELERCQLEWDVEAAKKKASVARTDKAALKRKLTKLKELYVNDLIDIEDYKKDYQIYVSALNQIPEPAQEAPPDFAAVRRLLDNSFRTIYDTLTREEKRTLWRSVIKEIRIDNDQNITGVVFG

SEQ ID NO: 7728 - protein, 465 aa, Unknown
  Description of Unknown: Integrase B7729 sequence
  PTHR30461:SF3,SM00857,G3DSA:1.10.10.2600,IPR036162,PF13408, IPR025827,G3DSA:3.40.50.1390,PS51737,IPR006119,IPR038109, PF07508,SSF53041,IPR011109,PTHR30461,PS51736, cd00338,PF00239
MKGNAGDTIVKKIDLSPELVRVALYIRVSGEEQKIKGLSLEAQQERLEAYARERGWVIVGIYIDAAKTARKNIHKRTDFQRMMDSVKRDEVDILLFCRLDRWFRSVADYYKIMEVLEAHNCDWKTTDEEYDTTTANGRLYINVKLSIAQNEADIDGERIDVVFDSKIAHGTVVSGSAPFGFRVNAGKRLEVVPEDAAIVQDAFNYFETSISQRATVRYIRETYGVNWCDATFRRMLKEKLYTGVYDRGGRFNDHFCPAIISKQQFDRVQALLERNARSVPSGKVYIFTSILTCAECGHKLVGYKSSDYYYYRCNQHFQRGRCSHNHSAREDVVEKWLFEHLAEELERYQLEWEVAAAKKKASVARTDKAALKRKLTKLKELYVNDLIDIEDYKRDYQIYTAALKQIPEPSIEPPPDFAAVRRLLDNDFKTIYENLTREEKRTLWRSVIKEIRIDNDQNITGVVFG

SEQ ID NO: 7729 - protein, 465 aa, Unknown
  Description of Unknown: Integrase B7730 sequence
  PTHR30461:SF3,SM00857,G3DSA:1.10.10.2600,IPR036162,PF13408, IPR025827,G3DSA:3.40.50.1390,PS51737,IPR006119,IPR038109, PF07508,IPR011109,SSF53041,PTHR30461,PS51736, cd00338,PF00239
MKGNAGDTIVKKIDLSPELVRVALYIRVSGEEQKIKGLSLEAQQERLEAYARERGWVIVGIYIDAAKTARKNIHKRTDFQRMMDSVKRDEVDILLFCRLDRWFRSVADYYKIMEVLEAHNCDWKTTDEEYDTTTANGRLYINVKLSIAQNEADIDGERIDVVFDSKIAHGTVVSGSAPFGFRVNEEKRLEVVSEDAAIVQDAFNYFETSISQRATVRYIREAYGVNWCDATFRRMLKEKLYTGVYDRGGRFNDHFCPAIISKQQFDRVQALLERNARSVPSGKVYIFTSILTCAECGHKLVGYKSSDYYYYRCNQHFQRGRCSHNHSAREDVVEKWLFEHLAEELERCQLEWEVAAAKKKASVARTDKAALKRKLTKLKELYVNDLIDIEDYKRDYQIYTAALKQIPEPSIEPPPDFAAVRRLLDNDFKTIYENLTREEKRTLWRSVIKEIRIDNDQNITGVVFG

SEQ ID NO: 7730 - protein, 464 aa, Unknown
  Description of Unknown: Integrase B7731 sequence
  PTHR30461:SF3,SM00857,G3DSA:1.10.10.2600,IPR036162,PF13408, PS51737,IPR025827,G3DSA:3.40.50.1390,IPR006119,IPR038109, IPR011109,SSF53041,PTHR30461,PS51736,cd00338, PF00239
MNSTYFRPQPELFGLRVVKYIRCSHDGQVLHGDTLEAQDALLDEFIKVNRMVLIDTFIDEALTARKKFTRRKEFVRLLDGVRAHNFDMILFTKLDRWFRNIGDYHKIQEILEANGVQWKAITESYDTTTTNGRLHINIRLSVAQDECDRDSDRIKDVFAYKLKNKTYLSGSLPRGLKLDDEKHVIIDPEWKQFALDMFDRFEQTNSKRGTLLYLKEKYGIYLCYDTISRNLRNSLYKGMYRDDPDFCEPLIEPERFDRIQVLGKRNVRQRYSNRTYIFTGLLICSSCNHYLVGQTTHRTLSDGTEKHYPSYRCNQRYQSHSCDRNRSYREDYVEEYLLQHIRPALSEYVAEYEVTGTNPVRKNPAAEAAKIRTKMQKLYELYMDDLIDRDTYKRDYSAFQEKLKELDSIVVAPSRDLADLKKLLEQDYEDIYRTFSPQEKNAFWKSFVQSITVHEDGEMDIVFL

SEQ ID NO: 7731 - protein, 464 aa, Unknown
  Description of Unknown: Integrase B7732 sequence
  PTHR30461:SF3,SM00857,IPR006118,IPR036162,PF13408, IPR025827,G3DSA:3.40.50.1390,PS51737,IPR006119,SSF53041, IPR011109,PF00239,PTHR30461,PS00397,PS51736, Coil,cd00338
MMTNKIIRCALYIRVSTAEQCMHGKSLEAQESYLQQYASDHNMIVVGVYADEGKTARKELKKRKAIHSLLEDVKAGKIDVILFWRLDRWFRNLSDFYKVQDILDEYGVRWMSASEPGINMETRDGRLQLNVVLSIGQNEVDTTSERIKFVNEASIRQGKLIFGDANMGYGYKSGIVDGRKCMIKDPEREETVNAFYKYFFKHQNKCATLRYIQDNYDPNFSWAIMRTLLSSEFYKGTYRGFPYCPPYLTEEQWNELQKVAHKNIKRAKSGRIYLFTSLIRCPVCGQLLCGTGCKSIINRKTREKRDYCYYRCSRAHNDRICTYRHRLSQNLIEQYLLDNLDTEYRKYQIRVKKIEEEKKKIAQTKTPEKLNAELERLNLLFQKGRVEWDYYSSEYDRIEQELKDLSRIKPEVKRDLSFLEDLLQSDFKTLYASLSPENRRAFWRSTIKQIHLNEDSTIKFVDFL

SEQ ID NO: 7732 - protein, 464 aa, Unknown
  Description of Unknown: Integrase B7733 sequence
  PTHR30461:SF3,cd00338,SM00857,IPR036162,PF13408, IPR025827,G3DSA:3.40.50.1390,PS51737,IPR006119,IPR011109, SSF53041,PTHR30461,PS51736,Coil,PF00239
MSSSYFRPQPELYGLRVVKYIRCSHEGQVLHGDTLEAQDTLLNEFIEVNRMVLVDTFVDEALTARKKFTKRKEFVRLLDGVRTHSFDLILFTKLDRWFRNISDYHKIQEILDANGVQWKAITESYDTTTTNGRLHINIRLSVAQDECDRDSDRIKDVFAYKLKNKSYISGRLPRGLKLDTNKHIIHDPDWKQWALDMFDHFESSGSIYSTFLFLTDKYGSLLRYDGVSRALKNPLYKGMYRDDPKFCDPLIDPERFDRLFDLAKKNVRQRKTRRYYIFTGLLVCSSCQHNLVPYTIPHTLADGTRKDYIFYRCGYHSSSRLCDRSRTYREEYIEQYLLDHVRPALSRYIAEYDVISSGASKKDPAAEVAKIRHKLEKLYDLFLDDLIEKDLYRQKYDELQNQLKECLEAPSVPVRDFSAVQELLSKNWEDMYCTFSKTEKNVFWKSFIKSIVVYEDGSMDINFL

SEQ ID NO: 7733 - protein, 464 aa, Unknown
  Description of Unknown: Integrase B7734 sequence
  PTHR30461:SF3,cd00338,SM00857,IPR006118,G3DSA:1.10.10.2600, IPR036162,PS51737,G3DSA:3.40.50.1390,IPR006119,IPR038109, PF07508,IPR011109,SSF53041,PTHR30461, PS00397,PS51736,Coil,PF00239
MKKQLKALIYARVSTVMQEEGDSLVYQKKKCEDFCSVKGYEIYKILEDVESGANDDRSGFIELQNEIARKNFDVLVVFESSRISRKTLTMLNFVLSLEENGIKFTSISQPELDTTTPTGMLFFQIQSSLGEYERKQISSRVKSSKWQRIKDGLWQGGSIPLGYKKENDNIVVDEKGANEVKSIFFHYLSSHSLKQTSRAFNKPIGSIKWILENPFYLGKLTYGKKEKNINTGIIKINSSYHVFEGKHPPIIDEETFDTVQKILTTKKRVIQSENVILFSGLIRCTCGEKMYKNTSMNKGSIRIRYYCKNCYKTIAYKKAEDIIIKALLDMKELEEINDVVDSENKILNDKMEIYKASMKQVNDERKKYINLYSKDYITIEDLDEKMQVTKSKIDDFTDKINKLQKVIDEEKITKNYNSNLETLKAVLKDMDKSDRIDLYNMFKLLIKKIDLISSKPPEFKIYLK

SEQ ID NO: 7734 - protein, 464 aa, Unknown
  Description of Unknown: Integrase B7735 sequence
  PTHR30461:SF3,IPR036162,PS51737,IPR011109,PTHR30461, PS00397,PF00239,G3DSA:1.10.10.2600,IPR006119,SSF53041, SM00857,IPR025827,IPR038109,PS51736,cd03768, IPR006118,PF13408,G3DSA:3.40.50.1390,PF07508,Coil
MKRAALYIRVSTMEQAKEGYSIPAQTDKLKAFAKAKDMAVTKVYTDPGFSGAKMERPALQEMISDIQNKKIDVVLVYKLDRLSRSQKNTLYLIEDVFLKNNVDFISMQESFDTSTPFGRATIGMLSVFAQLERDTITERMHMGRTERAKQGYYHGSGIVPLGYDYVDGELIINDYEAQIIQEIYDLYVNQGKGQQYITKRMVAKYPDKVKTLTIVKYALTNPLYIGKISWDGKVYDGHHTPIIDKSMYDKAQEIIVRKAQKGGEQHGNQLGLLLGITYCGKCGAKVFRYVSGGKKYRYNYYMCRSVKKMLPSLVKDWNCKQPSLRQEVVEKKVIDSLKSLDFKKIERELKQVENKTKSKITTINNQISKKHNEKQKILDLYQYGTFDVTMLNERMKKIDNEINALTANISNLEGTKSESLINKLETLKTFNWETETTENKILIIKEFVERIELFDDEVIIKYKF

SEQ ID NO: 7735 - protein, 464 aa, Unknown
  Description of Unknown: Integrase B7736 sequence
  PTHR30461:SF3,SM00857,IPR006118,IPR036162,PF13408, PS51737,IPR025827,G3DSA:3.40.50.1390,PS00397,IPR006119, SSF53041,IPR011109,PTHR30461,Coil,PS51736, cd00338,PF00239
MMTNKIIRCALYIRVSTAEQCMHGKSLEAQESYLQQYASDHNMIVVGVYADEGKTARKELKKRKAIHSLLEDVKAGKIDVILFWRLDRWFRNLSDFYKVQDILDEYGVRWMSASEPGINMETRDGRLQLNVVLSIGQNEVDTTSERIKFVNEASIRQGKLIFGDANMGYGYKSGIVDGRKCMVKDPEREETVNAFYKYFFKHQNKCATLRYIQDNYDPNFSWAIMRTLLSSEFYKGTYRGFPYCPPYLTEEQWNELQKIAHKNIKRAKSGRIYLFTSLIRCPVCGQLLCGTGCKSIINRKTREKRDYCYYRCSRAHNDRICTYKHRLSQNLIEQYLLDNLDTEYRKYQIRVKKIEEEKKKIAQTKTPEKLNAELERLNLLFQKGRVEWDYYSSEYDRIEQELKDLSKIKPEVKRDLSFLEDLLQSDFKTLYASLSPENRRAFWRSTIKQIHLNEDSTIKFVDFL

SEQ ID NO: 7736 - protein, 464 aa, Unknown
  Description of Unknown: Integrase B7737 sequence
  PTHR30461:SF3,SM00857,G3DSA:1.10.10.2600,IPR036162,PF13408, IPR025827,PS51737,G3DSA:3.40.50.1390,IPR006119,IPR038109, IPR011109,SSF53041,PTHR30461,PS51736,cd00338, PF00239
MNSTYFRPQPELFGLRVVKYIRCSHDGQVLHGDTLEAQDALLDEFIKVNRMVLIDTFIDEALTARKKFTRRKEFVRLLDGVRSHSFDMILFTKLDRWFRNIGDYHKIQEILEANGVQWKAITESYDTTTTNGRLHINIRLSVAQDECDRDSDRIKDVFAYKLKNKTYLSGSLPRGLKLDDEKHVIIDPEWKQFALDMFDHFEQTNSKRGTLLYLKEKYGIYLCYDTISRNLRNSLYKGMYRDDPDFCEPLIEPERFDRIQVLGKRNVRQRYSNRTYIFTGLLICSSCNHYLVGQTTHRTLSDGTEKHYPSYRCNQRYQSHSCDRNRSYREDYVEEYLLQHIRPALSEYVAEYEVTGTNPARKNPAAEAAKIRTKMQKLYELYMDDLIDRDTYKRDYSAFQEKLKELDSIVVAPSRDLADLKKLLEQDYEEIYRTFSPQEKNAFWKSFVQSITVHEDGEMDIVFL

SEQ ID NO: 7737 - protein, 464 aa, Unknown
  Description of Unknown: Integrase B7738 sequence
  PTHR30461:SF3,SM00857,G3DSA:1.10.10.2600,IPR036162,PF13408, IPR025827,PS51737,G3DSA:3.40.50.1390,IPR006119,IPR038109, IPR011109,SSF53041,PTHR30461,PS51736,cd00338, PF00239
MNSTYFRPQPELFGLRVVKYIRCSHDGQVLHGDTLEAQDALLDEFIKVNRMVLVDTFIDEALTARKKFTRRKEFVRLLDGVRSRSFDMILFTKLDRWFRNIGDYHKIQEILEANGVQWKAITESYDTTTTNGRLHINIRLSVAQDECDRDSDRIKDVFAYKLKNKTYLSGSLPRGLKLDDEKHVIIDPEWKQFALDMFDHFEQTNSKRGTLLYLKEKYGIYLCYDTISRNLRNSLYKGMYRDDPDFCEPLIEPERFDRIQVLGKRNVRQRYSNRTYIFTGLLICSSCNHYLVGQTTHRTLSDGTEKHYPSYRCNQRYQSHSCDRNHSYREDYVEEYLLQHIRPALSEYVAEYEVTGTNPARKNPAAEAAKIRTKMQKLYELYMDDLIDRDTYKRDYSAFQEKLKELDSIVVAPSRDLADLKKLLEQDYEEIYRTFSPQEKNAFWKSFVQSITVHEDGEMNIVFL

SEQ ID NO: 7738 - protein, 464 aa, Unknown
  Description of Unknown: Integrase B7739 sequence
  SM00857,G3DSA:1.10.10.2600,IPR036162,PS51737,G3DSA:3.40.50.1390, IPR006119,IPR038109,PF07508,IPR011109,SSF53041, PTHR30461,Coil,PS51736,cd00338,PF00239
MREVKKAIAYFRVSTDMQKEDLSLETQEKGGEIFARDNNIEIVKKFTDVMSGGNRNRKGFIEAQKYLEENQGEIDYFIAYDVSRIARDAFAFLSLFNKLNLLNVKLKLVNNPTLDSDSPMGKLILTILAAIFEFFRFDNADRVRDNMIVKVKEGKRMNNAPYGYRIIDKKMVIVPEEAELIKYIYQEYLKGHGIVALERMTGKDRSTIKQWLNNKVYAGYNIFGKRKMNKTTFKPMKNPDETKIVEAKGDWEPIIDIDTWEKVANRMSLNQELRMRNIEKTSYLLSGLLFHTCGSKFRGNAGRKGTYYYRCTGCSRSIKSDTLDKKVLDELFNSEFLDELNKIPLENNNKDSELKKLKAQKSKLKTREENLIELYADGDITKEQFKSKKVDIQNSLIDIEAKIIELENERNEVKQNLDFKKMFIEALSNLKNTESKQEANKILKQIIKKIEVNEEREVFIHLNF

SEQ ID NO: 7739 - protein, 464 aa, Unknown
  Description of Unknown: Integrase B7740 sequence
  PTHR30461:SF3,SM00857,IPR006118,IPR036162,PF13408, PS51737,G3DSA:3.40.50.1390,IPR025827,IPR006119,IPR011109, SSF53041,PF00239,PTHR30461,PS00397, PS51736,Coil,cd00338
MMTNKIIRCALYIRVSTAEQCMHGKSLEAQESYLQQYASDHNMIVVGVYADEGKTARKELKKRKAIHSLLEDVKAGKIDIILFWRLDRWFRNLSDFYKVQDILDEYGVRWMSASEPGINMETRDGRLQLNVVLSIGQNEVDTTSERIKFVNEASIRQGKLIFGDANMGYGYKSGIVDGRKCMVKDPEREETVNAFYKYFFKHQNKCATLRYIQDNYDPNFSWAIMRTLLSSEFYKGTYRGFPYCPPYLTEDQWNELQKIAHKNIKRAKSGRIYLFTSLIRCPVCGQLLCGTGCKSIINRKTREKRDYCYYRCSRAHNDRICTYRHRLSQNLIEQYLLDNLDTEYRKYQIRVKKIEEEKKKIAQTKTPEKLNAELERLNLLFQKGRVEWDYYSSEYDRIEQELKDLSRIKPEVKRDLSFLEDLLQSDFKTLYASLSPENRRAFWRSTIKQIHLNEDSTIKFVDFL

SEQ ID NO: 7740 - protein, 464 aa, Unknown
  Description of Unknown: Integrase B7741 sequence
  PTHR30461:SF3,SM00857,IPR006118,IPR036162,PF13408, IPR025827,G3DSA:3.40.50.1390,PS51737,Coil,IPR006119, IPR011109,SSF53041,PTHR30461,PS00397,PS51736, cd00338,PF00239
MMTNKIIRCALYIRVSTAEQCMHGKSLEAQESYLQQYASDHNMIVVGVYADEGKTARKELKKRKAIHSLLEDVKAGKIDIILFWRLDRWFRNLSDFYKVQDILDEYGVRWMSASEPGINMETRDGRLQLNVVLSIGQNEVDTTSERIKFVNEASIRQGKLIFGDANMGYGYKSGIVDGRKCMVKDPEREETVNAFYKYFFKHQNKCATLRYIQDNYDPNFSWAIMRTLLSSEFYKGTYRGFPYCPPYLTEEQWNELQKVAHKNIKRAKSGRIYLFTSLIRCPVCGQLLCGTGCKSIINRKTREKRDYCYYRCSRAHNDRICTYRHRLSQNLIEQYLLDNLDTEYRKYQIRVKKIEEEKKKIAQTKTPEKLNAELERLNLLFQKGRVEWDYYSSEYDRIEQELKGLSKIKPEVKRNLSFLEDLLQSDFKTLYASLSPENRRAFWRSTIKQIHLNEDSTIKFVDFL

SEQ ID NO: 7741 - protein, 464 aa, Unknown
  Description of Unknown: Integrase B7742 sequence
  PTHR30461:SF3,SM00857,G3DSA:1.10.10.2600,IPR036162,PF13408, IPR025827,G3DSA:3.40.50.1390,PS51737,IPR006119,IPR038109, SSF53041,IPR011109,PTHR30461,PS51736,cd00338, PF00239
MNSTYFRPQPELFGLRVVKYIRCSHDGQVLHGDTLEAQDALLDEFIKVNRMVLIDTFIDEALTARKKFTRRKEFVRLLDGVRAHSFDMILFTKLDRWFRNIGDYHKIQEILEANGVQWKAITESYDTTTTNGRLHINIRLSVAQDECDRDSDRIKDVFAYKLKNKTYLSGSLPRGLKLDDEKHVIIDPEWKQFVLDMFDHFEQTNSKRGTLLYLKEKYGIYLCYDTISRNLRNSLYKGMYRDDPDFCEPLIEPERFDRIQVLGKRNVRQRYSNRTYVFTGLLICSSCNHYLVGQTTHRTLSDGTEKHYPSYRCNQRYQSHSCDRNRSYREDYVEEYLLQHIRPALSEYVAEYEVTGTNPARKNPAAEAAKIRTKMQKLYELYMDDLIDRDTYKRDYSAFQEKLKELDSIVVAPSRDLADLKKLLEQDYEEIYRTFSPQEKNAFWKSFVQSITVHEDGEMDIVFL

SEQ ID NO: 7742 - protein, 464 aa, Unknown
  Description of Unknown: Integrase B7743 sequence
  PTHR30461:SF3,SM00857,G3DSA:1.10.10.2600,IPR036162,PF13408, IPR025827,G3DSA:3.40.50.1390,PS51737,IPR006119,IPR038109, SSF53041,IPR011109,PTHR30461,PS51736,cd00338, PF00239
MNSTYFRPQPELFGLRVVKYIRCSHDGQVLHGDTLEAQDALLDEFIKVNRMVLIDTFIDEALTARKKFTRRKEFVRLLDGVRAHNFDMILFTKLDRWFRNIGDYHKIQEILEANGVQWKAITESYDTTTTNGRLHINIRLSVAQDECDRDSDRIKDVFAYKLKNKTYLSGSLPRGLKLDDEKHVIIDPEWKQFALDMFDHFEQTNSKRGTLLYLKEKYGIYLCYDTISRNLRNSLYKGMYRDDPDFCDPLIEPERFDRIQVLGKRNVRQRYSNRTYIFTGLLICSSCNHYLVGQTTHRTLSDGTEKHYPSYRCNQRYQSHSCDRNRSYREDYVEEYLLQHIRPALSEYVAEYEVTGTNPARKNPAAEAAKIRTKMQKLYELYMDDLIDRDTYKRDYSAFQEKLKELDSIVVAPSRDLADLKKLLEQDYEEIYRTFSPQEKNAFWKSFVQSITVHEDGEMDIVFL

SEQ ID NO: 7743 - protein, 464 aa, Unknown
  Description of Unknown: Integrase B7744 sequence
  PTHR30461:SF3,IPR036162,PS51737,IPR011109,PTHR30461, PS00397,PF00239,G3DSA:1.10.10.2600,IPR006119,SSF53041, SM00857,IPR025827,IPR038109,PS51736,cd03768, IPR006118,PF13408,G3DSA:3.40.50.1390,PF07508,Coil
MKRAALYIRVSTMEQAKEGYSIPAQTDKLKAFAKAKDMAVTKVYTDPGFSGAKMERPALQEMISDIQNKKIDVVLVYKLDRLSRSQKNTLYLIEDVFLKNNVDFISMQESFDTSTPFGRATIGMLSVFAQLERDTITERMHMGRTERAKQGYYHGSGIVPLGYDYVDGELIINDYEAQIIQEIYDLYVNQGKGQQYITKRMVAKYPDKVKTLTIVKYALTNPLYIGKISWDGKVYDGHHTPIIDKSMYDKAQEIIARKAQKGGEQHGNQLGLLLGITYCGKCGAKVFRYVSGGKKYRYNYYMCRSVKKMLPSLVKDWNCKQPSLRQEVVEKKVIDSLKSLDFKKIERELKQVENKTKSKITTINNQISKKHNEKQKILDLYQYGTFDVTMLNERMKKIDNEINALTDNISNLEGTKSESLINKLETLKTFNWETETTENKILIIKEFVERIELFDDEVIIKYKF

SEQ ID NO: 7744 - protein, 464 aa, Unknown
  Description of Unknown: Integrase B7745 sequence
  PTHR30461:SF3,SM00857,IPR006118,IPR036162,PS51737, G3DSA:3.40.50.1390,Coil,IPR006119,IPR011109,SSF53041, PTHR30461,PS00397,PS51736,cd00338,PF00239
MMTNKIIRCALYIRVSTAEQCMHGKSLEAQESYLQQYASDHNMIVVGVYADEGKTARKELKKRKAIHSLLEDVKAGKIDIILFWRLDRWFRNLSDFYKVQDILDEYGVRWMSASEPGINMETRDGRLQLNVVLSIGQNEVDTTSERIKFVNEASIRQGKLIFGDANMGYGYKSGIADGRKCMIKDPEREETVNAFYKYFFKHQNKCATLRYIQDNYDPNFSWAIMRTLLSSEFYKGTYRGFPYCPPYLTEDQWNELQKIAHKNIKRAKSGRIYLFTSLIRCPVCGQLLCGNGCKSIINRKTREKRDYCYYRCSRAHNDRICTYRHRLSQNLIEQYLLDNLDTEYRKYQIRVKKIEEEKKKIAQTKTPEKLNAELERLNLLFQKGRVEWDYYSSEYDRIEQELKDLSRIKPEVKRNLSFLEDLLQSDFKTLYASLSPENRRAFWRSTIKQIHLNEDSTIKFVDFL

SEQ ID NO: 7745 - protein, 464 aa, Unknown
  Description of Unknown: Integrase B7746 sequence
  PTHR30461:SF3,SM00857,G3DSA:1.10.10.2600,IPR036162,PF13408, IPR025827,G3DSA:3.40.50.1390,PS51737,IPR006119,IPR038109, IPR011109,SSF53041,PTHR30461,PS51736, cd00338,PF00239
MNSTYFRPQPELFGLRVVKYIRCSHDGQVLHGDTLEAQDALLDEFIKVNRMVLVDTFIDEALTARKKFTRRKEFVRLLDGVRSRIFDMILFTKLDRWFRNIGDYHKIQEILEENGVQWKAITESYDTTTTNGRLHINIRLSVAQDECDRDSDRIKDVFAYKLKNKTYLSGSLPRGLKLDDEKHVIIDPEWKQFALDMFDHFEQTNSKRGTLLYLKEKYGIYLCYDTISRNLRNSLYKGMYRDDPDFCEPLIEPERFDRIQVLGKRNVRQRYSNRTYIFTGLLICSSCNHYLVGQTTHRTLSDGTEKHYPSYRCNQRYQSHSCDRNRSYREDYVEEYLLQHIRPALSEYVAEYEVTGTNPARKNPAAEAAKIRTKMQKLYELYMDDLIDRDTYKRDYSAFQEKLKELDSIVVAPSRDLADLKKLLEQDYEEIYRTFSPQEKNAFWKSFVQSITVHEDGEMDIVFL

SEQ ID NO: 7746 - protein, 464 aa, Unknown
  Description of Unknown: Integrase B7747 sequence
  PTHR30461:SF3,SM00857,IPR006118,IPR036162,PF13408, PS51737,G3DSA:3.40.50.1390,Coil,IPR025827,IPR006119, SSF53041,IPR011109,PTHR30461,PS00397,PS51736, cd00338,PF00239
MPEKILRCAIYIRVSTFEQSVHGKSLQAQKECLEQYATDNNMSIVGVYADEGKTARKELKKRKAIHALVEDVKRDKIDVIIFWRLDRWFRNLSDFYKVQDVLDDHGVRWISVSEPGINMETRDGRLQLNVVLSIGQNEVDTTSERIKFVNEASIRQRKLIFGDANMPFGYKTGVVDGKKCMVKDPETEHMVEDFFNYFRIHNSKKGAVRYMQEVYGIDFSYGMLRTMLSSEFYKGTYRGYPYCPAYLSEKEWNEMQTISKRNIKSTPSGRVYLFTGLIRCPVCGQKLVGTGCSSVINRKTWEKRTYCYYRCNRALKDHICTYRHRVSQNLVEKYLLENLEREYEKYKVRSNQISEELKKQKKAKDPEKLRKEMERLNLLFQKGRISFDYYDKEYQRLEREYSASAAFCEEEETRNLHYVEELLKTDFRQMYDSLSPENRRSFWRSTIQEIYLNDDNTIKAVDFL

SEQ ID NO: 7747 - protein, 464 aa, Unknown
  Description of Unknown: Integrase B7748 sequence
  PTHR30461:SF3,SM00857,G3DSA:1.10.10.2600,IPR036162,PF13408, PS51737,IPR025827,G3DSA:3.40.50.1390,IPR006119,IPR038109, IPR011109,SSF53041,PTHR30461,PS51736,cd00338, PF00239
MNSTYFRPQPELFGLRVVKYIRCSHDGQVLHGDTLEAQDALLDEFIKVNRMVLVDTFIDEALTARKKFTRRKEFVRLLDGVRAHSFDMILFTKLDRWFRNIGDYHKIQEILEENGVQWKAITESYDTTTTNGRLHINIRLSVAQDECDRDSDRIKDVFAYKLKNKTYLSGSLPRGLKLDDEKHVIIDPEWKQFALDMFDHFEQTNSKRGTLLYLKEKYGIYLCYDTISRNLRNSLYKGMYRDDPDFCEPLIEPERFDRIQVLGKRNVRQRYSNRTYVFTGLLICSSCNHYLVGQTTHRTLSDGTEKHYPSYRCNQRYQSHSCDRNRSYREDYVEEYLLQHIRPALSEYVAEYEVTGTNPARKNPAAEAAKIRTKMQKLYELYMDDLIDRDTYKRDYSAFQEKLKELDSIVVAPSRDLADLKKLLEQDYEEIYRTFSPQEKNAFWKSFVQSITVHEDGEMDIVFL

SEQ ID NO: 7748 - protein, 464 aa, Unknown
  Description of Unknown: Integrase B7749 sequence
  PTHR30461:SF3,SM00857,IPR036162,PF13408,IPR025827, G3DSA:3.40.50.1390,PS51737,IPR006119,SSF53041,IPR011109, PTHR30461,PS51736,cd00338,PF00239
MNSTYFRPQPELFGLRVVKYIRCSHDGQVLHGDTLEAQDALLDEFIKVNRMILVDTFVDEALTARKKFTRRKEFVRLLDGVRAHNFDMILFTKLDRWFRNIGDYHKIQEILEANGVQWKAITESYDTTTTNGRLHINIRLSVAQDECDRDSDRIKDVFSYKLKNKTYLSGSLPRGLKLDAEKHVVIDPEWHQFTLDMFDHFESTCSKRGTQLFLQEKYGIRVCYDTVVRYLRNPLFMGQYRDDPEFCEKTISRERFEHIQNLAIRNVRIRHTQQFYIFSGLLICSSCNHYMTGTVTYRTLADGKEKTYKSYRCNFKAQSKLCDRSKHYREEYVEEYMLQHIRPALSSYVADFEVTAAAAAKKDPAIEIAKVERKMKKLYDLFMDDLIDKASYRSEYEKFQSQIDKLRSCPAAPVRNLDSIKKMLSDDWETVYHTFSDQEKNVFWKSFVQSITVHEDGEMDIVFL

SEQ ID NO: 7749 - protein, 464 aa, Unknown
  Description of Unknown: Integrase B7750 sequence
  PTHR30461:SF3,IPR036162,PS51737,IPR011109, PTHR30461,PS00397,PF00239,G3DSA:1.10.10.2600, IPR006119,SSF53041,cd00338,SM00857,IPR025827,IPR038109 ,PS51736,IPR006118,PF13408,G3DSA:3.40.50.1390,Coil
MRRKTTAPVEKILLRVAIYIRVSTDKQVKDGDSMRDQLATGQKYIDSHENMILVDTYIDDGISGQKLKRDDFQRLLDDVRAGRIDLIIFTRLDRWFRNLRHYLNTQDILDKHGVSWTAIEQPYFDTSTPHGRAFVNNSMIWAELEAQNDSDRILDVFDDKVDNGEVLSGSTPIGYKIESKHLVPDDDAPTAVSIFQYYRKSGNLSMTLRYMESEFGLVRSAASLKNMLTNTKYIGEFRDNKNYCPAIIDRDLFFDVQRLLDINIKDGKKHDYIFGGLVVCDDCDHIMSGCQQRSAGRIRADDGTRTVYKYSVYRCRQGVNLHRCPNRKLVFEKTLESMLLDRVRPELENYIAEYEVANLPALRTDAKRRSVESKMQKLKDLYLNDLITMDEFKLDREKLLMQLEKINAEDSRPIKDLSYLKSFLKMDFESVYDSLSIPERRELWRSIVKEIRVDHDKNIHIIFL

SEQ ID NO: 7750 - protein, 464 aa, Unknown
  Description of Unknown: Integrase B7751 sequence
  PTHR30461:SF3,SM00857,IPR036162,PF13408,PS51737, IPR025827,G3DSA:3.40.50.1390,IPR006119,IPR011109,SSF53041, PTHR30461,PS51736,cd00338,PF00239
MNSTYFRPQPELFGLRVVKYIRCSHDGQVLHGDTLEAQDALLDEFIKVNRMILVDTFVDEALTARKKFTRRKEFVRLLDGVRAHNFDMILFTKLDRWFRNIGDYHKIQEILEANGVQWKAITESYDTTTTNGRLHINIRLSVAQDECDRDSDRIKDVFSYKLKNKTYLSGSLPRGLKLDAEKHVVIDPEWHQFALDMFDHFESTCSKRGTQLFLQEKYGIRVCYDTVVRYLRNPLFMGQYRDDPEFCEKTISRERFEHIQNLAIRNVRIRHTQQFYIFSGLLICSSCNHYMTGTVTYRTLADGKEKTYKSYRCNFKAQSKLCDRSKHYREEYVEEYMLQHIRPALSSYVADFEVTAAAAAKKDPAIEIAKVERKMKKLYDLFMDDLIDKASYRSEYEKFQSQIDKLRSCPATPVRNLDSIKKMLSDDWETVYHTFSDQEKNVFWKSFVQSITVHEDGEMDIVFL

SEQ ID NO: 7751 - protein, 464 aa, Unknown
  Description of Unknown: Integrase B7752 sequence
  PTHR30461:SF3,IPR036162,PS51737,IPR011109, PTHR30461,PS00397,PF00239,G3DSA:1.10.10.2600, IPR006119,SSF53041,SM00857,IPR025827,IPR038109,PS51736 ,cd03768,IPR006118,PF13408,G3DSA:3.40.50.1390,PF07508,Coil
MKRAALYIRVSTMEQAKEGYSIPAQTDKLKAFAKAKDMAVTKIYTDPGFSGAKMERPALQEMISDIQNKKIDVVLVYKLDRLSRSQKNTLYLIEDVFLKNNVDFISMQESFDTSTPFGRATIGMLSVFAQLERDTITERMHMGRTERAKQGYYHGSGIVPLGYDYVDGELIINDYEAQIIQEIYDLYVNQGKGQQYITKRMVAKYPDKVKTLTIVKYALTNPLYIGKISWDGKVYDGHHTPIIDKSMYDKAQEIIARMAQKGGEQHGNQLGLLLGITYCGKCGAKVFRYVSGGKKYRYNYYMCRSVKKMLPSLVKDWNCKQPSLRQEVVEKKVIDSLKSLDFKKIERELKQVENKTKSKITTINNQISKKHNEKQKILDLYQYGTFDVTMLNERMKKIDNEINALTANIANLEGTKSESLINKLETLKTFNWETETTENKILIIKEFVERIELFDDEVIIKYKF

SEQ ID NO: 7752 - protein, 464 aa, Unknown
  Description of Unknown: Integrase B7753 sequence
  PTHR30461:SF3,SM00857,IPR006118,IPR036162,PF13408, PS51737,G3DSA:3.40.50.1390,Coil,IPR025827,IPR006119, IPR011109,SSF53041,PTHR30461,PS00397,PS51736, cd00338,PF00239
MQEKILRCAIYIRVSTFEQSVHGKSLQAQEECLKQYAADHNMAVVGIYADEGKTARKELKKRKAIHALVEDVKQDKIDVIVFWRLDRWFRNLSDFYKVQDVLDEHGVRWISVSEPGINMETRDGRLQLNVVLSIGQNEVDTTSERIKFVNEASIRQKKLIFGDANMPFGYKTGVVDGKKCMVKDSETEHMVEDFFEYFRNHNSKKGAIRYMQETYGIDFSYGMLRTMLSSEFYKGTYRGYPYCPAYLSEKEWDEMQTISKRNIKNTPSGRIYLFTGLMRCPVCGQKLVGTGCSSIVNRKTRKKRTYCYYRCNRALIDHICTYRHRVSQNLIEKYLLENLEREYEKYKVRTNQISEELKKQKKTKDPEKLRKEMERLNLLFQKGRISYDYYDKEYQRLEEEHSASAAFPEEEETRSLHYVEELLETDFRQMYDTLSLENRRSFWRSTIQEIYLNEDNTIKGVDFI

SEQ ID NO: 7753 - protein, 464 aa, Unknown
  Description of Unknown: Integrase B7754 sequence
  PTHR30461:SF3,SM00857,G3DSA:1.10.10.2600,IPR036162,PF13408, IPR025827,G3DSA:3.40.50.1390,PS51737,IPR006119,IPR038109, SSF53041,IPR011109,PTHR30461,PS51736,cd00338, PF00239
MNSTYFRPQPELFGLRVVKYIRCSHDGQVLHGDTLEAQDALLDEFIKVNRMVLIDTFIDEALTARKKFTRRKEFVRLLDGVRSRSFDMILFTKLDRWFRNIGDYHKIQEILEENGVQWKAITESYDTTTTNGRLHINIRLSVAQDECDRDSDRIKDVFAYKLKNKTYLSGSLPRGLKLDDEKHVIIDPEWKQFALDMFDHFEQTNSKRGTLLYLKEKYGIYLCYDTISRNLRNSLYKGMYRDDPDFCEPLIESERFDRIQVLGKRNVRQRYSNRTYIFTGLLICSSCNHYLVGQTTHRTLSDGTEKHYPSYRCNQRYQSHSCDRNRSYREDYVEEYLLQHIRPVLSEYVAEYEVTGTNPARKNPAAEAAKIRTKMQKLYELYMDDLIDRDTYKRDYSAFQEKLKELDSIVVAPSRDLADLKKLLEQDYEEIYRTFSPQEKNAFWKSFVQSITVHEDGEMDIVFL

SEQ ID NO: 7754 - protein, 464 aa, Unknown
  Description of Unknown: Integrase B7755 sequence
  PTHR30461:SF3,SM00857,G3DSA:1.10.10.2600,IPR036162,PF13408, IPR025827,G3DSA:3.40.50.1390,PS51737,IPR006119,IPR038109, IPR011109,SSF53041,PTHR30461,PS51736,cd00338, PF00239
MNSTYFRPQPELFGLRVVKYIRCSHDGQVLHGDTLEAQDALLDEFIKVNRMVLVDTFIDEALTARKKFTRRKEFVRLLDGVRSRSFDMILFTKLDRWFRNIGDYHKIQEILEENGVQWKAITESYDTTTTNGRLHINIRLSVAQDECDRDSDRIKDVFAYKLKNKTYLSGSLPRGFKLDDEKHVIIDPEWKQFALDMFDHFEQTNSKRGTLLYLKEKYGIYLCYDTISRNLRNSLYKGMYRDDPDFCEPLIEPERFDRIQVLGKRNVRQRYSNRTYIFTGLLICSSCNHYLVGQTTHRTLSDGTEKHYPSYRCNQRYQSHSCDRNRSYREDYVEEYLLQHIRPALSEYVAEYEVTGTNPARKNPAAEAAKIRTKMQKLYELYMDDLIDRDTYKRDYSAFQEKLKELDSIVVAPSRDLADLKKLLEQDYEEIYRTFSPQEKNAFWKSFVQSITVHEDGEMDIVFL

SEQ ID NO: 7755 - protein, 464 aa, Unknown
  Description of Unknown: Integrase B7756 sequence
  SM00857,IPR006118,IPR036162,PF13408,IPR025827, G3DSA:3.40.50.1390,PS51737,IPR006119,IPR011109,SSF53041, PF00239,PTHR30461,PS00397,PS51736,Coil, cd00338
MKSKTLRCAIYIRVSTTEQMMHGKSLEAQKDYLIHYAKEHDMNIVGIYADEGKTARKELKRRKAIQELVKAVERDEIDVILFWRLDRWFRNLSDFYKVQDILDQHNVRWISASEPGINMETRDGRLQLNVVLSIGQNEVDTTSERIKFVNEASIRQGKVIFGDSNMPIGYIVGTVDGVKRMVKDPEKEDLVNAFYRYFRTHQSKMKTLKFIQENYDPTFSYSQLRNMLESDFYHGAYRDNPHYCPAYLTEKEWAEIQEISNRNVKHPSSGRVYLFSGMMRCPVCGQLLAGRGGSSIINRKTRETRTYCYYRCNKACIDHMCTYRHNVSQNLIEEYLISNLEEEYNRYKIQSQNIHSKADLPKKKRTPAQVKKEMQRLNLLFQKERIEWDYYNEEYEKLTTELSSLKESDQQPKTNFDNIEKILHNDFRKTYDNLSPENRRAFWRSIIKEIHINTSHEVTGIDFY

SEQ ID NO: 7756 - protein, 464 aa, Unknown
  Description of Unknown: Integrase B7757 sequence
  PTHR30461:SF3,SM00857,IPR006118,IPR036162,PF13408, IPR025827,PS00397,G3DSA:3.40.50.1390,PS51737,IPR006119, SSF53041,IPR011109,PTHR30461,Coil,PS51736, cd00338,PF00239
MQEKILRCAIYIRVSTFEQSVHGKSLQAQKECLEQYATDNNMSIVGVYADEGKTARKELKKRKAIHALIEDVKKDRIDVILFWRLDRWFRNLSDFYKVQDVLDEHGVRWISVSEPGINMETRDGRLQLNVVLSIGQNEVDTTSERIKFVNEASIRQKKLIFGDANMPFGYKTGVVDGKKCMVKDPETEHMVEDFFNYFRIHNSKKGAVRYMQETYGVDFSYGMLRTMLSSEFYKGTYRGYPYCPAYLSEKEWNEMQIISKRNIKNTPSGRIYLFTGLMRCPVCGQKLVGTGCSSIINRKTGEKRTYCYYRCNRALIDHICTYRHRVSQNLIEKYLLENLEREYEKYKVRSNQISEELKKEKKAKDPEKLRKEMERLNLLFQKGRISFDYYDKEYQRLEEEYSASAAFPEEEETRSLHYVEELLETDFRQMYDSLSLENRRSFWRSTIREIYLNEDNTIKCVDFI

SEQ ID NO: 7757 - protein, 464 aa, Unknown
  Description of Unknown: Integrase B7758 sequence
  PTHR30461:SF3,IPR036162,PS51737,IPR011109,PTHR30461, PS00397,PF00239,G3DSA:1.10.10.2600,IPR006119,SSF53041, cd00338,SM00857,IPR025827,IPR038109,PS51736, IPR006118,PF13408,G3DSA:3.40.50.1390,Coil
MSEKLKRCALYIRVSTAEQCMHGKSLEAQREYLARYAKDHGMIPVGVYADEGKTARKELKKRKAIHALLEDVKAGKIDVILFWRLDRWFRNMSDFYKVQDILDEYGVYWISASEPGINMETRDGRLQLNVVLSIGQNEVDTTSERIKFVNEASIRQGKVIFGDCNMPRGYKVGIVDGKKCMVKDPEQEEMVNAFYDYFEKHQAKQATLRYMQRNYDPTFSYSVLRTMLSSEFYKGTYRGIPYCPAYVSEERWARIQQISKKTAKQTPSGRIYYFSGMIRCPVCGQLLAGTGCRSIINRKTGEKKDYCYYRCNRAMIDRICTNRHRLSQNLIESYLLDNLEHEFNAYKIRVEDIKKQKTKERPKVRTEKQIDKEMERLNILFQKGRIDWDYYSDEYDALEKEKREIAVIVPEPEQDYTFIEELLQKDFRSIYNSLSPENRRAFWRNTIRQIHLTPEYTVDFVDFI

SEQ ID NO: 7758 - protein, 464 aa, Unknown
  Description of Unknown: Integrase B7759 sequence
  PTHR30461:SF3,SM00857,G3DSA:1.10.10.2600,IPR036162,PF13408, IPR025827,PS51737,G3DSA:3.40.50.1390,IPR006119,IPR038109, IPR011109,SSF53041,PTHR30461,PS51736,cd00338, PF00239
MNSTYFRPQPELFGLRVVKYIRCSHDGQVLHGDTLEAQDALLDEFIKVNRMVLIDTFIDEALTARKKFTRRKEFVRLLDGVRSRSFDMILFTKLDRWFRNIGDYHKIQEILEENGVQWKAITESYDTTTTNGRLHINIRLSVAQDECDRDSDRIKDVFAYKLKNKTYLSGSLPRGLKLDDEKHVIIDPEWKQFALDMFDHFEQTNSKRGTLLYLKEKYGIYLCYDTISRNLRNSLYKGMYRDDPDFCEPLIEPERFDRIQVLGKRNVRQRYSNRTYIFTGLLICSSCNHYLVGQTTHRTLSDGTEKHYPSYRCNQRYQSHSCDRNRSYREDYVEEYLLQHIRPALSEYVAEYEVTGTTPARKNPAAEAAKIRTKMQKLYELYMDDLIDRDTYKRDYSAFQEKLKELDSIVVAPSRDLADLKKLLEQDYEEIYRTFSPQEKNAFWKSFVQSITVHEDGEMDIVFL

SEQ ID NO: 7759 - protein, 464 aa, Unknown
  Description of Unknown: Integrase B7760 sequence
  PTHR30461:SF3,SM00857,IPR036162,PF13408,PS51737, IPR025827,G3DSA:3.40.50.1390,IPR006119,IPR011109,SSF53041, PF00239,PTHR30461,PS51736,Coil,cd00338
MNSTYFRPQPELFGLRVVKYIRCSHDGQVLHGDTLEAQDALLDEFIKVNRMVLIDTFIDEALTARKKFTRRKEFVRLLDGVRAHSFDMILFTKLDRWFRNIGDYHKIQEILEANGVQWKAITESYDTTTTNGRLHINIRLSVAQDECDRDSDRIKDVFAYKLKNKTYLSGSLPRGLKLDAEKHVVIDPEWHQFALDMFDRFEFTCSKRGTQLFLQEKYGIRVCYDTVVRYLRNPLFMGQYRDDPDFCEKTISRERFERIQNLAIRNVRIRHTQQFYIFSGLLICSSCNHYMTGTVTYRTLADGKEKTYKSYRCNFKAQSKLCDRSKHYREEYVEEYMLQHIRPALSSYVADFEVTAAAAAKKDPAIEIAKVERKMKKLYDLFMDDLIDKASYRNEYEKFQSQIDKLRSCPAAPVRNLDSIKKMLSDDWETVYHTFSDQEKNVFWKSFVQSITVHEDGEMDIVFL

SEQ ID NO: 7760 - protein, 464 aa, Unknown
  Description of Unknown: Integrase B7761 sequence
  PTHR30461:SF3,SM00857,G3DSA:1.10.10.2600,IPR036162,PF13408, IPR025827,PS51737,G3DSA:3.40.50.1390,IPR006119,IPR038109, PF07508,SSF53041,IPR011109,PTHR30461, PS51736,cd00338,PF00239
MRKCTAFALHNDIQIVGEYIDRAFSAKTDNRPSFQKMIKDSAKGEFDVIIVWKLDRFARNRYDSAHYKNILKKNGVKVVSATEAISSGAEGIILESVLEGMAEYYSAELAEKVSRGMKENALKCKYNGGSVPLGYYIDESKHFQIDSSVAPFVVECFEHYADGMTMKQLRDELNMKGVKNSRGGKLSIDVISRMLTNRKYLGEYTFQDITIKDGIPAIVSTSLFEKVQDRLTKTKKAPSSHKADDDYILTTKLFCGKCKSFMVGESGTNAQGKKYRYYKCVNHKKHQGCDMKSIRKDLIENMTIKYIREFLNDEDLINTLIDLAYDAQHKENEQLPLLRKQLAQTEKGIKNIVDAIEQGISTKSTRERLLDLEQRKNDIEMSISKESIENPMLTKKQFKFWFDQLKKLDISKSEQRQKLVDLFVNSIIIYDDHIKFFFNYKEHTETITFDELNNCSDLPDSPRP

SEQ ID NO: 7761 - protein, 464 aa, Unknown
  Description of Unknown: Integrase B7762 sequence
  SM00857,G3DSA:1.10.10.2600,IPR036162,PS51737,G3DSA:3.40.50.1390, IPR006119,IPR038109,PF07508,SSF53041,IPR011109, PF00239,PTHR30461,PS51736,Coil,cd00338
MREVKKAIAYFRVSTDMQKEDLSLETQEKGGEIFARDNNIEIVKKFTDVMSGGNRNRKGFIEAQKYLEENQGEIDYFIAYDVSRIARDAFAFLSLFNKLNLLNVKLKLINNPTLDSDSPMGKLILTILAAIFEFFRFDNADRVRDNMIVKVKEGKRMNNAPYGYRIIDKKMVIVPEEAELIKYIYQEYLKGHGIVALERMTGKDRSTIKQWLNNKVYAGYNIFGKRKMNKTTFKPMKNPDETKIVEAKGDWEPIIDIDTWEKVANRMSLNQELRMRNIEKTSYLLSGLLFHTCGSKFRGNAGRKGTYYYRCTGCSRSIKSDTLDKKVLDELFNSEFLDELNKIPLENNNKDNELKKLKAQKSKLKTREENLIELYADGDITKEQFKSKKVDIQNSLIDIEAKIIELENERNEVKQNLDFKKMFIEALSNLKNAESKQEANKILKQIIKKIEVNEEREVFIHLNF

SEQ ID NO: 7762 - protein, 464 aa, Unknown
  Description of Unknown: Integrase B7763 sequence
  PTHR30461:SF3,SM00857,IPR036162,PF13408,PS51737, G3DSA:3.40.50.1390,IPR025827,IPR006119,IPR011109,SSF53041, PTHR30461,PS51736,cd00338,PF00239
MNSTYFRPQPELFGLRVVKYIRCSHDGQVLHGDTLEAQDALLDEFIKVNRMILVDTFVDEALTARKKFTRRKEFVRLLDGVRAHNFDMILFTKLDRWFRNIGDYHKIQEILEANGVQWKAITESYDTTTTNGRLHINIRLSVAQDECDRDSDRIKDVFSYKLKNKTYLSGSLPRGLKLDAEKHVVIDPEWHQFALDMFDHFESTCSKRGTQLFLQEKYGIRVCYDTVVRYLRNPLFMGQYRDDPEFCEKTISRERFEHIQNLAIRNVRIRHTQQFYIFSGLLICSSCNHYMTGTVTYRTLADGKEKTYKSYRCNFKAQSKLCDRSKHYREEYVEEYMLQHIRPALSSYVADFEVTAAAAAKKDPAIEIAKVERKMKKLYDLFMDDLIDKASYRSEYEKFQSQIDKLRSCPAAPVRNLDSIKKMLSDDWETVYHTFSDQEKNVFWKSFVQSITVHEDGEMDIVFL

SEQ ID NO: 7763 - protein, 464 aa, Unknown
  Description of Unknown: Integrase B7764 sequence
  PTHR30461:SF3,SM00857,G3DSA:1.10.10.2600,IPR036162,PF13408, IPR025827,PS51737,G3DSA:3.40.50.1390,IPR006119,IPR038109, IPR011109,SSF53041,PTHR30461,PS51736,cd00338, PF00239
MNSTYFRPQPELFGLRVVKYIRCSHDGQVLHGDTLEAQDALLDEFIKVNRMVLVDTFVDEALTARKKFTRRKEFVRLLDGVRSHSFDMILFTKLDRWFRNIGDYHKIQEILEANGVQWKAITESYDTTTTNGRLHINIRLSVAQDECDRDSDRIKDVFAYKLKNKTYLSGSLPRGLKLDDEKHVIIDPEWKQFALDMFDHFEQTNSKRGTLLYLKEKYGIYLCYDTISRNLRNSLYKGMYRDDPDFCEPLIEPERFDRIQVLGKRNVRQRYSNRTYIFTGLLICSSCNHYLVGQTTHRTLSDGTEKHYPSYRCNQRYQSHSCDRNRSYREDYVEEYLLQHIRPALSEYVAEYEVTGTNPARKNPAAEAAKIRTKMQKLYELYMDDLIDRDTYKRDYSAFQEKLKELDSIVVAPSRDLADLKKLLEQDYEEIYRTFSPQEKNAFWKSFVQSITVHEDGEMDIVFL

SEQ ID NO: 7764 - protein, 464 aa, Unknown
  Description of Unknown: Integrase B7765 sequence
  PTHR30461:SF3,SM00857,IPR036162,PF13408,PS51737, G3DSA:3.40.50.1390,IPR025827,IPR006119,IPR011109,SSF53041, PF00239,PTHR30461,PS51736,Coil,cd00338
MNSTYFRPQPELFGLRVVKYIRCSHDGQVLHGDTLEAQDALLDEFIKVNRMVLIDTFIDEALTARKKFTRRKEFVRLLDGVRAHSFDMILFTKLDRWFRNIGDYHKIQEILEANGVQWKAITESYDTTTTNGRLHINIRLSVAQDECDRDSDRIKDVFAYKLKNKTYLSGSLPRGLKLDAEKHVVIDPEWHQFALDMFDRFESTCSKRGTQLFLQEKYGIRVCYDTVVRYLRNPLFMGQYRDDPDFCEKTISRERFERIQNLAIRNVRIRHTQQFYIFSGLLICSSCNHYMTGTVTYRTLADGKEKTYKSYRCNFKAQSKLCDRSKHYREEYVEEYMLQHIRPALSSYVADFEVTAAAAAKKDPAIEIAKVERKMKKLYDLFMDDLIDKASYRNEYEKFQSQIDKLRSCPAAPVRNLDSIKKMLSDDWETVYHTFSDQEKNVFWKSFVQSITVHEDGEMDIVFL

SEQ ID NO: 7765 - protein, 464 aa, Unknown
  Description of Unknown: Integrase B7766 sequence
  PTHR30461:SF3,SM00857,IPR006118,IPR036162,PF13408, PS51737,G3DSA:3.40.50.1390,IPR025827,IPR006119,IPR011109, SSF53041,PF00239,PTHR30461,PS00397, PS51736,Coil,cd00338
MQEKILRCAIYIRVSTFEQSVHGKSLQAQKECLKQYAADHNMAVVGIYADEGKTARKELKKRKAIHALVEDVKKDRIDVILFWRLDRWFRNLSDFYKVQDVLDAHGVRWISVSEPGINMETRDGRLQLNVVLSIGQNEVDTTSERIKFVNESSIRQKKLIFGDANMPFGYKTGVVDGKKCMVKDPETEHMVEDFFKYFKSHNSKKGAVRYMQEAYGIDFSYGMLRTMLSSEFYKGTYRGYPYCPAYLSEKEWNEMQIISKRNIKNTPSGRIYLFTGLMRCPVCGQKLVGTGCSSIIDRKTREKRTYCYYRCNRALKDHICTYRHRVSQNLIEKYLLENLEREYEKYKVRSNKISEELKKQKKAKDPKKLRKEMERLNILFQKGRISYDYYDKEYQRLEREYSASAAFCEEEETRNLHYVEELLKTDFRQMYDSLSPENRRSFWRSTIQEIYLNDDNTIKAVDFL

SEQ ID NO: 7766 - protein, 464 aa, Unknown
  Description of Unknown: Integrase B7767 sequence
  cd00338,SM00857,IPR006118,G3DSA:1.10.10.2600,IPR036162, PF13408,PS51737,G3DSA:3.40.50.1390,IPR025827,IPR006119, IPR038109,SSF53041,IPR011109,PTHR30461,PS00397, PS51736,Coil,PF00239
MKSKTLRCAIYIRVSTTEQMMHGKSLEAQKDYLIHYAKEHDMNIVGIYADEGKTARKELKRRKAIQELVKAVERDEIDVILFWRLDRWFRNLSDFYKVQDILDQHNVRWISASEPGINMETRDGRLQLNVVLSIGQNEVDTTSERIKFVNEASIRQGKVIFGDSNMPIGYMVGTVDGVKRMVKDPEKEDLVNAFYRYFRTHQSKMKTLKFIQENYDPTFSYSQLRNMLESDFYHGTYRDNPHYCPAYLTEKEWAEIQEISNRNVKHPSSGRVYLFSGMMRCPVCGQLLAGRGGSSIINRKTRETRTYCYYRCNKACIDHMCTYRHNVSQNLIEEYLISNLEEEYNRYKIQSQNIHSKADLPKKKRTPEQVKKEMQRLNLLFQKERIEWDYYNEEYEKLTTELSSLEESDQQPKTNFDNIEKILHNDFRKTYDNLSPENRRAFWRSIIKEIHINTNHEVTGIDFY

SEQ ID NO: 7767 - protein, 464 aa, Unknown
  Description of Unknown: Integrase B7768 sequence
  PTHR30461:SF3,SM00857,G3DSA:1.10.10.2600,IPR036162,PF13408, IPR025827,PS51737,G3DSA:3.40.50.1390,IPR006119,IPR038109, IPR011109,SSF53041,PTHR30461,PS51736,cd00338, PF00239
MNSTYFRPQPELFGLRVVKYIRCSHDGQVLHGDTLEAQDALLDEFIKVNRMVLIDTFIDEALTARKKFTRRKEFVRLLDGVRAHSFDMILFTKLDRWFRNIGDYHKIQEILEANGVQWKAITESYDTTTTNGRLHINIRLSVAQDECDRDSDRIKDVFAYKLKNKTYLSGSLPRGLKLDDEKHVIIDPEWKQFALDMFDHFEQTNSKRGTLLYLKEKYGIYLCYDTISRNLRNSLYKGMYRDDPDFCEPLIEPERFDRIQVLGKRNVRQRYSNRTYIFTGLLICSSCNHYLVGQTTHRTLSDGTEKHYPSYRCNQRYQSHSCDRNRSYREDYVEEYLLQHIRPALSEYVAEYEVTGTNPARKNPAAEAAKIRTKMQKLYELYMDDLIDRDTYKRDYSAFQEKLKELDSIVVAPSRDLADLKKLLEQDYEEIYRTFSPQEKNAFWKSFVQSITVHEDGEMDIVFL

SEQ ID NO: 7768 - protein, 464 aa, Unknown
  Description of Unknown: Integrase B7769 sequence
  PTHR30461:SF3,cd00338,SM00857,IPR036162,PF13408, PS51737,G3DSA:3.40.50.1390,IPR025827,IPR006119,SSF53041, IPR011109,PTHR30461,PS51736,Coil,PF00239
MNSTYFRPQPELFGLRVVKYIRCSHDGQVLHGDTLEAQDALLDEFIKVNRMVLIDTFIDEALTARKKFTRRKEFVRLLDGVRAHNFDMILFTKLDRWFRNIGDYHKIQEILEANGVQWKAITESYDTTTTNGRLHINIRLSVAQDECDRDSDRIKDVFSYKLKNKTYLSGSLPRGLKLDAEKHVVIDPEWHQFALDMFDHFESTCSKRGTQLFLQEKYGIRVCYDTVVRYLRNPLFMGQYRDDPEFCEKTISRERFEHIQNLAIRNVRIRHTQQFYIFSGLLICSSCNHYMTGTVTYRTLADGKEKTYKSYRCNFKAQSKLCDRSKHYREEYVEEYMLQHIRPALSSYVADFEVTAAAAAKKDPAIEIAKVERKMKKLYDLFMDDLIDKASYRNEYEKFQSQIDKLRSCPAAPVRNLDSIKKMLSDDWETVYHTFSDQEKNVFWKSFVQSITVHEDGEMDIVFL

SEQ ID NO: 7769 - protein, 464 aa, Unknown
  Description of Unknown: Integrase B7770 sequence
  PTHR30461:SF3,IPR036162,PS51737,IPR011109,PTHR30461, PS00397,PF00239,G3DSA:1.10.10.2600,IPR006119,SSF53041, SM00857,IPR025827,IPR038109,PS51736, cd03768,IPR006118,PF13408,G3DSA:3.40.50.1390,PF07508,Coil
MKRAALYIRVSTMEQAKEGYSIPAQTDKLKAFAKAKDMAVTKIYTDPGFSGAKMERPALQEMISDIQNKKIDVVLVYKLDRLSRSQKNTLYLIEDVFLKNNVDFISMQESFDTSTPFGRATIGMLSVFAQLERDTITERMHMGRTERAKQGYYHGSGIVPLGYDYVDGELIINDYEAQIIQEIYDLYVNQGKGQQYITKRMVAKYPDKVKTLTIVKYALTNPLYIGKISWDGKVYDGHHTPIIDKSMYDKAQEIIARKAQKGGEQHGNQLGLLLGITYCGKCGAKVFRYVSGGKKYRYNYYMCRSVKKMLPSLVKDWNCKQPSLRQEVVEKKVIDSLKSLDFKKIERELKQVENKTKSKITTINNQISKKHNEKQKILDLYQYGTFDVTMLNERMKKIDNEINALTANIANLEGTKSESLINKLETLKTFNWETETTENKILIIKEFVERIELFDDEVIIKYKF

SEQ ID NO: 7770 - protein, 464 aa, Unknown
  Description of Unknown: Integrase B7771 sequence
  PTHR30461:SF3,SM00857,G3DSA:1.10.10.2600,PS51736,IPR036162, PS51737,G3DSA:3.40.50.1390,PF13408,IPR025827,IPR006119, IPR038109,PF07508,IPR011109,SSF53041,PTHR30461, mobidb-lite,cd00338,PF00239
MNEKTMTLTRMEAPAQLPVRKRVAAYARVSMEKDAMLHSLAAQVSYYSERIQRNPEWEYAGVFADFGLTGTKETRPEFQRMLQECREGKIDLILVKSISRFARNTLTLLNTVRELKGLGIGVYFEEQKLDTLSGDGEFMLTILASFAQEESRSVSENCKWRIRKKFEQGIPTGFGMYGYKVRNGSFAIKPEEAAVVRRIFQMYLEGMGSVKIMKLLTEEGVPAPLGGLWNASVVMEMLKNEKYVGDLLLQKFYTNNHVEKKRFHNRGELPQYFVGEDHEPIIDRETFDAVQREIAWRTAQRKAAKAKRTATNAELSASAVEPSMSSSGNNSRETIPLTDRIYCGVCGKRYRYKVTRLGTPYAAPVWICSTFNYRGKAYCASKQIPEDILKELIASALGTVYTEDSVHHIEMHPGNRVLFVFQDGHTEEHFWEDHSRKDSWNEEKRQKAAEKTRIQHQKRKEQEQ

SEQ ID NO: 7771 - protein, 464 aa, Unknown
  Description of Unknown: Integrase B7772 sequence
  PTHR30461:SF3,SM00857,G3DSA:1.10.10.2600,IPR036162,PF13408, IPR025827,PS51737,G3DSA:3.40.50.1390,IPR006119,IPR038109, IPR011109,SSF53041,PTHR30461,PS51736,cd00338, PF00239
MNSTYFRPQPELFGLRVVKYIRCSHDGQVLHGDTLEAQDALLDEFIKVNRMVLIDTFIDEALTARKKFTRRKEFVRLLDGVRAHSFDMILFTKLDRWFRNIGDYHKIQEILEANGVQWKAITESYDTTTTNGRLHINIRLSVAQDECDRDSDRIKDVFAYKLKNKTYLSGSLPRGLKLDDEKHVIIDPEWKQFALDMFDHFEQTNSKRGTLLYLKEKYGIYLCYDTISRNLRNSLYKGMYRDDPDFCEPLIEPERFDRIQVLGKRNVRQRYSNRTYIFTGLLICSSCNHYLVGQTTHRTLSDGTEKHYPSYRCNQRYQSHSCDRNRSYREDYVEEYLLQHIRPALSEYVAEYEVTGTNPARKNPAAEAAKIRTKMQKLYELYMDDLIDRDTYKRDYSAFQEKLKELDSIVVAPSRDLADLKKLLEQDYEDIYRTFSPQEKNAFWKSFVQSITVHEDGEMDIVFL

SEQ ID NO: 7772 - protein, 464 aa, Unknown
  Description of Unknown: Integrase B7773 sequence
  PTHR30461:SF3,SM00857,G3DSA:1.10.10.2600,IPR036162,PF13408, IPR025827,PS51737,G3DSA:3.40.50.1390,IPR006119,IPR038109, IPR011109,SSF53041,PTHR30461,PS51736,cd00338, PF00239
MNSTYFRPQPELFGLRVVKYIRCSHDGQVLHGDTLEAQDALLDEFIKVNRMVLVDTFIDEALTARKKFTRRKEFVRLLDGVRAHNFGMILFTKLDRWFRNIGDYHKIQEILEANGVQWKAITESYDTTTTNGRLHINIRLSVAQDECDRDSDRIKDVFAYKLKNKTYLSGSLPRGLKLDDEKHVIIDPEWKQFALDMFDHFEQTNSKRGTLLYLKEKYGIYLCYDTISRNLRNSLYKGMYRDDPDFCEPLIEPERFDRIQVLGKRNVRQRYSNRTYIFTGLLICSSCNHYLVGQTTHRTLSDGTEKHYPSYRCNQRYQSHSCDRNRSYREDYVEEYLLQHIRPALSEYVAEYEVTGTNPARKNPAAEAAKIRTKMQKLYELYMDDLIDRDTYKRDYSAFQEKLKELDSIVVAPSRDLADLKKLLEQDYEEIYRTFSPQEKNAFWKSFVQSITVHEDGEMDIVFL

SEQ ID NO: 7773 - protein, 464 aa, Unknown
  Description of Unknown: Integrase B7774 sequence
  PTHR30461:SF3,SM00857,G3DSA:1.10.10.2600,IPR036162,PF13408, IPR025827,G3DSA:3.40.50.1390,PS51737,IPR006119,IPR038109, IPR011109,SSF53041,PTHR30461,PS51736,cd00338, PF00239
MNSTYFRPQPELFGLRVVKYIRCSHDGQVLHGDTLEAQDSLLDEFIAVNRMVLVDTFIDEALTARKKFTRRKEFVRLLDGVRSRSFDMILFTKLDRWFRNIGDYHKIQEILEANGVQWKAITESYDTTTTNGRLHINIRLSVAQDECDRDSDRIKDVFAYKLKNKTYLSGSLPRGLKLDDEKHVIIDPEWKQFALDMFDHFEQTNSKRGTLLYLKEKYGIYLCYDTISRNLRNSLYKGMYRDDPDFCEPLIEPERFDRIQVLGKRNVRQRYSNRTYIFTGLLICSSCNHYLVGQTTHRTLSDGTEKHYPSYRCNQRYQSHSCDRNHSYREDYVEEYLLQHIRPALSEYVAEYEVTGTNPARKNPAAEAAKIRTKMQKLYELYMDDLIDRDTYKRDYSAFQEKLKELDSIVVAPSRDLADLKKLLEQDYEEIYRTFSPQEKNAFWKSFVQSITVHEDGEMDIVFL

SEQ ID NO: 7774 - protein, 464 aa, Unknown
  Description of Unknown: Integrase B7775 sequence
  PTHR30461:SF3,SM00857,IPR036162,PF13408,PS51737, G3DSA:3.40.50.1390,IPR025827,IPR006119,IPR011109,SSF53041, PF00239,PTHR30461,PS51736,Coil,cd00338
MNSTYFRPQPELFGLRVVKYIRCSHDGQVLHGDTLEAQDALLDEFIKVNRMVLVDTFIDEALTARKKFTRRKEFVRLLDGVRSHSFDMILFTKLDRWFRNIGDYHKIQEVLEANGVQWKAITESYDTTTTNGRLHINIRLSVAQDECDRDSDRIKDVFAYKLKNKTYLSGSLPRGLKLDAEKHVVIDPEWHQFALDMFDHFESTCSKRGTQLFLQEKYGIRVCYDTVVRYLRNPLFMGQYRDDPDFCEKTISRERFEHIQNLAIRNVRIRHTQQFYIFSGLLICSSCNHYMTGTVTYRTLADGKEKTYKSYRCNFKAQSKLCDRSKHYREEYVEEYMLQHIRPALSSYVADFEVTAAAAAKKDPAIEIAKVERKMKKLYDLFMDDLIDKASYRNEYEKFQSQIDKLRSCPAAPVRNLDSIKKMLSDDWETVYHTFSDHEKNVFWKSFVQSITVHEDGEMDIVFL

SEQ ID NO: 7775 - protein, 464 aa, Unknown
  Description of Unknown: Integrase B7776 sequence
  PTHR30461:SF3,cd00338,SM00857,IPR006118,G3DSA:1.10.10.2600, IPR036162,PS51737,G3DSA:3.40.50.1390,IPR006119,IPR038109, PF07508,IPR011109,SSF53041,PTHR30461, PS00397,PS51736,Coil,PF00239
MKKQLKALIYARVSTVMQEEGDSLVYQKKKCEDFCSVKGYEIYKILEDVESGANDDRSGFIELQNEIARKNFDVLVVFESSRISRKTLTMLNFVLSLEENGIKFTSISQPELDTTTPTGMLFFQIQSSLGEYERKQISSRVKSSKWQRIKDGLWQGGSIPLGYKKENDNIVVDEKGVNEVKSIFFHYLSSHSLKQTSRAFNKPIGSIKWILENPFYLGKLTYGKKEKNINTGIIKINSSYHVFEGKHPPIIDEETFDTVQKILTTKKRVIQSENVLLFSGLIRCTCGEKMYKNTSMNKGNIRIRYYCKNCYKTIAYKKAEDIIIKALLDMKELEEINDVVDSENKILNDKMEIYKASMKQVNDERKKYINLYSKDYITIEDLDEKMQVTKSKIDDFTDKINKLQKVIDEEKITKNYNSNLETLKAVLKDMDKSDRIDLYNMFKLLIKKIDLISSKPPEFKIYLK

SEQ ID NO: 7776 - protein, 464 aa, Unknown
  Description of Unknown: Integrase B7777 sequence
  PTHR30461:SF3,SM00857,IPR006118,IPR036162,PF13408, IPR025827,G3DSA:3.40.50.1390,PS00397,PS51737,IPR006119, IPR011109,SSF53041,PTHR30461,Coil,PS51736, cd00338,PF00239
MQEKILRCAIYIRVSTFEQSVHGKSLQAQKECLKQYAADHNMAVVGIYADEGKTARKELKKRKAIHALVEDVKKDRIDVILFWRLDRWFRNLSDFYKVQDVLDAHGVRWISVSEPGINMETRDGRLQLNVVLSIGQNEVDTTSERIKFVNESSIRQKKLIFGDANMPFGYKTGVVDGKKCMVKDPETEHMVEDFFKYFKSHNSKKGAVRYMQEAYGIDFSYGMLRTMLSSEFYKGTYRGYPYCPAYLSEKEWNEMQIISKRNIKNTPSGRIYLFTGLMRCPVCGQKLVGTGCSSIIDRKTREKRTYCYYRCNRALIDHICTYRHRVSQNLVEKYLLENLEREYEKYKVRSNQIGEELKKQKKAKDPEKLRKEMERLNLLFQKGRISFDYYDKEYQRLEREYSASAAFCEEEETRNLHYVEELLKTDFRQMYDSLSPENRRSFWRSTIQEIYLNDDNTIKAVDFL

SEQ ID NO: 7777 - protein, 464 aa, Unknown
  Description of Unknown: Integrase B7778 sequence
  PTHR30461:SF3,SM00857,IPR036162,PF13408,PS51737, G3DSA:3.40.50.1390,IPR025827,IPR006119,SSF53041,IPR011109, PTHR30461,PS51736,cd00338,PF00239
MNSTYFRPQPELFGLRVCKYIRCSHDGQVLHGDTLEAQNALLDEFIKVNHMILVDTFVDEALTARKKFTRRKEFVRLLDGVRAHNFDMILFTKLDRWFRNIGDYHKIQEILEANGVQWKAITESYDTTTTNGRLHINIRLSVAQDECDRDSDRIKDVFAYKLKNKTYLSGSLPRGLKLDAEKHVVIDPEWHQFALDMFDHFESTCSKRGTQLFLQEKYGIRVCYDTVVRYLRNPLFMGQYRDDPEFCEKTISRERFEHIQNLAIRNVRIRHTQQFYIFSGLLICSSCNHYMTGTVTYRTLADGKEKTYKSYRCNFKAQSKLCDRSKHYREEYVEEYMLQHIRPALSSYVADFEVTAAAAAKKDPAVEIAKVERKMKKLYDLFMDDLIDKASYRKEYEKFQTQIDKLRSCPAAPVRNLDSVKKMLSDDWETVYHTFSDQEKNVFWKSFVQSITVHEDGEMDIVFL

SEQ ID NO: 7778 - protein, 464 aa, Unknown
  Description of Unknown: Integrase B7779 sequence
  PTHR30461:SF3,IPR036162,PS51737,IPR011109, PTHR30461,PS00397,PF00239,G3DSA:1.10.10.2600, IPR006119,SSF53041,SM00857,IPR025827,IPR038109,PS51736 ,cd03768,IPR006118,PF13408,G3DSA:3.40.50.1390,PF07508,Coil
MKRAALYIRVSTMEQAKEGYSIPAQTDKLKAFAKAKDMAVTKVYTDPGFSGAKMERPALQEMISDIQNKKIDVVLVYKLDRLSRSQKNTLYLIEDVFLKNNVDFISMQESFDTSTPFGRATIGMLSVFAQLERDTITERMHMGRTERAKQGYYHGSGIVPLGYDYVDGELIINDYEAQIIQEIYDLYVNQGKGQQYITKRMVAKYPDKVKTLTIVKYALTNPLYIGKISWDGKVYDGHHTPIIDKSMYDKAQEIIARKAQKGGEQHGNQLGLLLGITYCGKCGAKVFRYVSGGKKYRYNYYMCRSVKKMLPSLVKDWNCKQPSLRQEVVEKKVIDSLKSLDFKKIERELKQVENKTKSKITTINNQISKKHNEKQKILDLYQYGTFDVTMLNERMKKIDNEINALTANISNLEGTKSESLINKLETLKTFNWETETTENKILIIKEFVERIELFDDEVIIKYKF

SEQ ID NO: 7779 - protein, 464 aa, Unknown
  Description of Unknown: Integrase B7780 sequence
  PTHR30461:SF3,cd00338,SM00857,IPR036162,PF13408, PS51737,G3DSA:3.40.50.1390,IPR025827,IPR006119,IPR011109, SSF53041,PTHR30461,PS51736,Coil,PF00239
MNSTYFRPQPELFGLRVVKYIRCSHDGQVLHGDTLEAQDALLDEFIKVNRMVLVDTFIDEALTARKKFTRRKEFVRLLDGVRSHSFDMILFTKLDRWFRNIGDYHKIQEVLEANGVQWKAITESYDTTTTNGRLHINIRLSVAQDECDRDSDRIKDVFAYKLKNKTYLSGSLPRGLKLDAEKHVVIDPEWHQFALDMFDHFEFTCSKRGTQLFLQEKYGIRVCYDTVVRYLRNPLFMGQYRDDPDFCEKTISRERFERIQNLAIRNVRIRHTQQFYIFSGLLICSSCNHYMTGTVTYRTLADGKEKTYKSYRCNFKAQSKLCDRSKHYREEYVEEYMLQHIRPALSSYVADFEVTAAAAAKKDPAIEIAKVERKMKKLYDLFMDDLIDKASYRNEYEKFQSQIDKLRSCPAAPVRNLDSIKKMLSDDWETVYHTFSDQEKNVFWKSFVQSITVHEDGEMDIVFL

SEQ ID NO: 7780 - protein, 464 aa, Unknown
  Description of Unknown: Integrase B7781 sequence
  PTHR30461:SF3,SM00857,G3DSA:1.10.10.2600,IPR036162,PF13408, PS51737,G3DSA:3.40.50.1390,IPR025827,IPR006119,IPR038109, PF07508,IPR011109,SSF53041,PTHR30461, Coil,cd00338,PF00239
MTIIGEYCDRAISGKTDNRPNFQRLIKDSEKEQFEAVIMYTLDRFARNRYDSAIYKAKLKKNGVKVYYAKQPMPDTPEGIILESVLEGYAEYYSENLSRNIKRGMKENALQCLANGGAGMPLGYTVGKDRKYKIDPVGAKIVQEIFQMYADGMSATQIINECNRRGYKTSRGNDFNKNSLRTILKNDRYIGVYRFADVIVEDGVPPIISRELFEKVQAMFKHNYSARAKSKAKEDYLLTAKLFCGHCGSAMVGESGTSKSGKLHHYYKCIDRKRNHKCKKAVEKKDWIEELVVRFTVQKVLTDENIERIATKTMEIIEKESSDTSYLDELQNELKDIKKKIKNLMTAIEQGIITPSTKERMDELELEKNEVEGKIAREEMKKPLLTKERIMYWLYSFKSGDIDDVDYRRRVIDTLVNSVYVYDDGDKGRRIVFTFNISGQNTATLSCSDIACAAPPDGKLHFSL

SEQ ID NO: 7781 - protein, 464 aa, Unknown
  Description of Unknown: Integrase B7782 sequence
  PTHR30461:SF3,SM00857,IPR006118,IPR036162,PF13408, PS51737,G3DSA:3.40.50.1390,Coil,IPR025827,IPR006119, SSF53041,IPR011109,PTHR30461,PS00397,PS51736, cd00338,PF00239
MMTNKIIRCALYIRVSTAEQCMHGKSLEAQESYLQQYASDHNMIVVGVYADEGKTARKELKKRKAIHSLLEDVKAGKIDVILFWRLDRWFRNLSDFYKVQDILDEYGVRWMSASEPGINMETRDGRLQLNVVLSIGQNEVDTTSERIKFVNEASIRQGKLIFGDANMGYGYKSGIVDDRKCMVKDPEREETVNAFYKYFFKHQNKCATLRYIQDNYDPNFSWAIMRTLLSSEFYKGTYRGFPYCPPYLTEEQWNELQKIAHKNIKRAKSGRIYLFTSLIRCPVCGQLLCGTGCKSIINRKTREKRDYCYYRCSRAHNDRICTYRHRLSQNLIEQYLLDNLDTEYRKYQIRVKKIEEEKKKIAQTKTPEKLNAELERLNLLFQKGRVEWDYYSSEYDRIEQELKDLSKIKPEVKRDLSFLEDLLQSDFKTLYASLSPENRRAFWRSTIKQIHLNEDSTIKFVDFL

SEQ ID NO: 7782 - protein, 464 aa, Unknown
  Description of Unknown: Integrase B7783 sequence
  PTHR30461:SF3,SM00857,G3DSA:1.10.10.2600,IPR036162,PF13408, PS51737,G3DSA:3.40.50.1390,IPR025827,IPR006119,IPR038109, SSF53041,IPR011109,PTHR30461,PS51736,cd00338, PF00239
MNSTYFRPQPELFGLRVVKYIRCSHDGQVLHGDTLEAQDTLLDEFIKVNRMVLVDTFVDEALTARKKFTRRKEFVRLLDGVRSRSFDMILFTKLDRWFRNIGDYHKIQEILEENGVQWKAITESYDTTTTNGRLHINIRLSVAQDECDRDSDRIKDVFAYKLKNKTYLSGSLPRGLKLDDEKHVIIDPEWKQFALDMFDHFEQTNSKRGTLLYLKEKYGIYLCYDTISRNLRNSLYKGMYRDDPDFCEPLIEPERFDRIQVLGKRNVRQRYSNRTYIFTGLLICSSCNHYLVGQTTHRTLSGGTEKHYPSYRCNQRYQSHSCDRNRSYREDYVEEYLLQHIRPALSEYVAEYEVTGTTPARKNPAAEAAKIRTKMQKLYELYMDDLIDRDTYKRDYSAFQEKLKELDSIVVAPSRDLADLKKLLEQDYEEIYRTFSPQEKNAFWKSFVQSITVHEDGEMDIVFL

SEQ ID NO: 7783 - protein, 464 aa, Unknown
  Description of Unknown: Integrase B7784 sequence
  PTHR30461:SF3,SM00857,IPR036162,PF13408,IPR025827, PS51737,G3DSA:3.40.50.1390,IPR006119,IPR011109,SSF53041, PTHR30461,PS51736,cd00338,PF00239
MNSTYFRPQPELFGLRVVKYIRCSHDGQVLHGDTLEAQDALLDEFIKVNRMVLIDTFIDEALTARKKFTRRKEFVRLLDGVRAHNFDMILFTKLDRWFRNIGDYHKIQEILEANGVQWKAITESYDTTTTNGRLHINIRLSVAQDECDRDSDRIKDVFAYKLKNKTYLSGSLPRGLKLDAEKHVVIDPEWHQFALDMFDHFESTCSKRGTQLFLQEKYGIRVCYDTVVRYLRNPLFMGQYRDDPDFCEKTISRERFERIQNLAIRNVRIRHTQQFYIFSGLLICSSCNHYMTGTVTYRTLADGKEKTYKSYRCNFKAQSKLCDRSKHYREEYVEEYMLQHIRPALSSYVADFEVTAAAAAKKDPAIEIAKVERKMKKLYDLFMDDLIDKASYRKEYEKFQTQIDKLRSCPAAPVRNLDSVKKMLSDDWETVYHTFSDQEKNVFWKSFVQSITVHEDGEMDIVFL

SEQ ID NO: 7784 - protein, 464 aa, Unknown
  Description of Unknown: Integrase B7785 sequence
  SM00857,IPR006118,IPR036162,PF13408, IPR025827,G3DSA:3.40.50.1390,PS51737,IPR006119, IPR011109,SSF53041,PF00239,PTHR30461, PS00397,PS51736,Coil,cd00338
MKSKTLRCAIYIRVSTTEQMMHGKSLEAQKDYLIHYAKEHDMNIVGIYADEGKTARKELKRRKAIQELVKAVERDEIDVILFWRLDRWFRNLSDFYKVQDILDQHNVRWISASEPGINMETRDGRLQLNVVLSIGQNEVDTTSERIKFVNEASIRQGKVIFGDSNMPIGYIVGTVDGVKRMVKDPEKEDLVNAFYRYFRTHQSKMKTLKFIQENYDPTFSYSQLRNMLESDFYHGAYRDNPHYCPAYLTEKEWAEIQEISNRNVKHPSSGRVYLFSGMMRCPVCGQLLAGRGGSSIINRKTRETRTYCYYRCNKACIDHMCTYRHNVSQNLIEEYLISNLEEEYNRYKIQSQNIHSKADLPKKKRTPEQVKKEMQRLNLLFQKERIEWDYYNEEYEKLTTELSSLEESDQKPKTNFDNIEKILHNDFRKTYDNLSPENRRAFWRSIIKEIHINTSHEVTGIDFY

SEQ ID NO: 7785 - protein, 464 aa, Unknown
  Description of Unknown: Integrase B7786 sequence
  PTHR30461:SF3,SM00857,G3DSA:1.10.10.2600,IPR036162,PF13408, PS51737,IPR025827,G3DSA:3.40.50.1390,IPR006119,IPR038109, IPR011109,SSF53041,PTHR30461,PS51736,cd00338, PF00239
MNSTYFRPQPELFGLRVVKYIRCSHDGQVLHGDTLEAQDALLDEFIEVNRMVLVDTFVDEALTARKKFTRRKEFVRLLDGVRAHNFDMILFTKLDRWFRNIGDYHKIQEILEANGVQWKAITESYDTTTTNGRLHINIRLSVAQDECDRDSDRIKDVFAYKLKNKTYLSGSLPRGLKLDDEKHVIIDPEWKQFALDMFDHFEQTNSKRGTLLYLKEKYGIYLCYDTISRNLRNSLYKGMYRDDPDFCEPLIEPERFDRIQILGKRNVRQRYSNRTYIFTGLLICSSCNHYLVGQTTHRTLSDGTEKHYPSYRCNQRYQSHSCDRNRGYREDYVEEYLLQHIRPALSEYVAEYEVTGTNPARKNPAAEAAKIRTKMQKLYELYMDDLIDRDTYKRDYSAFQEKLKELDSIVVAPSRDLADLKKLLEQDYEEIYRTFSPQEKNAFWKSFVQSITVHEDGEMDIVFL

SEQ ID NO: 7786 - protein, 464 aa, Unknown
  Description of Unknown: Integrase B7787 sequence
  PTHR30461:SF3,SM00857,IPR036162,PF13408,PS51737, G3DSA:3.40.50.1390,IPR025827,IPR006119,IPR011109,SSF53041, PTHR30461,PS51736,cd00338,PF00239
MNSTYFRPQPELFGLRVVKYIRCSHDGQVLHGDTLEAQDALLDEFIKVNHMILVDTFVDEALTARKKFTRRKEFVRLLDGVRAHNFDMILFTKLDRWFRNIGDYHKIQEILEANGVQWKAITESYDTTTTNGRLHINIRLSVAQDECDRDSDRIKDVFSYKLKNKTYLSGSLPRGLKLDAEKHVVIDPEWNQFALDMFDHFESTCSKRGTQLFLQEKYGIRVCYDTVVRYLRNPLFMGQYRDDPEFCEKTISRERFEHIQNLAIRNVRIRHTQQFYIFSGLLICSSCNHYMTGTVTYRTLADGKEKTYKSYRCNFKAQSKLCDRSKHYREEYVEEYMLQHIRPALSSYVADFEVTAAAAAKKDPAIEIAKVERKMKKLYDLFMDDLIDKASYRSEYEKFQSQIDKLRSCPAAPVRNLDSIKKMLSDDWETVYHTFSDQEKNVFWKSFVQSITVHEDGEMDIVFL

SEQ ID NO: 7787 - protein, 464 aa, Unknown
  Description of Unknown: Integrase B7788 sequence
  PTHR30461:SF3,SM00857,IPR006118,IPR036162, PF13408,PS51737,IPR025827,Coil, G3DSA:3.40.50.1390,IPR006119,IPR011109,SSF53041, PTHR30461,PS00397,PS51736,cd00338,PF00239
MPEKILRCAIYIRVSTFEQSVHGKSLQAQKECLEQYATDNNMSIVGVYADEGKTARKELKKRKAIHALVEDVKRDKIDVIIFWRLDRWFRNLSDFYKVQDVLDDHGVRWISVSEPGINMETRDGRLQLNVVLSIGQNEVDTTSERIKFVNEASIRQKKLIFGDANMPFGYKTGVVDGKKCMVKDSETEHMVEDFFEYFRNHNSKKGAIRYMQETYGIDFSYGMLRTMLSSEFYKGTYRGYPYCPAYLSEKEWDEMQTISKRNIKNTPSGRIYLFTGLMRCPVCGQKLVGTGCSSIINRKTGEKRTYCYYRCNRALIDHICTYRHRVSQNLIEKYLLENLEREYEKYKVRTNQISEELKKQKKAKDPKKLRKEMERLNILFQKGRISYDYYDKEYQRLEREYSASAAFCEEEETRNLHYVEELLKTDFRQMYDSLSPENKRSFWRSTIQEIYLNDDNTIKAVDFL

SEQ ID NO: 7788 - protein, 464 aa, Unknown
  Description of Unknown: Integrase B7789 sequence
  PTHR30461:SF3,SM00857,IPR036162,PF13408,PS51737, IPR025827,G3DSA:3.40.50.1390,IPR006119,IPR011109,SSF53041, PF00239,PTHR30461,PS51736,Coil,cd00338
MNSTYFRPQPELFGLRVVKYIRCSHDGQVLHGDTLEAQDALLDEFIKVNHMILVDTFVDEALTARKKFTRRKEFVRLLDGVRAHNFDMILFTKLDRWFRNIGDYHKIQEILEANGVQWKAITESYDTTTTNGRLHINIRLSVAQDECDRDSDRIKDVFSYKLKNKTYLSGSLPRGLKLDAEKHVVIDPEWHQFALDMFDHFESTCSKRGTQLFLQEKYGIRVCYDTVVRYLRNPLFMGQYRDDPEFCEKTISRERFEHIQNLAIRNVRIRHTQQFYIFSGLLICSSCNHYMTGTVTYRTLADGKEKTYKSYRCNFKAQSKLCDRSKHYREEYVEEYMLQHIRPALSSYVADFEVTAAAAAKKDPAIEIAKVERKMKKLYDLFMDDLIDKASYRNEYEKFQSQIDKLRSCPAAPVRNLDSIKKMLSDDWETVYHTFSDQEKNVFWKSFVQSITVHEDGEMDIVFL

SEQ ID NO: 7789 - protein, 464 aa, Unknown
  Description of Unknown: Integrase B7790 sequence
  PTHR30461:SF3,SM00857,IPR006118,IPR036162,PF13408, IPR025827,G3DSA:3.40.50.1390,Coil,PS51737,IPR006119, SSF53041,IPR011109,PTHR30461,PS00397, PS51736,cd00338,PF00239
MPEKILRCAIYIRVSTFEQSVHGKSLQAQKECLEQYATDNNMSIVGVYADEGKTARKELKKRKAIHALVEDVKMDRIDVILFWRLDRWFRNLSDFYKVQDVLDDHGVRWISVSEPGINMETRDGRLQLNVVLSIGQNEVDTTSERIKFVNEASIRQKKLIFGDANMPFGYKSGIVDGKKCMVKDPETEHMVEDFFRYFKNHNTKKGAIRHMQETYGIDFSYGMLRTMLSSEFYKGTYRGYPYCPAYLSEKEWDEMQIISKRNIKNTPSGRVYLFTGLMHCPVCGQKLVGTGCSSIINRTTREKRTYCYYRCNRALIDHICTYRHRVSQNLVEKYLLENLEREYEKYKVRSNQIGEELKKQKKAKDPEKLRKEMERLNLLFQKGRISFDYYDKEYQRLEKEYSVSADFPEEEETRNLHYVEELLKTDFRQMYDSLSPENKRSFWRSTIQEIYLNDDNTIKAVDFL

SEQ ID NO: 7790 - protein, 464 aa, Unknown
  Description of Unknown: Integrase B7791 sequence
  PTHR30461:SF3,SM00857,G3DSA:1.10.10.2600,IPR036162,PF13408, IPR025827,G3DSA:3.40.50.1390,PS51737,IPR006119,IPR038109, SSF53041,IPR011109,PTHR30461,PS51736,cd00338, PF00239
MNSTYFRPQPELFGLRVVKYIRCSHDGQVLHGDTLEAQDALLDEFIKVNRMVLVDTFIDEALTARKKFTRRKEFVRLLDGVRAHSFDMILFTKLDRWFRNIGDYHKIQEILEANGVQWKAITESYDTTTTNGRLHINIRLSVAQDECDRDSDRIKDVFAYKLKNKTYLSGSLPRGLKLDEEKHVIIDPEWKQFALDMFDHFEQTNSKRGTLLYLKEKYGIYLCYDTIARNLRNPLYKGMYRDDPDFCEPLIEPERFDRIQVLGKRNVRQRYSNRTYIFTGLLICSSCNHYLVGQTTHRTLSDGTEKHYPSYRCNQRYQSHSCDRNRSYREDYVEEYLLQHIRPALSEYVAEYEVTGTNPARKNPAAEAAKIRTKMQKLYELYMDDLIDRDTYKRDYSAFQEKLKELDSIVVAPSRDLADLKKLLEQDYEEIYRTFSPQEKNAFWKSFVQSITVHEDGEMDIVFL

SEQ ID NO: 7791 - protein, 464 aa, Unknown
  Description of Unknown: Integrase B7792 sequence
  PTHR30461:SF3,cd00338,SM00857,IPR006118,IPR036162, PF13408,IPR025827,G3DSA:3.40.50.1390,PS51737,IPR006119, SSF53041,IPR011109,PTHR30461,PS00397,PS51736, Coil,PF00239
MQEKILRCAIYIRVSTFEQSVHGKSLQAQKECLKQYAADHNMAVVGIYADEGKTARKELKKRKAIHALVEDVKKDRIDVILFWRLDRWFRNLSDFYKVQDVLDDHGVRWISVSEPGINMETRDGRLQLNVVLSIGQNEVDTTSERIKFVNEASIRQRKLIFGDANMPFGYKTGVVDGKKCMVKDPETEHMVEDFFKYFRSHNSKKGAIRYMQETYGIDFSYGMLRTMLSSEFYKGTYRGYPYCPAYLSEKEWNEMQTISKRNIKTTPSGRIYLFTGLMRCPVCGQKLVGTGCSSIINRKTGEKRTYCYYRCNRALKDHICTYRHRVSQNLVEKYLLENLEREYEKYKVRSNQISEELKKEKKAKDPKKLRKEMERLNLLFQKGRISFDYYDKEYQRLEEEYSASTAFPEEEETRSLHYVEELLETDFRQMYDSLSPENKRSFWRSTIQEIYLNDDNTIKAVDFL

SEQ ID NO: 7792 - protein, 464 aa, Unknown
  Description of Unknown: Integrase B7793 sequence
  PTHR30461:SF3,SM00857,G3DSA:1.10.10.2600,IPR036162,PF13408, IPR025827,PS51737,G3DSA:3.40.50.1390,IPR006119,IPR038109, PF07508,IPR011109,SSF53041,PTHR30461,PS51736, cd00338,PF00239
MKGNAGDTIVKKIDLSPELVRVALYIRVSGEEQKIKGLSLEAQQERLEAYARERGWVIVGIYIDAAKTARKNIHKRTDFQRMMDSVKRDEVDILLFCRLDRWFRSVADYYKIMEVLEAHNCDWKTTDEEYDTTTANGRLYINVKLSIAQNEADIDGERIDVVFDSKIAHGTVVSGSAPFGFRVNEEKRLEVVPEDAAIVQDAFNYFETSISQRATVRYIRETYGVNWCDATFRRMLKEKLYTGVYDRGGRFNDHFCPTIISKQQFDRVQALLERNARSVPSGKVYIFTSILTCAECGHKLVGYKSSDYYYRCNQHFQRGRCSHNHSAREDVVEKWLFEHLVEELERCQLEWEVAAAKKKASVARTDKAALKRKLTKLKELYVNDLIDIEDYKRDYQIYTAALKQIPEPSIEPPPDFAAVRRLLDNDFKTIYENLTREEKRTLWRSVIKEIRIDNDQNITGVVFG

SEQ ID NO: 7793 - protein, 464 aa, Unknown
  Description of Unknown: Integrase B7794 sequence
  SM00857,G3DSA:1.10.10.2600,IPR036162,PS51737,G3DSA:3.40.50.1390, IPR006119,IPR038109,PF07508,SSF53041,IPR011109, PF00239,PTHR30461,PS51736,Coil,cd00338
MREVKKAIAYFRVSTDMQKEDLSLETQEKGGEIFARDNNIEIVKKFTDVMSGGNRNRKGFIEAQKYLEENQGEIDYFIAYDVSRIARDAFAFLSLFNKLNLLNVKLKLINNPTLDSDSPMGKLILTILAAIFEFFRFDNADRVRDNMIVKVKEGKRMNNAPYGYRIIDKKMVIVPEEAELIKYIYQEYLKGHGIVALERMTGKDRSTIKQWLNNKVYAGYNIFGKRKMNKTTFKPMKNPDETKIVEAKGDWEPIIDIDTWEKVANRMSLNQELRMRNIEKTSYLLSGLLFHTCGSKFRGNAGRKGTYYYRCTGCSRSIKSDTLDKKVLDELFNSEFLDELNKIPLENNNKDNELKKLKAQKSKLKTREENLIELYADGDITKKQFKSKKVDIQNSLIDIEAKIIELENERNEVKQNLDFKKMFIEALSNLKNAESKQEANKILKQIIKKIEVNEEREVFIHLNF

SEQ ID NO: 7794 - protein, 464 aa, Unknown
  Description of Unknown: Integrase B7795 sequence
  PTHR30461:SF3,SM00857,IPR006118,IPR036162,PF13408, PS51737,G3DSA:3.40.50.1390,Coil,IPR025827,IPR006119, IPR011109,SSF53041,PTHR30461,PS00397, PS51736,cd00338,PF00239
MPEKILRCAIYIRVSTFEQSVHGKSLQAQKECLEQYATDNNMSIVGVYADEGKTARKELKKRKAIHALVEDVKRDKIDVIIFWRLDRWFRNLSDFYKVQDVLDEHGVRWISVSEPGINMETRDGRLQLNVVLSIGQNEVDTTSERIKFVNEASIRQKKLIFGDANMPFGYKTGVVDGKKCMIKDPETEHMVEDFFNYFRIHNSKKGAVRYMQEAYGIDFSYGMLRTMLSSEFYKGTYRGYPYCPAYLSEKEWDEMQTISKRNIKSTPSGRVYLFTGLIRCPVCGQKLVGTGCSSIINRETREKRTYCYYRCNRALIDHICTYRHRMSQNLIEKYLLENLEREYEKYKVRSNQISEELKKQKKTKDPEKLRKEMERLNLLFQKGRISFDYYDNEYQRLEEEYSVSAAFPEEEETRSLHYVEELLKTDFRQMYDSLSLENRRSFWRSTIREIYLNEDNTIKCVDFI

SEQ ID NO: 7795 - protein, 464 aa, Unknown
  Description of Unknown: Integrase B7796 sequence
  PTHR30461:SF3,SM00857,G3DSA:1.10.10.2600,IPR036162,PF13408, PS51737,IPR025827,G3DSA:3.40.50.1390,IPR006119,IPR038109, IPR011109,SSF53041,PTHR30461,PS51736,cd00338, PF00239
MNSTYFRPQPELFGLRVVKYIRCSHDGQVLHGDTLEAQDALLDEFIKVNRMVLIDTFIDEALTARKKFTRRKEFVRLLDCVRAHNFDMILFTKLDRWFRNIGDYHKIQEILEANGVQWKAITESYDTTTTNGRLHINIRLSVAQDECDRDSDRIKDVFAYKLKNKTYLSGSLPRGLKLDDEKHVIIDPEWKQFALDMFDHFEQTNSKRGTLLYLKEKYGIYLCYDTISRNLRNSLYKGMYRDDPDFCEPLIEPERFDRIQVLGKRNVRQRYSNRTYIFTGLLICSSCNHYLVGQTTHRTLSDGTEKHYPSYRCNQRYQSHSCDRNRSYREDYVEEYLLQHIRPALSEYVAEYEVTGTTPARKNPAAEAAKIRTKMQKLYELYMDDLIDRDTYKRDYSAFQEKLKELDSIVVAPSRDLADLKKLLEQDYEEIYRTFSPQEKNAFWKSFVQSITVHEDGEMDIVFL

SEQ ID NO: 7796 - protein, 464 aa, Unknown
  Description of Unknown: Integrase B7797 sequence
  PTHR30461:SF3,SM00857,IPR006118,IPR036162,PF13408, IPR025827,G3DSA:3.40.50.1390,Coil,PS51737,IPR006119, SSF53041,IPR011109,PTHR30461,PS00397,PS51736, cd00338,PF00239
MPEKILRCAIYIRVSTFEQSVHGKSLQAQKECLEQYATDNNMSIVGVYADEGKTARKELKKRKAIHALVEDVKKDRIDVILFWRLDRWFRNLSDFYKVQDVLDEHGVRWISVSEPGINMETRDGRLQLNVVLSIGQNEVDTTSERIKFVNEASIRQKKLIFGDANMPFGYKTGVVDGKKCMVKDPETEHMVEDFFNYFRIHNSKKGAVRYMQETYGVDFSYGMLRTMLSSEFYKGTYRGYPYCPAYLSEKEWNEMQIISKRNIKNTPSGRIYLFTGLMRCPVCGQKLVGTGCSSIINRKTGEKRTYCYYRCNRALIDHICTYRHRVSQNLVEKYLLENLEREYEKYKVRSNQISEELKKQKKTKDPEKLRKEMERLNLLFQKGRISFDYYDKEYQRLEEEYSASAAFPEEEETRSLHYVEELLETDFRQMYDSLSLENRRSFWRSTIREIYLNEDNTIKCVDFI

SEQ ID NO: 7797 - protein, 464 aa, Unknown
  Description of Unknown: Integrase B7798 sequence
  PTHR30461:SF3,SM00857,IPR006118,IPR036162,PS51737, G3DSA:3.40.50.1390,Coil,IPR006119,IPR011109,SSF53041, PTHR30461,PS00397,PS51736,cd00338,PF00239
MMTNKIVRCALYIRVSTAEQCMHGKSLEAQESYLQQYASDHNMIVVGIYADEGKTARKELKKRKAIHSLLEDVKAGKIDVILFWRLDRWFRNLSDFYKVQDILDEYGVRWMSASEPGINMETRDGRLQLNVVLSIGQNEVDTTSERIKFVNEASIRQGKLIFGDANMGYGYKSGIVDGRKCMVKDPEREETVNAFYKYFFKHQNKCATLRYIQDNYDPNFSWSIMRTLLSSEFYKGTYRGFPYCPPYLTEEQWNELQKVAHKNIKRAKSGRIYLFTSLIRCPVCGQLLCGNGCKSIINRKTREKRDYCYYRCSRAHNDRICTYRHRLSQNLIEQYLLDNLDTEYRKYQIRVKKIEEEKKKIAQTKTPEKLNAELERLNLLFQKGRVEWDYYSSEYDRIEQELKDLSRIKPEVKRDLSFLEDLLQSDFKTLYASLSPENRRAFWRSTIKQIHLNEDSTIKFVDFL

SEQ ID NO: 7798 - protein, 464 aa, Unknown
  Description of Unknown: Integrase B7799 sequence
  SM00857,IPR006118,G3DSA:1.10.10.2600,IPR036162, PF13408,PS51737,IPR025827,G3DSA:3.40.50.1390, IPR006119,IPR038109,IPR011109,SSF53041, PF00239,PTHR30461,PS00397,PS51736,Coil,cd00338
MKSKTLRCAIYIRVSTTEQMMHGKSLEAQKDYLIHYAQEHDMNIVGVYADEGKTARKELKRRKAIQELVKAVERDEIDVILFWRLDRWFRNLSDFYKVQDILDQHNVRWISASEPGINMETRDGRLQLNVVLSIGQNEVDTTSERIKFVNEASIRQGKVIFGDSNMPIGYMVGTVDGVKRMVKDPEKEDLVNAFYRYFRTHQSKMKTLKFIQENYDPTFSYSQLRNMLESDFYHGTYRDNPHYCPAYLTEKEWAEIQEISNRNVKHPSSGRVYLFSGMMRCPVCGQLLAGRGGSSIINRKTRETRTYCYYRCNKACIDHMCTYRHNVSQNLIEEYLISNLEEEYNRYKIQSQNIHSKADIPKKKRTPEQVKKEMQRLNLLFQKERIEWDYYNEEYEKLTTELSSLEESDQKPKTNFDNIEKILHNDFRKTYDNLSPENRRAFWRSIIKEIHINTSHEVTGIDFY

SEQ ID NO: 7799 - protein, 464 aa, Unknown
  Description of Unknown: Integrase B7800 sequence
  SM00857,IPR006118,G3DSA:1.10.10.2600,IPR036162,PF13408, PS51737,G3DSA:3.40.50.1390,IPR025827,IPR006119,IPR038109, IPR011109,SSF53041,PF00239,PTHR30461,PS00397, PS51736,Coil,cd00338
MKSKTLRCAIYIRVSTTEQMMHGKSLEAQKDYLIHYAKEHDMNIVGIYADEGKTARKELKRRKAIQELVKAVERDEIDVILFWRLDRWFRNLSDFYKVQDILDQHNVRWISASEPGINMETRDGRLQLNVVLSIGQNEVDTTSERIKFVNEASIRQGKVIFGDSNMPIGYMVGTVDGVKRMVKDPEKEDLVNAFYRYFRTHQSKMKTLKFIQKNYDPTFSYSQLRNMLESDFYHGAYRDNSHYCPAYLTEKEWAEIQEISNRNVKHPSSGRVYLFSGMMRCPVCGQLLAGRGGSSIINRKTRETRTYCYYRCNKACIDHMCTYRHNVSQNLIEEYLISNLEEEYNRYKIQSQNIHSKADLPKKKRTPEQVKKEMQRLNLLFQKERIEWDYYNEEYEKLTTELSSLEESDQKPKTNFDNIEKILHNDFRKTYDNLSPENRRAFWRSIIKEIHINTSHEVTGIDFY

SEQ ID NO: 7800 - protein, 464 aa, Unknown
  Description of Unknown: Integrase B7801 sequence
  PTHR30461:SF3,cd00338,SM00857,IPR036162,PF13408, IPR025827,G3DSA:3.40.50.1390,PS51737,IPR006119,IPR011109, SSF53041,PTHR30461,PS51736,Coil,PF00239
MNSTYFRPQPELFGLRVVKYIRCSHDGQVLHGDTLEAQDALLDEFIKVNRMVLIDTFIDEALTARKKFTRRKEFVRLLDGVRAHSFNMILFTKLDRWFRNIGDYHKIQEILEANGVQWKAITESYDTTTTNGRLHINIRLSVAQDECDRDSDRIKDVFAYKLKNKTYLSGSLPRGLKLDAEKHVVIDPEWHQFALDMFDRFESTCSKRGTQLFLQEKYGIRVCYDTVVRYLRNPLFMGQYRDDPDFCEKTISRERFERIQNLAIRNVRIRHTQQFYIFSGLLICSSCNHYMTGTVTYRTLADGKEKTYKSYRCNFKAQSKLCDRSKHYREEYVEEYMLQHIRPALSSYVADFEVTAAAAAKKDPAIEIAKVERKMKKLYDLFMDDLIDKASYRNEYEKFQSQIDKLRSCPAAPVRNLDSIKKMLSDDWETVYHTFSDQEKNVFWKSFVQSITVHEDGEMDIVFL

SEQ ID NO: 7801 - protein, 464 aa, Unknown
  Description of Unknown: Integrase B7802 sequence
  PTHR30461:SF3,SM00857,G3DSA:1.10.10.2600,IPR036162,PF13408, IPR025827,PS51737,G3DSA:3.40.50.1390,IPR006119,IPR038109, IPR011109,SSF53041,PTHR30461,PS51736, cd00338,PF00239
MNSTYFRPQPELFGLRVVKYIRCSHDGQVLHGDTLEAQDALLDEFIKVNRMVLVDTFVDEALTARKKFTRRKEFVRLLDGVRSRSFDMILFTKLDRWFRNIGDYHKIQEILEENGVQWKAITESYDTTTTNGRLHINIRLSVAQDECDRDSDRIKDVFAYKLKNKTYLSGSLPRGLKLDDEKHVIIDPEWKQFALDMFDHFEQTNSKRGTLLYLKEKYGIYLCYDTISRNLRNSLYKGMYRDDPDFCEPLIEPERFDRIQVLGKRNVRQRYSNRTYIFTGLLICSSCNHYLVGQTTHRTLSDGTEKHYPSYRCNQRYQSHSCDRNRSYREDYVEEYLLQHIRPALSEYVAEYEVTGTTPARKNPAAEAAKIRTKMQKLYELYMDDLIDRDTYKRDYSAFQEKLKELDSIVVAPSRDLADLKKLLEQDYEEIYRTFSPQEKNAFWKSFVQSITVHEDGEMDIVFL

SEQ ID NO: 7802 - protein, 464 aa, Unknown
  Description of Unknown: Integrase B7803 sequence
  PTHR30461:SF3,SM00857,IPR006118,IPR036162,PF13408, PS51737,IPR025827,G3DSA:3.40.50.1390,PS00397,IPR006119, IPR011109,SSF53041,PTHR30461,Coil,PS51736, cd00338,PF00239
MQEKILRCAIYIRVSTFEQSVHGKSLQAQKECLEQYATDNNMSIVGVYADEGKTARKELKKRKAIHALVEDVKRDKIDVIIFWRLDRWFRNLSDFYKVQDVLDEHGVRWISVSEPGINMETRDGRLQLNVVLSIGQNEVDTTSERIKFVNEASIRQKKLIFGDANMPFGYKTGVVDGKKCMVKDSETEHMVEDFFEYFRNHNSKKGAIRYMQETYGIDFSYGMLRTMLSSEFYKGTYRGYPYCPAYLSEKEWDEMQTISKRNIKNTPSGRIYLFTGLMRCPVCGQKLVGTGCSSIINRKTGEKRTYCYYRCNRALIDHICTYRHRVSQNLIEKYLLENLEREYEKYKVRTNQISEELKKQKKAKDPKKLRKEMERLNILFQKGRISYDYYDKEYQRLEREYSASAAFCEEEETRNLHYVEELLKTDFRQMYDSLSPENKRSFWRSTIQEIYLNDDNTIKAVDFL

SEQ ID NO: 7803 - protein, 464 aa, Unknown
  Description of Unknown: Integrase B7804 sequence
  PTHR30461:SF3,SM00857,IPR006118,IPR036162,PF13408, IPR025827,G3DSA:3.40.50.1390,PS51737,PS00397,IPR006119, SSF53041,IPR011109,PTHR30461,Coil,PS51736, cd00338,PF00239
MQEKILRCAIYIRVSTFEQSVHGKSLQAQEECLKQYAADHNMAVVGIYADEGKTARKELKKRKAIHALVEDVKQDKIDVIVFWRLDRWFRNLSDFYKVQDVLDEHGVRWISVSEPGINMETRDGRLQLNVVLSIGQNEVDTTSERIKFVNESSIRQKKLIFGDANMPFGYKTGVVDGKKCMVKDPETEHMVEDFFNYFRIHNSKKGAVRYMQEAYGIDFSYGMLRTMLSSEFYKGTYRGYHYCPAYLSEKEWNEMQIISKRNIKNTPSGRIYLFTGLMRCPVCGQKLVGTGCSSIIDRKTREKRTYCYYRCNRALIDHICTYRHRVSQNLVEKYLLENLEREYEKYKVRSNQIGEELKKQKKAKDPEKLRKEMERLNLLFQKGRISFDYYDKEYQRLEKEYSVSADFPEEEETRSLHYVEELLKTDFRQMYDSLSPENKRSFWRSTIQEIYLNDDNTIKAVDFL

SEQ ID NO: 7804 - protein, 464 aa, Unknown
  Description of Unknown: Integrase B7805 sequence
  PTHR30461:SF3,SM00857,IPR006118,IPR036162,PF13408, IPR025827,G3DSA:3.40.50.1390,PS51737,IPR006119,SSF53041, IPR011109,PF00239,PTHR30461,PS00397,PS51736, Coil,cd00338
MPEKILRCAIYIRVSTFEQSVHGKSLQAQKECLEQYATDNNMSIVGVYADEGKTARKELKKRKAIHALIEDVKKDRIDVILFWRLDRWFRNLSDFYKVQDVLDEHGVRWISVSEPGINMETRDGRLQLNVVLSIGQNEVDTTSERIKFVNEASIRQRKLIFGDANMPFGYKTGVVDGKKCMVKDPETEHMVEDFFKYFKSHNSKKGAVRYMQETYGVDFSYGMLRTMLSSEFYKGTYRGYPYCPAYLSEKEWNEMQIISKRNIKNTPSGRIYLFTGLMRCPVCGQKLVGTGCSSIINRKTGEKRTYCYYRCNRALIDHICTYRHRVSQNLVEKYLLENLEREYEKYKVRSNQISEELKKQKKTKDPEKLRKEMERLNLLFQKGRISFDYYDKEYQRLEEEYSASAAFPEEEETRSLHYVEELLETDFRQMYDSLSPENKRSFWRSTIQEIYLNDDNTIKAVDFL

SEQ ID NO: 7805 - protein, 464 aa, Unknown
  Description of Unknown: Integrase B7806 sequence
  PTHR30461:SF3,SM00857,IPR036162,PF13408,IPR025827, G3DSA:3.40.50.1390,PS51737,IPR006119,IPR011109,SSF53041, PTHR30461,PS51736,cd00338,PF00239
MNSTYFRPQPELFGLRVVKYIRCSHDGQVLHGDTLEAQDALLDEFIKVNHMILVDTFVDEALTARKKFTRRKEFVRLLDGVRARNFDMILFTKLDRWFRNIGDYHKIQEILEANGVQWKAITESYDTTTTNGRLHINIRLSVAQDECDRDSDRIKDVFSYKLKNKTYLSGSLPRGLKLDAEKHVVIDPEWHQFALDMFDHFESTCSKRGTQLFLQEKYGIRVCYDTVVRYLRNPLFMGQYRDDPEFCEKTISRERFEHIQNLAIRNVRIRHTQQFYIFSGLLICSSCNHYMTGTVTYRTLADGKEKTYKSYRCNFKAQSKLCDRSKHYREEYVEEYMLQHIRPALSSYVADFEVTAAAAAKKDPAVEIAKVERKMKKLYDLFMDDLIDKASYRKEYEKFQSQIDKLRSCPATPVRNLDSVKKMLSDDWETVYHTFSDQEKNVFWKSFVQSITVHEDGEMDIVFL

SEQ ID NO: 7806 - protein, 464 aa, Unknown
  Description of Unknown: Integrase B7807 sequence
  PTHR30461:SF3,SM00857,IPR006118,IPR036162, PF13408,IPR025827,G3DSA:3.40.50.1390,PS51737, Coil,IPR006119,IPR011109,SSF53041, PTHR30461,PS00397,PS51736,cd00338,PF00239
MQEKILRCAIYIRVSTFEQSVHGKSLQAQKECLKQYAADHNMAVVGIYADEGKTARKELKKRKAIHALVEDVKQDKIDVIVFWRLDRWFRNLSDFYKVQDVLDEHGVRWISVSEPGINMETRDGRLQLNVVLSIGQNEVDTTSERIKFVNESSIRQKKLIFGDANMPLGYKTGIVDGKKCMVKDPETEHMVEDFFRYFKNHNTKKGAIRYMQETYGIDFSYSMLRTMLSSEFYKGTYRGYPYCPAYLSEKEWNEMQIISKRNIKNTPSGRIYLFTGLMRCPVCGQKLVGTGCSSIIDRKTREKRTYCYYRCNRALIDHICTYRHRVSQNLVEKYLLENLEREYEKYKVRSNQIGEELKKQKKAKDPEKLRKEMERLNLLFQKGRISFDYYDKEYQRLEKEYSVSADFPEEEETRNLHYVEELLETDFRQMYDTLSLENRRSFWRSTIQEIYLNEDNTIKGVDFI

SEQ ID NO: 7807 - protein, 464 aa, Unknown
  Description of Unknown: Integrase B7808 sequence
  PTHR30461:SF3,SM00857,IPR006118,IPR036162,PF13408, IPR025827,PS51737,G3DSA:3.40.50.1390,IPR006119,IPR011109, SSF53041,PF00239,PTHR30461,PS00397,PS51736, Coil,cd00338
MPEKILRCAIYIRVSTFEQSVHGKSLQAQKECLEQYATDNNMSIVSVYADEGKTARKELKKRKAIHALVEDVKMDRIDVILFWRLDRWFRNLSDFYKVQDVLDEHGVRWISVSEPGINMETRDGRLQLNVVLSIGQNEVDTTSERIKFVNESSIRQKKLIFGDANMPLGYKTGIVDGKKCMVKDPETEHMVEDFFRYFKNHNTKKGAIRYMQETYGIDFSYSMLRTMLSSEFYKGTYRGYPYCPAYLSEKEWNEMQIISKRNIKNTPSGRIYLFTGLMRCPVCGQKLVGTGCSSIINRKTGEKRTYCYYRCNRALIDHICTYRHRVSQNLIEKYLLENLEREYEKYKVRTNQISEELKKQKKAKDPEKLRKEMERLNLLFQKGRISFDYYDKEYQRLEKEYSVSADFPEEEETRNLHYVEELLKTDFRQMYDSLSPENKRSFWRSTIQEIYLNDDNTIKAVDFL

SEQ ID NO: 7808 - protein, 464 aa, Unknown
  Description of Unknown: Integrase B7809 sequence
  PTHR30461:SF3,SM00857,G3DSA:1.10.10.2600,IPR036162,PF13408, IPR025827,PS51737,G3DSA:3.40.50.1390,IPR006119,IPR038109, IPR011109,SSF53041,PTHR30461,PS51736,cd00338, PF00239
MNSTYFRPQPELFGLRVVKYIRCSHDGQVLHGDTLEAQDALLDEFIKVNRMVLVDTFIDEALTARKKFTRRKEFVRLLDGVRAHNFDMILFTKLDRWFRNIGDYHKIQEILEENGVQWKAITESYDTTTTNGRLHINIRLSVAQDECDRDSDRIKDVFAYKLKNKTYLSGSLPRGLKLDDEKHVIIDPEWKQFALDMFDHFEQTNSKRGTLLYLKEKYGIYLCYDTISRNLRNSLYKGMYRDDPDFCEPLIEPERFDRIQVLGKRNVRQRYSNRTYIFTGLLICSSCNHYLVGQTTHRTLSDGTEKHYPSYRCNQRYQSHSCDRNHSYREDYVEEYLLQHIRPALSEYVAEYEVTGTNPARKNPAAEAAKIRTKMQKLYELYMDDLIDRDTYKRDYSAFQEKLKELDSIVVAPSRDLADLKKLLEQDYEEIYRTFSPQEKNAFWKSFVQSITVHEDGEMDIVFL

SEQ ID NO: 7809 - protein, 464 aa, Unknown
  Description of Unknown: Integrase B7810 sequence
  PTHR30461:SF3,SM00857,G3DSA:1.10.10.2600,IPR036162,PF13408, PS51737,IPR025827,G3DSA:3.40.50.1390,IPR006119,IPR038109, IPR011109,SSF53041,PTHR30461,PS51736,cd00338, PF00239
MNSTYFRPQPELFGLRVVKYIRCSHDGQVLHGDTLEAQDALLDEFVKVNRMVLIDTFIDEALTARKKFTRRKEFVRLLDGVRAHNFDMILFTKLDRWFRNIGDYHKIQEILEANGVQWKAITESYDTTTTNGRLHINIRLSVAQDECDRDSDRIKDVFAYKLKNKTYLSGSLPRGLKLDDEKHVIIDPEWKQFALDMFDHFEQTNSKRGTLLYLKEKYGIYLCYDTISRNLRNSLYKGMYRDDPDFCEPLIEPERFDRIQVLGKRNVRQRYSNRTYIFTGLLICSSCNHYLVGQTTHRTLSDGTEKHYPSYRCNQRYQSHSCDRNRSCREDYVEEYLLQHIRPALSEYVAEYEVTGTNPARKNPAAEAAKIRTKMQKLYELYMDDLIDRDTYKRDYSAFQEKLKELDSIVVAPSRDLADLKKLLEQDYEEIYRTFSPQEKNAFWKSFVQSITVHEDGEMDIVFL

SEQ ID NO: 7810 - protein, 464 aa, Unknown
  Description of Unknown: Integrase B7811 sequence
  PTHR30461:SF3,SM00857,IPR036162,PF13408,PS51737, G3DSA:3.40.50.1390,IPR025827,IPR006119,IPR011109,SSF53041, PTHR30461,PS51736,cd00338,PF00239
MNSTYFRPQPELFGLRVVKYIRCSHDGQVLHGDTLEAQDALLDEFIKVNRMVLIDTFIDEALTARKKFTRRKEFVRLLDGVRAHSFDMILFTKLDRWFRNIGDYHKIQEILEANGVQWKAITESYDTTTTNGRLHINIRLSVAQDECDRDSDRIKDVFAYKLKNKTYLSGSLPRGLKLDAEKHVVIDPEWHQFALDMFDRFESTCSKRGTQLFLQEKYGIRVCYDTVVRYLRNPLFMGQYRDDPDFCEKTISRERFERIQNLAIRNVRIRHTQQFYIFSGLLICSSCNHYMTGTVTYRTLADGKEKTYKSYRCNFKAQSKLCDRSKHYREEYVEEYMLQHIRPALSSYVADFEVTAAAAAKKDPAIEIAKVERKMKKLYDLFMDDLIDKASYRKEYEKFQSQIDKLRSCPAAPVRNLDSIKKMLSDDWETVYHTFSDQEKNVFWKSFVQSITVHEDGEMDIVFL

SEQ ID NO: 7811 - protein, 464 aa, Unknown
  Description of Unknown: Integrase B7812 sequence
  cd00338,SM00857,IPR006118,G3DSA:1.10.10.2600, IPR036162,PF13408,PS51737,IPR025827, G3DSA:3.40.50.1390,IPR006119,IPR038109,IPR011109, SSF53041,PTHR30461,PS00397,PS51736,Coil,PF00239
MKSKTLRCAIYIRVSTTEQMMHGKSLEAQKDYLIHYAKEHDMNIVGIYADEGKTARKELKRRKAIQELVKAVERDEIDVILFWRLDRWFRNLSDFYKVQDILDQHNVRWISASEPGINMETRDGRLQLNVVLSIGQNEVDTTSERIKFVNEASIRQGKVIFGDSNMPIGYMVGTVDGVKRMVKDPEKEDLVNAFYRYFRTHQSKMKTLKFIQKNYDPTFSYSQLRNMLESDFYHGAYRDNSHYCPAYLTEKEWAEIQEISNRNVKHPASGRVYLFSGMMRCPVCGQLLAGRGGSSIINRKTRETRTYCYYRCNKACIDHMCTYRHNVSQNLIEEYLISNLEEEYNRYKIQSQNIHSKADLPKKKRTPEQVKKEMQRLNLLFQKERIEWDYYNEEYEKLTTELSSLEESDQQPKTNFDNIEKILHNDFRKTYDNLSPENRRAFWRSIIKEIHINTSHEVTGIDFY

SEQ ID NO: 7812 - protein, 464 aa, Unknown
  Description of Unknown: Integrase B7813 sequence
  PTHR30461:SF3,SM00857,G3DSA:1.10.10.2600,IPR036162,PF13408, PS51737,IPR025827,G3DSA:3.40.50.1390,IPR006119,IPR038109, IPR011109,SSF53041,PTHR30461,PS51736,cd00338, PF00239
MNSTYFRPQPELFGLRVVKYIRCSHDGQVLHGDTLEAQDALLDEFIAVNRMVLVDTFIDEALTARKKFTRRKEFVRLLDGVRSRSFDMILFTKLDRWFRNIGDYHKIQEILEANGVQWKAITESYDTTTTNGRLHINIRLSVAQDECDRDSDRIKDVFAYKLKNKTYLSGSLPRGLKLDDEKHVIIDPEWKQFALDMFDHFEQTNSKRGTLLYLKEKYGIYLCYDTISRNLRNSLYKGMYRDDPDFCEPLIEPERFDRIQVLGKRNVRQRYSNRTYIFTGLLICSSCNHYLVGQTTHRTLSDGTEKHYPSYRCNQRYQSHSCDRNHSYREDYVEEYLLQHIRPALSEYVAEYEVTGTNPARKNPAAEAAKIRTKMQKLYELYMDDLIDRDTYKRDYSAFQEKLKELDSIVVAPSRDLADLKKLLEQDYEEIYRTFSPQEKNAFWKSFVQSITVHEDGEMDIVFL

SEQ ID NO: 7813 - protein, 464 aa, Unknown
  Description of Unknown: Integrase B7814 sequence
  PTHR30461:SF3,SM00857,IPR006118,IPR036162,PF13408, PS51737,IPR025827,Coil,G3DSA:3.40.50.1390,IPR006119, IPR011109,SSF53041,PTHR30461,PS00397,PS51736, cd00338,PF00239
MMTNKIIRCALYIRVSTAEQCMHGKSLEAQESYLQQYASDHNMIVVGVYADEGKTARKELKKRKAIHSLLEDVKAGKIDIILFWRLDRWFRNLSDFYKVQDILDEYGVRWMSASEPGINMETRDGRLQLNVVLSIGQNEVDTTSERIKFVNEASIRQGKLIFGDANMGYGYKSGIVDGRKCMVKDPEREETVNAFYKYFFKHQNKCATLRYIQDNYDPNFSWAIMRTLLSSEFYKGTYRGFPYCPPYLTEEQWNELQKIAHKNIKRAKSGRIYLFTSLIRCPVCGQLLCGTGCKSIINRKTREKRDYCYYRCSRAHNDRICTYKHRLSQNLIEQYLLDNLDTEYRKYQIRVKKIEEEKKKIAQTKTPEKLNAELERLNLLFQKGRVEWDYYSSEYDRIEQELKNLRKIKPEVKRDLSFLENLLQSDFKTLYASLSPENRRAFWRSTIKQIHLNEDSTIKFVDFL

SEQ ID NO: 7814 - protein, 464 aa, Unknown
  Description of Unknown: Integrase B7815 sequence
  PTHR30461:SF3,SM00857,G3DSA:1.10.10.2600,IPR036162,PF13408, IPR025827,PS51737,G3DSA:3.40.50.1390,IPR006119,IPR038109, IPR011109,SSF53041,PTHR30461,PS51736,cd00338, PF00239
MNSTYFRPQPELFGLRVVKYIRCSHDGQVLHGDTLEAQDSLLDEFIKVNRMVLVDTFVDEALTARKKFTRRKEFVRLLDGVRSHSFDMILFTKLDRWFRNIGDYHKIQEILEANGVQWKAITESYDTTTTNGRLHINIRLSVAQDECDRDSDRIKDVFAYKLKNKTYLSGSLPRGLKLDDEKHVIIDPEWKQFALDMFDHFEQTNSKRGTLLYLKEKYGIYLCYDTISRNLRNSLYKGMYRDDPDFCEPLIEPERFDRIQVLGKRNVRQRYSNRTYIFTGLLICSSCNHYLVGQTTHRTLSDGTEKHYPSYRCNQRYQSHSCDRNRSYREDYVEEYLLQHIRPALSEYVAEYEVTGTNPARKNPAAEAAKIRTKMQKLYELYMDDLIDRDTYKRDYSAFQEKLKELDSIVVAPSRDLADLKKLLEQDYEEIYRTFSPQEKNAFWKSFVQSITVHEDGEMDIVFL

SEQ ID NO: 7815 - protein, 464 aa, Unknown
  Description of Unknown: Integrase B7816 sequence
  PTHR30461:SF3,SM00857,G3DSA:1.10.10.2600,IPR036162,PF13408, PS51737,G3DSA:3.40.50.1390,IPR025827,IPR006119,IPR038109, IPR011109,SSF53041,PTHR30461,PS51736,cd00338, PF00239
MNSTYFRPQPELFGLRVVKYIRCSHDGQVLHGDTLEAQDALLDEFIKVNRMVLVDTFIDEALTARKKFTRRKEFVRLLDCVRSHSFDMILFTKLDRWFRNIGDYHKIQEILEENGVQWKAITESYDTTTTNGRLHINIRLSVAQDECDRDSDRIKDVFAYKLKNKTYLSGSLPRGLKLDDEKHVIIDPEWKQFALDMFDHFEQTNSKRGTLLYLKEKYGIYLCYDTISRNLRNSLYKGMYRDDPDFCEPLIEPERFDRIQVLGKRNVRQRYSNRTYIFTGLLICSSCNHYLVGQTTHRTLSDGTEKHYPSYRCNQRYQSHSCDRNRSYREDYVEEYLLQHIRPALSEYVAEYEVTGTNPARKNPAAEAAKIRTKMQKLYELYMDDLIDRDTYKRDYSAFQEKLKELDSIVVAPSRDLADLKKLLEQDYEEIYRTFSPQEKNAFWKSFVQSITVHEDGEMDIVFL

SEQ ID NO: 7816 - protein, 464 aa, Unknown
  Description of Unknown: Integrase B7817 sequence
  PTHR30461:SF3,SM00857,G3DSA:1.10.10.2600,IPR036162,PF13408, PS51737,G3DSA:3.40.50.1390,IPR025827,IPR006119,IPR038109, IPR011109,SSF53041,PTHR30461,PS51736,cd00338, PF00239
MNSTYFRPQPELFGLRVVKYIRCSHDGQVLHGDTLEAQDALLDEFIKVNRMVLVDTFVDEALTARKKFTRRKEFVRLLDGVRAHNFDMILFTKLDRWFRNIGDYHKIQEILEANGVQWKAITESYDTTTTNGRLHINIRLSVAQDECDRDSDRIKDVFAYKLKNKTYLSGSLPRGLKLDDEKHVIIDPEWKQFALDMFDHFEQTNSKRGTLLYLKEKYGIYLCYDTISRNLRNSLYKGMYRDDPDFCEPLIEPERFDRIQVLGKRNVRQRYSNRTYIFTGLLICSSCNHYLVGQTTHRTLSDGTEKHYPSYRCNQMYQSHSCDRNRSYREDYVEEYLLQHIRPALSEYVAEYEVTGTNPARKNPAAEAAKIRTKMQKLYELYMDDLIDRDTYKRDYSAFQEKLKELDSIVVAPSRDLADLKKLLEQDYEEIYRTFSPQEKNAFWKSFVQSITVHEDGEMDIVFL

SEQ ID NO: 7817 - protein, 464 aa, Unknown
  Description of Unknown: Integrase B7818 sequence
  PTHR30461:SF3,cd00338,SM00857,IPR006118,IPR036162, PF13408,IPR025827,G3DSA:3.40.50.1390,PS51737,IPR006119, SSF53041,IPR011109,PTHR30461,PS00397,PS51736, Coil,PF00239
MPEKILRCAIYIRVSTFEQSVHGKSLQAQKECLEQYATDNNMSIVGVYADEGKTARKELKKRKAIHALIEDVKKDRIDVILFWRLDRWFRNLSDFYKVQDVLDEHGVRWISVSEPGINMETRDGRLQLNVVLSIGQNEVDTTSERIKFVNEASIRQKKLIFGDANMPFGYKTGVVDGKKCMVKDPETEHMVEDFFNYFRIHNSKKGAVRYMQESYGIDFSYGMLRTMLSSEFYKGTYRGYPYCPAYLSEKEWDEMQIISKRNIKTTPSGRIYLFTGLMRCPVCGQKLVGTGCSSIINRKTGEKRTYCYYRCNRALKDHICTYRHRVSQNLVEKYLLENLEREYEKYKVRSNQISEELKKQKKTKDPEKLRKEMERLNLLFQKGRISFDYYDKEYQRLEEEYSASAAFPEEEETRSLHYVEELLETDFRQMYDSLSPENKRSFWRSTIQEIYLNDDNTIKAVDFL

SEQ ID NO: 7818 - protein, 464 aa, Unknown
  Description of Unknown: Integrase B7819 sequence
  PTHR30461:SF3,cd00338,SM00857,IPR036162,PF13408, PS51737,IPR025827,G3DSA:3.40.50.1390,IPR006119,IPR011109, SSF53041,PTHR30461,PS51736,Coil,PF00239
MNSTYFRPQPELFGLRVVKYIRCSHDGQVLHGDTLEAQDALLDEFIKVNRMILVDTFVDEALTARKKFTRRKEFVRLLDGVRAHNFDMILFTKLDRWFRNIGDYHKIQEILEANGVQWKAITESYDTTTTNGRLHINIRLSVAQDECDRDSDRIKDVFSYKLKNKTYLSGSLPRGLKLDAEKHVVIDPEWHQFALDMFDHFESTCSKRGTQLFLQEKYGIRVCYDTVVRYLRNPLFMGQYRDDPEFCEKTISRERFEHIQNLAIRNVRIRHTQQFYIFSGLLICSSCNHYMTGTVTYRTLADGKEKTYKSYRCNFKAQSKLCDRSKHYREEYVEEYMLQHIRPALSSYVADFEVTAAAAAKKDPAIEIAKVERKMKKLYDLFMDDLIDKASYRNEYEKFQSQIDKLRSCPAVPVRNLDSIKKMLSDDWETVYHTFSNQEKNVFWKSFVQSITVHEDGEMDIVFL

SEQ ID NO: 7819 - protein, 464 aa, Unknown
  Description of Unknown: Integrase B7820 sequence
  PTHR30461:SF3,SM00857,G3DSA:1.10.10.2600,IPR036162,PF13408, IPR025827,PS51737,G3DSA:3.40.50.1390,IPR006119,IPR038109, IPR011109,SSF53041,PTHR30461,PS51736, cd00338,PF00239
MNSTYFRPQPELFGLRVVKYIRCSHDGQVLHGDTLEAQDALLDEFIKVNRMVLVDTFIDEALTARKKFTRRKEFVRLLDGVRAHNFDMILFTKLDRWFRNIGDYHKIQEILEANGVQWKAITESYDTTTTNGRLHINIRLSVAQDECDRDSDRIKDVFAYKLKNKTYLSGSLPRGLKLDDEKHVIIDPEWKQFALDMFDHFEQTNSKRGTLLYLKEKYGIYLCYDTISRNLRNSLYKGMYRDDPDFCEPLIEPERFDRIQVLGKRNVRQRYSNRTYIFTGLLICSSCNHYLVGQTTHRTLSDGTEKHYPSYRCNQRYQSHSCDRNRSYREDYVEEYLLQHIRPALSEYVAEYEVTGTNPARKNPAAEAAKIRTKMQKLYELYMDDLIDRDTYKRDYSAFQEKLKELDSIVVAPSRDLADLKKLLEQDYEEIYRTFSPQEKNAFWKSFVQSITVHEDGEMDIVFL

SEQ ID NO: 7820 - protein, 464 aa, Unknown
  Description of Unknown: Integrase B7821 sequence
  PTHR30461:SF3,SM00857,G3DSA:1.10.10.2600,IPR036162,PF13408, PS51737,G3DSA:3.40.50.1390,IPR025827,IPR006119,IPR038109, IPR011109,SSF53041,PTHR30461,cd00338,PF00239
MNSTYFRPQPELFGLRVCKYIRCSHDGQVLHGDTLEAQDALLDEFIKVNRMVLVDAFIDEALTARKKFTRRKEFVRLLDGVRAHNFNMILFTKLDRWFRNIGDYHKIQEILEANGVQWKAITESYDTTTTNGRLHINIRLSVAQDECDRDSDRIKDVFAYKLKNKTYLSGSLPRGLKLNEEKHVIIDPDWKQFALDMFDHFEQTNSKRGTLLYLKEKYGIYLCYDTIARNLRNPLYKGMYRDDPDFCEPLIEPERFDRIQVLGKRNVRQRYSNRTYIFTGLLICSSCNHYLVGQTTHRTLADGTEKHYPSYRCNQRYQSHSCDRNRSYREDCVEEYLLQHIRPALSEYVAEYEVTGTNPARKNPAAEAAKIRTKMQKLYELYMDDLIDRDTYKRDYSAFQEKLKELDSIVVAPSRDLADLKKLLEQDYEEIYRTFSPQEKNAFWKSFVQSITVHEDGEMDIVFL

SEQ ID NO: 7821 - protein, 464 aa, Unknown
  Description of Unknown: Integrase B7822 sequence
  PTHR30461:SF3,SM00857,IPR036162,PF13408,IPR025827, PS51737,G3DSA:3.40.50.1390,IPR006119,SSF53041,IPR011109, PTHR30461,PS51736,cd00338,PF00239
MNSSYFRSQPELYGLRVAKYIRCSHEGQVLHGDTLEAQDTLLNEFIEVNHMVLVDTFVDEALTARKRFAKRKEFVRLLDGVRTHSFDLILFTKLDRWFRNISDYHKIQEILDANGVQWKAITESYDTTTTNGRLHINIRLSVAQDECDRDSDRIKDVFAYKLKNKSYISGRLPRGLKLDADKHIIHDPEWKQWALDMFDHFESSGSIYSTFLYLTDKYGPLLRYDGVSRALKNSLYKGMYRDDPEFCDPLIDPERFDRLFDLAKKNVRQRKTRRYYIFTGLLVCSSCQHNLVPYTIPHTLADGTRKDYIFYRCGYHSSSRLCDRSRTYREEYIEQYLLDHVRPALSRYIAEYDVISSGASKKDPAAEAAKIRHKLEKLYDLFLDDLIEKDLYRQKYDDLQTQLKDCLTVPSAPVRDFSAIQELLSKNWEDMYCTFSKTEKNVFWKSFIKSIVVYEDGSMDINFL

SEQ ID NO: 7822 - protein, 464 aa, Unknown
  Description of Unknown: Integrase B7823 sequence
  PTHR30461:SF3,SM00857,G3DSA:1.10.10.2600,IPR036162,PF13408, IPR025827,PS51737,G3DSA:3.40.50.1390,IPR006119,IPR038109, IPR011109,SSF53041,PTHR30461,PS51736,cd00338, PF00239
MNSTYFRPQPELFGLRVVKYIRCSHDGQVLHGDTLEAQDALLDEFIKVNRMVLIDTFIDEALTARKKFTRRKEFVRLLDGVRSHSFDMILFTKLDRWFRNIGDYHKIQEILEANGVQWKAITESYDTTTTNGRLHINIRLSVAQDECDRDSDRIKDVFAYKLKNKTYLSGSLPRGLKLDDEKHVIIDPEWKQFALDMFDHFEQTNSKRGTLLYLKEKYGIYLCYDTISRNLRNSLYKGMYRDDPDFCEPLIEPERFDRIQVLGKRNVRQRYSNRTYIFTGLLICSSCNHYLVGQTTHRTLSDGTEKHYPSYRCNQRYQSHSCDRNRSYREDYVEEYLLQHIRPALSEYVAEYEVTGTNPARKNPAAEAAKIRTKMQKLYELYMDDLIDRDTYKRDYSAFQEKLKELDSIVVVPSRDLADLKKLLEQDYEEIYRTFSPQEKNAFWKSFVQSITVHEDGEMDIVFL

SEQ ID NO: 7823 - protein, 464 aa, Unknown
  Description of Unknown: Integrase B7824 sequence
  PTHR30461:SF3,SM00857,G3DSA:1.10.10.2600,IPR036162,PF13408, IPR025827,G3DSA:3.40.50.1390,PS51737,IPR006119,IPR038109, IPR011109,SSF53041,PTHR30461,PS51736,cd00338, PF00239
MNSTYFRPQPELFGLRVVKYIRCSHDGQVLHGDTLEAQDALLDEFIKVNRMVLIDTFIDEALTARKKFTRRKEFVRLLDGVRAHNFDMILFTKLDRWFRNIGDYHKIQEILEANGVQWKAITESYDTTTTNGRLHINIRLSVAQDECDRDSDRIKDVFAYKLKNKTYLSGSLPRGLKLDDEKHVIIDPEWKQFALDMFDHFEQTNSKRGTLLYLKEKYGIYLCYDTISRNLRNSLYKGMYRDDPDFCEPLIEPERFDRIQVLGKRNVRQRYSNRTYVFTGLLICSSCNHYLVGQTTHRTLSDGTEKHYPSYRCNQRYQSHSCDRNRSYREDYVEEYLLQHIRPALSEYVAEYEVTGTNPARKNPAAEAAKIRTKMQKLYGLYMDDLIDRDTYKRDYSAFQEKLKELDSIVVAPSRDLADLRKLLEQDYEEIYRTFSPQEKNAFWKSFVQSITVHEDGEMDIVFL

SEQ ID NO: 7824 - protein, 464 aa, Unknown
  Description of Unknown: Integrase B7825 sequence
  PTHR30461:SF3,SM00857,G3DSA:1.10.10.2600,IPR036162,PF13408, IPR025827,PS51737,G3DSA:3.40.50.1390,IPR006119,IPR038109, IPR011109,SSF53041,PTHR30461,PS51736,cd00338, PF00239
MNSTYFRPQPELFGLRVVKYIRCSHDGQVLHGDTLEAQDALLDEFIKVNRMVLIDTFIDEALTARKKFTRRKEFVRLLDGVRSHSFDMILFTKLDRWFRNIGDYHKIQEILEANGVQWKAITESYDTTTTNGRLHINIRLSVAQDECDRDSDRIKDVFAYKLKNKTYLSGSLPRGLKLDDEKHVIIDPEWKQFALDMFDHFEQTNSKRGTLLYLKEKYGIYLCYDTISRNLRNSLYKGMYRDDPDFCEPLIEPERFDRIQVLGKRNVRQRYSNRTYIFTGLLICSSCNHYLVGQTTHRTLSDGTEKHYPSYRCNQRYQSHSCDLNRSYREDYVEEYLLQHIRPALSEYVAEYEVTGTNPARKNPAAEAAKIRTKMQKLYELYMDDLIDRDTYKRDYSAFQEKLKELDSIVVAPSRDLADLKKLLEQDYEEIYRTFSPQEKNAFWKSFVQSITVHEDGEMDIVFL

SEQ ID NO: 7825 - protein, 464 aa, Unknown
  Description of Unknown: Integrase B7826 sequence
  SM00857,IPR006118,G3DSA:1.10.10.2600,IPR036162,PF13408, PS51737,G3DSA:3.40.50.1390,IPR025827,IPR006119,IPR038109, IPR011109,SSF53041,PF00239,PTHR30461,PS00397, PS51736,Coil,cd00338
MKSKTLRCAIYIRVSTTEQMMHGKSLEAQKDYLIHYAKEHDMNIVGIYADEGKTARKELKRRKAIQELVKAVERDEIDVILFWRLDRWFRNLSDFYKVQDILDQHNVRWISASEPGINMETRDGRLQLNVVLSIGQNEVDTTSERIKFVNEASIRQGKVIFGDSNMPIGYIVGTVDGVKRMVKDPEKEDLVNAFYRYFRTHQSKMKTLKFIQENYDPTFSYSQLRNMLESDFYHGTYRDNPHYCPAYLTEKEWAEIQEISNRNVKHPASGRVYLFSGMMRCPVCGQLLAGRGGSSIINRKTRETRTYCYYRCNKACIDHMCTYRHNVSQNLIEEYLISNLEEEYNRYKIQSQNIHSKADLPKKKRTPAQVKKEMQRLNLLFQKERIEWDYYNEEYEKLTTELSSLEESDQQPKTNFDNIEKILHNDFRKTYDNLSPENRRAFWRSIIKEIHINTSHEVTGIDFY

SEQ ID NO: 7826 - protein, 464 aa, Unknown
  Description of Unknown: Integrase B7827 sequence
  PTHR30461:SF3,SM00857,G3DSA:1.10.10.2600,IPR036162,PF13408, IPR025827,PS51737,G3DSA:3.40.50.1390,IPR006119,IPR038109, IPR011109,SSF53041,PTHR30461,PS51736,cd00338, PF00239
MNSTYFRPQPELFGLRVVKYIRCSHDGQVLHGDTLEAQDALLDEFIAVNRMVLVDTFIDEALTARKKFTRRKEFVRLLDGVRSRSFDMILFTKLDRWFRNIGDYHKIQEILEENGVQWKAITESYDTTTTNGRLHINIRLSVAQDECDRDSDRIKDVFAYKLKNKTYLSGSLPRGLKLDDEKHVIIDPEWKQFALDMFDHFEQTNSKRGTLLYLKEKYGIYLCYDTISRNLRNSLYKGMYRDDPDFCEPLIEPERFDRIQVLGKRNVRQRYSNRTYIFTGLLICSSCNHYLVGQTTHRTLSDGTEKHYPSYRCNQRYQSHSCDRNRSYREDYVEEYLLQHIRPALSEYVAEYEVTGTNPARKNPAAEAAKIRTKMQKLYELYMDDLIDRDTYKRDYSAFQEKLKELDSIVVAPSRDLADLKKLLEQDYEEIYRTFSPQEKNAFWKSFVQSITVHEDGEMDIVFL

SEQ ID NO: 7827 - protein, 464 aa, Unknown
  Description of Unknown: Integrase B7828 sequence
  PTHR30461:SF3,cd00338,SM00857,IPR036162,PF13408, IPR025827,G3DSA:3.40.50.1390,PS51737,IPR006119,SSF53041, IPR011109,PTHR30461,PS51736,Coil,PF00239
MSSSYFRPQPELYGLRVVKYIRCSHEGQVLHGDTLEAQDTLLNEFIEVNHMVLVDTFVDEALTARKRFTKRKEFVRLLDGVRTHSFDLILFTKLDRWFRNISDYHKIQEILDANGVQWKAITESYDTTTTNGRLHINIRLSVAQDECDRDSDRIKDVFAYKLKNKSYISGRLPRGLKLDADKHIIHDPEWKQWALDMFDHFESSGSIYSTFLFLTDKYGPLLRYDGVSRALKNPLYKGMYRDDPEFCDPLIDPERFDRLFDLAKKNVRQRKTRRYYIFTGLLVCSSCQHNLVPYTIPHTLADGTHKDYVSYRCGYHSSSRLCDRSRTYREEYIEQYLLDHVRPALSRYMAEYDVVSSSALKKDPAAEAAKIRHKLEKLYDLFLDDLIEKDLYRQKYDELQAQLKDCLAVPSTPVRDFSAVQELLSKNWEDMYCTFSKTEKNVFWKSFVESIIVYEDGSMDINFL

SEQ ID NO: 7828 - protein, 464 aa, Unknown
  Description of Unknown: Integrase B7829 sequence
  PTHR30461:SF3,SM00857,IPR036162,PF13408,PS51737, G3DSA:3.40.50.1390,IPR025827,IPR006119,IPR011109,SSF53041, PTHR30461,PS51736,cd00338,PF00239
MNSTYFRPQPELFGLRVVKYIRCSHDGQVLHGDTLEAQDALLDEFIKVNHMILVDTFVDEALTARKKFTRRKEFVRLLDGVRAHNFDMILFTKLDRWFRNIGDYHKIQEILEANGVQWKAITESYDTTTTNGRLHINIRLSVAQDECDRDSDRIKDVFSYKLKNKTYLSGSLPRGLKLDAEKHVVIDPEWHQFALDMFDHFESTCSKRGTQLFLQEKYGIRVCYDTVVRYLRNPLFMGQYRDDPEFCEKTISRERFEHIQNLAIRNVRIRHTQQFYIFSGLLICSSCNHYMTGTVTYRTLADGKEKTYKSYRCNFKAQSKLCDRSKHYREEYVEEYMLQHIRPALSSYVADFEVTAAAAAKKDPAIEIAKVERKMKKLYDLFMDDLIDKASYRSEYEKFQSQIDKLRSCPAAPVRNLDSIKKMLSDDWETVYHTFSDQEKNVFWKSFVQSITVHEDGEMDIVFL

SEQ ID NO: 7829 - protein, 464 aa, Unknown
  Description of Unknown: Integrase B7830 sequence
  PTHR30461:SF3,SM00857,G3DSA:1.10.10.2600,IPR036162,PF13408, IPR025827,PS51737,G3DSA:3.40.50.1390,IPR006119,IPR038109, IPR011109,SSF53041,PTHR30461,PS51736,cd00338, PF00239
MNSTYFRPQPELFGLRVVKYIRCSHDGQVLHGDTLEAQDALLDEFIKVNRMVLIDAFIDEALTARKKFTRRKEFVRLLDGVRAHSFDMILFTKLDRWFRNIGDYHKIQEILEANGVQWKAITESYDTTTTNGRLHINIRLSVAQDECDRDSDRIKDVFAYKLKNKTYLSGSLPRGLKLDDEKHVIIDPEWKQFALDMFDHFEQTNSKRGTLLYLKEKYGIYLCYDTISRNLRNSLYKGMYRDDPDFCEPLIEPERFDRIQVLGKRNVRQRYSNRTYIFTGLLICSSCNHYLVGQTTHRTLSDGTEKHYPSYRCNQRYQSHSCDRNRSYREDYVEEYLLQHIRPALSEYVAEYEVTGTNPARKNPAAEAAKIRTKMQKLYELYMDDLIDRDTYKRDYSAFQEKLKELDSIVVAPSRDLADLKKLLEQDYEDIYRTFSPQEKNAFWKSFVQSITVHEDGEMDIVFL

SEQ ID NO: 7830 - protein, 464 aa, Unknown
  Description of Unknown: Integrase B7831 sequence
  SM00857,G3DSA:1.10.10.2600,IPR036162,PS51737,G3DSA:3.40.50.1390, IPR006119,IPR038109,PF07508,SSF53041,IPR011109, PF00239,PTHR30461,PS51736,Coil,cd00338
MREVKKAIAYFRVSTDMQKEDLSLETQEKGGEIFARDNNIEIVKKFTDVMSGGNRNRKGFIEAQKYLEENQGEIDYFIAYDVSRIARDAFAFLSLFNKLNLLNVKLKLINNPTLDSDSPMGKLILTILAAIFEFFRFDNADRVRDNMIVKVKEGKRMNNAPYGYRIIDKKMVIVPEEAELIKYIYQEYLKGHGIVALERMTGKDRSTIKQWLNNKVYAGYNIFGKRKMNKTTFKPMKNPDETKIVEAKGDWEPIIDIDTWEKVANRMSLNQELRMRNIEKTSYLLSGLLFHTCGSKFRGNAGRKGTYYYRCTGCSRSIKSDTLDKKVLDELFNSEFLDELNKIPLENNNKDSELKKLKAQKSKLKTREENLIELYADGDITKEQFKSKKVDIQNSLIDIEAKIIELENERNEVKQNLDFKKMFIEALSNLKNAESKQEANKILKQIIKKIEVNEEREVFIHLNF

SEQ ID NO: 7831 - protein, 463 aa, Unknown
  Description of Unknown: Integrase B7832 sequence
  PTHR30461:SF3,SM00857,IPR006118,IPR036162,PF13408, PS51737,G3DSA:3.40.50.1390,IPR025827,Coil,IPR006119, IPR011109,SSF53041,PTHR30461,PS00397, PS51736,cd00338,PF00239
MPSKIERCAIYIRVSTAEQMMHGKSLEAQKQYLTNYAKEHNMTVAGVYADEGKTARKELKKRKAIHSLLEDVKAGKIDVIIFWRIDRWFRNLSDFYKVQEVLDDNNVHWISTSEPGINMETRDGRLQLNVVLSIGQNEVDTTSERIKFVNEASIRQGKLIFGDVNMGYGYKSGIIDGVKRMVKDPDREDTVNAFYRFFFKHHAKGLSMRYIQENYDPDFTWANMRTLLSSEFYKGTYRGIPYCPAYLTESEWNNLQEIQNANVKRAPSGRIYLFSGMINCPICGRRLSARGGSSIINRKTGAKKVYCYYRCNKAFIDHKCSYRHMVSQNLIERYLIDHLEYEYNKFKIKCEKIEKEQEKKKKVQTPEKLQKELERLNLLFQKGRIEWDYYSKEYDRIENELNELLNAAPELEPDYAYLEELLNTDFRTMYYNLTQENRRAFWHSIIREIHLNTDHTVDSVDFL

SEQ ID NO: 7832 - protein, 463 aa, Unknown
  Description of Unknown: Integrase B7833 sequence
  PTHR30461:SF3,SM00857,IPR006118,IPR036162,PF13408, IPR025827,PS51737,PS00397,G3DSA:3.40.50.1390,IPR006119, SSF53041,IPR011109,PTHR30461,Coil,PS51736, cd00338,PF00239
MTTKVERCAIYIRVSTTEQMMHGKSLEAQKEYLTNYAREHNMAVVGVYADEGKTARKELKKRKAIHSLLQDVEAGKIDVIIFWRIDRWFRNLSDFYKVQDILDNHNVRWISTSEPGINMETRDGRLQLNVVLSIGQNEVDTTSERIKFVNEASIRSGKLIFGDVNMGYGYKSGIVDGQKRMIKDPDREHVVDAFYKYFFKHQNKCATLRYIQETYDPDFSFGIMRTLLSSEFYKGTYRGFPYCPAYLTEDEWNKLQKIQKRNVKATPSGRIYLFAGMIRCPVCGQKLCGTGCSSIINRKTGAKRTYCYYRCNRAMIDHICSYRHRLSQNLVENYLLDNLENEYKNYKVKCEKIEKEKEKQKKKQSPEKLRKELDRLNFLFQKGRIEWDYYNEEYSRVESELNNLQKVLPEPAPNYSYLEELLNTDFRTMYDQLSQENRRAFWRSIIQEIHINEDSTITSVDFL

SEQ ID NO: 7833 - protein, 463 aa, Unknown
  Description of Unknown: Integrase B7834 sequence
  PTHR30461:SF3,SM00857,IPR036162,PF13408,IPR025827, G3DSA:3.40.50.1390,PS51737,IPR006119,IPR011109,SSF53041, PF00239,PTHR30461,PS51736,Coil,cd00338
MNTYFHPQPELYGLRVVKYIRCSHEGQVLHGDTLEAQDTLLNEFIEVNHMVLVDTFVDEALTARKRYTKRKEFVRLLDGVRAHAFDMILFTKLDRWFRNIGDYHKIQEILDVNGVQWKAITESYDTTTTNGRLHINIRLSVAQDECDRDSDRIKDVFAYKLKNKSYISGRLPRGLKLDADKHIIHDPEWKQWALDMFDHFESSGSIYSTFQFLTNKYGPLLRYDGVSRALKNPLYKGMYRDDPDFCDPLIDPERFDHLLELAKKNVRQRKTRRYYIFTGLLVCSSCQHNLVPYTIPHTLADGTHKDYVSYRCGYHSSSRLCDRSRTYREEYIEQYLLDHVRPALSCYMAEYDVVSSSASKKDPAAEAAKIRHKLEKLYDLFLDDLIEKDLYRQKYDELQAQLKECLEVPSAPVRDFSAVQELLSKNWEDMYCTFSKTEKNVFWKSFVESIIVYEDGSMDINFL

SEQ ID NO: 7834 - protein, 463 aa, Unknown
  Description of Unknown: Integrase B7835 sequence
  PTHR30461:SF3,SM00857,IPR006118,G3DSA:1.10.10.2600,IPR036162, PF13408,IPR025827,G3DSA:3.40.50.1390,Coil,PS51737, IPR006119,IPR038109,SSF53041,IPR011109, PTHR30461,PS00397,cd00338,PF00239
MTKPQTALLRVALYIRVSSDEQAERGDSIRDQKERGIKYIDDHQNMVLQDTYIDDGVSGQKLDRDDFTRLIGNVKAGLVDLIIFTKLDRWFRSLRHYLNIQVILDKYNVAWTAIDQPYFDTSTPYGRAFVAQSMTWAELEAQNGGLRVADVFRNKVVHGEVITGKVPRGYMIQNKHLVFSDEAPAMLDSIQYFHREQGLAKTVNYMRENHGINMSIQNLKNSILRNEKYTGRYRGNENYCPRLISDEMYQDIQRVLDNNSTIRSSQKYPYIFSGILICDECGHKMSGCHINVVSRRTSGKVYRYKYPAYECLQYRAYKKCSNGGEIREMRIEEYLLEHIREELSGYLVDFETGEAKRIDNRAKKNKIRRKLDRLKDLYLNEVINLEEYKKDRAEYEEQLAALPDMEQPIKNLKPLKQVLDCNFEIIYNNLNNEEKRAFWRSIIKEIRVSKSIGRNRKYQIIFL

SEQ ID NO: 7835 - protein, 463 aa, Unknown
  Description of Unknown: Integrase B7836 sequence
  PTHR30461:SF3,SM00857,IPR006118,IPR036162,PF13408, PS51737,G3DSA:3.40.50.1390,Coil,IPR025827,IPR006119, IPR011109,SSF53041,PTHR30461,PS00397,PS51736, cd00338,PF00239
MPSKIERCAIYIRVSTAEQMMHGKSLEAQKQYLTNYAKEHNMTVAGVYADEGKTARKELKKRKAIHSLLEDVKAGKIDVIIFWRIDRWFRNLSDFYKVQEVLDDNNVHWISTSEPGINMETRDGRLQLNVVLSIGQNEVDTTSERIKFVNEASIRQGKLIFGDVNMGYGYKSGIIDGVKRMVKDPDREDAVNAFYRFFFKHHAKGLSMRYIQENYDPDFTWANMRTLLSSEFYKGTYRGIPYCPAYLTESEWNNLQEIQNTNVKRAPSGRIYLFSGMINCPICGRRLSARGGSSIINRKTGAKKVYCYYRCNKAFIDHKCTYKHMVSQNLIEQYLIDHLEYEYNKFKIKCEKIEKEQEKKKKIQTPEKLQKELERLNLLFQKGRIEWDYYSKEYDRIENELNELLNAAPELEPDYAYLEELLNTDFRTMYYNLTQENRRAFWHSIIREIHLNTDHTVDSVDFL

SEQ ID NO: 7836 - protein, 463 aa, Unknown
  Description of Unknown: Integrase B7837 sequence
  PTHR30461:SF3,IPR036162,PS51737,IPR011109,PTHR30461, PS00397,PF00239,G3DSA:1.10.10.2600,IPR006119,SSF53041, cd00338,SM00857,IPR025827,IPR038109,PS51736, IPR006118,PF13408,G3DSA:3.40.50.1390,Coil
MRRKTTAHVEKILLRVAIYIRVSTDKQVKDGDSMRDQLATGQKYIDSHENMILVDTYIDDGISGQKLKRDDFQRLIDDVRAGRIDLIIFTRLDRWFRNLRHYLNTQDILDKHGVSWTAIEQPYFDTSTPHGRAFVNNSMIWAELEAQNDSDRILGVFDDKVDNGEVLSGSTPLGYTIVNKHLVPDDDAPTAVAIFQYYRKTGNLSMTLRYMESEFGLVRSAASLKNMLTNTKYIGEFRDNKNYCPAIIDRDLFFDVQRLLKINIKSGKKHDYIFSGLVVCDDCDHIMSGCQQRARGRVRADGTRIIYKYSVYRCRQGVNLHRCPNRKLVFETTLEKMLLERIRPELENYIAEYEVANLPALRTDAKRRSVEGKMQKLKDLYLNDLITMDEFKLDREKLLMQLEKINAEDSRPVKDLSYLKNFLKMDFESVYDSLSIPERRELWRSIVKEIRVDHDKNIHIIFL

SEQ ID NO: 7837 - protein, 463 aa, Unknown
  Description of Unknown: Integrase B7838 sequence
  PTHR30461:SF3,IPR036162,PS51737,IPR011109,PTHR30461, PS00397,PF00239,G3DSA:1.10.10.2600,IPR006119,SSF53041, cd00338,SM00857,IPR025827,IPR038109,PS51736, IPR006118,PF13408,G3DSA:3.40.50.1390,Coil
MRRKTTAPVEKILLRVAIYIRVSTDKQVKDGDSMRDQLATGQKYIDSHENMILVDTYIDDGISGQKLKRDDFQRLIDDVRAGRIDLIIFTRLDRWFRNLRHYLNTQDILDKHGVSWTAIEQPYFDTSTPHGRAFVNNSMIWAELEAQNDSDRILGVFDDKVDNGEVLSGSTPLGYKIVNKHLVPDDDAPTAVAIFQYYRKTGNLSMTLRYMESEFGLVRSAASLKNMLTNTKYIGEFRDNKNYCPAIIDRDLFFDVQRLLKINIKSGKKHDYIFSGLVVCDDCDHIMSGCQQRARGRVRADGTRIIYKYSVYRCRQGVNLHRCPNRKLVFETTLEKMLLERIRPELENYIAEYEVANLPALRTDAKRRSVEGKMQKLKDLYLNDLITMDEFKLDREKLLMQLEKINAEDSRPVKDLSYLKNFLKMDFESVYDSLSIPERRELWRSIVKEIRVDHDKNIHIIFL

SEQ ID NO: 7838 - protein, 463 aa, Unknown
  Description of Unknown: Integrase B7839 sequence
  PTHR30461:SF3,SM00857,IPR006118,IPR036162,PF13408, PS51737,IPR025827,PS00397,G3DSA:3.40.50.1390,IPR006119, IPR011109,SSF53041,PTHR30461,Coil,PS51736, cd00338,PF00239
MPSKIERCAIYIRVSTAEQMMHGKSLEAQKQYLTNYAKEHNMTVAGVYADEGKTARKELKKRKAIHSLLEDVKAGKIDVIIFWRIDRWFRNLSDFYKVQEVLDDNNVHWISTSEPGINMETRDGRLQLNVVLSIGQNEVDTTSERIKFVNEASIRQGKLIFGDVNMGYGYKSGIIDGVKRMVKDPDREDTVNAFYRFFFKHHAKGLSMRYIQENYDPDFTWANMRTLLSSEFYKGTYRGIPYCPAYLTESEWNNLQEIQNANVKRAPSGRIYLFSGMINCPICGRRLSARGGSSIINRKTGAKKVYCYYRCNKAFIDHKCTYKHMVSQNLIEQYLIEHLEYEYNKFKIKCEKIEKEQEKKKKIQTPEKLQKELERLNLLFQKGRIEWDYYSKEYDRIENELNELLNAAPELEPDYAYLEELLNTDFRTMYYNLTQENRRAFWHSIIREIHLNADHTVDSVDFL

SEQ ID NO: 7839 - protein, 463 aa, Unknown
  Description of Unknown: Integrase B7840 sequence
  PTHR30461:SF3,SM00857,IPR006118,IPR036162,PF13408, PS51737,IPR025827,PS00397,G3DSA:3.40.50.1390,IPR006119, IPR011109,SSF53041,PTHR30461,Coil,PS51736, cd00338,PF00239
MPSKIERCAIYIRVSTAEQMMHGKSLEAQKQYLTNYAKEHNMTVAGVYADEGKTARKELKKRKAIHALLEDVKAGKIDVIIFWRIDRWFRNLSDFYKVQEVLDDNNVHWISTSEPGINMETRDGRLQLNVVLSIGQNEVDTTSERIKFVNEASIRQGKLIFGDVNMGYGYKSGIIDGVKRMVKDPDREDTVNAFYRFFFKHHAKGLSMRYIQENYDPDFTWANMRTLLSSEFYKGTYRGIPYCPAYLTESEWNNLQEIQNANVKRAPSGRIYLFSGMINCPICGRRLSARGGSSIINRKTGAKKVYCYYRCNKAFIDHKCSYRHMVSQNLIERYLIDHLEYEYNKFKIKCEKIEKEQEKKKKVQTPEKLQKELERLNFLFQKGRIEWDYYSKEYDRIENELNELLNAAPELEPDYAYLEELLNTDFRTMYYNLTQENRRAFWHSIIREIHLNTDHTVDSVDFL

SEQ ID NO: 7840 - protein, 463 aa, Unknown
  Description of Unknown: Integrase B7841 sequence
  PTHR30461:SF3,SM00857,IPR006118,IPR036162,PF13408, PS51737,IPR025827,Coil,G3DSA:3.40.50.1390,IPR006119, IPR011109,SSF53041,PTHR30461,PS00397,PS51736, cd00338,PF00239
MSEKIKRCAIYIRVSTSEQMMHGKSIEAQREYLACYAKDHGMIVTGVYADEGKTARKELKKRKAIHALLEDVKAGKIDVILFWRLDRWFRNMSDFYKVQDILDEYGVYWISASEPGINMETRDGRLQLNVVLSIGQNEVDTTSERIKFVNEASIRQGKVIFGENNMPRGYKVGIVDGKKCMVKDPEQEEMVNAFYDYFEKHQAKQQTLRFIQRNYDPAFSYGMLRTMLSSEFYKGTYRGIPYCPAYLSEERWAHIQNISKKSIRRTRSGRVYYFTGLIRCPQCGQILCGTGCKSVVNRKTGEKRDYCYYRCNRAMIDRICTNQHRVSQNLIESYLLDNLENEFKTYKIRVENVKQQKKKAPPVRTEKQIDKELDRLNLLFQKGRIEWDYYSREYDSLEKEKEDLNSVTVDPEPDYSFIETLLQQDIRGIYRSLTPENKRAFWKNTIRQIYLKPDYTIDYVDFI

SEQ ID NO: 7841 - protein, 463 aa, Unknown
  Description of Unknown: Integrase B7842 sequence
  PTHR30461:SF3,SM00857,IPR036162,PF13408,IPR025827, PS51737,G3DSA:3.40.50.1390,IPR006119,IPR011109,SSF53041, PF00239,PTHR30461,PS51736,Coil,cd00338
MNTYFHPQPELYGLRVVKYIRCSHEGQVLHGDTLEAQDTLLNEFIETNHMVLVDTFVDEALTARKRYTKRKEFVRLLDGVRAHAFDMILFTKLDRWFRNIGDYHKIQEILDANSVQWKAITESYDTTTTNGRLHINIRLSVAQDECDRDSDRIKDVFAYKLKNKTYISGSLPRGLMLDEEKHVIIDPEWHQFALDMFDHFEATGSKRGTLLYLQEKYDMRLCYDTVVRNLRNPLYKGMYRDDPGFCECTITPERFDRIQLLGRKNVRHRKTNRTYIFTGLLICSSCKHYLVGAATTATLAHGVKKEYRSYRCNQRYQSHSCDRARTYREQDVEDYLLGHVRPALSQYIAQYEVSSSSMQKKDPAADAAKIRRKLEKLYDLFMDDLIDKESYREKYDDLQDQLKKCQAVVPVPRRDLSEVKSLLAQNWEEIYQAFTAAEKNTFWKSFIESILVHEDGSMDISFL

SEQ ID NO: 7842 - protein, 463 aa, Unknown
  Description of Unknown: Integrase B7843 sequence
  PTHR30461:SF3,SM00857,IPR006118,IPR036162,PF13408, PS51737,G3DSA:3.40.50.1390,Coil,IPR025827,IPR006119, IPR011109,SSF53041,PTHR30461,PS00397, PS51736,cd00338,PF00239
MPSKIERCAIYIRVSTAEQMMHGKSLEAQKQYLTNYAKEHNMTVAGVYADEGKTARKELKKRKAIHSLLEDVKAGKIDVIIFWRIDRWFRNLSDFYKVQEVLDDNNVHWISTSEPGINMETRDGRLQLNVVLSIGQNEVDTTSERIKFVNEASIRQGKLIFGDVNMGYGYKSGIIDGVKRMVKDPDREDTVNAFYRFFFKHHAKGLSMRYIQENYDPDFTWANMRTLLSSEFYKGTYRGIPYCPAYLTESEWNNLQEIQNANVKRAPSGRIYLFSGMINCPICGRRLSARGSSSIINRKTGAKKVYCYYRCNKAFIDHKCSYRHMVSQNLIERYLIDHLEYEYNKFKIKCEKIEKEQEKKKKVQTPEKLQKELERLNLLFQKGRIEWDYYSKEYDRIENELNELLNAAPELEPDYAYLEELLNTDFRTMYYNLTQENRRAFWHSIIREIHLNTDHTVDSVDFL

SEQ ID NO: 7843 - protein, 463 aa, Unknown
  Description of Unknown: Integrase B7844 sequence
  PTHR30461:SF3,cd00338,SM00857,IPR036162,PF13408, IPR025827,PS51737,G3DSA:3.40.50.1390,IPR006119,IPR011109, SSF53041,PTHR30461,PS51736,Coil,PF00239
MSFFTPNPQLFGLRVVKYIRCSHDDQVLHGDTLEAQDLILEDFIKVNRMILVDTFIDEALTARKRFNKRKEFVRLLNGVKAHDFDLIIFTKLDRWFRNIGDYHKIQEILEANGVQWKAVTENYDTTTTNGRLHINIRLSVAQDECDRDSDRIKDVFAYKLKNKTYVSGSLPRGLKLDAEKHVIIDPEWNCFALDMFDRFEATCSKRDTQLFLQEKYNIRVCYDTVARYLKNPLFKGQYRDDPDFCPATISPERFERIQKLAIRNVRIRHTQQFYIFSGLLICSSCNHYMCGTVTYRRMADGSEKMYKNYRCNFKAQSKLCDRGKTYREADLEEYMLTHIRPALSDYIAKYEVTAASTVQKNPVTEIAKIERKMKKLYDLFMDDLIDKEAYRSEYDKFKAQIEELQKCSTTAPMRSLDSVKKLLSEDWEAVYHTFSDREKNTFWKSFVESVLVYEDGSMDIRFL

SEQ ID NO: 7844 - protein, 463 aa, Unknown
  Description of Unknown: Integrase B7845 sequence
  PTHR30461:SF3,SM00857,IPR006118,IPR036162,PF13408, IPR025827,G3DSA:3.40.50.1390,PS51737,PS00397,IPR006119, SSF53041,IPR011109,PTHR30461,Coil, PS51736,cd00338,PF00239
MTTKVERCAIYIRVSTTEQMMHGKSLEAQKEYLTNYAKEHNMAVVGVYADEGKTARKELKKRKAIHSLLQDVEAGKIDVIIFWRIDRWFRNLSDFYKVQDILDNHNVRWISTSEPGINMETRDGRLQLNVVLSIGQNEVDTTSERIKFVNEASIRSGKLIFGDVNMGYGYKSGIVDGQKRMIKDPDREHVVDAFYKYFFKHQNKCATLRYIQETYDPDFSFGIMRTLLSSEFYKGTYRGFPYCPAYLTEDEWNKLQKIQKRNVKATPSGRIYLFAGMIRCPVCGQKLCGTGCSSIISRKTGAKRTYCYYRCNRAMIDHICSYRHRLSQNLVENYLLDNLENEYKNYKVKCEKIEKEKEKRKKKQSPDKLRKELDRLNFLFQKGRIDWDYYNEEYGRVESELNDLQSALPEPVTNYSYLEELLDTDFRTMYDQLSQENRRAFWRSIIQEIHVNEDNAITSVDFL

SEQ ID NO: 7845 - protein, 463 aa, Unknown
  Description of Unknown: Integrase B7846 sequence
  SM00857,IPR006118,IPR036162,G3DSA:3.40.50.1390,Coil, IPR006119,SSF53041,PTHR30461,PS00397,PS51736, cd00338,PF00239
MKVVTYLRVSTEMQKDRGSLETQRESLNEYCKKNNLNIIDSFEDVMSGGIADRDGILKIMAMLPLKKFEGVVVQNSDRISRDFKDGTLFFNDFRKHNVRLISVMEGPLDFRDDNTDAMAKIRLIFSEMERRKMRIRTKVSMAALANTDRYLGGGLLPHFKVKIINKEKKIVKNEETWDLERQKYLDILKYRSFKKVAELYCINYSTFLEQVRKVELIGHRMFGEFIKDPYTLKKVKNKDPFISSEKVLPALLTDEEFNLINALLKDNRKKFKNPKRKYLFSGLLYCSCGKKFAGNIVNKKTKSYYYYRCEGCKVFYNVDKLEINIKNAILSHPHLKLLNDTTFRLQDLQDKIELENKKLEDLVKRQREITQLLMDGLLDASTIKPELEKLKKLVDLSKQEIKKYENLILENSNFVITEDNISDLKELLFMENTDEIMEELQEILCLIVNRIIIKTLEDIEVIF

SEQ ID NO: 7846 - protein, 463 aa, Unknown
  Description of Unknown: Integrase B7847 sequence
  PTHR30461:SF3,IPR036162,PS51737,IPR011109, PTHR30461,PS00397,PF00239,G3DSA:1.10.10.2600, IPR006119,SSF53041,cd00338,SM00857,IPR025827,IPR038109 ,PS51736,IPR006118,PF13408,G3DSA:3.40.50.1390,Coil
MRRKTTAPVEKILLRVAIYIRVSTDKQVKDGDSMRGQLATGQKYIDSHENMILVDTYIDDGISGQKLKRDDFQRLIDDVRAGRIDLIIFTRLDRWFRNLRHYLNTQDILDKHGVSWTAIEQPYFDTSTPHGRAFVNNSMIWAELEAQNDSDRILGVFDDKVDNGEVLSGSTPLGYKIVNKHLVPDDDAPTAVAIFQYYRKTGNLSMTLRYMESEFGLVRSAASLKNMLTNTKYIGEFRDNKNYCPAIIDRDLFFDVQRLLKINIKSGKKHDYIFSGLVVCDDCDHIMSGCQQRARGRVRADGTRIIYKYSVYRCRQGVNLHRCPNRKLVFETTLEKMLLERIRPELENYIAEYEVANLPALRTDAKRRSVEGKMQKLKDLYLNDLITMDEFKLDREKLLMQLEKINAEDSRPVKDLSYLKNFLKMDFESVYDSLSIPERRELWRSIVKEIRVDHDKNIHIIFL

SEQ ID NO: 7847 - protein, 463 aa, Unknown
  Description of Unknown: Integrase B7848 sequence
  PTHR30461:SF3,IPR036162,PS51737,IPR011109,PTHR30461, PS00397,PF00239,G3DSA:1.10.10.2600,IPR006119,SSF53041, cd00338,SM00857,IPR025827,IPR038109,PS51736, IPR006118,PF13408,G3DSA:3.40.50.1390,Coil
MRRKTTAPVEKILLRVAIYIRVSTDKQVKDGDSMRDQLATGQKYIDSHENMILVDTYIDDGISGQKLKRDDFQRLIDDVRAGRIDLIIFTRLDRWFRNLRHYLNTQDILDKHGVSWTAIEQPYFDTSTPHGRAFVNNSMIWAELEAQNDSDRILGVFDDKVDNGEVLSGSTPLGYTIVNKHLVPDDDAPTAVAIFQYYRKTGNLSMTLRYMESEFGLVRSAASLKNMLTNTKYIGEFRDNKNYCPAIIDRDLFFDVQRLLKINIKSGKKHDYIFSGLVVCDDCDHIMSGCQQRARGRVRSDGTRIIYKYSVYRCRQGVNLHRCPNRKLVFETTLEKMLLERIRPELENYIAEYEVANLPALRTDAKRRSVEGKMQKLKDLYLNDLITMDEFKLDREKLLMQLEKINAEDSRPVKDLSYLKNFLKMDFESVYDSLSIPEKRELWRSIVKEIRVDHDKNIHIIFL

SEQ ID NO: 7848 - protein, 463 aa, Unknown
  Description of Unknown: Integrase B7849 sequence
  PTHR30461:SF3,SM00857,IPR006118,IPR036162,PF13408, PS51737,IPR025827,Coil,G3DSA:3.40.50.1390,IPR006119, IPR011109,SSF53041,PTHR30461,PS00397,PS51736, cd00338,PF00239
MPSKIERCAIYIRVSTAEQMMHGKSLEAQKQYLTNYAKEHNMTVAGVYADEGKTARKELKKRKAIHSLLEDVKAGKIDVIIFWRIDRWFRNLSDFYKVQEVLDDNNVRWISTSEPGINMETRDGRLQLNVVLSIGQNEVDTTSERIKFVNEASIRQGKLIFGDVNMGYGYKSGIIDGVKRMVKDPDREDTVNAFYRFFFKHHAKGLSMRYIQENYDPDFTWANMRTLLSSEFYKGTYRGIPYCPAYLTESEWNNLQEIQNANVKRAPSGRIYLFSGMINCPICGRRLSARGGSSIINRKTGAKKVYCYYRCNKAFIDHKCSYRHMVSQNLIERYLIDHLEYEYNKFKIKCEKIEKEQEKKKKVQTPEKLQKELERLNLLFQKGRIEWDYYSKEYDRIENELNELLNTAPELEPDYAYLEELLNTDFRTMYYNLTQENRRAFWHSIIREIHLNTDHTVDSVDFL

SEQ ID NO: 7849 - protein, 463 aa, Unknown
  Description of Unknown: Integrase B7850 sequence
  PTHR30461:SF3,SM00857,IPR006118,IPR036162,PS51737, G3DSA:3.40.50.1390,Coil,IPR006119,SSF53041,IPR011109, PTHR30461,PS00397,PS51736,cd00338,PF00239
MATKIERCAIYIRVSTTEQMMHGKSLEAQKEYLTNYASEHNMAVVGVYADEGKTARKELKKRKAIHSLLEDVKAGKIDVIIFWRLDRWFRNLSDFYRVQDILDSHNVRWISTSEPGINMETRDGRLQLNVVLSIGQNEVDTTSERIKFVNEASIRNGKLIFGDVNMGYGYKSGVVDGQKRMIKDPDREHVVDAFYKYFFKHQNKCATLRYIQETYDPDFSFGIMRTLLSSEFYKGTYRGFPYCPAYLTEDEWNKLQKIQKRNVKATPSGRIYLFAGMIRCPVCGQLLCGTGCSSIINRKTGAKRTYCYYRCNRAMIDHICSYRHRLSQNLVENYLLDNLENEYKNYKVKCEKIEKEKEKQKKKQSPEKLRKELERLNFLFQKGRIDWDYYNEEYGRVESELNNLQNALPEPVTNYGYLEELLDTDFRTMYDQLSQENRRAFWRSIIQEIHVNEDHAITSVDFL

SEQ ID NO: 7850 - protein, 463 aa, Unknown
  Description of Unknown: Integrase B7851 sequence
  PTHR30461:SF3,IPR036162,PS51737,IPR011109,PTHR30461, PS00397,PF00239,G3DSA:1.10.10.2600,IPR006119,SSF53041, cd00338,SM00857,IPR025827,IPR038109, PS51736,IPR006118,PF13408,G3DSA:3.40.50.1390,Coil
MRRKTTAPIEKILLRVAIYIRVSTDKQVKDGDSMRDQLATGQKYIDSHENMILVDTYIDDGISGQKLKRDDFQRLIDDVRAGRIDLIIFTRLDRWFRNLRHYLNTQDILDKHGVSWTAIEQPYFDTSTPHGRAFVNNSMIWAELEAQNDSDRILGVFDDKVDNGEVLSGSTPLGYTIVNKHLVPDDDAPTAVAIFQYYRKTGNLSMTLRYMESEFGLVRSAASLKNMLTNTKYIGEFRDNKNYCPAIIDRDLFFDVQRLLKINIKSGKKHDYIFSGLVVCDDCDHIMSGCQQRARGRVRADGTRIVYKYSVYRCRQGVNLHRCPNRKLVFETTLEKMLLERIRPELENYIAEYEVANLPALRTDAKRRSVEGKMQKLKDLYLNDLITMDEFKLDREKLLMQLEKINAEDSRPVKDLSYLKNFLKMDFESVYDSLSIPERRELWRSIVKEIRVDHDKNIHIIFL

SEQ ID NO: 7851 - protein, 463 aa, Unknown
  Description of Unknown: Integrase B7852 sequence
  PTHR30461:SF3,IPR036162,PS51737,IPR011109,PTHR30461, PS00397,PF00239,G3DSA:1.10.10.2600,IPR006119,SSF53041, cd00338,SM00857,IPR025827,IPR038109,PS51736, IPR006118,PF13408,G3DSA:3.40.50.1390,Coil
MRRKTTAPVEKILLRVAIYIRVSTDKQVKDGDSMRDQLATGQKYIDSHENMILVDTYIDDGISGQKLKRDDFQRLIDDVRASRIDLIIFTRLDRWFRNLRHYLNTQDILDRHGVSWTAIEQPYFDTSTPHGRAFVNNSMIWAELEAQNDSDRILGVFDDKVDNGEVLSGSTPLGYTIENKHLIPDDDAPTAVTIFQYYRKTGNLSMTLRYMESEFGLVRSAASLKNMLTNTKYIGEFRDNKEYCPAIIDHDLFYDVQRLLKINIKSGKKHDYIFSGLVVCDDCDHIMSGCQQRAGGRVRADGTRITYKYSVYRCRQGVNLHRCPNRKLVFETTLESMLLDRIRPELEKYIAEYEVANLPALRTDAKRRSVEGKMQKLKDLYLNDLITMDEFKLDREKLLMQLEKINAEDSRPVKDLSYLKNFLKMDFESVYDSLSIPERRELWRSIVKEIRVDHDKNIHIIFL

SEQ ID NO: 7852 - protein, 463 aa, Unknown
  Description of Unknown: Integrase B7853 sequence
  PTHR30461:SF3,IPR036162,PS51737,IPR011109,PTHR30461, PS00397,PF00239,G3DSA:1.10.10.2600,IPR006119,SSF53041, cd00338,SM00857,IPR025827,IPR038109,PS51736, IPR006118,PF13408,G3DSA:3.40.50.1390,Coil
MRRKTTAPVEKILLRVAIYIRVSTDKQVKDGDSMRDQLATGQKYIDNHENMILVDTYIDDGISGQKLKRDDFQRLIDDVRAGRIDLIIFTRLDRWFRNLRHYLNTQDILDKHGVSWTAIEQPYFDTSTPHGRAFVNNSMIWAELEAQNDSDRILGVFDDKVDNGEVLSGSTPLGYTIVNKHLVPDDDAPTAVAIFQYYRKTGNLSMTLRYMESEFGLVRSAASLKNMLTNTKYIGEFRDNKNYCPAIIDRDLFFDVQRLLKINIKSGKKHDYIFSGLVVCDDCDHIMSGCQQRARGRVRADGTRIIYKYSVYRCRQGVNLHRCPNRKLVFETTLEKMLLERIRPELENYIAEYEVANLPALRTDAKRRSVEGKMQKLKDLYLNDLITMDEFKLDREKLLMQLEKINAEDSRPVKDLSYLKNFLKMDFESVYDSLSIPERRELWRSIVKEIRVDHDKNIHIIFL

SEQ ID NO: 7853 - protein, 463 aa, Unknown
  Description of Unknown: Integrase B7854 sequence
  PTHR30461:SF3,cd00338,SM00857,IPR036162,PF13408, IPR025827,G3DSA:3.40.50.1390,PS51737,IPR006119,IPR011109, SSF53041,PTHR30461,PS51736,Coil,PF00239
MSFFTPNPQLFGLRVVKYIRCSHDDQVLHGDTLEAQDLILEDFIKVNRMILVDTFIDEALTARKRFNKRKEFVRLLNGVKAHDFDLIIFTKLDRWFRNIGDYHKIQEILEANGVQWKAVTENYDTTTTNGRLHINIRLSVAQDECDRDSDRIKDVFAYKLKNKTYVSGSLPRGLKLDAEKHVIIDPEWNCFALDMFDRFEATCSKRDTQLFLQEKYNIRVCYDTVARYLKNPLFKGQYRDDPDFCPATISPERFERIQKLAIRNVRIRHTQQFYIFSGLLICSSCNHYMCGTVTYRRMADGSEKMYKNYRCNFKAQSKLCDRGKTYREADLEEYMLAHIRPALSDYIAKYEVTAASTVQKNPVTEIAKIERKMKKLYDLFMDDLIDKEAYRSEYDKFKAQIEELQKCSTAAPMRSLDSVKKLLSEDWEAVYHTFSDREKNTFWKSFVESVLVYEDGSMDIRFL

SEQ ID NO: 7854 - protein, 463 aa, Unknown
  Description of Unknown: Integrase B7855 sequence
  PTHR30461:SF3,SM00857,IPR006118,IPR036162,PF13408, PS51737,PS00397,IPR025827,G3DSA:3.40.50.1390,IPR006119, IPR011109,SSF53041,PTHR30461,Coil, PS51736,cd00338,PF00239
MSEKIKRCAIYIRVSTSEQMMHGKSIEAQREYLACYAKDHGMIVTGVYADEGKTARKELKKRKAIHALLEDVKAGKIDVILFWRLDRWFRNMSDFYKVQDILDEYGVYWISASEPGINMETRDGRLQLNVVLSIGQNEVDTTSERIKFVNEASIRQGKVIFGENNMPRGYKVGIVDGKKCMVKDPEQEEMVNAFYDYFEKHQAKQQTLRFIQRNYDPAFSYGMLRTMLSSEFYKGTYRGIPYCPAYLSEERWAHIQNISKKSIRRTRSGRVYYFTGLIRCPQCGQILCGTGCKSVVNRKTGEKRDYCYYRCNRAMIDRICTNQHRVSQNLIESYLLDNLENEFKTYKIRVENVKQQKKKAPPVRTEKQIDKELDRLNLLFQKGRIEWDYYSREYDSLEKEKEDLNSVTVDPEPDYSFIETLLQQDFRDIYRSLTPENKRAFWKNTIRQIYLKPDYTIDYVDFI

SEQ ID NO: 7855 - protein, 463 aa, Unknown
  Description of Unknown: Integrase B7856 sequence
  PTHR30461:SF3,cd00338,SM00857,IPR036162,PF13408, IPR025827,PS51737,G3DSA:3.40.50.1390,IPR006119,SSF53041, IPR011109,PTHR30461,PS51736,Coil,PF00239
MSFFTPNPQLFGLRVVKYIRCSHDDQVLHGDTLEAQDLILEDFIKVNRMILVDTFIDEALTARKKFNKRKEFVRLLSGVKAHAFDLIIFTKLDRWFRNIGDYHKIQEILEANGVQWKAVTENYDTTTTNGRLHINIRLSVAQDECDRDSDRIKDVFAYKLKNKTYVSGSLPRGLKLDAEKHVIIDPEWNCFALDMFDRFEATCSKRDTQLFLQDKYNIRVCYDTVARYLKNPLFKGQYRDDPDFCPATISPERFERIQKLAIRNVRIRHTQQFYIFSGLLICSSCNHYMCGTVTYRRMADGSEKMYKNYRCNFKAQSKLCDRGKTYREADLEEYMLAHIRPALSDYIAKYEVTAASTVQKNPVTEIAKIERKMKKLYDLFMDDLIDKEAYRSEYDKFKAQIEELQKCSTAAPMRSLDSVKKLLSEDWEAVYHTFSDQEKNTFWKSFVESVLVYEDGSMDIRFL

SEQ ID NO: 7856 - protein, 463 aa, Unknown
  Description of Unknown: Integrase B7857 sequence
  PTHR30461:SF3,SM00857,IPR006118,IPR036162,PS51737, PS00397,G3DSA:3.40.50.1390,IPR006119,IPR011109,SSF53041, PTHR30461,Coil,PS51736,cd00338, PF00239
MTTKVERCAIYIRVSTTEQMMHGKSLEAQKEYLTNYAKEHNMAVVGIYADEGKTARKELKKRKAIHSLLQDVEAGKIDVIIFWRIDRWFRNLSDFYKVQDILDSHNVRWISTSEPGINMETRDGRLQLNVVLSIGQNEVDTTSERIKFVNEASIRNGKLIFGDVNMGYGYKSGIVDGQKRMVKDPDREHVVDAFYKYFFKHQNKCATLRYIQETYDPDFSFGIMRTLLSSEFYKGTYRGFPYCPAYLTEDEWNKLQKIQKRNVKATPSGRIYLFAGMIRCPVCGQLLCGTGCSSIINRKTGAKRTYCYYRCNRAMIDHICSYRHRLSQNLVENYLLDNLENEYKNYKVKCEKIEKEKEKQKKKQSPEKLRKELDRLNFLFQKGRIDWDYYNEEYGRIESELNDLQSALPEPVTNYGYLEELLDTDFRTMYDQLSQENRRVFWRSIIQEIHVNEDHAITSVDFL

SEQ ID NO: 7857 - protein, 463 aa, Unknown
  Description of Unknown: Integrase B7858 sequence
  PTHR30461:SF3,IPR036162,PS51737,IPR011109,PTHR30461, PS00397,PF00239,G3DSA:1.10.10.2600,IPR006119,SSF53041, cd00338,SM00857,IPR025827,IPR038109,PS51736, IPR006118,PF13408,G3DSA:3.40.50.1390,Coil
MRRKTTAPVEKILLRVAIYIRVSTDKQVKDGDSMRDQLATGQKYIDSHENMILVDAYIDDGISGQKLKRDDFQRLIDDVRAGRIDLIIFTRLDRWFRNLRHYLNTQDILDKHGVSWTAIEQPYFDTSTPHGRAFVNNSMIWAELEAQNDSDRILGVFDDKVDNGEVLSGSTPLGYTIVNKHLVPDDDAPTAVAIFQYYRKTGNLSMTLRYMESEFGLVRSAASLKNMLTNTKYIGEFRDNKNYCPAIIDRDLFFDVQRLLKINIKSGKKHDYIFSGLVVCDDCDHIMSGCQQRARGRVRADGTRIIYKYSVYRCRQGVNLHRCPNRKLVFETTLEKMLLERIRPELENYIAEYEVANLPALRTDAKRRSVEGKMQKLKDLYLNDLITMDEFKLDREKLLMQLEKINAEDSRPVKDLSYLKNFLKMDFESVYDSLSIPERRELWRSIVKEIRVDHDKNIHIIFL

SEQ ID NO: 7858 - protein, 463 aa, Unknown
  Description of Unknown: Integrase B7859 sequence
  PTHR30461:SF3,IPR036162,PS51737,IPR011109,PTHR30461, PS00397,PF00239,G3DSA:1.10.10.2600,IPR006119,SSF53041, cd00338,SM00857,IPR025827,IPR038109,PS51736, IPR006118,PF13408,G3DSA:3.40.50.1390,Coil
MRRKTTAPVEKILLRVAIYIRVSTDKQVKDGDSMRDQLATGQKYIDSHENMILVDTYIDDGISGQKLKRDDFQRLIDDVRAGRIDLIIFTRLDRWFRNLRHYLNTQDILDKHGVSWTAIEQPYFDTSTPHGRAFVNNSMIWAELEAQNDSDRILGVFDDKVDNGEVLSGSTPLGYTIVNKHLVPDDDAPTAVAIFQYYRKTGNLSMTLRYMESEFGLVRSAASLKNMLTNTKYIGEFRDNKNYCPAIIDRDLFFDVQRLLKINIKSGKKHDYIFSGLVVCDDCDHIMSGCQQRARGRVRADGTRIIYKYSVYRCRQGVNLHRCPNRKLVFETTLEKMLLERIRPELENYIAEYEVANLPALRTDAKRRSVEGKMQKLKDLYLNDLITMDEFKLDREKLLMQLEKINAEDSRPVKDLSYLKNFLKMDFESVYDSLSIPEKRELWRSIVKEIRVDHDKNIHIIFL

SEQ ID NO: 7859 - protein, 463 aa, Unknown
  Description of Unknown: Integrase B7860 sequence
  PTHR30461:SF3,SM00857,IPR006118,IPR036162,PF13408, IPR025827,PS51737,G3DSA:3.40.50.1390,PS00397,IPR006119, IPR011109,SSF53041,PTHR30461,Coil,PS51736, cd00338,PF00239
MPSKIERCAIYIRVSTAEQMMHGKSLEAQKQYLTNYAKEHNMTVAGVYADEGKTARKELKKRKAIHSLLEDVKAGKIDVIIFWRIDRWFRNLSDFYKVQEVLDDNNVRWISTSEPGINMETRDGRLQLNVVLSIGQNEVDTTSERIKFVNEASIRQGKLIFGDVNMGYGYKSGIIDGVKRMVKDPDREDTVNAFYRFFFKHHAKGLSMRYIQENYDPDFTWANMRTLLSSEFYKGTYRGIPYCPAYLTESEWNNLQEIQNANVKRAPSGRIYLFSGMINCPICGRRLSARGGSSIINRKTGAKKVYCYYRCNKAFIDHKCTYKHMVSQNLIEQYLIDHLEYEYNKFKIKCEKIEKEQEKKKKIQTPEKLQKELERLNLLFQKGRIEWDYYSKEYDRIETELNELLNAAPELEPDYAYLEELLNTDFRTMYYNLTQENRRAFWHSIIRKIHLNTDHTVDSVDFL

SEQ ID NO: 7860 - protein, 463 aa, Unknown
  Description of Unknown: Integrase B7861 sequence
  PTHR30461:SF3,SM00857,IPR006118,IPR036162,PF13408, IPR025827,G3DSA:3.40.50.1390,PS00397,PS51737,IPR006119, SSF53041,IPR011109,PTHR30461,Coil,PS51736, cd00338,PF00239
MTTKVERCAIYIRVSTTEQMMHGKSLEAQKEYLTNYAREHNMAIVGIYADEGKTARKELKKRKAIHSLIKDVEAGKIDVIIFWRIDRWFRNLSDFYKVQDILDSHNVRWISTSEPGINMETRDGRLQLNVVLSIGQNEVDTTSERIKFVNEASIRSGKLIFGDVNMGYGYKSGIVDGQKRMIKDPDREHVVNAFYEYFFKHQNKCATLRYIQETYDPDFSFGIMRTLLSSEFYKGTYRGFPYCPAYLTEDEWNKLQKIQKRNVKATPSGRIYLFAGMIRCPVCGQKLCGTGCSSIINRKTGAKRTYCYYRCNRAMIDHICSYRHRLSQNLVENYLLDNLEDEYKNYKVKCEKIEKEKEKQKKKQSPEKLRKELDRLNFLFQKGRIEWDYYNEEYGRVESELNDLQSVLPEPAPNYSYLEELLNTDFRTMYDQLSQENRRAFWRSIIQEIHINEDSTITSVDFL

SEQ ID NO: 7861 - protein, 463 aa, Unknown
  Description of Unknown: Integrase B7862 sequence
  PTHR30461:SF3,SM00857,IPR006118,IPR036162,PF13408, PS51737,IPR025827,G3DSA:3.40.50.1390,IPR006119,IPR011109, SSF53041,PF00239,PTHR30461,PS00397,PS51736, Coil,cd00338
MTTKIERCAIYIRVSTTEQMMHGKSLEAQKEYLTNYAREHNMAVVGVYADEGKTARKELKKRKAIHSLLQDVESGKIDVIIFWRIDRWFRNLSDFYKVQDILDNHNVRWISTSEPGINMETRDGRLQLNVVLSIGQNEVDTTSERIKFVNEASIRNGKLIFGDVNMGYGYKSGIVDGQKRMVKDPDREHVVDAFYKYFFKHQNKCATLRYIQETYDPDFSFGIMRTLLSSEFYKGTYRGFPYCPAYLTEDEWNKLQKIQKRNVKATPSGRIYLFAGLIRCPVCGQKLCGTGCSSIINRKTGAKRTYCYYRCNRAMIDHICSYRHRLSQNLVENYLLDNLENEYKNYKVKCEKIEKEKEKQKKKQSPEKLRKELDRLNFLFQKGRIDWDYYNEEYGRVESELNDLQNALPEPVTNYGYLEELLDTDFRTMYDQLSQENRRAFWRSIIQEIHVNEDHAITSVDFL

SEQ ID NO: 7862 - protein, 463 aa, Unknown
  Description of Unknown: Integrase B7863 sequence
  PTHR30461:SF3,SM00857,IPR006118,IPR036162,PF13408, IPR025827,PS51737,Coil,G3DSA:3.40.50.1390,IPR006119, IPR011109,SSF53041,PTHR30461,PS00397,PS51736, cd00338,PF00239
MSEKIKRCAIYIRVSTSEQMMHGKSLEAQREYLERYAKEHNMIVVGIYADEGKTARKELKKRKAIHALLEDVKAGKIDMILFWRLDRWFRNLSDFYKVQDILDEYDVHWLSASEPGINMETRDGRLQLNVVLSIGQNEVDTTSERIKFVNEASIRQGKLIFGEANMGFGYKSGIVDGVKRMIKDPETEEATEAFFKYLLTHQNKSETVRYMQKHYYPDFSYSMLRTMVSSEFYKGTYRGIPYCPAYITEQEWLQLQELSRKNIKQTPSGRIYLFSGLIRCPVCGQKLAGTGCSSIINRKTKEKRTYCYYRCNRAILDRLCTSRHRVSQNLIEKYLLENLSEEYKKYQIRYTKICEQKKKMKDTRTPEKLNKELDRLNLLFQKDRITWEYYSAEYDRIEKELKELSAIHPEPEKDFTYLEELLHSDFKKIYKQLTPENRRTFWRSTIEEIHLNEDYTVESVDFL

SEQ ID NO: 7863 - protein, 463 aa, Unknown
  Description of Unknown: Integrase B7864 sequence
  PTHR30461:SF3,SM00857,IPR006118,IPR036162,PF13408, IPR025827,G3DSA:3.40.50.1390,PS51737,IPR006119,SSF53041, IPR011109,PF00239,PTHR30461,PS00397,PS51736, Coil,cd00338
MSEKIKRCAIYIRVSTSEQMMHGKSLEAQREYLERYAKEHNMIVVGIYADEGKTARKELKKRKAIHALLEDVKAGKIDMILFWRLDRWFRNLSDFYKVQDILDEYDVHWLSASEPGINMETRDGRLQLNVVLSIGQNEVDTTSERIKFVNEASIRQGKLIFGEANMGFGYKSGIVDGVKRMIKDPETEEATEAFFKYLLSHQNKSETVRYMQKHYYPDFSYSMLRTMVSSEFYKGTYRGIPYCPAYITEQEWLQLQELSRKNIKQTPSGRIYLFSGLIRCPVCGQKLAGTGCSSIINRKTKEKRTYCYYRCNRAILDRLCTSRHRVSQNLIEKYLLENLSEEYKKYQIRYTKICEQKKKIKDTRTPEKLNKELDRLNLLFQKDRITWEYYSTEYDRIEKELKELSAIQPEAEKDFTYLEELLRSDFKKIYEQLTPENRRTFWRSTIGEIHLNEDYTVESVDFL

SEQ ID NO: 7864 - protein, 463 aa, Unknown
  Description of Unknown: Integrase B7865 sequence
  PTHR30461:SF3,SM00857,IPR006118,IPR036162,PF13408, PS51737,IPR025827,G3DSA:3.40.50.1390,Coil,IPR006119, IPR011109,SSF53041,PTHR30461,PS00397,PS51736, cd00338,PF00239
MPSKIERCAIYIRVSTAEQMMHGKSLEAQKQYLTNYAKEHNMTIVGVYADEGKTARKELKKRKAIHSLLEDVKAGKIDVIIFWRIDRWFRNLSDFYKVQEALDDNNVRWISTSEPGINMETRDGRLQLNVVLSIGQNEVDTTSERIKFVNEASIRQGKLIFGDVNMGYGYKSGIIDGVKRMVKDPDREDTVNAFYRFFFKHHAKGLSMRYIQENYDPDFTWANMRTLLSSEFYKGTYRGIPYCPAYLTESEWNNLQEIQNANVKRAPSGRIYLFSGMINCPICGRRLSARGGSSIINRKTGAKKVYCYYRCNKAFIDHKCTYKHMVSQNLIEQYLIEHLEYEYNKFKIKCKKIEKEQEKKKKIQTPEKLQKELERLNLLFQKGRIEWDYYSKEYDRIENELNELLNAAPELEPDYAYLEELLNTDFRTMYYNLTQENRRAFWHSIIREIHLNTDHTVDSVDFL

SEQ ID NO: 7865 - protein, 463 aa, Unknown
  Description of Unknown: Integrase B7866 sequence
  PTHR30461:SF3,SM00857,IPR006118,IPR036162,PF13408, IPR025827,G3DSA:3.40.50.1390,PS51737,IPR006119,SSF53041, IPR011109,PF00239,PTHR30461,PS00397,PS51736, Coil,cd00338
MPSKIERCAIYIRVSTAEQMMHGKSLEAQKQYLTNYAKEHNMTVAGVYADEGKTARKELKKRKAIHALLEDVKAGKIDVIIFWRIDRWFRNLSDFYKVQEVLDDNNVRWISTSEPGINMETRDGRLQLNVVLSIGQNEVDTTSERIKFVNEASIRQGKLIFGDVNMGYGYKSGIIDGVKRMVKDSDREDTVNAFYRFFFKHHAKGLSMRYIQENYDPDFTWANMRTLLSSEFYKGTYRGIPYCPAYLTESEWNNLQEIQNANVKRAPSGRIYLFSGMINCPICGRRLSARGGSSIINRKTGAKKVYCYYRCNKAFIDHKCTYKHMVSQNLIEQYLIDHLEYEYNKFKIKCEKIEKEQEKKKKFQTPEKLQKELERLNLLFQKGRIEWDYYSKEYDRIENELNELLNAAPELEPDYAYLEELLNTDFRTMYYNLTQENRRAFWHSIIREIHLNTDHTVDSVDFL

SEQ ID NO: 7866 - protein, 463 aa, Unknown
  Description of Unknown: Integrase B7867 sequence
  PTHR30461:SF3,SM00857,IPR006118,IPR036162,PF13408, IPR025827,PS51737,G3DSA:3.40.50.1390,Coil,IPR006119, IPR011109,SSF53041,PTHR30461,PS00397,PS51736, cd00338,PF00239
MPSKIERCAIYIRVSTAEQMMHGKSLEAQKQYLTNYAKEHNMTVAGVYADEGKTARKELKKRKAIHSLLEDVKAGKIDVIIFWRIDRWFRNLSDFYKVQEVLDNNNVRWISTSEPGINMETRDGRLQLNVVLSIGQNEVDTTSERIKFVNEASIRQGKLIFGDVNMGYGYKSGIICGVKRMVKDPDREDAVNAFYRFFFKHHAKGLSMRYIQENYDPDFTWANMRTLLSSEFYKGTYRGIPYCPAYLTESEWNNLQEIQNANVKRAPSGRIYLFSGMINCPICGRRLSARGGSSIINRKTGAKKVYCYYRCNKAFIDHKCSYRHMVSQNLIERYLIDHLEYEYNKFKIKCEKIEKDQEKKKKVQTPEKLQKELERLNLLFQKGRIEWDYYSKEYDRIENELNELLNAAPELEPDYAYLEELLNTDFRTMYYNLTQENRRAFWHSIIREIHLNADHTVDSVDFL

SEQ ID NO: 7867 - protein, 463 aa, Unknown
  Description of Unknown: Integrase B7868 sequence
  PTHR30461:SF3,SM00857,IPR006118,IPR036162,PF13408, PS51737,G3DSA:3.40.50.1390,Coil,IPR025827,IPR006119, IPR011109,SSF53041,PTHR30461,PS00397,PS51736, cd00338,PF00239
MPSKIERCAIYIRVSTAEQMMHGKSLEAQKQYLTNYAKEHNMTVAGVYADEGKTARKELKKRKAIHSLLEDVKAGKIDVIIFWRIDRWFRNLSDFYKVQEVLDNNNVRWISTSEPGINMETRDGRLQLNVVLSIGQNEVDTTSERIKFVNEASIRQGKLIFGDVNMGYGYKSGIIDGVKRMVKDPDREDTVNAFYRFFFKHHAKGLSMRYIQENYDPDFTWANMRTLLSSEFYKGTYRGIPYCPAYLTESEWNNLQEIQNANVKRAPSGRIYLFSGMINCPICGRRLSARGGSSIINRKTGAKKVYCYYRCNKAFIDHKCTYKHMVSQNLIEQYLIDHLEYEYNKFKIKCEKIEKEQEKKKKVQTPEKLQKELERLNLLFQKGRIEWDYYSKEYDRIENELNELLNAAPELEPDYAYLEELLNTDFRTMYYNLTQENRRAFWHSIIREIHLNTDHTVDSVDFL

SEQ ID NO: 7868 - protein, 463 aa, Unknown
  Description of Unknown: Integrase B7869 sequence
  PTHR30461:SF3,cd00338,SM00857,IPR036162,PF13408, PS51737,IPR025827,G3DSA:3.40.50.1390,IPR006119,IPR011109, SSF53041,PTHR30461,PS51736,Coil,PF00239
MSFFTPNPQLFGLRVVKYIRCSHDDQVLHGDTLEAQDLILEDFIKVNRMILVDTFIDEALTARKKFNKRKEFVRLLDGVKAHAFDLIIFTKLDRWFRNIGDYHKIQEILEANGVQWKAVTENYDTTTTNGRLHINIRLSVAQDECDRDSDRIKDVFAYKLKNKTYVSGSLPRGLKLDAEKHVIIDPEWNCFALDMFDRFEATCSKRDTQLFLQDKYNIRVCYDTVSRYLKNPLFKGQYRDDPDFCPATISPERFERIQKLAIRNVRIRHTQQFYIFSGLLICSSCNHYMCGTVTYRRMADGSEKVYKNYRCNFKAQSKLCDRGKTYREADLEEYMLAHIRPALSDYIAKYEVTAASTVQKNPVAEIAKIERKMKKLYDLFMDDLIDKEAYRSEYDKFKAQIEELQKCSTAAPMRSLDSVKKLLSEDWESVYRTFSDQEKNTFWKSFVESVLVYEDGSMDIRFL

SEQ ID NO: 7869 - protein, 463 aa, Unknown
  Description of Unknown: Integrase B7870 sequence
  PTHR30461:SF3,IPR036162,PS51737,IPR011109,PTHR30461, PS00397,PF00239,G3DSA:1.10.10.2600,IPR006119,SSF53041, cd00338,SM00857,IPR025827,IPR038109, PS51736,IPR006118,PF13408,G3DSA:3.40.50.1390,PF07508,Coil
MKRQTAKLNDKLLLRVAIYIRVSTDQQAQDGDSVRDQLATGQKYIENHENMILADTYVDDGISGQKVKRDDFQRLMNDVRAGSIDLIIFTRLDRWFRNLRHYLNTQDVLDKNGVSWTATEQPYFDTSTPHGRAFVNNSMIWAELEAQNDSDRILSVFDDKVDNSEVLSGSTPLGYRIENKHLVPDDDAPTAAAIFEYYRSNGNLAMTLRYMETEFGLIRSSASLKNMLTNTKYIGEFRTNKNYCPAIIDRDLFDDVQRLLKINIKSGKKHDYIFSGLVVCDECEHTMSGCQQRNSARILADGTRVVYKYNSYRCRQGITLHRCPNHKVMLESTLEKILLARIRPELENYITEYEVANRPAMRTDSKRRNLEHKMQKLKELYLNDLITMDEFKVDREKLMQQLDKIKSDDSQPMKDLSYLKNFLKTDFENIYVSLSIPEKRELWRSIIREIRVDHERNVRIIFL

SEQ ID NO: 7870 - protein, 463 aa, Unknown
  Description of Unknown: Integrase B7871 sequence
  PTHR30461:SF3,SM00857,IPR006118,IPR036162,PF13408, PS51737,G3DSA:3.40.50.1390,IPR025827,Coil,IPR006119, IPR011109,SSF53041,PTHR30461,PS00397,PS51736, cd00338,PF00239
MPSKIERCAIYIRVSTAEQMMHGKSLEAQKQYLTNYAKEHNMTVAGVYADEGKTARKELKKRKAIHSLLEDVKAGKIDVIIFWRIDRWFRNLSDFYKVQEVLDDNNVRWISTSEPGINMETRDGRLQLNVVLSIGQNEVDTTSERIKFVNEASIRQGKLIFGDVNMGYGYKSGIIDGVKRMVKDPDREDTVNAFYRFFFKHHAKGLSMRYIQENYDPDFTWANMRTLLSSEFYKGTYRGIPYCPAYLTESEWNNLQEIQNANVKRAPSGRIYLFSGMINCPICGRRLSARGGSSIINRKTGAKKVYCYYRCNKAFIDHKCSYRHMVSQNLIEQYLIDHLEYEYNKFKIKCEKIEKEQEKKKKVQTPENLQKELERLNLLFQKGRIEWDYYSKEYDRIENELNELLNTAPELEPDYAYLEELLNTDFRTMYYNLTQENRRAFWHSIIREIHLNTDHTVDSVDFL

SEQ ID NO: 7871 - protein, 463 aa, Unknown
  Description of Unknown: Integrase B7872 sequence
  PTHR30461:SF3,cd00338,SM00857,IPR006118,IPR036162, PS51737,G3DSA:3.40.50.1390,IPR006119,IPR011109,SSF53041, PTHR30461,PS00397,PS51736,Coil,PF00239
MTTKVERCAIYIRVSTTEQMMHGKSLEAQKEYLENYANEHNMAVVGIYADEGKTARKELKKRKAIHSLLQDVEAGKIDVIIFWRIDRWFRNLSDFYKVQDILDSHNVRWISTSEPGINMETRDGRLQLNVVLSIGQNEVDTTSERIKFVNESSIRSGKLIFGDANMGYGYKSGIVDGQKRMVKDPDREHVVDAFYKYFFKHQNKCATLRYIQETYDPDFSFGIMRTLLSSEFYKGTYRGFPYCPAYLTEDEWNKLQKIQKRNVKATPSGRIYLFAGMIRCPVCGQLLCGTGCSSIINRKTGAKRTYCYYRCNRAMIDHICSYRHRLSQNLVENYLLDNLEDEYKNYKVKCEKIEKEKEKQKKKQSPEKLRKELDRLNFLFQKGRIEWDYYNEEYSRVESELNNLQKVLPEPAPNYSYLEELLNTDFRTMYDQLSQENRRAFWRSIIQEIHINEDSTITSVDFL

SEQ ID NO: 7872 - protein, 463 aa, Unknown
  Description of Unknown: Integrase B7873 sequence
  PTHR30461:SF3,SM00857,IPR006118,IPR036162,PF13408, IPR025827,G3DSA:3.40.50.1390,Coil,PS51737,IPR006119, SSF53041,IPR011109,PTHR30461,PS00397, PS51736,cd00338,PF00239
MPSKIERCAIYIRVSTAEQMMHGKSLEAQKQYLTNYAKEHNMTVAGVYADEGKTARKELKKRKAIHALLEDVKAGKIDVIIFWRIDRWFRNLSDFYKVQEVLDDNNVRWISTSEPGINMETRDGRLQLNVVLSIGQNEVDTTSERIKFVNEASIRQGKLIFGDVNMGYGYKSGIIDGVKRMVKDPDREDTVNAFYRFFFKHHAKGLSMRYIQENYDPDFTWANMRTLLSSEFYKGTYRGIPYCPAYLTESEWNNLQEIQNANVKRAPSGRIYLFSSMINCPICGRRLSARGGSSIINRKTGAKKVYCYYRCNKAFIDHKCTYKHMVSQNLIEQYLIDHLEYEYNKFKIKCEKIEKEQEKKKKVQTPEKLQKELERLNLLFQKGRIEWDYYSKEYDRIENELNELLNAAPELEPDYAYLEELLNTDFRTMYYNLTQENRRAFWHSIIREIHLNTDHTIDSVDFL

SEQ ID NO: 7873 - protein, 463 aa, Unknown
  Description of Unknown: Integrase B7874 sequence
  PTHR30461:SF3,cd00338,SM00857,G3DSA:1.10.10.2600,IPR036162, PF13408,IPR025827,G3DSA:3.40.50.1390,PS51737,IPR006119, IPR038109,SSF53041,IPR011109,PTHR30461,PS51736, Coil,PF00239
MSYFNFNPDLVGVRVVKYIRCSHEGQVLHGDTLEAQNLILDEFIATNKMVLVDTFIDEAMTARKKYTKRKEFVRLLDGVRSHNFDLIIFTKLDRWFRNIGDYHKIQEILDANHVQWKAVTENYDTTTTNGRLHINIRLSVAQDECDRDSDRIKDVFAYKLKNKTFISGALPRGLMLDAEKHVIPDPEYSEYVTDLFEHFESCGSIRNTLLFLQDKYGFSISYKSISNALRNPLFKGQYRDDPDFCTQIIEPERFDHIQLLLSRNVRIRRNRQTYVFSGLLTCAECNHALVGYSAYYTTKEGEERATKTYRCNHYISTRTCTHKNQMSQKKLEKYLTENIQLAFSDYIASFNVVSSAAKKKDTAAEIARIERKQKKLYNLYMDDLIDAATYKEEYNSFKKQLEELRSIPFSPAVDTRKKTEELLSGDWISVYSSFTDLEKNAFWKSFIDKIVIDVNGNIDIIFL

SEQ ID NO: 7874 - protein, 463 aa, Unknown
  Description of Unknown: Integrase B7875 sequence
  PTHR30461:SF3,SM00857,IPR006118,IPR036162,PF13408, PS51737,G3DSA:3.40.50.1390,IPR025827,Coil,IPR006119, IPR011109,SSF53041,PTHR30461,PS00397,PS51736, cd00338,PF00239
MPSKIERCAIYIRVSTAEQMMHGKSLEAQKQYLTNYAKEHNMTVAGVYADEGKTARKELKKRKAIHSLLEDVKAGKIDVIIFWRIDRWFRNLSDFYKVQEVLDDNNVHWISTSEPGINMETRDGRLQLNVVLSIGQNEVDTTSERIKFVNEASIRQGKLIFGDVNMGYGYKSGIIGGVKRMVKDPDREDAVNAFYRFFFKHHAKGLSMRYIQENYDPDFTWANMRTLLSSEFYKGTYRGIPYCPAYLTESEWNNLQEIQNANVKRAPSGRIYLFSGMINCPICGRRLSARGGSSIINRKTGAKKVYCYYRCNKAFIDHKCSYRHMVSQNLIERYLIDHLEYEYNKFKIKCEKIEKEQEKKKKIQTPEKLQKELERLNLLFQKGRIEWDYYSKEYDRIENELNELLNTAPELEPDYAYLEELLNTDFRTMYYNLTQENRRAFWHSIIREIHLNTDHTVDSVDFL

SEQ ID NO: 7875 - protein, 463 aa, Unknown
  Description of Unknown: Integrase B7876 sequence
  PTHR30461:SF3,SM00857,IPR036162,PF13408,PS51737, G3DSA:3.40.50.1390,IPR025827,IPR006119,SSF53041,IPR011109, PTHR30461,Coil,PS51736,cd00338,PF00239
MNTYFHPQPELYGLRVVKYIRCSHEGQVLHGDTLEAQDTLLNEFIETNHMVLVDTFVDEALTARKKFTKRKEFVRLLDGVRAHAFDMILFTKLDRWFRNIGDYHKIQEILDANGVQWKAITESYDTTTTNGRLHINIRLSVAQDECDRDSDRIKDVFAYKLKNKTYISGSLPRGLKLDAEKHVVIDPEWHQFALDMFDHFESTCSKRGTQLFLQEKYGIRVCYDTVVRYLRNPLFMGQYRDDPDFCEKTISRERFERIQNLAIRNVRIRHTQQFYIFSGLLICSSCNHYMTGTVTYRTLADGREKTYKSYRCNFKAQSKLCDRSKHYREEYVEEYMLQHIRPALSSYVADFEVTAAAAAKKDPAVEIAKVERKMKKLYDLFMDDLIDKASYRNEYEKFQSQIDKLRSCPAAPVRNLDSIKKMLSDDWETVYHTFNDQEKNVFWKSFVQSITVHENGEMDIVFL

SEQ ID NO: 7876 - protein, 463 aa, Unknown
  Description of Unknown: Integrase B7877 sequence
  PTHR30461:SF3,SM00857,IPR006118,IPR036162,PF13408, IPR025827,G3DSA:3.40.50.1390,Coil,PS51737,IPR006119, SSF53041,IPR011109,PTHR30461,PS00397, PS51736,cd00338,PF00239
MSEKIKRCAIYIRVSTSEQMMHGKSLEAQREYLERYAKEHHMIVVGIYADEGKTARKELKKRKAIHALLEDVKAGKIDMILFWRLDRWFRNLSDFYKVQDILDEYDVHWMSASEPGINMETRDGRLQLNVVLSIGQNEVDTTSERIKFVNEASIRQGKLIFGDANMGFGYKSGIVDGVKRMIKDPETEEATEAFFKYLLTHQNKSETVRYMQKHYYPDFSYSMLRTMVSSEFYKGTYRGIPYCPAYITEQEWLQLQELSRKNIKQTPSGRIYLFSGLIRCPVCGQKLAGTGCSSIINRKTKEKRTYCYYRCNRAILDRLCTSRHRVSQNLIEKYLLENLSEEYKKYQIRYTKICEQKKKMKDTRTPEKLNKELDRLNLLFQKDRITWEYYSAEYDRIEKELKELSAIHPEPEKDFTYLEELLHSDFKKIYKQLTPENRRTFWRSTIEEIHLNEDYTVESVDFL

SEQ ID NO: 7877 - protein, 463 aa, Unknown
  Description of Unknown: Integrase B7878 sequence
  PTHR30461:SF3,SM00857,IPR006118,G3DSA:1.10.10.2600,IPR036162, PF13408,IPR025827,G3DSA:3.40.50.1390,Coil,IPR006119, IPR038109,SSF53041,PTHR30461,PS00397,cd00338, PF00239
MAKTQTALQRVALYIRVSSDEQAERGDSIRDQKERGTKYIDDHQNMILQDTYIDDGVSGQKLDRDDFTRLIGNVKAGLVDLIIFTKLDRWFRSLRHYLNTQVILDKYNVAWTAIDQPYFDTSTPYGRAFVAQSMTWAELEAQNGGLRVTDVFRSKVEHGEVITGKVPRGYMIQNKHLVFSDEAPAMLDSIQYFHREQGLAKTINYMRETHGIIMSIQNLKNSILRNEKYTGRYRGNNAYCPRLISDEMYQDIQRVLDTNSTIRSSQKYPYIFSGILVCDQCGHKMCGCHIKVTSHRTSGKVYRYKYPAYECLQYRTYKKCSNGGEIREVRIEEYLLEHVREELSGYLVDFETGETKRIDNRAKKNKLRRKLDRLKDLYLNEVISLDEYKKDRIEYEEQLAALPDIEQPIKNLEPLKQVLDCNFEVIYNKLSNEEKRAFWRSIIKEIRISRSVERNRKYQIIFL

SEQ ID NO: 7878 - protein, 463 aa, Unknown
  Description of Unknown: Integrase B7879 sequence
  cd03768,PTHR30461:SF3,SM00857,G3DSA:1.10.10.2600,IPR036162, PS51737,G3DSA:3.40.50.1390,IPR006119,IPR038109,PF07508, IPR011109,SSF53041,PTHR30461,PS51736,Coil, PF00239
MKVAIYTRVSTAEQNLNGFSIHEQRKKLISFCEINEWKEYEVFTDGGFSGGSTKRPALQDLFSRLTQFDLVLVYKLDRLTRNVRDLLEMLERFEKYNVSFKSATEVFDTTTAIGKLFITIVGAMAEWERETIRERSLFGSRAAVESGKYIREQPFVYDNIEGKLVPNENTKYIEYIVKKFKEGNSANEIARLLNSKKKPSKIKNWNRQTIIRLIKNPVLRGHTKFGDIFIENTHEPILSDDDYYKVINAIENKTHKSKSKHNAIFRGVLKCPQCNGNLHLYAGTIHPKNGRSYNVRRYTCDKCHRDKYSRNISFNESEIENKFIEELEKMDLTRFEIHKPKKVEINIESDKKRIKEQRTKLLRAYTMGYVEEEEFKIIMDETQRQLEDIKREENKETVQEIDEKQIKSIGNFIIEGWKTLTIKEKEKLILSSVDKIDIEFIPREKNNNSNTNTVNIKKVHFIF

SEQ ID NO: 7879 - protein, 463 aa, Unknown
  Description of Unknown: Integrase B7880 sequence
  PTHR30461:SF3,IPR036162,PS51737,IPR011109,PTHR30461, PS00397,PF00239,G3DSA:1.10.10.2600,IPR006119,SSF53041, cd00338,SM00857,IPR025827,IPR038109,PS51736, IPR006118,PF13408,G3DSA:3.40.50.1390,Coil
MRRKTTAPVEKILLRVAIYIRVSTDKQVKDGDSMRDQLATGQKYIDSHENMILVDTYIDDGISGQKLKRDDFQRLIDDVRAGRIDLIIFTRLDRWFRNLRHYLNTQDILDKHGVSWTAIEQPYFDTSTPHGRAFVNNSMIWAELEAQNDSDRILGVFDDKVDNGEVLSGSTPLGYAIVNKHLVPDDDAPTAVAIFQYYRKTGNLSMTLRYMESEFGLVRSAASLKNMLTNTKYIGEFRDNKNYCPAIIDRDLFFDVQRLLKINIKSGKKHDYIFSGLVVCDDCDHIMSGCQQRAGGRVRADGTRIVYKYSVYRCRQGVNLHRCPNRKLVFETTLEKMLLERIRPELENYIAEYEVANLPALRTDAKRRSVEGKMQKLKDLYLNDLITMDEFKLDREKLLMQLEKINAEDSRPVKDLSYLKNFLKMDFESVYDSLSIPEKRELWRSIVKEIRVDHDKNIHIIFL

SEQ ID NO: 7880 - protein, 463 aa, Unknown
  Description of Unknown: Integrase B7881 sequence
  PTHR30461:SF3,SM00857,IPR006118,IPR036162,PF13408, PS51737,G3DSA:3.40.50.1390,IPR025827,PS00397,IPR006119, IPR011109,SSF53041,PTHR30461,Coil,PS51736, cd00338,PF00239
MPSKIERCAIYIRVSTAEQMMHGKSLEAQKQYLTNYAKEHNMTVAGVYADEGKTARKELKKRKAIHSLLEDVKAGKIDVIIFWRIDRWFRNLSDFYKVQEVLDDNNVHWISTSEPGINMETRDGRLQLNVVLSIGQNEVDTTSERIKFVNEASIRQGKLIFGDVNMGYGYKSGIIDGVKRMVKDPDREDAVNAFYRFFFKHHAKGLSMRYIQENYDPDFTWANMRTLLSSEFYKGTYRGIPYCPAYLTESEWNNLQEIQNANVKRAPSGRIYLFSGMINCPICGRRLSARGGSSIINRKTGAKKVYCYYRCNKAFIDHKCTYKHMVSQNLIEQYLIDHLEYEYNKFKIKCEKIEKEQEKKKKIQTPEKLQKELERLNLLFQKGRIEWDYYSKEYDRIENELNELLNAAPELEPDYAYLEELLNTDFRTMYYNLTQENRRAFWHSIIREIHLNTDHTVDSVDFL

SEQ ID NO: 7881 - protein, 463 aa, Unknown
  Description of Unknown: Integrase B7882 sequence
  PTHR30461:SF3,IPR036162,PS51737,IPR011109,PTHR30461, PS00397,PF00239,G3DSA:1.10.10.2600,IPR006119,SSF53041, cd00338,SM00857,IPR025827,IPR038109,PS51736, IPR006118,PF13408,G3DSA:3.40.50.1390,Coil
MRRKTTAPVEKILLRVAIYIRVSTDKQVKDGDSMRDQLATGQKYIDSHENMILVDTYIDDGISGQKLKRDDFQRLIDDVRAGRIDLIIFTRLDRWFRNLRHYLNTQDILDKHGVSWTAIEQPYFDTSTPHGRAFVNNSMIWAELEAQNDSDRILGVFDDKVDNGEVLSGSTPLGYTIVNKHLVPDDDAPTAVAIFQYYRKTGNLSMTLRYMESEFGLVRSAASLKNMLTNTKYIGEFRDNKNYCPAIIDRDLFFDVQRLLKINIKSGKKHDYIFSGLVVCDDCDHIMSGCQQRARGRVRADGTRIIYKYSVYRCRQGVNLHRCPNRKLVFETTLEKMLLERIRPELENYIAEYEVANLPALRTDAKRRSVEGKMQKLKDLYLNDLITMDEFKLDREKLLMQLEKINAEDSRPVKDLSYLKNFLKMDFESVYDSLSIPERRELWRSIVKEIRVDHDKNIHIIFL

SEQ ID NO: 7882 - protein, 463 aa, Unknown
  Description of Unknown: Integrase B7883 sequence
  PTHR30461:SF3,SM00857,IPR006118,IPR036162,PF13408, PS51737,IPR025827,G3DSA:3.40.50.1390,PS00397,IPR006119, IPR011109,SSF53041,PTHR30461,Coil,PS51736, cd00338,PF00239
MPSKIERCAIYIRVSTAEQMMRGKSLEAQKQYLTNYAKEHNMTVAGVYADEGKTARKELKKRKAIHSLLEDVKAGKIDVIIFWRIDRWFRNLSDFYKVQEVLDDNNVRWISTSEPGINMETRDGRLQLNVVLSIGQNEVDTTSERIKFVNEASIRQGKLIFGDVNMGYGYKSGIIDGVKRMVKDPDREDAVNAFYRFFFKHHAKGLSMRYIQENYDPDFTWANMRTLLSSEFYKGTYRGIPYCPAYLTESEWNNLQEIQNANVKRAPSGRIYLFSGMINCPICGRRLSARGGSSIINRKTGAKKVYCYYRCNKAFIDHKCTYKHMVSQNLIEQYLIEHLEYEYNKFKIKCEKIEKEQEKKKKFQTPEKLQKELERLNLLFQKGRIEWDYYSKEYDRIENELNELLNAAPELEPDYAYLEELLNTDFRTMYYNLTQENRRAFWHSIIREIHLNTDHTVDSVDFL

SEQ ID NO: 7883 - protein, 463 aa, Unknown
  Description of Unknown: Integrase B7884 sequence
  PTHR30461:SF3,cd00338,SM00857,IPR036162,PF13408, IPR025827,G3DSA:3.40.50.1390,PS51737,IPR006119,SSF53041, IPR011109,PTHR30461,PS51736,Coil,PF00239
MSFFTPNPQLFGLRVVKYIRCSHDDQVLHGDTLEAQDLILEDFIKVNRMILVDTFIDEALTARKKFNKRKEFVRLLDGVKAHSFDLIIFTKLDRWFRNIGDYHKIQEILEANGVQWKAVTENYDTTTTNGRLHINIRLSVAQDECDRDSDRIKDVFAYKLKNKTYVSGSLPRGLKLDAEKHVVIDPEWNCFALDMFDRFEATCSKRDTQLFLQDKYNIRVCYDTVARYLKNPLFKGQYRDDPDFCPATISPERFERIQKLAIRNVRIRHTQQFYIFSGLLICSSCNHYMCGTVTYRRMADGSEKMYKNYRCNFKAQSKLCDRSKTYREADLEEYMLAHIRPALSDYIAKYEVTAASTVQKNPVTEIAKIERKMKKLYDLFMDDLIGKEAYRSEYDKFKAQIEELQKCSTATPMRSLDSVKKLLSEDWEVVYRTFSDQEKNTFWKSFVESVLVYEDGSMDIRFL

SEQ ID NO: 7884 - protein, 463 aa, Unknown
  Description of Unknown: Integrase B7885 sequence
  PTHR30461:SF3,SM00857,IPR036162,PF13408,IPR025827, PS51737,G3DSA:3.40.50.1390,IPR006119,IPR011109,SSF53041, PTHR30461,PS51736,cd00338,PF00239
MSFFTPNPQLFGLRVVKYIRCSHDDQVLHGDTLEAQDLILEDFIKVNQMILVDTFIDEALTARKKFNKRKEFVRLLDGVKAHAFDLIIFTKLDRWFRNIGDYHKIQEILEANGVQWKAVTENYDTTTTNGRLHINIRLSVAQDECDRDSDRIKDVFAYKLKNKTYVSGSLPRGLKLDAEKHVIIDPEWNCFALDMFDRFEATCSKRDTQLFLQEKYNIRVCYDTVARYLKNPLFKGQYRDDPDFCPATISPERFERIQKLAIRNVRIRHTQQFYIFSGLLICSSCNHYMCGTVTYRRMADGSEKMYKNYRCNFKAHSKLCDRGKTYREADLEEYMLAHIRPALSDYIAKYEVTAASAVQKNPVTEIAKIERKMKKLYDLFMDDLIGKEAYRSEYGKFKAQIEELQKCSTAAPMRSLDSVKKLLSEDWEAVYHTFSDQEKNTFWKSFVESVLVYEDGSMDIRFL

SEQ ID NO: 7885 - protein, 463 aa, Unknown
  Description of Unknown: Integrase B7886 sequence
  PTHR30461:SF3,SM00857,IPR006118,IPR036162,PF13408, PS51737,G3DSA:3.40.50.1390,IPR025827,PS00397,IPR006119, IPR011109,SSF53041,PTHR30461,Coil,PS51736, cd00338,PF00239
MPSKIERCAIYIRVSTAEQMMHGKSLEAQKQYLTNYAKEHNMTVAGVYADEGKTARKELKKRKAIHSLLEDVKAGKIDVIIFWRIDRWFRNLSDFYKVQEVLDDNNVHWISTSEPGINMETRDGRLQLNVVLSIGQNEVDTTSERIKFVNEASIRQGKLIFGDVNMGYGYKSGIIGGVKRMVKDPDREDAVNAFYRFFFKHHAKGLSMRYIQENYDPDFTWANMRTLLSSEFYKGTYRGIPYCPAYLTESEWNNLQEIQNANVKRAPSGRIYLFSGMINCPICGRRLSARGGSSIINRKTGAKKVYCYYRCNKAFIDHKCTYKHMVSQNLIEQYLIDHLEYEYNKFKIKCEKIEKEQEKKKKIQTPEKLQKELERLNLLFQKGRIEWDYYSKEYDRIENELNELLNAAPELEPDYAYLEELLNTDFRTMYYNLTQENRRAFWHSIIREIHLNTDHTVDSVDFL

SEQ ID NO: 7886 - protein, 463 aa, Unknown
  Description of Unknown: Integrase B7887 sequence
  PTHR30461:SF3,SM00857,IPR006118,IPR036162,PS51737, G3DSA:3.40.50.1390,PS00397,IPR006119,IPR011109,SSF53041, PTHR30461,Coil,PS51736,cd00338,PF00239
MTTKVERCAIYIRVSTTEQMMHGKSLEAQKEYLTNYAKEHNMAVVGVYADEGKTARKELKKRKAIHSLLQDVEAGKIDVIIFWRIDRWFRNLSDFYKVQDILDNHNVRWISTSEPGINMETRDGRLQLNVVLSIGQNEVDTTSERIKFVNEASIRSGKLIFGDVNMGYGYKSGIVDGQKRMVKDPDREHVVDAFYKYFFKHQNKCATLRYIQETYDPDFSFGIMRTLLSSEFYKGTYRGFPYCPAYLTEDEWNKLQKIQKRNVKATPSGRIYLFAGMIRCPVCGQLLCGTGCSSIINRKTGAKRTYCYYRCNRAMIDHICSYRHRLSQNLVENYLLDNLEDEYKNYKVKCEKIEKEKEKQKKKQSPEKLRKELDRLNFLFQKGRIEWDYYNEEYSRVESELNNLQKVLPEPAPNYSYLEELLNTDFRTMYDQLSQENRRAFWRSIIQEIHINEDSTITSVDFL

SEQ ID NO: 7887 - protein, 463 aa, Unknown
  Description of Unknown: Integrase B7888 sequence
  PTHR30461:SF3,SM00857,IPR006118,IPR036162,PF13408, PS51737,G3DSA:3.40.50.1390,Coil,IPR025827,IPR006119, IPR011109,SSF53041,PTHR30461,PS00397, PS51736,cd00338,PF00239
MPSKIERCAIYIRVSTAEQMMHGKSLEAQKQYLTNYAKEHNMTVAGVYADEGKTARKELKKRKAIHSLLEDVKAGKIDVIIFWRIDRWFRNLSDFYKVQEVLDDNNVHWISTSEPGINMETRDGRLQLNVVLSIGQNEVDTTSERIKFVNEASIRQGKLIFGDVNMGYGYKSGIIDGVKRMVKDPDREDTVNAFYRFFFKHHAKGLSMRYIQENYDPDFTWANMRTLLSSEFYKGTYRGIPYCPAYLTESEWNNLQEIQNANVKRAPSGRIYLFSGMINCPICGRRLSARGSSSIINRKTGAKKVYCYYRCNKAFIDHKCSYRHMVSQNLIERYLIDHLEYEYNKFKIKCEKIEKEQEKKKKVQTPEKLQKELERLNLLFQKGRIEWDYYSKEYDRIENELNELLNVAPELEPDYAYLEELLNTDFRTMYYNLTQENRRAFWHSIIREIHLNTDHTVDSVDFL

SEQ ID NO: 7888 - protein, 463 aa, Unknown
  Description of Unknown: Integrase B7889 sequence
  PTHR30461:SF3,IPR036162,PS51737,IPR011109,PTHR30461, PS00397,PF00239,G3DSA:1.10.10.2600,IPR006119,SSF53041, cd00338,SM00857,IPR025827,IPR038109,PS51736, IPR006118,PF13408,G3DSA:3.40.50.1390,Coil
MRRKTTAPVEKILLRVAIYIRVSTDKQVKDGDSMRDQLATGQKYIDSHENMILVDTYIDDGISGQKLKRDDFQRLIDDVRAGRIDLIIFTRLDRWFRNLRHYLNTQDILDKHGVSWTAIEQPYFDTSTPHGRAFVNNSMIWAELEAQNDSDRILGVFDDKVDNGEVLSGSTPLGYTIVNKHLVPDDDAPTAVAIFQYYRKTGNLSMTLRYMESEFGLVRSAASLKNMLTNTKYIGEFRDNKNYCPAIIDRDLFFDVQRLLKINIKSGKKHDYIFSGLVVCDDCDHIMSGCQQRAKGRVRADGTQIVYKYSVYRCRQGVNLHRCPNRKLVFETTLEKMLLERIRPELENYIAEYEVANLPALRTDAKRRSVEGKMQKLKDLYLNDLITMDEFKLDREKLLMQLEKINAEDSRPVKDLSYLKNFLKMDFESVYDSLSIPERRELWRSIVKEIRVDHDKNIHIIFL

SEQ ID NO: 7889 - protein, 463 aa, Unknown
  Description of Unknown: Integrase B7890 sequence
  cd00338,SM00857,G3DSA:1.10.10.2600,IPR036162,PS51737, G3DSA:3.40.50.1390,IPR006119,IPR038109,PF07508,IPR011109, SSF53041,PTHR30461,PS51736,Coil,PF00239
MNNVAIYCRESTEKQNIDTLVSLCEKEAKKLGYSNYKIYKDIKSGYSKDREEYTKLKEDIKEEKINILILYESSRITRDEIEHHMFYALLKLYNVRVYTLNHGWIDLTNEDDCFLAGLLNLLDAREGRKTAKRVKDRMEEMAKNGFWTGGPAPFGYKLVDKKLIINPEEAEKVKEIFRLFLEGKTRFYLSALFGFECKRVMRMLVNPVYNGKLKFRQIEFKNKKRIEHKQFDVLPGIHEPIIDDYTFKLVQDKVKSIKRETNKGSYIFKDLLICTCGEKMYLHKKKYFYKRDTPIITNVYICNSKDRKIRNCSLSIIHENELFINVIESLEELILSFNVDDIDTNKNDFEKQLKYYKKELSSLSAKEEVLARQLMNGKLSENLYEKFIVELSENKEFIENKINSLTKVINSQEAKKNNKTILKKYFNKIKKEKDPEKLNAFFKLIIDSIEFINDYRFYIHLKF

SEQ ID NO: 7890 - protein, 463 aa, Unknown
  Description of Unknown: Integrase B7891 sequence
  PTHR30461:SF3,IPR036162,PS51737,IPR011109,PTHR30461, PS00397,PF00239,G3DSA:1.10.10.2600,IPR006119,SSF53041, cd00338,SM00857,IPR025827,IPR038109, PS51736,IPR006118,PF13408,G3DSA:3.40.50.1390,Coil
MRRKTTAPVEKILLRVAIYIRVSTDKQVKDGDSMRDQLATGQKYIDSHENMILVDTYIDDGISGQKLKRDDFQRLIDDVRAGRIDLIIFTRLDRWFRNLRHYLNTQDILDKHGVSWTAIEQPYFDTSTPHGRAFVNNSMIWAELEAQNDSDRILGVFDDKVDNGEVLSGSTPLGYKIVNKHLVPDDDAPTAVAIFQYYRKTGNLSMTLRYMESEFGLVRSAASLKNMLTNTKYIGEFRDNKNYCPAIIDRDLFFDVQRLLKINIKSGKKHDYIFSGLVVCDDCDHIMSGCQQRAGGRVRADGTRIVYKYSVYRCRQGVNLHRCPNRKLVFETTLEKMLLERIRPELENYIAEYEVANLPALRTDAKRRSVEGKMQKLKDLYLNDLITMDEFKLDREKLLMQLEKINAEDSRPVKDLSYLKNFLKMDFESVYDSLSIPERRELWRSIVKEIRVDHDKNIHIIFL

SEQ ID NO: 7891 - protein, 463 aa, Unknown
  Description of Unknown: Integrase B7892 sequence
  PTHR30461:SF3,SM00857,IPR006118,IPR036162,PF13408, IPR025827,G3DSA:3.40.50.1390,PS51737,PS00397,IPR006119, SSF53041,IPR011109,PTHR30461,Coil,PS51736, cd00338,PF00239
MANKILRCAIYIRVSTFEQSVHGKSLQAQKEFLERYAAEHGMIVVGVYADEGKTARKELKKRKAIHALINDVKQDKIDVILFWRLDRWFRNLSDFYKVQDILDEHSVRWISASEPGINMETRDGRLQLNVVLSIGQNEVDTTSERIKFVNEASIRQKKLIFGDANMPLGYKSGIADGKKCMIKDPDTEHMVEDFFLYFKKHQSKQGAIRYMQSTYGINFSYSMLRTMLSSEFYKGTYRGFPYCPAYLTESEWNDIQAISNRNIKRTPSGRVYLFSSLMHCPVCGQKLVGTGCSSIINRKTGEKRTYCYYRCNRSIVDHICTNRHRVSQNLIEKYLLENLSDEYHRYKIRNNKINEENKKKKVDRSPEQIRKELERLNLLFQKGRISFDYYDEEYTRLEQELSTINATPIEPDRDLSYLDELLQTDFKEMYNSLTLENRRAFWRSTILQIHLNDDCTVKEVDFL

SEQ ID NO: 7892 - protein, 463 aa, Unknown
  Description of Unknown: Integrase B7893 sequence
  PTHR30461:SF3,IPR036162,PS51737,IPR011109,PTHR30461, PS00397,PF00239,G3DSA:1.10.10.2600,IPR006119,SSF53041, cd00338,SM00857,IPR025827,IPR038109,PS51736, IPR006118,PF13408,G3DSA:3.40.50.1390,Coil
MRRKTTAPVEKILLRVAIYIRVSTDKQVKDGDSMRDQLATGQKYIDSHENMILVDTYIDDGISGQKLKRDDFQRLIDDVRAGRIDLIIFTRLDRWFRNLRHYLNTQDILDKHGVSWTAIEQPYFDTSTPHGRAFVNNSMIWAELEAQNDSDRILGVFDDKVDNGEVLSGSTPLGYTIVNKHLVPDDDAPTAVAIFQYYRKTGNLSMTLRYMESEFGLVRSAASLKNMLTNTKYIGEFRDNKNYCPAIIDRDLFFDVQRLLKINIKSGKKHDYIFSGLVVCDDCDHIMSGCQQRARGRVRADGTRIVYKYSVYRCRQGVNLHRCPNRKLVFETTLEKMLLERIRPELENYIAEYEVANLPALRTDAKRRSVEGKMQKLKDLYLNDLITMDEFKLDREKLLMQLEKINAEDSRPVKDLSYLKNFLKMDFESVYDSLSMPERRELWRSIVKEIRVDHDKNIHIIFL

SEQ ID NO: 7893 - protein, 463 aa, Unknown
  Description of Unknown: Integrase B7894 sequence
  PTHR30461:SF3,SM00857,IPR006118,IPR036162,PF13408, IPR025827,G3DSA:3.40.50.1390,Coil,PS51737,IPR006119, SSF53041,IPR011109,PTHR30461,PS00397,PS51736, cd00338,PF00239
MTNKLLRCAIYIRVSTFEQSVHGKSLQAQKEFLERYAAEHGMIVVGVYADEGKTARKELKKRKAIHALVNDVKQDKIDVILFWRLDRWFRNLSDFYKVQDILDEHSVRWISASEPGINMETRDGRLQLNVVLSIGQNEVDTTSERIKFVNEASIRQRKLIFGDANMPFGYKSGIVDGRKCMIKDPDTDHMVEDFFQYFKKHQSKQGAVRYMQSTYGINFSYSMLRTMLSSEFYKGTYRGFPYCPAYLTESEWNEIQTISVRNVKRTPSGRVYLFSSLMHCPVCGQKLVGTGCSSIINRKTGEKRTYCYYRCNRAITDCICTNRHRVSQNLIEKYLLENLTDEYHRYKIRNNKINEENRKKKVDRSPEQIRKELERLNLLFQKGRISFDYYDEEYTRLEQELSTINATPIEPDRDLSYLDELLQTDFREMYNSLTLENRRAFWRSTIKEIHLNDDYTVKEVDFL

SEQ ID NO: 7894 - protein, 463 aa, Unknown
  Description of Unknown: Integrase B7895 sequence
  PTHR30461:SF3,SM00857,IPR006118,IPR036162,PS51737, G3DSA:3.40.50.1390,IPR006119,IPR011109,SSF53041,PF00239, PTHR30461,PS00397,PS51736,Coil,cd00338
MTTKVERCAIYIRVSTTEQMMHGKSLEAQKEYLTNYAREHNMAIVGVYADEGKTARKELKKRKAIHSLLQDVEDGKIDVIIFWRIDRWFRNLSDFYKVQDILDNHNVRWISTSEPGINMETRDGRLQLNVVLSIGQNEVDTTSERIKFVNEASIRQGKLIFGDANMGYGYKSGIVDGQKRMVKDPDREHVVDAFYKYFFKHQNKCATLRYIQETYDPDFSFGIMRTLLSSEFYKGTYRGFPYCPAYLTEDEWNKLQKIQKRNVKATPSGRIYLFAGMIRCPVCGQLLCGTGCSSIINRKTGAKRTYCYYRCNRAMIDHICSYRHRLSQNLVENYLLDNLEDEYKNYKVKCEKIEKEKEKQKKKQSPEKLRKELDRLNFLFQKGRIDWDYYNEEYGRIESELNDLQSALPEPVTNYSYLEELLNTDFRTMYDQLSQENRRAFWRSIIQEIHVNEDHAITSVDFL

SEQ ID NO: 7895 - protein, 463 aa, Unknown
  Description of Unknown: Integrase B7896 sequence
  PTHR30461:SF3,IPR036162,PS51737,IPR011109,PTHR30461, PS00397,PF00239,G3DSA:1.10.10.2600,IPR006119,SSF53041, cd00338,SM00857,IPR025827,IPR038109, PS51736,IPR006118,PF13408,G3DSA:3.40.50.1390,Coil
MKRQTAKLNDKLLLRVAIYIRVSTDQQAQDGDSVRDQLATGQKYIENHENMILADTYVDDGISGQKVKRDDFQRLMNDVRAGSIDLIIFTRLDRWFRNLRHYLNTQDVLDKNGVSWTATEQPYFDTSTPHGRAFVNNSMIWAELEAQNDSDRILSVFDDKVDNSEVLSGSTPLGYRIENKHLVPDNDAPTAAAIFEYYRKTGNLSMTLRYMESEFGLVRSAASLKNMLTNTKYIGEFRDNKNYCPAIIDRDLFFDVQRLLKINIKSGKKHDYIFSGLVVCDDCDHIMSGCQQRAKGRVCADGTRIVYKYSVYRCRQGVNLHRCPNRKLVFETTLEKMLLERIRPELENYIAEYEVTNLPVLHTDAKRRNLEHKMQKLKELYLNDLITMDEFKVDREKLMQQLDKIKSDDSQPMKDLSYLKNFLKTDFENIYVSLSIPEKRELWRSIIREIRVDHERNVRIIFL

SEQ ID NO: 7896 - protein, 463 aa, Unknown
  Description of Unknown: Integrase B7897 sequence
  PTHR30461:SF3,SM00857,IPR006118,IPR036162,PF13408, PS51737,G3DSA:3.40.50.1390,IPR025827,Coil,IPR006119, IPR011109,SSF53041,PTHR30461,PS00397,PS51736, cd00338,PF00239
MPSKIERCAIYIRVSTAEQMMHGKSLEAQKQYLTNYAKEHNMTVAGVYADEGKTARKELKKRKAIHSLLEDVKAGKIDVIIFWRIDRWFRNLSDFYKVQEVLDDNNVHWISTSEPGINMETRDGRLQLNVVLSIGQNEVDTTSERIKFVNEASIRQGKLIFGDVNMGYGYKSGIIDGVKRMVKDPDREDTVNAFYRFFFKHHAKGLSMRYIQENYDPDFTWANMRTLLSSEFYKGTYRGIPYCPAYLTESEWNNLQKIQNANVKRAPSGRIYLFSGMINCPICGRRLSARGGSSIINRKTGAKKVYCYYRCNKAFIDHKCSYRHMVSQNLIERYLIDHLEYEYNKFKIKCEKIEKEQEKKKKVQTPEKLQKELERLNLLFQKGRIEWDYYSKEYDRIENELNELLNTAPELEPDYAYLEELLNTDFRTMYYNLTQENRRAFWHSIIREIHLNTDHTVDSVDFL

SEQ ID NO: 7897 - protein, 463 aa, Unknown
  Description of Unknown: Integrase B7898 sequence
  PTHR30461:SF3,SM00857,IPR006118,IPR036162,PF13408, IPR025827,G3DSA:3.40.50.1390,Coil,PS51737,IPR006119, SSF53041,IPR011109,PTHR30461,PS00397,PS51736, cd00338,PF00239
MPSKIERCAIYIRVSTAEQMMHGKSLEAQKQYLTNYAKEHNMTVAGVYADEGKTARKELKKRKAIHSLLEDVKAGKIDVIIFWRIDRWFRNLSDFYKVQEVLDDNNVRWISTSEPGINMETRDGRLQLNVVLSIGQNEVDTTSERIKFVNEASIRQGKLIFGDVNMGYGYKSGIIDGVKRMVKDPDREDTVNAFYRFFFKHHAKGPSMRYIQENYDPDFTWANMRTLLSSEFYKGTYRGIPYCPAYLTESEWNNLQEIQNANVKRAPSGRIYLFSGMINCPICGRRLSARGGSSIINRKTGAKKVYCYYRCNKAFIDHKCSYRHMVSQNLIERYLIDHLEYEYNKFKIKCEKIEKEQEKKKKVQTPEKLQKELERLNLLFQKGRIEWDYYSKEYDRIENELNELLNVAPELEPDYAYLEDLLNTDFRTMYYNLTQENRRAFWHSIIREIHLNTDHTVDSVDFL

SEQ ID NO: 7898 - protein, 463 aa, Unknown
  Description of Unknown: Integrase B7899 sequence
  PTHR30461:SF3,IPR036162,PS51737,IPR011109,PTHR30461, PS00397,PF00239,G3DSA:1.10.10.2600,IPR006119,SSF53041, cd00338,SM00857,IPR025827,IPR038109,PS51736, IPR006118,PF13408,G3DSA:3.40.50.1390,Coil
MRRKTTAPVEKILLRVAIYIRVSTDKQVKDGDSMRDQLATGQKYIDSHENMILVDTYIDDGISGQKLKRDDFQRLIDDVRAGRIDLIIFTRLDRWFRNLRHYLNTQDILYKHGVSWTAIEQPYFDTSTPHGRAFVNNSMIWAELEAQNDSDRILGVFDDKVDNGEVLSGSTPLGYKIVNKHLVPDDDAPTAVAIFQYYRKTGNLSMTLRYMESEFGLVRSAASLKNMLTNTKYIGEFRDNKNYCPAIIDRDLFFDVQRLLKINIKSGKKHDYIFSGLVVCDDCDHIMSGCQQRAGGRVRADGTRIVYKYSVYRCRQGVNLHRCTNRKLVFETTLEKMLLERIRPELENYIAEYEVANLPALRTDAKRRSVEGKMQKLKDLYLNDLITMDEFKLDREKLLMQLEKINAEDSRPVKDLSYLKNFLKMDFESVYDSLSIPERRELWRSIVKEIRVDHDKNIHIIFL

SEQ ID NO: 7899 - protein, 463 aa, Unknown
  Description of Unknown: Integrase B7900 sequence
  PTHR30461:SF3,cd00338,SM00857,IPR036162,PF13408, IPR025827,G3DSA:3.40.50.1390,PS51737,IPR006119,IPR011109, SSF53041,PTHR30461,PS51736,Coil,PF00239
MSFFTPNPQLFGLRVVKYIRCSHDDQVLHGDTLEAQDLILEDFIKVNRMILVDTFIDEALTARKKFNKRKEFVRLLNGVKAHDFDLIIFTKLDRWFRNIGDYHKIQEILEANGVQWKAVTENYDTTTTNGRLHINIRLSVAQDECDRDSDRIKDVFAYKLKNKTYVSGSLPRGLKLDAEKHVIIDPEWNCFALDMFDRFEATCSKRDTQLFLQEKYNIRVCYDTVARYLKNPLFKGQYRDDPDFCPATISPERFERIQKLAIRNVRIRHTQQFYIFSGLLICSSCNHYMCGTVTYRRMADGSEKMYKNYRCNFKAQSKLCDRGKTYREADLEEYMLAHIRPALSDYIVKYEVTAASTVQKNPVTEIAKIERKMKKLYDLFMDDLIDKEAYRSEYDKFKTQIEELQKCSTAAPMRSLDSVKKLLSEDWEAVYHTFSDQEKNTFWKSFVESVLVYEDGSMDIRFL

SEQ ID NO: 7900 - protein, 463 aa, Unknown
  Description of Unknown: Integrase B7901 sequence
  PTHR30461:SF3,IPR036162,PS51737,IPR011109,PTHR30461, PS00397,PF00239,G3DSA:1.10.10.2600,IPR006119,SSF53041, cd00338,SM00857,IPR025827,IPR038109, PS51736,IPR006118,PF13408,G3DSA:3.40.50.1390,Coil
MRRKTTSPVEKILLRVAIYIRVSTDKQVKDGDSMRDQLATGQKYIDSHENMILVDTYIDDGISGQKLKRDDFQRLIDDVRAGRIDLIIFTRLDRWFRNLRHYLNTQDILDKHGVSWTAIEQPYFDTSTPHGRAFVNNSMIWAELEAQNDSDRILGVFDDKVDNGEVLSGSTPLGYTIVNKHLVPDDDAPTAVAIFQYYRKTGNLSMTLRYMESEFGLVRSAASLKNMLTNTKYIGEFRDNKNYCPAIIDRDLFFDVQRLLKINIKSGKKHDYIFSGLVVCDDCDHIMSGCQQRARGRVRADGTRIIYKYSVYRCRQGVNLHRCPNRKLVFETTLEKMLLERIRPELENYIAEYEVANLPALRTDAKRRSIEGKMQKLKDLYLNDLITMDEFKLDREKLLMQLEKINAEDSRPVKDLSYLKNFLKMDFESVYDSLSIPERRELWRSIVKEIRVDHDKNIHIIFL

SEQ ID NO: 7901 - protein, 463 aa, Unknown
  Description of Unknown: Integrase B7902 sequence
  PTHR30461:SF3,SM00857,IPR006118,IPR036162,PF13408, PS51737,IPR025827,PS00397,G3DSA:3.40.50.1390,IPR006119, IPR011109,SSF53041,PTHR30461,Coil,PS51736, cd00338,PF00239
MPSKIERCAIYIRVSTAEQMMHGKSLEAQKQYLTNYAKEHNMTVAGVYADEGKTARKELKKRKAIHSLLEDVKAGKIDVIIFWRIDRWFRNLSDFYKVQEVLDDNNVHWISTSEPGINMETRDGRLQLNVVLSIGQNEVDTTSERIKFVNEASIRQGKLIFGDVNMGYGYKSGIIDGVKRMVKDPDREDTVNAFYRFFFKHHAKGLSMRYIQENYDPDFTWANMRTLLSSEFYKGTYRGIPYCPAYLTESEWNNLQEIQNANVKRAPSGRIYLFSGMINCPICGRRLSARGGSSIINRKTGAKKVYCYYRCNKAFIDHKCTYKHMVSQNLIEQYLIEHLEYEYNKFKIKCKKIEKEQEKKKKIQTPEKLQKELERLNLLFQKGRIEWDYYSKEYDRIENELNELLNAAPELEPDYAYLEELLNTDFRTMYYNLTQENRRAFWHSIIREIHLNTDHTVDSVDFL

SEQ ID NO: 7902 - protein, 463 aa, Unknown
  Description of Unknown: Integrase B7903 sequence
  PTHR30461:SF3,cd00338,SM00857,IPR036162,PF13408, IPR025827,PS51737,G3DSA:3.40.50.1390,IPR006119,IPR011109, SSF53041,PTHR30461,PS51736,Coil,PF00239
MSFFTPNPQLFGLRVVKYIRCSHDDQVLHGDTLEAQDLILEDFIKVNRMILVDTFIDEALTARKKFNKRKEFVRLLDGVKAHAFDLIIFTKLDRWFRNIGDYHKIQEILEANGVQWKAVTENYDTTTTNGRLHINIRLSVAQDECDRDSDRIKDVFAYKLKNKTYVSGSLPRGLKLDAEKHVIIDPEWNCFALDMFDRFEATCSKRDTQLFLQEKYNIRVCYDTVARYLKNPLFKGQYRDDPDFCPATISPERFERIQKLAIRNVRIRHTQQFYIFSGLLICSSCNHYMCGTVTYRKMADGSEKMYKNYRCNFKAQSKLCDRGKTYREADLEEYMLAHIRPALSDYIAKYEVTAASTVQKNPVTEIAKIERKMKKLYDLFMDDLIDKEAYRSEYDKFKAQIEELQKCSTAAPMRSLDSVKKLLSEDWEAVYHTFSDQEKNTFWKSFVESVLVYEDGSMDIRFL

SEQ ID NO: 7903 - protein, 463 aa, Unknown
  Description of Unknown: Integrase B7904 sequence
  PTHR30461:SF3,cd00338,SM00857,IPR036162,PF13408, PS51737,G3DSA:3.40.50.1390,IPR025827,IPR006119,SSF53041, IPR011109,PTHR30461,PS51736,Coil, PF00239
MNTYFHSQPELYGLRVVKYIRCSHEGQVLHGDTLEAQDTLLNEFIETNHMVLVDTFVDEALTARKRYTKRKEFVRLLDGVRAHSFDMILFTKLDRWFRNIGDYHKIQEILDANGVQWKAITESYDTTTTNGRLHINIRLSVAQDECDRDSDRIKDVFAYKLKNKSYISGRLPRGLKLDADKHIIHDPEWKQWALDMFDHFESSGSIYSTFLFLTNKYGPLLRYDGVSRALKNPLYKGMYRDDPEFCDPLIDPERFDHLLELAKKNVRQRKTRRYYIFTGLLVCSSCQHNLVPYTIPHTLADGTHKDYVSYRCGYHSSSRLCDRSRTYREEYIEQYLLDHVRPALSRYIAEYDVVSSSASKTDPAAEAAKIRHKLEKLYDLFLDDLIEKDLYRQKYDDLQAQLKECLEVPSAPVRDFSAVQELLSKNWEDMYCTFSKAEKNVFWKSFVESIIVYEDGSMDINFL

SEQ ID NO: 7904 - protein, 463 aa, Unknown
  Description of Unknown: Integrase B7905 sequence
  PTHR30461:SF3,SM00857,IPR036162,PF13408,IPR025827, G3DSA:3.40.50.1390,PS51737,IPR006119,IPR011109,SSF53041, PTHR30461,PS51736,cd00338,PF00239
MSFFTPNPQLFGLRVVKYIRCSHDDQVLHGDTLEAQDLILEDFIKVNRMILVDTFIDEALTARKKFNKRKEFVRLLDGVKAHAFDLIIFTKLDRWFRNIGDYHKIQEILEANGVQWKAVTENYDTTTTNGRLHINIRLSVAQDECDRDSDRIKDVFAYKLKNKTYVSGSLPRGLKLDAEKHVIIDPEWNCFALDMFDRFEATCSKRDTQLFLQDKYNIRVCYDTVARYLKNPLFKGQYRDDPDFCPATISPERFERIQKLAIRNVRIRHTQQFYIFSGLLICSSCNHYMCGAVTYRRMADGSEKMYKNYRCNFKAHSKLCDRGKTYREADLEEYMLAHIRPALSDYIAKYEVTAASTVQKNPVTEIAKIERKMKKLYDLFMDDLIDKEAYRSEYGKFKAQIEELQKCSTVAPVRSLDSVKKLLSEDWEAVYHTFSDREKNTFWKSFVESVLVYEDGSMYIRFL

SEQ ID NO: 7905 - protein, 463 aa, Unknown
  Description of Unknown: Integrase B7906 sequence
  PTHR30461:SF3,IPR036162,PS51737,IPR011109, PTHR30461,PS00397,PF00239,G3DSA:1.10.10.2600, IPR006119,SSF53041,cd00338,SM00857,IPR025827,IPR038109 ,PS51736,IPR006118,PF13408,G3DSA:3.40.50.1390,Coil
MRRKTAATVEKILLRVAIYIRVSTDRQVKEGDSMRDQLATGQRYIDSHENMILVDTYIDDGISGQKLKRDDFQRLLDDVRDGRIDLIIFTRLDRWFRNLRHYLNTQDILDRNNVSWTAIEQPYFDTSTPHGRAFVNNSMIWAELEAQNDSDRILGVFDDKVDNGEVLSGSTPLGYSIVDKHLHPDDDAPTAVSIFQFYRRTGNLSETLRYMEREFGLVRSAASLKNMLTNTKYVGVFRDNENYCPAIIDRDLFDDVQRLLSINIKDGKKHDYIFGGLVVCSDCDHVMSGCQQRSGGRPRADGTRIIYKYSCYRCRQGVNLHRCPNRKIVMESTLEAMLLDRIRPELEKYIADYEVANLPALRTDAKRRSVEGKLQKLKDLYLNDLITMDEFKVDREKLLIQLEKIKAEETRPVKDLSYLREFLKMDFESVYDTFSIPEKRELWRSIIREIRVDHEKNIQIIFL

SEQ ID NO: 7906 - protein, 463 aa, Unknown
  Description of Unknown: Integrase B7907 sequence
  PTHR30461:SF3,SM00857,IPR006118,IPR036162,PF13408, PS51737,G3DSA:3.40.50.1390,Coil,IPR025827,IPR006119, IPR011109,SSF53041,PTHR30461,PS00397,PS51736, cd00338,PF00239
MPSKIERCAIYIRVSTAEQMMHGKSLEAQKQYLTNYAKEHNMTVAGVYADEGKTARKELKKRKAIHSLLEDVKAGKIDVIIFWRIDRWFRNLSDFYKVQEVLDDNNVHWISTSEPGINMETRDGRLQLNVVLSIGQNEVDTTSERIKFVNEASIRQGKLIFGDVNMGYGYKSGIIGGVKRMVKDPDREDTVNAFYRFFFKHHAKGLSMRYIQENYDPDFTWANMRTLLSSEFYKGTYRGIPYCPAYLTESEWNNLQEIQNANVKRAPSGRIYLFSGMINCPICGRRLSARGGSSIINRKTGAKKVYCYYRCNKAFIDHKCTYKHMVSQNLIEQYLIDHLEYEYNKFKIKCEKIEKEQEKKKKIQTPEKLQKELERLNLLFQKGRIKWDYYSKEYDRIENELNELLNAAPELEPDYAYLEELLNTDFRTMYYNLTQENRRAFWHSIIREIHLNTDHTVDSVDFL

SEQ ID NO: 7907 - protein, 463 aa, Unknown
  Description of Unknown: Integrase B7908 sequence
  PTHR30461:SF3,IPR036162,PS51737,IPR011109,PTHR30461, PS00397,PF00239,G3DSA:1.10.10.2600,IPR006119,SSF53041, cd00338,SM00857,IPR025827,IPR038109,cd09875, PS51736,IPR006118,PF13408,G3DSA:3.40.50.1390,PF07508,Coil
MKKVALYVRVSTARQDQEGYSIPLQKERLIAYCKAKGWVVAGIFIDPGHSGSSLDRPGMVSLMEAVEAGKFDAVLVYKLDRLSRSQKDTLYLIEDVFMANKTDFVSLQESFDTTTIYGRAMVGILSVFAQMERETITERTLMGRAGRAEDGLWHGGGTDPIGYDYIDGGLVINEEEAKQVRRVYRFYAAVYSVTEISRRMDGYRTKHGDWSHTSTIGNVLDNPLYAGRVHFDGVLAFGKHDPIVPLDMDAKVKARRERLRHAEAAGDSRYLLTGMIYCNNCGARYFPNRRPNGKVVYSCHSRAKKNKKMIKDPTCKAPHIPVEELDAMVESEVLHLAENPVMVDELIKKGPQKSGPGAVSKSEEIRKLDEEISRLMDLLQHNAMVSVEDIAARIAAVHAERMRLLPDEGIKRKYDVEAAKMVLQDIQFGWEHSDNRSRRVHLLQLIDRILVDTGGVCIDWAFM

SEQ ID NO: 7908 - protein, 463 aa, Unknown
  Description of Unknown: Integrase B7909 sequence
  PTHR30461:SF3,cd00338,SM00857,IPR006118,IPR036162, PS51737,G3DSA:3.40.50.1390,IPR006119,IPR011109,SSF53041, PTHR30461,PS00397,PS51736,Coil,PF00239
MTTKVERCAIYIRVSTTEQMMHGKSLEAQKEYLTNYAREHNMAIVGIYADEGKTARKELKKRKAIHSLLQDVEAGKIDVIIFWRIDRWFRNLSDFYKVQDILDNHNVRWISTSEPGINMETRDGRLQLNVVLSIGQNEVDTTSERIKFVNEASIRNGKLIFGDANMGYGYKSGIVDGQKRMVKDPDREHVVNAFYEYFFKHQNKCATLRYIQETYDPDFSFGIMRTLLSSEFYKGTYRGFPYCPAYLTEDEWNKLQKIQKRNVKATPSGRIYLFAGMIRCPVCGQLLCGTGCSSIINRKTGAKKTYCYYRCNRAMIDHICSYRHRLSQNLVENYLLDNLENEYKNYKVKCEKIEKEKEKQKKKQSPEKLRKELDRLNFLFQKGRIDWDYYNEEYGRVESELNDLQSALPEPVTNYGYLEELLDTDFRTMYDQLSQENRRAFWRSIIQEIHVNEDHAITSVDFL

SEQ ID NO: 7909 - protein, 463 aa, Unknown
  Description of Unknown: Integrase B7910 sequence
  PTHR30461:SF3,SM00857,IPR006118,IPR036162,PF13408, IPR025827,PS51737,G3DSA:3.40.50.1390,PS00397,IPR006119, IPR011109,SSF53041,PTHR30461,Coil, PS51736,cd00338,PF00239
MPSKIERCAIYIRVSTAEQMMHGKSLEAQKQYLTNYAKEHNMTVAGVYADEGKTARKELKKRKAIHSLLEDVKAGKIDVIIFWRIDRWFRNLSDFYKVQEVLDDNNVHWISTSEPGINMETRDGRLQLNVVLSIGQNEVDTTSERIKFVNEASIRQGKLIFGDVNMGYGYKSGIIDGVKRMVKDPDREDAVNAFYRFFFKHHAKGLSMRYIQENYDPDFTWANMRTLLSSEFYKGTYRGIPYCPAYLTESEWNNLQEIQNANVKRAPSGRIYLFSGMINCPICGRRLSARGGSSIINRKTGAKKVYCYYRCNKAFIDHKCTYKHMVSQNLIEQYLIDHLEYEYNKFKIKCEKIEKEQEKKKKIQTPEKLQKELERLNLLFQKGRIEWDYYSKEYDRIETELNELLNAAPELEPDYAYLEELLNTDFRTMYYNLTQENRRAFWHSIIREIQLNTDHTVDSVDFL

SEQ ID NO: 7910 - protein, 463 aa, Unknown
  Description of Unknown: Integrase B7911 sequence
  PTHR30461:SF3,SM00857,IPR006118,IPR036162,PF13408, PS51737,G3DSA:3.40.50.1390,IPR025827,IPR006119,IPR011109, SSF53041,PF00239,PTHR30461,PS00397,PS51736, Coil,cd00338
MPSKIERCAIYIRVSTAEQMMHGKSLEAQKQYLTNYAKEHNMTVAGVYADEGKTARKELKKRKAIHSLLEDVKAGKIDVIIFWRIDRWFRNLSDFYKVQEVLDDNNVRWISTSEPGINMETRDGRLQLNVVLSIGQNEVDTTSERIKFVNEASIRQGKLIFGDVNMGYGYKSGIIDGVKRMVKDPDREDTVNAFYRFFFKHHAKGLSMRYIQENYDPDFTWANMRTLLSSEFYKGTYRGIPYCPAYLTESEWNNLQEIQNANVKRAPSGRIYLFSSMINCPICGRRLSARGGSSIINRKTGAKKVYCYYRCNKAFIDHKCTYKHMVSQNLIEQYLIDHLEYEYNKFKIKCEKIEKEQEKKKKVQTPEKLQKELERLNLLFQKGRIEWDYYSKEYDRIENELNELLNTAPELESDYAYLEELLNTDFRTMYYNLTQENRRAFWHSIIREIHLNTDHTVDSVDFL

SEQ ID NO: 7911 - protein, 463 aa, Unknown
  Description of Unknown: Integrase B7912 sequence
  PTHR30461:SF3,cd00338,SM00857,IPR036162,PF13408, IPR025827,PS51737,G3DSA:3.40.50.1390,IPR006119,IPR011109, SSF53041,PTHR30461,PS51736,Coil,PF00239
MSFFTPNPQLFGLRVVKYIRCSHDDQVLHGDTLEAQDLILEDFIKVNRMILVDTFIDEALTARKKFNKRKEFVRLLDGVKAHSFDLIIFTKLDRWFRNIGDYHKIQEILEANGVQWKAVTENYDTTTTNGRLHINIRLSVAQDECDRDSDRIKDVFAYKLKNKTYVSGSLPRGLKLDAEKHVIIDPEWNCFALDMFDRFEATCSKRDTQLFLQDKYNIRVCYDTVARYLKNPLFKGQYRDDPDFCPATISPERFERIQKLAIRNVRIRHTQQFYIFSGLLICSSCNHYMCGTVTYRRMADGSEKMYKNYRCNFKAQSKLCDRSKTYREADLEEYMLAHIRPALSDYVAKYEVTAASTVQKNPVTEIAKIERKMKKLYDLFMDDLIDKEAYRSEYDKFKAQIEELQKCSTATPMRSLDSVKKLLSEDWEVVYRTFSDQEKNTFWKSFVESVLVYEDGSMDIRFL

SEQ ID NO: 7912 - protein, 463 aa, Unknown
  Description of Unknown: Integrase B7913 sequence
  PTHR30461:SF3,SM00857,IPR006118,IPR036162,PF13408, PS51737,IPR025827,G3DSA:3.40.50.1390,PS00397,IPR006119, IPR011109,SSF53041,PTHR30461,Coil, PS51736,cd00338,PF00239
MPSKIERCAIYIRVSTAEQMMHGKSLEAQKQYLTNYAKEHNMTVAGVYADEGKTARKELKKRKAIHSLLEDVKAGKIDVIIFWRIDRWFRNLSDFYKVQEVLDDNNVRWISTSEPGINMETRDGRLQLNVVLSIGQNEVDTTSERIKFVNEASIRQGKLIFGDVNMGYGYKSGIIDGVKRMVKDPDREDTVNAFYRFFFKHHAKGLSMRYIQENYDPDFTWANMRTLLSSEFYKGTYRGIPYCPAYLTESEWNNLQEIQNANVKRAPSGRIYLFSGMINCPICGRRLSARGGSSIINRKTGAKKVYCYYRCNKAFIDHKCSYRHMVSQNLIERYLIDHLEYEYNKFKIKCEKIEKEQEKKKKVQTPEKLQKELERLNLLFQKGRIEWDYYSKEYDRIETELNELLIAAPELEPDYAYLEDLLNTDFRTMYYNLTTENRRAFWHSIIREIHLNPDHTVDSVDFL

SEQ ID NO: 7913 - protein, 463 aa, Unknown
  Description of Unknown: Integrase B7914 sequence
  PTHR30461:SF3,SM00857,IPR006118,IPR036162,PF13408, PS51737,G3DSA:3.40.50.1390,Coil,IPR025827,IPR006119, IPR011109,SSF53041,PTHR30461,PS00397,PS51736, cd00338,PF00239
MPSKIERCAIYIRVSTAEQMMHGKSLEAQKQYLTNYAKEHNMTVAGVYADEGKTARKELKKRKAIHSLLEDVKAGKIDVIIFWRIDRWFRNLSDFYKVQEVLDDNNVRWISTSEPGINMETRDGRLQLNVVLSIGQNEVDTTSERIKFVNEASIRQGKLIFGDVNMGYGYKSGIIDGVKRMVKDPDREDTVNAFYRFFFKHHAKGLSMRYIQENYDPDFTWANMRTLLSSEFYKGTYRGIPYCPAYLTESEWNNLQEIQNANVKRAPSGRIYLFSGMINCPICGRRLSARGGSSIINRKTGAKKVYCYYRCNKTFIDHKCTYKHMVSQNLIEQYLIEHLEYEYNKFKIKCEKIEKEQEKKKKIQTPEKLQKELERLNLLFQKGRIEWDYYSKEYDRIENELNELLNAAPELEPDYAYLEELLNTDFRTMYYNLTQENRRAFWHSIIREIQLNTDHTIDSVDFL

SEQ ID NO: 7914 - protein, 463 aa, Unknown
  Description of Unknown: Integrase B7915 sequence
  PTHR30461:SF3,SM00857,IPR036162,PF13408,IPR025827, G3DSA:3.40.50.1390,PS51737,IPR006119,SSF53041,IPR011109, PF00239,PTHR30461,PS51736,Coil,cd00338
MAFYTQSCPELYGMRVAKYIRCSHDDQVAHGDTLEAQNEILDDFVVKNHLILVDTFVDEALTARKKYTKRKEFVRLLDGVKRHDFDLIIFTKLDRWFRNIGDYHRIQEILEANGVQWKAVTESYDTTTTNGRLHINIRLSVAQDECDRDSDRIKDVFEYKLKNKTYLSGSLPRGLKLDPEKHVIIDPEWKQFALDLFDHFEATNSKRGTLMYLKEKYQLPRLCHDTIVRSLRNTLYKGEYRGIKDFCPALIDPERFDRIQILAKRDVRNSRTRTYIFNGLLICSDCGHNMTCQTTVRKRADGKKCEYRAYRCNQHYSMHCCDRNKSYREELIEENMLANIRPALADYIAEYEVDGECPQTKDPAAEANRIRAKLKKLYELFLDDLIDKDMYKKEYEQLQAQLQEANAAAAVPHKDVNALKEFLSQEWEDVYKTFSYEEKAAFWKSFVQSITLHEDGKMDIVFL

SEQ ID NO: 7915 - protein, 463 aa, Unknown
  Description of Unknown: Integrase B7916 sequence
  PTHR30461:SF3,IPR036162,PS51737,IPR011109,PTHR30461, PS00397,PF00239,G3DSA:1.10.10.2600,IPR006119,SSF53041, cd00338,SM00857,IPR025827,IPR038109, PS51736,IPR006118,PF13408,G3DSA:3.40.50.1390,Coil
MRRKAAAIVEKILLRVAIYIRVSTDRQVKEGDSMRDQLATGQRYIDSHENMILVDTYIDDGISGQKLKRDDFQRLLDDVRDGRIDLIIFTRLDRWFRNLRHYLNTQDILDRNNVSWTAIEQPYFDTSTPHGRAFVNNSMIWAELEAQNDSDRILGVFDDKVDNGEVLSGSTPLGYSIVDKHLHPDDDAPTAVSVFQFYRRTGNLSETLRYMEREFGLVRSAASLKNMLTNTKYVGVFRDNESYCPAIIDRDLFDDVQRLLSINIKDGKKHDYIFGGLVVCSDCDHVMSGCQQRCGGRPRADGTRTIYKYSCYRCRQGVNLHRCPNRKIVMESTLEAMLLDRIRPELEKYIADYEVANLPALRTDAKRRSVEGKLQKLKDLYLNDLITMDEFKVDREKLLIQLEKIKAEETRPVKDLSYLREFLKMDFESVYDTFSIPEKRELWRSIIREIRVDHEKNIQIIFL

SEQ ID NO: 7916 - protein, 463 aa, Unknown
  Description of Unknown: Integrase B7917 sequence
  PTHR30461:SF3,cd00338,SM00857,IPR036162,PF13408, IPR025827,G3DSA:3.40.50.1390,PS51737,IPR006119,SSF53041, IPR011109,PTHR30461,PS51736,Coil,PF00239
MSFFTPNPQLFGLRVVKYIRCSHDDQVLHGDTLEAQDLILEDFIKVNRMILVDAFVDEALTARKKFTKRKEFVRLLDGVKAHDFDLIIFTKLDRWFRNIGDYHKIQEILEANGVQWKAVTENYDTTTTNGRLHINIRLSVAQDECDRDSDRIKDVFAYKLKNKTYVSGSLPRGLKLDAEKHVIIDPEWNCFALDMFDRFEATCSKRDTQLFLQDKYNIRVCYDTVARYLKNPLFKGQYRDDPDFCPATISPERFERIQKLAIRNVRIRHTQQFYIFSGLLICSSCNHYMCGTVTYRRMADGSEKMYKNYRCNFKAQSKLCDRGKTYREVDLEEYMLAHIRPALSDYIAKYEVTAASAVQKNPVTEIAKIERKMKKLYDLFMDDLIDKEAYRSEYDKFKTQIEELQKCSTAAPVRSLDSVKKLLSEDWEAVYHTFSDQEKNTFWKSFVESVLVYEDGSMDIHFL

SEQ ID NO: 7917 - protein, 463 aa, Unknown
  Description of Unknown: Integrase B7918 sequence
  PTHR30461:SF3,SM00857,IPR006118,G3DSA:1.10.10.2600,IPR036162, PF13408,IPR025827,PS00397,G3DSA:3.40.50.1390,PS51737, IPR006119,IPR038109,IPR011109,SSF53041, PTHR30461,Coil,cd00338,PF00239
MAKTQTALQRVALYIRVSSDEQAERGDSIRDQKERGTKYIDDHQNMILQDTYIDDGVSGQKLDRDDFTRLIGNVKAGLVDLIIFTKLDRWFRSLRHYLNTQVILDKYNVAWTAIDQPYFDTSTPYGRAFVAQSMTWAELEAQNGGLRVTDVFRSKVEHGEVITGKVPRGYMIQNKHLVFSDEAPAMLDSIQYFHREQGLAKTVNYMRETHGINMSIQNLKNSILRNEKYTGRYRGNENYCPRLISDEMYQDIQRVLDNNSTIRSSQKYPYIFSGILICDECSHKMSGCHINVVSRRTSGKVYRYKYPAYECLQYRAYKKCSNGGEIREIRIEEYLLEHVREELSGYLVDFETGEAKRIDNRAKKNKIRRKLDRLKDLYLNEVINLEEYKKDRAEYEEQLAALPDMEQPIKNLKPLKQVLDCNFEVIYNNLNNEEKRAFWRSIIKEIRVSKSIGRNRKYQIIFL

SEQ ID NO: 7918 - protein, 463 aa, Unknown
  Description of Unknown: Integrase B7919 sequence
  PTHR30461:SF3,cd00338,SM00857,IPR036162,PF13408, IPR025827,PS51737,G3DSA:3.40.50.1390,IPR006119,IPR011109, SSF53041,PTHR30461,PS51736,Coil,PF00239
MSFFTPNPQLFGLRVVKYIRCSHDDQVLHGDTLEAQDLILEDFIKVNRMILVDTFIDEALTARKKFNKRKEFVRLLDGVKAHTFDLIIFTKLDRWFRNIGDYHKIQEILEANGVQWKAVTENYDTTTTNGRLHINIRLSVAQDECDRDSDRIKDVFAYKLKNKTYVSGSLPRGLKLDAEKHVIIDPEWNCFALDMFDRFEATCSKRDTQLFLQEKYNIRVCYDTVARYLKNPLFKGQYRDDPDFCPATISPERFERIQKLAIRNVRIRHTQQFYIFSGLLICSSCNHYMCGTVTYRRMADGSEKMYKNYRCNFKAQSKLCDRGKTYREADLEEYMLAHIRPALSDYIAKYEVTAASTVQKNPVTEIAKIERKMKKLYDLFMDDLIDKEAYRSEYDKFKAQIEELQKCSTAAPMRSLDSVKKLLSEDWEAVYHTFSDQEKNTFWKSFVESVLVYEDGSMDIRFL

SEQ ID NO: 7919 - protein, 463 aa, Unknown
  Description of Unknown: Integrase B7920 sequence
  PTHR30461:SF3,SM00857,IPR006118,IPR036162,PF13408, IPR025827,PS51737,Coil,G3DSA:3.40.50.1390,IPR006119, SSF53041,IPR011109,PTHR30461,PS00397, PS51736,cd00338,PF00239
MPSKIERCAIYIRVSTAEQMMHGKSLEAQKQYLTNYAKEHNMTVAGVYADEGKTARKELKKRKAIHSLLEDVKAGKIDVIIFWRIDRWFRNLSDFYKVQEVLDDNNVHWISTSEPGINMETRDGRLQLNVVLSIGQNEVDTTSERIKFVNEASIRQGKLIFGDVNMGYGYKSGIIGGVKRMVKDPDREDAVNAFYRFFFKHHAKGLSMRYIQENYDPDFTWANMRTLLSSEFYKGTYRGIPYCPAYLTESEWNNLQEIQNANVKRAPSGRIYLFSGMINCPICGRRLSARGGSSIINRKTGAKKVYCYYRCSKAFIDHKCTYKHMVSQNLIEQYLIDHLEYEYNKFKIKCEKIEKEQEKKKKIQTPEKLQKELERLNLLFQKGRIEWDYYSKEYDRIENELNELLNAAPELEPDYAYLEELLNTDFRTMYYNLTQENRRAFWHSIIREIHLNTDHTVDSVDFL

SEQ ID NO: 7920 - protein, 463 aa, Unknown
  Description of Unknown: Integrase B7921 sequence
  PTHR30461:SF3,cd00338,SM00857,IPR036162,PF13408, IPR025827,PS51737,G3DSA:3.40.50.1390,IPR006119,IPR011109, SSF53041,PTHR30461,PS51736,Coil,PF00239
MSFFTPNPQLFGLRVVKYIRCSHDDQVLHGDTLEAQDLILEDFIKVNRMILVDTFIDEALTARKKFNKRKEFVRLLDGVKAHSFDLIIFTKLDRWFRNIGDYHKIQEILEANGVQWKAVTENYDTTTTNGRLHINIRLSVAQDECDRDSDRIKDVFAYKLKNKTYVSGSLPRGLKLDAEKHVIIDPEWNCFALDMFDRFEATCSKRDTQLFLQDKYNIRVCYDTVARYLKNPLFKGQYRDDPDFCPATISPERFERIQKLAIRNVRIRHTQQFYIFSGLLICSSCNHYMCGTVTYRRMADGSEKMYKNYRCNFKAQSKLCDRGKTYREVDLEEYMLAHIRPALSDYIAKYEVTAASAVQKNPVTEIAKIERKMKKLYDLFMDDLIDKEAYRSEYDKFKTQIEELQKCSTAAPVRSLDSVKKLLSEDWEAVYHTFSDQEKNTFWKSFVESVLVYEDGSMDIHFL

SEQ ID NO: 7921 - protein, 463 aa, Unknown
  Description of Unknown: Integrase B7922 sequence
  PTHR30461:SF3,IPR036162,PS51737,IPR011109,PTHR30461, PS00397,PF00239,G3DSA:1.10.10.2600,IPR006119,SSF53041, cd00338,SM00857,IPR025827,IPR038109, PS51736,IPR006118,PF13408,G3DSA:3.40.50.1390,Coil
MRRKTTAPVEKILLRVAIYIRVSTDKQVKDGDSMRDQLATGQKYIDSHENMILVDTYIDDGISGQKLKRDDFQRLIDDVRAGRIDLIIFTRLDRWFRNLRHYLNTQDILDKHGVSWTAIEQPYFDTSTPHGRAFVNNSMIWAELEAQNDSDRILGVFDDKVDNGEVLSGSTPLGYKIVNKHLVPDDDAPTAVAIFQYYRKTGNLSMTLRYMESEFGLVRSAASLKNMLTNTKYIGEFRDNKNYCPAIIDRDLFFDVQRLLKINIKSGKKHDYIFSGLVVCDDCDHIMSGCQQRAGGRVRADGTRIVYKYSVYRCRQGVNLHRCPNRKLVFETTLEKMLLERIRPELENYIAEYEVSNLPALRTDAKRRSVEGKMQKLKDLYLNDLITMDEFKLDREKLLMQLEKINAEDSRPVKDLSYLKNFLKMDFESVYDSLSIPERRELWRSIVKEIRVDHDKNIHIIFL

SEQ ID NO: 7922 - protein, 463 aa, Unknown
  Description of Unknown: Integrase B7923 sequence
  PTHR30461:SF3,IPR036162,PS51737,IPR011109,PTHR30461, PS00397,PF00239,G3DSA:1.10.10.2600,IPR006119,SSF53041, cd00338,SM00857,IPR025827,IPR038109,PS51736, IPR006118,PF13408,G3DSA:3.40.50.1390,Coil
MRRKTTAPVEKILLRVAIYIRVSTDKQVKDGDSMRDQLATGQKYIDSHENMILVDTYIDDGISGQKLKRDDFQRLIDDVRAGRIDLIIFTRLDRWFRNLRHYLNTQDILDKHGVSWTAIEQPYFDTSTPHGRAFVNNSMIWAELEAQNDSDRILGVFDDKVDNGEVLSGSTPLGYKIVNKHLVPDDDAPTAVAIFQYYRKTGNLSMTLRYMESEFGLVRSAASLKNMLTNTKYIGEFRDNKNYCPAIIDRDLFFDVQRLLKINIKSGKKHDYIFSGLVVCDDCDHIMSGCQQRARGRVRADGTRIIYKYSVYRCRQGVNLHRCPNRKLVFETTFEKMLLERIRPELENYIAEYEVANLPALRTDAKRRSVEGKMQKLKDLYLNDLITMDEFKLDREKLLMQLEKINAEDSRPVKDLSYLKNFLKMDFESVYDSLSIPERRELWRSIVKEIRVDHDKNIHIIFL

SEQ ID NO: 7923 - protein, 463 aa, Unknown
  Description of Unknown: Integrase B7924 sequence
  PTHR30461:SF3,cd00338,SM00857,IPR036162,PF13408, IPR025827,G3DSA:3.40.50.1390,PS51737,IPR006119,IPR011109, SSF53041,PTHR30461,PS51736,Coil,PF00239
MNTYFHPQPELYGLRVVKYIRCSHEGQVLHGDTLEAQDTLLNEFIEVNHMVLVDTFVDEALTARKKFTKRKEFVRLLNGVRAHAFDMILFTKLDRWFRNIGDYHKIQEILDANSVQWKAITESYDTTTTNGRLHINIRLSVAQDECDRDSDRIKDVFAYKLKNKSYISGRLPRGLKLDADKHIIHDPEWKQWALDMFDHFESSGSIYSTFLFLTNKYGPLLRYDGVSRALKNPLYKGMYRDDPEFCDPLIDPERFDHLLELAKKNVRQRKTRRYYIFTGLLVCSSCQHSLVPYTIPHTLADGTHKDYVSYRCGYHSSSRLCDRSRTYREEYIEQYLLDHVRPALSHYIAEYDVVSSSASKKDPAAEAAKIRRKLEKLYDLFLDDLIEKDLYRQKYDELQAQLKECLAAPSAPVRDFSAVQELLSKNWEDMYCTFSKTEKNVFWKSFVESITVYEDGSMDINFL

SEQ ID NO: 7924 - protein, 463 aa, Unknown
  Description of Unknown: Integrase B7925 sequence
  PTHR30461:SF3,SM00857,IPR006118,IPR036162,PF13408, PS51737,G3DSA:3.40.50.1390,IPR025827,Coil,IPR006119, IPR011109,SSF53041,PTHR30461,PS00397, PS51736,cd00338,PF00239
MPSKIERCAIYIRVSTAEQMMHGKSLEAQKQYLTNYAKEHNMTVAGVYADEGKTARKELKKRKAIHSLLEDVKAGKIDVIIFWRIDRWFRNLSDFYKVQEVLDDNNVHWISTSEPGINMETRDGRLQLNVVLSIGQNEVDTTSERIKFVNEASIRQGKLIFGDVNMGYGYKSGIIDGVKRMVKDPDREDTVNAFYRFFFKHHAKGLSMRYIQENYDPDFTWANMRTLLSSEFYKGTYRGIPYCPAYLTESEWNNLQEIQNANVKRAPSGRIYLFSGMINCPICGRRLSARGGSSIINRKTGAKKVYCYYRCNKAFIDHKCSYRHMVSQNLIERYLIDHLEYEYNKFKIKCEKIEKDQEKKKKVQTPEKLQKELERLNLLFQKGRIEWDYYSKEYDRIENELNELLNAAPELEPDYAYLEELLNTDFRTMYYNLTQENRRAFWHSIIREIHLNADHTVDSVDFL

SEQ ID NO: 7925 - protein, 463 aa, Unknown
  Description of Unknown: Integrase B7926 sequence
  PTHR30461:SF3,SM00857,IPR006118,IPR036162,PF13408, IPR025827,PS51737,G3DSA:3.40.50.1390,Coil,IPR006119, IPR011109,SSF53041,PTHR30461,PS00397,PS51736, cd00338,PF00239
MPSKIERCAIYIRVSTAEQMMHGKSLEAQKQYLTNYAKEHNMTIVGVYADEGKTARKELKKRKAIHSLLEDVKAGKIDVIIFWRIDRWFRNLSDFYKVQEVLDDNNVHWISTSEPGINMETRDGRLQLNVVLSIGQNEVDTTSERIKFVNEASIRQGKLIFGDVNMGYGYKSGIIGGVKRMVKDPDREDAVNAFYRFFFKHHAKGLSMRYIQENYDPDFTWANMRTLLSSEFYKGTYRGIPYCPAYLTESEWNNLQEIQNANVKRAPSGRIYLFSGMINCPICGRRLSARGGSSIINRKTGAKKVYCYYRCNKAFIDHKCTYKHMVSQNLIEQYLIDHLEYEYNKFKIKCEKIEKEQEKKKKIQTPEKLQKELERLNLLFQKGRIEWDYYSKEYDRIENELNELLNAAPELEPDYAYLEELLNTDFRTMYYNLTQENRRAFWHSIIREIHLNTDHTVDSVDFL

SEQ ID NO: 7926 - protein, 463 aa, Unknown
  Description of Unknown: Integrase B7927 sequence
  PTHR30461:SF3,SM00857,IPR006118,IPR036162,PS51737, G3DSA:3.40.50.1390,IPR006119,IPR011109,SSF53041,PF00239, PTHR30461,PS00397,PS51736,Coil,cd00338
MTNKFTRCALYIRVSTAEQCMHGKSLEAQESYLQQYASDHNMIVVGVYADEGKTARKELKKRKAIHSLLEDVKAGKIDVILFWRLDRWFRNMSDFYKVQDILDEYGVRWMSASEPGINMETRDGRLQLNVVLSIGQNEVDTTSERIKFVNEASIRQGKLIFGDANMGYGYKSGIADGRKCMIKDPEREETVNAFYKYFFKHQNKCATLRYIQDNYDPNFSWAIMRTLLSSEFYKGTYRGFPYCPPYLTEEQWNELQKVAHKNIKRAKSGRIYLFTSLIRCPVCGQLLCGNGCKSIINRKTREKRDYCYYRCSRAHNDRICTYRHRLSQNLIEQYLLDNLDMEYRKYQIRVKKIEEEKKKIAQTKTPEKLNAELERLNLLFQKGRVEWDYYSSEYDRIEQELKDLSKIKPEVKRDLSFLEDLLQSDFKALYASLSPENRRAFWRSTIKQIHLNEDSTIKFVDFL

SEQ ID NO: 7927 - protein, 463 aa, Unknown
  Description of Unknown: Integrase B7928 sequence
  PTHR30461:SF3,cd00338,SM00857,IPR036162,PF13408, IPR025827,G3DSA:3.40.50.1390,PS51737,IPR006119,IPR011109, SSF53041,PTHR30461,PS51736,Coil, PF00239
MSFFTPNPQLFGLRVVKYIRCSHDDQVLHGDTLEAQDLILEDFIKVNRMILVDTFIDEALTARKKFNKRKEFVRLLDGVKAHAFDLIIFTKLDRWFRNIGDYHKIQEILEANGVQWKAVTENYDTTTTNGRLHINIRLSVAQDECDRDSDRIKDVFAYKLKNKTYVSGSLPRGLKLDAEKHVIIDPEWNCFALDMFNRFEATCSKRDTQLFLQDKYNIRVCYDTVARYLKNPLFKGQYRDDPDFCPATISPERFERIQKLAIRNVRIRHTQQFYIFSGLLICSSCNHYMCGTVTYRRMADGSEKMYKNYRCNFKAQSKLCDRGKTYREVDLEEYMLAHVRPALSDYIAKYEVTAVSTVQKNPVTEIAKIERKMKKLYDLFMDDLIDKEAYRSEYDKFKAQIEELQKCSTAAPVRSLDSVKKLLSEDWEAVYHTFSDQEKNTFWKSFVESVLVYEDGSMDIRFL

SEQ ID NO: 7928 - protein, 463 aa, Unknown
  Description of Unknown: Integrase B7929 sequence
  PTHR30461:SF3,SM00857,IPR006118,IPR036162,PF13408, PS51737,G3DSA:3.40.50.1390,Coil,IPR025827,IPR006119, IPR011109,SSF53041,PTHR30461,PS00397,PS51736, cd00338,PF00239
MPSKIERCAIYIRVSTAEQMMHGKSLEAQKQYLTNYAKEHNMTVAGVYADEGKTARKELKKRKAIHSLLEDVKAGKIDVIIFWRIDRWFRNLSDFYKVQEVLDDNNVHWISTSEPGINMETRDGRLQLNVVLSIGQNEVDTTSERIKFVNEASIRQGKLIFGDVNMGYGYKSGIIDGVKRMVKDPDREDTVNAFYRFFFKHHAKGLSMRYIQENYDPDFTWANMRTLLSSEFYKGTYRGIPYCPAYLTESEWNNLQEIQNANVKRAPSGRIYLFSGMINCPICGRRLSARGGSSIINRKTGAKKVYCYYRCNKAFIDHKCTYKHMVSQNLIEQYLIDHLEYEYNKFKIKCEKIEKEQEKKKKIQTPEKLQKELERLNLLFQKGRIEWDYYSKEYDRIENELNELLNAAPELEPDYAYLEELLNTDFRTMYYNLTQENRRAFWHSIIREIHLNTDHTVDSVDFL

SEQ ID NO: 7929 - protein, 463 aa, Unknown
  Description of Unknown: Integrase B7930 sequence
  PTHR30461:SF3,IPR036162,PS51737,IPR011109,PTHR30461, PS00397,PF00239,G3DSA:1.10.10.2600,IPR006119,SSF53041, cd00338,SM00857,IPR025827,IPR038109,PS51736, IPR006118,PF13408,G3DSA:3.40.50.1390,Coil
MRRKTTAPVEKILLRVAIYIRVSTDKQVKDGDSMRDQLATGQKYIDSHENMILVDTYIDDGISGQKLKRDDFQRLIDDVRAGRIDLIIFTRLDRWFRNLRHYLNTQDILDKHGVSWTAIEQPYFDTSTPHGRAFVNNSMIWAELEAQNDSDRILGVFDDKVDNGEVLSGSTPLGYKIVNKHLVPDDDAPTAVAIFQYYRKTGNLSMTLRYMESEFGLVRSAASLKNMLTNTKYIGEFRDNKEYCPAIIDHDLFYDVQRLLKINIKSGKKHDYIFSGLVVCDDCDHIMSGCQQRARGRVRADGTRIVYKYSVYRCRQGVNLHRCPNRKLVFETTLEKMLLERIRPELENYIAEYEVANLPALRTDAKRRSIEGKMQKLKDLYLNDLITMDEFKLDREKLLMQLEKINAEDSRPVKDLSYLKNFLKMDFESVYDSLSIPERRELWRSIVKEIRVDHDKNIHIIFL

SEQ ID NO: 7930 - protein, 463 aa, Unknown
  Description of Unknown: Integrase B7931 sequence
  PTHR30461:SF3,SM00857,IPR006118,IPR036162,PF13408, IPR025827,PS51737,G3DSA:3.40.50.1390,Coil,IPR006119, IPR011109,SSF53041,PTHR30461,PS00397,PS51736, cd00338,PF00239
MPSKIERCAIYIRVSTAEQMMHGKSLEAQKQYLTNYAKEHNMTIVGVYADEGKTARKELKKRKAIHSLLEDVKAGKIDVIIFWRIDRWFRNLSDFYKVQEVLDNNNVRWISTSEPGINMETRDGRLQLNVVLSIGQNEVDTTSERIKFVNEASIRQGKLIFGDVNMGYGYKSGIIDGVKRMVKDPDREDTVNAFYRFFFKHHAKGLSMRYIQENYDPDFTWANMRTLLSSEFYKGTYRGIPYCPAYLTESEWNNLQEIQNANVKRAPSGRIYLFSGMINCPICGRRLSARGGSSIINRKTGAKKVYCYYRCNKAFIDHKCTYKHMVSQNLIEQYLIDHLEYEYNKFKIKCEKIEKEQEKKKKIQTPEKLQKELERLNLLFQKGRIEWDYYSKEYDRIENELNELLNTAPELEPDYAYLEELLNTDFRTMYYNLTQENRRAFWHSIIREIHLNTDHTVDSVDFL

SEQ ID NO: 7931 - protein, 463 aa, Unknown
  Description of Unknown: Integrase B7932 sequence
  PTHR30461:SF3,cd00338,SM00857,IPR036162,PF13408, IPR025827,PS51737,G3DSA:3.40.50.1390,IPR006119,IPR011109, SSF53041,PTHR30461,PS51736,Coil,PF00239
MSFFTPNPQLFGLRVVKYIRCSHDDQVLHGDTLEAQDLILEDFIKVNRMILVDTFIDEALTARKKFNKRKEFVRLLDGVKAHSFDLIIFTKLDRWFRNIGDYHKIQEILEANGVQWKAVTENYDTTTTNGRLHINIRLSVAQDECDRDSDRIKDVFAYKLKNKTYVSGSLPRGLKLDAEKHVIIDPEWNCFALDMFDRFEATCSKRDTQLFLQDKYNIRVCYDTVARYLKNPLFKGQYRDDPDFCPATISPERFERIQKLAIRNVRIRHTQQFYIFSGLLICSSCNHYMCGTVTYRRMADGSEKMYKNYRCNFKAQSKLCDRGKTYREVDLEEYMLAHIRPALSDYIAKYEVTAASTVQKNPATEIAKIERKMKKLYDLFMDDLIDKEAYRSEYDKFKVQIEELQKCSTAAPVRSLDSVKKLLSEDWEAVYHTFSDQEKNTFWKSFVESVLVYEDGSMDIHFL

SEQ ID NO: 7932 - protein, 463 aa, Unknown
  Description of Unknown: Integrase B7933 sequence
  PTHR30461:SF3,IPR036162,PS51737,IPR011109,PTHR30461, PS00397,PF00239,G3DSA:1.10.10.2600,IPR006119,SSF53041, cd00338,SM00857,IPR025827,IPR038109, PS51736,IPR006118,PF13408,G3DSA:3.40.50.1390,Coil
MRRKTTAPVEKILLRVAIYIRVSTDKQVKDGDSMRDQLATGQKYIDSHENMILVDTYIDDGISGQKLKRDDFQRLIDDVRAGRIDLIIFTRLDRWFRNLRHYLNTQDILDKHGVSWTAIEQPYFDTSTPHGRAFVNNSMIWAELEAQNDSDRILGVFDDKVDNGEVLSGSTPLGYKIVNKHLVPDDDAPTAVAIFQYYRKTGNLSMTLRYMESEFGLVRSAASLKNMLTNTKYIGEFRDNKNYCPAIIDRDLFFDVQRLLKINIKSGKKHDYIFSGLVVCDDCDHIMSGCQQRAGGRVRADGTRIVYKYSVYRCRQGVNLHRCPNRKLVFETTLEKMLLERIRPELENYIAEYEVANLPALRTDAKRRSIEGKMQKLKDLYLNDLITMDEFKLDREKLLMQLEKINAEDSRPVKDLSYLKNFLKMDFESVYDSLSIPERRELWRSIVKEIRVDHDKNIHIIFL

SEQ ID NO: 7933 - protein, 463 aa, Unknown
  Description of Unknown: Integrase B7934 sequence
  PTHR30461:SF3,SM00857,IPR006118,IPR036162,PF13408, PS51737,G3DSA:3.40.50.1390,IPR025827,PS00397,IPR006119, SSF53041,IPR011109,PTHR30461,Coil,PS51736, cd00338,PF00239
MPSKIERCAIYIRVSTAEQMMHGKSLEAQKQYLTNYAKEHNMTVAGVYADEGKTARKELKKRKAIHSLLEDVKAGKIDVIIFWRIDRWFRNLSDFYKVQEVLDDNNVRWISTSEPGINMETRDGRLQLNVVLSIGQNEVDTTSERIKFVNEASIRQGKLIFGDVNMGYGYKSGIIDGVKRMVKDPDREDTVNAFYRFFFKHHAKGLSMRYIQENYDPNFTWANMRTLLSSEFYKGTYRGIPYCPAYLTESEWNNLQEIQNANVKRAPSGRIYLFSGMINCPICGRRLSARGGSSIINRKTGAKKVYCYYRCNKAFIDHKCTYKHMVSQNLIEQYLIDHLEYEYNKFKIKCEKIEKEQEKKKKVQTPEKLQKELERLNLLFQKGRIEWDYYSKEYDRIENKLNELLNVAPELEPDYAYLEELLNTDFRTMYYNLTQENRRAFWHSIIREIHLNTDHTVDSVDFL

SEQ ID NO: 7934 - protein, 463 aa, Unknown
  Description of Unknown: Integrase B7935 sequence
  PTHR30461:SF3,cd00338,SM00857,IPR036162,PF13408, IPR025827,PS51737,G3DSA:3.40.50.1390,IPR006119,IPR011109, SSF53041,PTHR30461,PS51736,Coil,PF00239
MSFFTPNPQLFGLRVVKYIRCSHDDQVLHGDTLEAQDLILEDFIKVNRMILVDTFIDEALTARKKFNKRKEFVRLLDGVKAHAFDLIIFTKLDRWFRNIGDYHKIQEILEANGVQWKAVTENYDTTTTNGRLHINIRLSVAQDECDRDSDRIKDVFAYKLKNKTYVSGSLPRGLKLDAEKHVIIDPEWNCFALDMFDRFEATCSKRDTQLFLQEKYNIRVCYDTVARYLKNPLFKGQYRDDPDFCPATISPERFERIQKLAIRNVRIRHTQQFYIFSGLLICSSCNHYMCGTVTYRRMADGSEKMYKNYRCNFKAQSKLCDRGKTYREADLEEYMLAHIRPALSDYIAKYEVTAASTVQKNPVTEIAKIERKMKKLYDLFMDDLIDKEAYRSEYDKFKAQIEELQKCSTAAPMRSLDSVKKLLSEDWEAVYHTFSDQEKNTFWKSFVESVLVYEDGSMDIRFL

SEQ ID NO: 7935 - protein, 463 aa, Unknown
  Description of Unknown: Integrase B7936 sequence
  PTHR30461:SF3,SM00857,IPR006118,IPR036162,PS51737, G3DSA:3.40.50.1390,PS00397,IPR006119,IPR011109,SSF53041, PTHR30461,Coil,PS51736,cd00338, PF00239
MTTKVERCAIYIRVSTTEQMMHGKSLEAQKEYLTNYAREHNMAVVGVYADEGKTARKELKKRKAIHSLLQDVEAGKIDVIIFWRIDRWFRNLSDFYKVQDILDSHNVRWISTSEPGINMETRDGRLQLNVVLSIGQNEVDTTSERIKFVNEASIRNGKLIFGDANMGYGYKSGIVDGQKRMVKDPDREHVVDAFYKYFFKHQNKCATLRYIQETYDPDFSFGIMRTLLSSEFYKGTYRGFPYCPAYLTEDEWNKLQKIQKRNVKATPSGRIYLFAGMIRCPVCGQLLCGTGCSSIINRKTGAKRTYCYYRCNRAMIDHICSYRHRLSQNLVENYLLDNLEDEYKNYKVKCEKIEKEKEKQKKKQSPEKLRKELDRLNFLFQKGRIEWDYYNEEYGRVESELNDLQSVLPEPAPNYSYLEELLNTDFRTMYDQLSQENRRAFWRSIIQEIHINEDSTITSVDFL

SEQ ID NO: 7936 - protein, 463 aa, Unknown
  Description of Unknown: Integrase B7937 sequence
  PTHR30461:SF3,IPR036162,PS51737,IPR011109,PTHR30461, PS00397,PF00239,G3DSA:1.10.10.2600,IPR006119,SSF53041, cd00338,SM00857,IPR025827,IPR038109,PS51736, IPR006118,PF13408,G3DSA:3.40.50.1390,Coil
MRRKTTAPVEKILLRVAIYIRVSTDKQVKDGDSMRDQLATGQKYIDSHENMILVDTYIDDGISGQKLKRDDFQRLIDDVRAGRIDLIIFTRLDRWFRNLRHYLNTQDILDKHGVSWTAIEQPYFDTSTPHGRAFVNNSMIWAELEAQNDSDRILGVFDDKVDNGEVLSGSTPLGYTIVNKHLVPDGDAPTAVAIFQYYRKTGNLSMTLRYMESEFGLVRSAASLKNMLTNTKYIGEFRDNKNYCPAIIDRDLFFDVQRLLKINIKSGKKHDYIFSGLVVCDDCDHIMSGCQQRARGRVRADGTRIIYKYSVYRCRQGVNLHRCPNRKLVFETTLEKMLLERIRPELENYIAEYEVANLPALRTDAKRRSVEGKMQKLKDLYLNDLITMDEFKLDREKLLMQLEKINAEDSRPVKDLSYLKNFLKMDFESVYDSLSIPERRELWRSIVKEIRVDHDKNIHIIFL

SEQ ID NO: 7937 - protein, 463 aa, Unknown
  Description of Unknown: Integrase B7938 sequence
  PTHR30461:SF3,IPR036162,PS51737,IPR011109,PTHR30461, PS00397,PF00239,G3DSA:1.10.10.2600,IPR006119,SSF53041, cd00338,SM00857,IPR025827,IPR038109,PS51736, IPR006118,PF13408,G3DSA:3.40.50.1390,Coil
MRRKTTAPVEKILLRVAIYIRVSTDKQVKDGDSMRDQLATGQKYIDSHENMILVDTYIDDGISGQKLKRDDFQRLIDDVRAGRIDLIIFTRLDRWFRNLRHYLNTQDILDKHGVSWTAIEQPYFDTSTPHGRAFVNNSMIWAELEAQNDSDRILGVFDDKVDNGEVLSGSTPLGYKIVNKHLVPDDDAPTAVAIFQYYRKTGNLSMTLRYMESEFGLVRSAASLKNMLTNTKYIGEFRDNKNYCPAIIERDLFFDVQRLLKINIKSGKKHDYIFSGLVVCDDCDHIMSGCQQRARGRVRADGTRIIYKYSVYRCRQGVNLHRCPNRKLVFETTLEKMLLERIRPELENYIAEYEVANLPALRTDAKRRSVEGKMQKLKDLYLNDLITMDEFKLDREKLLMQLEKINAEDSRPVKDLSYLKNFLKMDFESVYDSLSIPERRELWRSIVKEIRVDHDKNIHIIFL

SEQ ID NO: 7938 - protein, 463 aa, Unknown
  Description of Unknown: Integrase B7939 sequence
  cd03768,PTHR30461:SF3,SM00857,G3DSA:1.10.10.2600,IPR036162, PF13408,PS51737,G3DSA:3.40.50.1390,IPR025827,IPR006119, IPR038109,PF07508,IPR011109,SSF53041,PTHR30461, PS51736,Coil,PF00239
MKVAIYTRVSSAEQANEGYSIHEQKRKLISFCEVNDWNRYEVFSDPGVSGGSMKRPSLQKLFDRLEEFDLVLVYKLDRLTRNVRDLLEMLEVFEKNNIAFKSATEVFDTNSAIGKLFITMVGAMAEWERETIRERSLMGSHAAIRSGKYIRARPFCYDLIDDKLKPNQHAKYIRFMVDKLMIGKSASEVVRQLESKKKPPGITKWNRKMILNWIKNPVMRGHTKFGDLLIENTHEPIISEDEYLKLIDIIEKRTYKTKSKHKAIFRGVLECPRCQSKLHLSRSIKKYDNGKTREVRRYSCDKCHRDNTVKNISFNESEIERQFINTLLKKGTDNFKISVPKKKSYDIEDNKVKINEQRANYTRSWSLGYIKDEEYFMLMDETENLLKDIEEKAKSHTDEKLNEEQIRTVKNLLIKGFKIATLEDKEDLITSSVDVIKFEFIPKEFNKNKTLNTVKINEIQFKF

SEQ ID NO: 7939 - protein, 463 aa, Unknown
  Description of Unknown: Integrase B7940 sequence
  PTHR30461:SF3,SM00857,IPR006118,IPR036162,PF13408, PS51737,IPR025827,G3DSA:3.40.50.1390,Coil,IPR006119, IPR011109,SSF53041,PTHR30461,PS00397,PS51736, cd00338,PF00239
MPSKIERCAIYIRVSTAEQMMHGKSLEAQKQYLTNYAKEHNMTVAGVYADEGKTARKELKKRKAIHSLLEDVKAGKIDVIIFWRIDRWFRNLSDFYKVQEVLDNNNVRWISTSEPGINMETRDGRLQLNVVLSIGQNEVDTTSERIKFVNEASIRQGKLIFGDVNMGYGYKSGIIDGVKRMVKDPDREDTVNAFYRFFFKHHAKGLSMRYIQENYDPDFTWANMRTLLSSEFYKGTYRGIPYCPAYLTESEWNNLQEIQNANVKRAPSGRIYLFSGMINCPICGRRLSARGGSSIINRKTGAKKVYCYYRCNKAFIDHKCSYRHMVSQNLIERYLIDHLEYEYNKFKIKCEKIEKEQEKKKKIQTPEKLQKELERLNLLFQKGRIEWDYYSKEYDRIENELNELLNAAPELEPDYAYLEELLNTDFRTMYYNLTQENRRAFWHSIIREIHLNTDHTVDSVDFL

SEQ ID NO: 7940 - protein, 463 aa, Unknown
  Description of Unknown: Integrase B7941 sequence
  PTHR30461:SF3,IPR036162,PS51737,IPR011109,PTHR30461, PS00397,PF00239,G3DSA:1.10.10.2600,IPR006119,SSF53041, cd00338,SM00857,IPR025827,IPR038109,PS51736, IPR006118,PF13408,G3DSA:3.40.50.1390,Coil
MRRKTTAPVEKILLRVAIYIRVSTDKQVKDGDSMRDQLATGQKYIDSHENMILVDTYIDDGISGQKLKRDDFQRLIDDVRAGRIDLIIFTRLDRWFRNLRHYLNTQDILDKHGVSWTAIEQPYFDTSTPHGRAFVNNSMIWAELEAQNDSDRILGVFDDKVDNGEVLSGSTPLGYTIVNKHLVPDDDAPTAVAIFQYYRKTGNLSMTLRYMESEFGLVRSAASLKNMLTNTKYIGEFRDNKNYCPAIIDRDLFFDVQRLLKINIKSGKKHDYIFSGLVVCDDCDHIMSGCQQRAGGRVRADGTRIVYKYSVYRCRQGVNLHRCPNRKLVFETTLEKMLLERIRPELENYIAEYEVANLPALRTDAKRRSVEGKMQKLKDLYLNDLITMDEFKLDREKLLMQLEKINAEDSRPVKDLSYLKNFLKMDFESVYDSLSIPERRELWRSIVKEIRVDHGKNIHIIFL

SEQ ID NO: 7941 - protein, 463 aa, Unknown
  Description of Unknown: Integrase B7942 sequence
  PTHR30461:SF3,SM00857,IPR006118,IPR036162,PS51737, G3DSA:3.40.50.1390,PS00397,IPR006119,IPR011109,SSF53041, PTHR30461,Coil,PS51736,cd00338,PF00239
MTDKIERCAIYIRVSTTEQMMHGKSLEAQKEYLTNYAREHNMAVVGVYADEGKTARKEFKKRKAIHSLLRDVEAGKIDVIIFWRIDRWFRNLSDFYKVQDILDNHNVRWISTSEPGINMETRDGRLQLNVVLSIGQNEVDTTSERIKFVNEASIRNGKLIFGDVNMGYGYKSGIVDGQKRMVKDPDREHVVDAFYKYFFKHQNKCATLRYIQETYDPDFSFGIMRTLLSSEFYKGTYRGFPYCPAYLTEDEWNKLQKIQKRNVKATPSGRIYLFAGMIRCPVCGQLLCGTGCSSIINRKTGARRTYCYYRCNRAMIDHICSYRHRLSQNLVENYLLDNLENEYKNYKVKCEKIEKEKEKQKKKQSPEKLRKELDRLNFLFQKGRIDWDYYNEEYSRVESELNNLQKVLPEPAPNYSYLEELLNTDFRTMYDQLSQENRRAFWRSIIQEIHINEDSTITSVDFL

SEQ ID NO: 7942 - protein, 463 aa, Unknown
  Description of Unknown: Integrase B7943 sequence
  PTHR30461:SF3,cd00338,SM00857,IPR036162,PF13408, IPR025827,PS51737,G3DSA:3.40.50.1390,IPR006119,SSF53041, IPR011109,PTHR30461,PS51736,Coil, PF00239
MNTYFHPQPELYGLRVVKYIRCSHEGQVLHGDTLEAQDTLLNEFIETNHMVLVDTFVDEALTARKRYTKRKEFVRLLDGVRAHAFDVILFTKLDRWFRNIGDYHKIQEILDANSVQWKAITESYDTTTTNGRLHINIRLSVAQDECDRDSDRIKDVFAYKLKNKTYISGSLPRGLMLDKEKHVIIDPEWHQFALDMFDHFEATGSKRGTLLYLQEKYDMRLCYDTVVRNLRNPLYKGMYRDDPGFCECTITPERFDRIQLLGRKNVRHRKTNRTYIFTGLLICSSCKHYLVGAATTATLAHGVKKEYRSYRCNQRYQSHSCDRARTYREQDVEDYLLGHVRPALSQYIAQYEVSSSSMQKKDPAADAAKIRRKLEKLYDLFMDDLIDKESYREKYDDLQDQLKKCQAVVPVPRRDLSEVKSLLAQNWEEIYQAFTAAEKNTFWKSFIESILVHEDGSMDISFL

SEQ ID NO: 7943 - protein, 463 aa, Unknown
  Description of Unknown: Integrase B7944 sequence
  PTHR30461:SF3,SM00857,IPR006118,IPR036162,PF13408, PS51737,G3DSA:3.40.50.1390,IPR025827,IPR006119,SSF53041, IPR011109,PF00239,PTHR30461,PS00397,PS51736, Coil,cd00338
MPSKIERCAIYIRVSTAEQMMHGKSLEAQKQYLTNYAKEHNMTVAGVYADEGKTARKELKKRKAIHSLLEDVKAGKIDVIIFWRIDRWFRNLSDFYKVQEVLDDNNVHWISTSEPGINMETRDGRLQLNVVLSIGQNEVDTTSERIKFVNEASIRQGKLIFGDVNMGYGYKSGIIDGVKRMVKDPDREDTVNAFYRFFFKHHAKGLSMRYIQENYDPDFTWANMRTLLSSEFYKGTYRGIPYCPAYLTESEWNNLQEIQNANVKRAPSGRIYLFSSMINCPICGRRLSARGGSSIINRKTGAKKVYCYYRCNKAFIDHKCTYKHMVSQNLIEQYLIDHLEYEYNKFKIKCEKIEKEQEKKKKVQTPEKLQKELERLNLLFQKGRIEWDYYSKEYDRIENELNELLNTAPELESDYAYLEELLNTDFRTMYYNLTQENRRAFWHSIIREIHLNTDHTVDSVDFL

SEQ ID NO: 7944 - protein, 463 aa, Unknown
  Description of Unknown: Integrase B7945 sequence
  PTHR30461:SF3,SM00857,IPR006118,IPR036162,PS51737, G3DSA:3.40.50.1390,IPR006119,IPR011109,SSF53041,PF00239, PTHR30461,PS00397,PS51736,Coil,cd00338
MPNKIERCAIYIRVSTTEQMMHGKSLEAQKEYLTNYAKEHNMAVVGVYADEGKTARKELKKRKAIHSLLQDVQAGKIDVIIFWRIDRWFRNLSDFYKVQDILDSHNVRWISTSEPGINMETRDGRLQLNVVLSIGQNEVDTTSERIKFVNEASIRSGKLIFGDVNMGYGYKSGIVDGQKRMIKDPDREHVVDAFYKYFFKHQNKCATLRYIQETYDPDFSFGIMRTLLSSEFYKGTYRGFPYCPAYLTEDEWNKLQKIQKRNVKATPSGRIYLFAGMIRCPVCGQLLCGTGCSSIINRKTGAKRTYCYYRCNRAMIDHICSYRHRLSQNLVENYLLDNLENEYKNYKVKCEKIEKEKEKQKKKQTPEKLRKELDRLNFLFQKGRIDWDYYNEEYGRVESELNDLQSALPEPVRNYGYLEELLDTDFRTMYDQLSQENRRAFWRSIIQEIHVNEDHAITSVDFL

SEQ ID NO: 7945 - protein, 463 aa, Unknown
  Description of Unknown: Integrase B7946 sequence
  PTHR30461:SF3,SM00857,IPR036162,PF13408,IPR025827, PS51737,G3DSA:3.40.50.1390,IPR006119,IPR011109,SSF53041, PTHR30461,cd00338,PF00239
MNTYFHPQPELYGLRVVKYIRCSHEGQVLHGDTLEAQDALLNEFIEANHMVLVDTFVDEALTARKKFTKRKEFVRLLNGVRAHAFGMILFTKLDRWFRNIGDYHKIQEILDANSVQWKAITESYDTTTTNGRLHINIRLSVAQDECDRDSDRIKDVFAYKLKNKTYISGRLPRGLKLDADKHIIHDPEWKQWALDMFDHFESSGSIYSTFLFLTNKYGPLLRYDGVSRALKNPLYKGMYRDDPEFCDPLIDPERFDHLLELAKKNVRQRKTRRYYIFTGLLVCSSCQHNLVPYTVPHTLTDGTHKDYISYRCGYHSSSRLCDRSRTYREEYIEQYLLDHVRPALSRYIAEYDIVSSSASKKDPAAEAAKIRRKLEKLYDLFLDDLIEKDLYRQKYDELQAQLKDCLTVPSAPVRDFSAVQELLSKNWEDMYCTFSKTEKNVFWKSFVKSVTVYEDGSMDINFL

SEQ ID NO: 7946 - protein, 463 aa, Unknown
  Description of Unknown: Integrase B7947 sequence
  PTHR30461:SF3,SM00857,IPR006118,IPR036162,PF13408, IPR025827,PS51737,Coil,G3DSA:3.40.50.1390,IPR006119, IPR011109,SSF53041,PTHR30461,PS00397,PS51736, cd00338,PF00239
MPSKIERCAIYIRVSTAEQMMHGKSLEAQKQYLTNYAKEHNMTVAGVYADEGKTARKELKKRKAIHSLLEDVKAGKIDVIIFWRIDRWFRNLSDFYKVQEVLDDNNVHWISTSEPGINMETRDGRLQLNVVLSIGQNEVDTTSERIKFVNEASIRQGKLIFGDVNMGYGYKSGIIDGVKRMVKDPDREDTVNAFYRFFFKHHAKGLSMRYIQENYDPDFTWANMRTLLSSEFYKGTYRGIPYCPAYLTESEWNNLQEIQNANVKRAPSGRIYLFSGMINCPICGRRLSARGGSSIINRKTGAKKVYCYYRCNKAFIDHKCTYKHMVSQNLIEQYLIDHLEYEYNKFKIKCEKIEKEQEKKKKFQTPEKLQKELERLNLLFQKGRIEWDYYSKEYDRIENELNELLNAAPELEPDYAYLEELLNTDFRTMYYNLTQENRRAFWHSIIREIHLNTDHTVDSVDFL

SEQ ID NO: 7947 - protein, 463 aa, Unknown
  Description of Unknown: Integrase B7948 sequence
  PTHR30461:SF3,SM00857,IPR036162,PF13408,IPR025827, G3DSA:3.40.50.1390,PS51737,IPR006119,IPR011109,SSF53041, PTHR30461,PS51736,cd00338,PF00239
MSFFTPNPQLFGLRVVKYIRCSHDDQVLHGDTLEAQDLILEDFIKVNRMILVDTFIDEALTARKKFNKRKEFVRLLDGVKAHAFDLIIFTKLDRWFRNIGDYHKIQEILEANGVQWKAVTENYDTTTTNGRLHINIRLSVAQDECDRDSDRIKDVFAYKLKNKTYVSGSLPRGLKLDAEKHVIIDPEWNCFALDMFDRFEATCSKRDTQLFLQEKYNIRVCYDTVARYLKNPLFKGQYRDDPDFCPATISPERFERIQKLAIRNVRIRHTQQFYIFSGLLICSSCNHYMCGTVTYRRMADGSEKMYKNYRCNFKAHSKLCDRGKTYREADLEEYMLAHIRPALSDYIAKYEVTAASAVQKNPVTEIAKIERKMKKLYDLFMDDLIGKEAYRSEYGKFKAQIEELQKCSTAAPMRSLDSVKKLLSEDWEAVYHTFSDQEKNTFWKSFVESVLVYEDGSMDIRFL

SEQ ID NO: 7948 - protein, 463 aa, Unknown
  Description of Unknown: Integrase B7949 sequence
  PTHR30461:SF3,cd00338,SM00857,IPR036162, PF13408,IPR025827,G3DSA:3.40.50.1390,PS51737, IPR006119,IPR011109,SSF53041,PTHR30461, PS51736,Coil,PF00239
MNTYFHPQPELFGLRVVKYIRCSHEGQVLHGDTLEAQDTLLNEFIEVNHMVLVDTFVDEALTARKKFTKRREFVRLLDGVRAHAFDMILFTKLDRWFRNIGDYHKIQEILDANSVQWKAITESYDTTTTNGRLHINIRLSVAQDECDRDSDRIKDVFAYKLKNKTYISGSLPRGLKLDAEKHVVIDPEWHQFAIDMFDHFESTCSKRGTQLFLQEKYGIRVCYDTVVRYLRNPLFMGQYRDDPDFCEKTISRERFERIQNLAIRNVRIRHTQQFYIFSGLLICSSCNHYMTGTVTYRTLADGREKTYKSYRCNFKAQSKLCDRSKHYREEYVEEYMLQHIRPALSSYVADFEVTAAAAAKKDPAVEIAKVERKMKKLYDLFMDDLIDKASYRNEYEKFQSQIDKLRSCPAAPVRNLDSIKKILSDDWETVYHTFSDQEKNVFWKSFVQSITVHEDGEMDIVFL

SEQ ID NO: 7949 - protein, 463 aa, Unknown
  Description of Unknown: Integrase B7950 sequence
  PTHR30461:SF3,SM00857,G3DSA:1.10.10.2600,IPR036162,PF13408, PS51737,G3DSA:3.40.50.1390,IPR025827,IPR006119,IPR038109, IPR011109,SSF53041,PTHR30461,PS51736,cd00338, PF00239
MSTYFHPQPELFGLRVVKYIRCSHDGQVLHGDTLEAQDALLDEFIKVNRMVLVDTFIDEALTARKKFTRRKEFVRLLDGVRAHNFDMILFTKLDRWFRNIGDYHKIQEILEANGVQWKAITESYDTTTTNGRLHINIRLSVAQDECDRDSDRIKDVFAYKLKNKTYLSGSLPRGLKLDDEKHVIIDSEWKQFVLDMFDHFEQTNSKRGTLLYLKEKYGIYLCYDTISRNLRNSLYKGMYRDDPDFCEPLIEPERFDRIQVLGKRNVRQRYSNRTYVFTGLLICSSCNHYLVGQTTHRTLSDGTEKHYPSYRCNQRYQSHSCDRNRSYREDYVEEYLLQHIRPALSEYVAEYEVTGTNPARKNPAAEAAKIRTKMQKLYELYMDDLIDRDTYKRDYSAFQEKLKELDSIVVAPSRDLADLKKLLEQDYEEIYRTFSPQEKNAFWKSFVQSITVHEDGEMDIVFL

SEQ ID NO: 7950 - protein, 463 aa, Unknown
  Description of Unknown: Integrase B7951 sequence
  PTHR30461:SF3,cd00338,SM00857,IPR036162,PF13408, PS51737,IPR025827,G3DSA:3.40.50.1390,IPR006119,IPR011109, SSF53041,PTHR30461,PS51736,Coil,PF00239
MSFFTPNPQLFGLRVVKYIRCSHDDQVLHGDTLEAQDLILEDFIKVNRMILVDTFIDEALTARKKFNKRKEFVRLLDGVKAHAFDLIIFTKLDRWFRNIGDYHKIQEILEANGVQWKAVTENYDTTTTNGRLHINIRLSVAQDECDRDSDRIKDVFAYKLKNKTYVSGSLPRGLKLDAEKHVIIDPEWNCFALDMFDRFEATCSKRDTQLFLQDKYNIRVCYDTVARYLKNPLFKGQYRDDPDFCPATISPERFERIQKLAIRNVRIRHTQQFYIFSGLLICSSCNHYMCGTVTYRRMADGSEKVYKNYRCNFKAQSKLCDRGKTYREADLEEYMLAHIRPALSDYIAKYEVTAASTVQKNPVAEIAKIERKMKKLYDLFMDDLIDKEAYRSEYDKFKAQIEELQKCSTAAPMRSLDSVKKLLSEDWESVYRTFSDQEKNTFWKSFVESVLVYEDGSMDIRFL

SEQ ID NO: 7951 - protein, 463 aa, Unknown
  Description of Unknown: Integrase B7952 sequence
  PTHR30461:SF3,SM00857,IPR006118,G3DSA:1.10.10.2600,IPR036162, PF13408,PS51737,G3DSA:3.40.50.1390,Coil,IPR025827, IPR006119,IPR038109,IPR011109,SSF53041, PTHR30461,PS00397,cd00338,PF00239
MAQPQTALQRVALYIRVSSDEQAERGDSIRDQKERGTKYIDDHQNMILQDTYIDDGVSGQKLDRDDFTRLIGNVKAGLVDLIIFTKLDRWFRSLRHYLNTQVILDKYNVAWTAIDQPYFDTSTPYGRAFVAQSMTWAELEAQNGGLRVADVFRSKVEHGEVITGKVPRGYMIQNKHLVFSDEAPAMLDSIQYFHREQGLAKTVNYMRETHGINMSIQNLKNSILRNEKYTGRYRGNENYCPRLISDEMYQDIQRVLDNNSTIRSSQKYPYIFSGILICDECGHKMSGCHINVVSRRTSGKVYRYKYPAYECLQYRAYKKCSNGGEIREIRIEEYLLEHVREELSGYLVDFETGEAKRIDNRAKKNKIRRKLDRLKDLYLNEVINLEEYKKDRAEYEEQLAALPDMEQPIKNLKPLKQVLDCNFEIIYNNLNNEEKRAFWRSIIKEIRVSKSIGRNRKYQIIFL

SEQ ID NO: 7952 - protein, 463 aa, Unknown
  Description of Unknown: Integrase B7953 sequence
  PTHR30461:SF3,cd00338,SM00857,IPR036162,PF13408, IPR025827,G3DSA:3.40.50.1390,PS51737,IPR006119,IPR011109, SSF53041,PTHR30461,PS51736,Coil,PF00239
MSFFTPNPQLFGLRVVKYIRCSHDDQVLHGDTLEAQDLILEDFIKVNRMILVDTFIDEALTARKRFNKRKEFVRLLNGVKAHDFDLIIFTKLDRWFRNIGDYHKIQEILEANGVQWKAVTENYDTTTTNGRLHINIRLSVAQDECDRDSDRIKDVFAYKLKNKTYVSGSLPRGLKLDAEKHVIIDPEWNCFALDMFDRFEVTCSKRDTQLFLQEKYNIRVCYDTVARYLKNPLFKGQYRDDPDFCPATISPERFERIQKLAIRNVRIRHTQQFYIFSGLLICSSCNHYMCGTVTYRRMADGSEKMYKNYRCNFKAQSKLCDRGKTYREADLEEYMLAHIRPALSDYIAKYEVTAASTVQKNPVTEIAKIERKMKKLYDLFMDDLIDKEAYRSEYDKFKAQIEELQKCSTAAPMRSLDSVKKLLSEDWEAVYHTFSDREKNTFWKSFVESVLVYEDGSMDIRFL

SEQ ID NO: 7953 - protein, 463 aa, Unknown
  Description of Unknown: Integrase B7954 sequence
  PTHR30461:SF3,SM00857,IPR006118,IPR036162,PF13408, PS51737,G3DSA:3.40.50.1390,IPR025827,PS00397,IPR006119, SSF53041,IPR011109,PTHR30461,Coil, PS51736,cd00338,PF00239
MTNKLLRCAIYIRVSTFEQSVHGKSLQAQKEFLERYAAEHGMIVVGVYADEGKTARKELKKRKAIHALVNDVKQDKIDVILFWRLDRWFRNLSDFYKVQDILDEHSVRWISASEPGINMETRDGRLQLNVVLSIGQNEVDTTSERIKFVNEASIRQRKLIFGDANMPLGYKSGIVDGRKCMIKDPGTEHMVEDFFQYFKKHQSKQGAIRYMQSTYGINFSYSMLRTMLSSEFYKGTYRGFPYCPAYLTESEWNEIQTISVRNVKRTPSGRVYLFSSLMHCPVCGQKLVGTGCSSIINRKTGEKRTYCYYRCNRAITDCICTNRHRVSQNLIEKYLLENLTDEYHRYKIRNNKINEENRKKKVDRSPEQIRKELERLNLLFQKGRISFDYYDEEYTRLEQDLSTINATPIEPDRDLSYLDELLQTDFREMYNSLTLENRRAFWRSTIKEIHLNDDYTVKEVDFL

SEQ ID NO: 7954 - protein, 463 aa, Unknown
  Description of Unknown: Integrase B7955 sequence
  PTHR30461:SF3,cd00338,SM00857,IPR036162,PF13408, IPR025827,PS51737,G3DSA:3.40.50.1390,IPR006119,IPR011109, SSF53041,PTHR30461,PS51736,Coil,PF00239
MSFFTPNPQLFGLRVVKYIRCSHDDQVLHGDTLEAQDLILEDFIKVNRMILVDTFIDEALTARKKFNKRKEFVRLLDGVKAHAFDLIIFTKLDRWFRNIGDYHKIQEILEANDVQWKAVTENYDTTTTNGRLHINIRLSVAQDECDRDSDRIKDVFAYKLKNKTYVSGSLPRGLKLDAEKHVIIDPEWNCFALDMFDRFEATCSKRDTQLFLQEKYNIRVCYDTVARYLKNPLFKGQYRDDPDFCPATISPERFERIQKLAIRNVRIRHTQQFYIFSGLLICSSCNHYMCGTVTYRRMADGSEKMYKNYRCNFKAQSKLCDRGKTYREADLEEYMLAHIRPALSDYIVKYEVTAASTVQKNPVTEIAKIERKMKKLYDLFMDDLIDKEAYRSEYDKFKAQIEELQKCSTAAPMRSLDSVKKLLSEDWEAVYHTFSDQEKNTFWKSFVESVLVYEDGSMDIRFL

SEQ ID NO: 7955 - protein, 463 aa, Unknown
  Description of Unknown: Integrase B7956 sequence
  cd03768,PTHR30461:SF3,SM00857,G3DSA:1.10.10.2600, IPR036162,PS51737,G3DSA:3.40.50.1390,IPR006119, IPR038109,PF07508,SSF53041,IPR011109, PTHR30461,PS51736,Coil,PF00239
MKVAIYTRVSTAEQNLNGFSIHEQRKKLISFCEINEWKEYEVFTDGGFSGGSTKRPALQGLFNRLTQFDLVLVYKLDRLTRNVRDLLEMLERFEKYNVSFKSATEVFDTTTAIGKLFITIVGAMAEWERETIRERSLFGSRAAVESGKYIREQPFVYDNIEGKLVPNENTKYIEYIVKKFKEGNSANEIARLLNSKKKPSKIKNWNRQTIIRLIKNPVLRGHTKFGDIFMENTHEPVLSDDDYHKVINAIENKTHKSKSKHNAIFRGVLKCPQCNGNLHLYAGTIRPKNGRSYNVRRYICDKCHRDKYSRNISFNESEIENKFIEELEKMDLTRFEIHKPKKVEINIESDKKRIKEQRTKLLRAYTMGYVEEEEFKIIMDETQRQLENIKREENKETVQEIDEKQIKSIGNFIIEGWKTLTIKEKEKLILSSVNKIDIEFIPREKNNNSNTNTVNIKKVHFIF

SEQ ID NO: 7956 - protein, 463 aa, Unknown
  Description of Unknown: Integrase B7957 sequence
  PTHR30461:SF3,SM00857,IPR006118,IPR036162,PF13408, PS51737,G3DSA:3.40.50.1390,Coil,IPR025827,IPR006119, IPR011109,SSF53041,PTHR30461,PS00397,PS51736, cd00338,PF00239
MTTKIERCAIYIRVSTTEQMMHGKSLEAQKEYLTNYAKEHNMAVVGVYADEGKTARKELKKRKAIHSLLQDVEAGKIDVIIFWRIDRWFRNLSDFYKVQDILDSHNVRWISTSEPGINMETRDGRLQLNVVLSIGQNEVDTTSERIKFVNESSIRSGKLIFGDANMGYGYKSGIVDGQKRMVKDPDREHVVDAFYKYFFKHQNKCATLRYIQETYDPDFSFGIMRTLLSSEFYKGTYRGFPYCPAYLTEDEWNKLQKIQKRNVKATPSGRIYLFAGMIRCPVCGQKLCGTGCSSIINRKTGVKRTYCYYRCNRAMIDHICSYRHRLSQNLVENYLLDNLEDEYKNYKVKCEKIEKEKEKQKKKQSPEKLRKELDRLNFLFQKGRIEWDYYNEEYSRVESELNDLQNSLPEPAPNYSYLEELLDTDFRTMYDQLSQENRRAFWRSIIQEIHINEDSTITSVDFL

SEQ ID NO: 7957 - protein, 463 aa, Unknown
  Description of Unknown: Integrase B7958 sequence
  PTHR30461:SF3,SM00857,IPR006118,IPR036162,PF13408, IPR025827,PS51737,PS00397,G3DSA:3.40.50.1390,IPR006119, SSF53041,IPR011109,PTHR30461,Coil,PS51736, cd00338,PF00239
MTTKVERCAIYIRVSTTEQMMHGKSLEAQKEYLTNYAREHNMAIVGVYADEGKTARKELKKRKAIHSLLQDVEAGKIDVIIFWRIDRWFRNLSDFYKVQDILDSHNVRWISTSEPGINMETRGGRLQLNVVLSIGQNEVDTTSERIKFVNEASIRSGKLIFGDVNMGYGYKSGIVDGQKRMIKDPDREHVVDAFYKYFFKHQNKCATLRYIQETYDPDFSFGIMRTLLSSEFYKGTYRGFPYCPAYLTEDEWNKLQKIQKRNVKATPSGRIYLFAGMIRCPMCGQKLCGTGCSSIINRKTGAKRTYCYYRCNRAMIDHICSYRHRLSQNLVENYLLDNLENEYKNYKVKCEKIEKEKEKQKKKQSPDKLRKELDRLNFLFQKGRIEWDYYNEEYSRVESELNDLQNSLPEPVTNYSYLEELLDTDFRTMYDQLSQENRRAFWRSIIQEIHVNEDNAITSVDFL

SEQ ID NO: 7958 - protein, 463 aa, Unknown
  Description of Unknown: Integrase B7959 sequence
  PTHR30461:SF3,SM00857,IPR006118,IPR036162,PF13408, PS51737,G3DSA:3.40.50.1390,IPR025827,PS00397,IPR006119, IPR011109,SSF53041,PTHR30461,Coil,PS51736, cd00338,PF00239
MPSKIERCAIYIRVSTAEQMMHGKSLEAQKQYLTNYAKEHNMTVAGVYADEGKTARKELKKRKAIHSLLEDVKAGKIDVIIFWRIDRWFRNLSDFYKVQEVLDDNNVHWISTSEPGINMETRDGRLQLNVVLSIGQNEVDTTSERIKFVNEASIRQGKLIFGDVNMGYGYKSGIIDGVKRMVKDPDREDTVNAFYRFFFKHHAKGLSMRYIQENYDPDFTWANMRTLLSSEFYKGTYRGIPYCPAYLTESEWNNLQEIQNANVKRAPSGRIYLFSGMINCPICGRRLSARGGSSIINRKTGAKKVYCYYRCNKAFIDHKCTYKHMVSQNLIEQYLIDHLEYEYNKFKIKCEKIEKEQEKKKKIQTPEKLQKELERLNLLFQKGRIEWDYYSKEYDRIENELNELLNAAPELEPDYAYLEELLNTDFRTMYYNLTQENRRAFWHSIIREIHLNADHTVDSVDFL

SEQ ID NO: 7959 - protein, 463 aa, Unknown
  Description of Unknown: Integrase B7960 sequence
  PTHR30461:SF3,SM00857,IPR036162,PF13408,IPR025827, G3DSA:3.40.50.1390,PS51737,IPR006119,IPR011109,SSF53041, PF00239,PTHR30461,PS51736,Coil,cd00338
MSFFTPNPQLFGLRVVKYIRCSHDDQVLHGDTLEAQDLILEDFIKVNRMILVDTFIDEALTARKKFNKRKEFVRLLDGVKAHSFDLIIFTKLDRWFRNIGDYHKIQEILEANGVQWKAVTENYDTTTTNGRLHINIRLSVAQDECDRDSDRIKDVFAYKLKNKTYVSGSLPRGLKLDAEKHVIIDPEWNCFALDMFDRFEATCSKRDTQLFLQDKYNIRVCYDTVARYLKNPLFKGQYRDDPDFCPATISPERFERIQKLAIRNVRIRHTQQFYIFSGLLICSSCNHYMCGTVTYRRMADGSEKMYKNYRCNFKAQSKLCDRGRSYREEYVEEYMLNHIRPALSDYVAKYEVTAASTVHKNPATEIAKIERKMKKLYDLFMDDLIDKEAYRSEYDKFKAQIEELQKCSTAAPVRSLDSVKKLLSEDWEAVYHTFSDQEKNTFWKSFVESVLVYEDGSMDIHFL

SEQ ID NO: 7960 - protein, 463 aa, Unknown
  Description of Unknown: Integrase B7961 sequence
  PTHR30461:SF3,SM00857,IPR006118,IPR036162,PS51737, G3DSA:3.40.50.1390,IPR006119,IPR011109,SSF53041,PF00239, PTHR30461,PS00397,PS51736,Coil, cd00338
MTTKIERCAIYIRVSTTEQMMHGKSLEAQKEYLTNYAREHNMAVVGIYADEGKTARKELKKRKAIHSLIKDVEAGKIDVIIFWRIDRWFRNLSDFYKVQDILDSHNVRWISTSEPGINMETRDGRLQLNVVLSIGQNEVDTTSERIKFVNESSIRSGKLIFGDANMGYGYKSGIVDGQKRMIKDPDREHVVDAFYKYFFKHQNKCATLRYIQETYDPDFSFGIMRTLLSSEFYKGTYRGFPYCPAYLTEDEWSTLQKIQKRNVKATPSGRIYLFAGMIRCPVCGQLLCGTGCSSIINRKTGAKRTYCYYRCNRAMIDHICSYRHRLSQNLVENYLLDNLENEYKNYKVKCEKIEKEKEKQKKKQSPEKLRKELDRLNFLFQKGRIDWDYYNEEYGRIESELNDLQSTLPEPVTNYSYLEELLDTDFRTMYDQLSQENRRAFWRSIIQEIHINEDSTITSVDFL

SEQ ID NO: 7961 - protein, 463 aa, Unknown
  Description of Unknown: Integrase B7962 sequence
  PTHR30461:SF3,SM00857,IPR006118,IPR036162,PF13408, PS51737,IPR025827,Coil,G3DSA:3.40.50.1390,IPR006119, IPR011109,SSF53041,PTHR30461,PS00397,PS51736, cd00338,PF00239
MPSKIERCAIYIRVSTAEQMMHGKSLEAQKQYLTNYAKEHNMTVAGVYADEGKTARKELKKRKAIHSLLEDVKAGKIDVIIFWRIDRWFRNLSDFYKVQEVLDDNNVHWISTSEPGINMETRDGRLQLNVVLSIGQNEVDTTSERIKFVNEASIRQRKLIFGDVNMGYGYKSGIIGGVKRMVKDPDREDAVNAFYRFFFKHHAKGLSMRYIQENYDPDFTWANMRTLLSSEFYKGTYRGIPYCPAYLTESEWNNLQEIQNANVKRAPSGRIYLFSGMINCPICGRRLSARGGSSIINRKTGAKKVYCYYRCNKAFIDHKCSYRHMVSQNLIERYLIDHLEYEYNKFKIKCEKIEKEQEKKKKIQTPEKLQKELERLNLLFQKGRIEWDYYSKEYDRIENELNELLNTAPELEPDYAYLEELLNTDFRTMYYNLTQENRRAFWHSIIREIHLNTDHTVDSVDFL

SEQ ID NO: 7962 - protein, 463 aa, Unknown
  Description of Unknown: Integrase B7963 sequence
  PTHR30461:SF3,cd00338,SM00857,G3DSA:1.10.10.2600,IPR036162, PF13408,IPR025827,G3DSA:3.40.50.1390,PS51737,IPR006119, IPR038109,SSF53041,IPR011109,PTHR30461,PS51736, Coil,PF00239
MSYFNFNPDLVGVRVVKYIRCSHEGQVLHGDTLEAQNLILDEFIAANKMTLVDTFIDEAMTARKKYTKRKEFVRLLDGVRSHNFDLIIFTKLDRWFRNIGDYHKIQEILDANGVQWKAVTENYDTTTTNGRLHINIRLSVAQDECDRDSDRIKDVFAYKLKNKTFISGALPRGLMLDAEKHVIPDPEYSEYVTDLFEHFESCGSIRNTLLFLQDKYGFSISYKSISNALRNPLFKGQYRDDPDFCTQIIEPERFDHIQLLLSRNVRIRRNRQTYVFSGLLTCAECNHALVGYSAYYTTKEGEERATKTYRCNHYISTRTCTHSNQMSQKKLEKYLTENIQLAFSDYIASFNVVSSAAKKKDTAAEIARIERKQKKLYNLYMDDLIDAATYKEEYNSFKKQLEELRSIPFSPAVDTRKKTEELLSGDWISVYSSFTDLEKNAFWKSFIDKIVIDVNGNIDIIFL

SEQ ID NO: 7963 - protein, 463 aa, Unknown
  Description of Unknown: Integrase B7964 sequence
  PTHR30461:SF3,cd00338,SM00857,IPR036162,PF13408, IPR025827,G3DSA:3.40.50.1390,PS51737,IPR006119,SSF53041, IPR011109,PTHR30461,PS51736,Coil,PF00239
MNTYFHPQPELYGLRVVKYIRCSHEGQVLHGDTLEAQDALLNEFIEANHMVLVDTFVDEALTARKKFTKRKEFVRLLNGVRAHAFDMILFTKLDRWFRNIGDYHKIQEILDANGVQWKAITESYDTTTTNGRLHINIRLSVAQDECDRDSDRIKDVFAYKLKNKSYISGRLPRGLKLDADKHIIHDPEWKQWALDMFDHFESSGSIYSTFLFLTNKYGPLLRYDGVSRALKNPLYKGMYRDDPEFCDPLIDPERFDHLLELAKKNVRQRKTRRYYIFTGLLVCSSCQHSLVPYTIPHTLADGTHKDYVSYRCGYHSSSRLCDRSRTYREEYIEQYLLDHVRPALSHYIAEYDVISSSASKKDPAAEAAKIRRKLEKLYDLFLDDLIEKDLYRQKYDELQAQLKECLAAPSAPVRDFSAVQELLSKNWEDMYCTFSKTEKNVFWKSFVESITVYEDGSMDINFL

SEQ ID NO: 7964 - protein, 463 aa, Unknown
  Description of Unknown: Integrase B7965 sequence
  PTHR30461:SF3,SM00857,IPR006118,IPR036162,PF13408, PS51737,G3DSA:3.40.50.1390,IPR025827,Coil,IPR006119, IPR011109,SSF53041,PTHR30461,PS00397, PS51736,cd00338,PF00239
MPSKIERCAIYIRVSTAEQMMHGKSLEAQKQYLTNYAKEHNMTIVGVYADEGKTARKELKKRKAIHSLLEDVKAGKIDVIIFWRIDRWFRNLSDFYKVQEVLDDNNVHWISTSEPGINMETRDGRLQLNVVLSIGQNEVDTTSERIKFVNEASIRQGKLIFGDVNMGYGYKSGIIDGVKRMVKDPDREDTVNAFYRFFFKHHAKGLSMRYIQENYDPDFTWANMRTLLSSEFYKGTYRGIPYCPAYLTESEWNNLQEIQNANVKRAPSGRIYLFSGMINCPICGRRLSARGGSSIINRKTGAKKVYCYYRCNKAFIDHKCSYRHMVSQNLIERYLIDHLEYEYNKFKIKCEKIEKDQEKKKKVQTPEKLQKELERLNLLFQKGRIEWDYYSKEYDRIENELNELLNAAPELEPDYAYLEELLNTDFRTMYYNLTQENRRAFWHSIIREIHLNTDHTVDSVDFL

SEQ ID NO: 7965 - protein, 463 aa, Unknown
  Description of Unknown: Integrase B7966 sequence
  PTHR30461:SF3,cd00338,SM00857,IPR036162,PF13408, IPR025827,G3DSA:3.40.50.1390,PS51737,IPR006119,IPR011109, SSF53041,PTHR30461,PS51736,Coil,PF00239
MSFFTPNPQLFGLRVVKYIRCSHDDQVLHGDTLEAQDLILEDFIKVNRMILVDTFIDEALTARKKFNKRKEFVRLLDGVKAHAFDLIIFTKLDRWFRNIGDYHKIQEILEANGVQWKAVTENYDTTTTNGRLHINIRLSVAQDECDRDSDRIKDVFAYKLKNKTYVSGSLPRGLKLDAEKHVIIDPEWNCFALDMFDRFEATCSKRDTQLFLQEKYNIRVCYDTVARYLKNPLFKGQYRDDPDFCPATISPERFERIQKLAIRNVRIRHTQQFYIFSGLLICSSCNHYMCGTVTYRRMADGSEKMYKNYRCNFKAQSKLCDRGKTYREADLEEYMLAHIRPALSDYIAKYEVTAASTIQKNPVTEIAKIERKMKKLYDLFMDDLIDKEAYRSEYDKFKAQIEELQKCSTAVPMRSLDSVKKLLSEDWEAVYHTFSDQEKNTFWKSFVESVLVYEDGSMDIRFL

SEQ ID NO: 7966 - protein, 463 aa, Unknown
  Description of Unknown: Integrase B7967 sequence
  cd03768,PTHR30461:SF3,SM00857,G3DSA:1.10.10.2600, IPR036162,PF13408,IPR025827,PS51737, G3DSA:3.40.50.1390,IPR006119,IPR038109,PF07508, IPR011109,SSF53041,PTHR30461,PS51736,Coil,PF00239
MEQATDGYSIGEQKDKLLHYASAQGYAVVDTYSDEGFSGKDLLRPNMERMLNDIQHGKINTVLVYKLDRLSRHVKDVLELVETFDKCNVTLYSLSENFDLASPFGRAALKMMATFAELERETIVERMEMGKIARAKEGKYTCPGTRCPFGYRHDKKNDRLLIEESEAEIIRKIFDLYVNHGYTFRKLYDYCREAYPDVKYFNNQMCCKPIIERPLYAGYFRYRGGELTKGTNFEAIISYELFLQAQAQVDRNRTKRLSDSSPYLLTGLLICGRCGNRYVGKMYERYTKKPDGTHTKHYRYRDYGCAARLKRDKKYHPAKCDNDIYRAEELEKIVEDYVLNLNIDDYNKADFSPGLIDKMMSEIGAIKRSQSKLLDLYLSGDIDKDTFLIRKIEYDSKIAELQNLIEKETESVQSAPTNAEAIKKSIAEYSMLNRRQKRTLLEYLIKNIIVDGSRITVNLRLKK

SEQ ID NO: 7967 - protein, 463 aa, Unknown
  Description of Unknown: Integrase B7968 sequence
  PTHR30461:SF3,IPR036162,PS51737,IPR011109,PTHR30461, PS00397,PF00239,G3DSA:1.10.10.2600,IPR006119,SSF53041, cd00338,SM00857,IPR025827,IPR038109,PS51736, IPR006118,PF13408,G3DSA:3.40.50.1390,Coil
MKRQTAKQNDKLLLRVAIYIRVSTDQQAQDGDSVRDQLATGQKYIEKHENMILADTYVDDGISGQKVKRDDFQRLMNDVRAGSIDLIIFTRLDRWFRNLRHYLNTQDVLDKNGVSWTATEQPYFDTSTPHGRAFVNNSMIWAELEAQNDSDRILSVFDDKVENSEVLSGSTPLGYRIENKHLVPDDDAPTAAAIFEYYRKTGNLSMTLRYMESEFGLVRSAASLKNMLTNTKYIGEFRDNKNYCPAIIDRDLFFDVQRLLKINIKSGKKHDYIFSGLVVCDDCDHIMSGCQQRAKGRVCADGTRIVYKYSVYRCRQGVNLHRCPNRKLVFETTLEKMLLERIRPELENYIAEYEVTNLPVLHTDAKRRNLEHKMQKLKELYLNDLITMDEFKVDREKLMQQLDKIKSDDSQPMKDLSYLKNFLKTDFENIYVSLSIPEKRELWRSIIREIRVDHERNVRIIFL

SEQ ID NO: 7968 - protein, 463 aa, Unknown
  Description of Unknown: Integrase B7969 sequence
  PTHR30461:SF3,SM00857,IPR006118,IPR036162,PF13408, PS51737,G3DSA:3.40.50.1390,IPR025827,PS00397,IPR006119, IPR011109,SSF53041,PTHR30461,Coil,PS51736, cd00338,PF00239
MPSKIERCAIYIRVSTAEQMMHGKSLEAQKQYLTNYAKEHNMTVAGVYADEGKTARKELKKRKAIHSLLEDVKAGKIDVIIFWRIDRWFRNLSDFYKVQEVLDDNNVHWISTSEPGINMETRDGRLQLNVVLSIGQNEVDTTSERIKFVNEASIRQGKLIFGDVNMGYGYKSGIIDGVKRMVKDPDREYTVNAFYRFFFKHHAKGLSMRYIQENYDPDFTWANMRTLLSSEFYKGTYRGIPYCPAYLTESEWNNLQEIQNANVKRAPSGRIYLFSGMINCPICGRRLSARGGSSIINRKTGAKKVYCYYRCNKAFIDHKCTYKHMVSQNLIEQYLIDHLEYEYNKFKIKCEKIEKEQEKKKKVQTPEKLQKELERLNLLFQKGRIEWDYYSKEYDRIENELNELLNAAPELEPDYAYLEELLNTDFRTMYYNLTQENRRAFWHSIIREIHLNTDHTVDSVDFL

SEQ ID NO: 7969 - protein, 463 aa, Unknown
  Description of Unknown: Integrase B7970 sequence
  PTHR30461:SF3,cd00338,SM00857,IPR006118,G3DSA:1.10.10.2600, IPR036162,PF13408,IPR025827,G3DSA:3.40.50.1390,PS51737, IPR006119,IPR038109,SSF53041,IPR011109,PTHR30461, PS00397,Coil,PF00239
MAKPQTALQRVALYIRVSSDEQAERGDSIRDQKERGTKYIDDHQNMILQDVYIDDGVSGQKLDRDDFTRLIGNVKAGLVDLIIFTKLDRWFRSLRHYLNTQVILDKYNVAWTAIDQPYFDTSTPYGRAFVAQSMTWAELEAQNGGLRVTDVFRSKVEHGEVITGKVPRGYMIQNKHLVFSDEAPAMLDSIQYFHREQGLAKTVNYMRETHGISMSIQNLKNSILRNEKYTGRYRGNENYCPRLISDEMYHDIQRVLDNNSTIRSNQKYPYIFSGILVCDQCGHKMCGCHITVTSHRTSEKVYRYKYPAYECLQYRTYKKCSNGGEIREVRIEEYLLGHVREELSGYLVDFETGETKRIDNRAKKNKLRRKLDRLKDLYLNEVISLDEYKKDRIEYEEQLAALPDMEQPIKNLEPLKQVLDCNFEVIYNKLSNEEKRAFWRSIIKEIRISKSVGRNRKYQIIFL

SEQ ID NO: 7970 - protein, 463 aa, Unknown
  Description of Unknown: Integrase B7971 sequence
  cd03768,PTHR30461:SF3,SM00857,G3DSA:1.10.10.2600,IPR036162, PS51737,G3DSA:3.40.50.1390,IPR006119,IPR038109,PF07508, IPR011109,SSF53041,PTHR30461,PS51736,Coil, PF00239
MKVAIYTRVSTAEQNLNGFSIHEQRKKLISFCEINEWKEYEVFTDGGFSGGSIKRPALQDLLNRLTQFDLILVYKLDRLTRNVRDLLEMLERFEKCNVSFKSATEVFDTTTAIGKLFITIVGAMAEWERETIRERSLFGSRAAVESGKYIREQPFVYDNIEGKLVPNENTKYIEYIVKKFKEGNSANEIARLLNSKKKPSKIKNWNRQTIIRLIKNPVLRGHTKFGDIFMENTHEPVLSDDDYHKVINAIENKTHKSKSKHNAIFRGVLKCPQCNGNLHLYAGTIHPKNGKSYNVRRYTCDKCHRDKYSRNISFNESEIENKFIEELEKMDLTRFEIHKPKKVEINIEGDKKRIKEQRTKLLRAYTMGYVEEEEFKIIMEETQRQLEDIKREENKETVQEIDEKQIKSIGNFIIEGWKTLTIEEKERLILSSIDKIDIEFIPREKNNNSNTNTVNIRKVHFIF

SEQ ID NO: 7971 - protein, 463 aa, Unknown
  Description of Unknown: Integrase B7972 sequence
  PTHR30461:SF3,cd00338,SM00857,IPR036162,PF13408, PS51737,IPR025827,G3DSA:3.40.50.1390,IPR006119,IPR011109, SSF53041,PTHR30461,PS51736,Coil,PF00239
MSFFTPNPQLFGLRVVKYIRCSHDDQVLHGDTLEAQDLILEDFIKVNRMILVDTFIDEALTARKKFNKRKEFVRLLDGVKAHAFDLIIFTKLDRWFRNIGDYHKIQEILEANGVQWKAVTENYDTTTTNGRLHINIRLSVAQDECDRDSDRIKDVFAYKLKNKTYVSGSLPRGLKLDAEKHVIIDPEWNCFALDMFDRFEATCSKRDTQLFLQEKYNIRVCYDTVARYLKNPLFKGQYRDDPDFCPATISPERFERIQKLAIRNVRIRHTQQFYIFSGLLICSSCNHYMCGTVTYRRMADGSEKMYKNYRCNFKAQSKLCDRGKTYREADLEEYMLAHIRPALSDYIAKYEVTAASTVQKNPVTEIAKIERKMKKLYDLFMDDLIDKEAYRSEYDKFKAQIEELQKCSTAAPMRSLDSVKKLLSEDWEAVYHTFSDQEKNTFWKSFVESVLVYEDGSMDIHFL

SEQ ID NO: 7972 - protein, 463 aa, Unknown
  Description of Unknown: Integrase B7973 sequence
  SM00857,G3DSA:1.10.10.2600,IPR036162,PS51737, G3DSA:3.40.50.1390,IPR006119,IPR038109,PF07508, IPR011109,SSF53041,PF00239,PTHR30461, PS51736,Coil,cd00338
MNNVAIYCRESTEKQNIDTLVSLCEKEAKKLGYSDYKIYKDIKSGYSKDREEYTKLKEDIKDEKINVVILYESSRITRDEIEHHMFYALLKLYNVKVYTLNHGWIDLTNEDDCFLAGLLNLLDAREGRKTAKRVKDRMEEMAKNGFWTGGPAPFGYKLVDKKLIIEPEEAEKVREIFKLFLEGKTRFSLSALFGFECKRVMRMLVNPVYNGKLKFRQIEFKNKKRIEHKQFDILPGIHEPIIDDYTFKLVQDKVKNIKRETNKDTYIFKDLLICACGEKMYLYKKKYFYKREIPEITNTYLCKSSNKKIRNCSLSYVREEKLFLNVMESLENLILSFAINDIDTNKDGFEKQLRYYQKELSSLSTKEEILVRQLMNGKLSEKLYEKFMSELSENKEFIENKINSLTKVINSREAKKNNKIILKKYFNKIKKEKDPEKLNAFFKLIIDSIEFINDYRFYIHLKF

SEQ ID NO: 7973 - protein, 463 aa, Unknown
  Description of Unknown: Integrase B7974 sequence
  PTHR30461:SF3,IPR036162,PS51737,IPR011109,PTHR30461, PS00397,PF00239,G3DSA:1.10.10.2600,IPR006119,SSF53041, cd00338,SM00857,IPR025827,IPR038109,PS51736, IPR006118,PF13408,G3DSA:3.40.50.1390,Coil
MRRKTTAPVEKILLRVAIYIRVSTDKQVKDGDSMRDQLATGQKYIDSHENMILVDTYIDDGISGQKLKRDDFQRLIDDVRAGRIDLIIFTRLDRWFRNLRHYLNTQDILDKHGVSWTAIEQPYFDTSTPHGRAFVNNSMIWAELEAQNDSDRILGVFDDKVDNGEVLSGSTPLGYRIVNKHLVPDDDAPTAVAIFQYYRKTGNLSMTLRYMESEFGLVRSAASLKNMLTNTKYIGEFRDNKNYCPAIIDRDLFFDVQRLLKINIKSGKKHDYIFSGLVVCDDCDHIMSGCQQRARGRVRADGTRIIYKYSVYRCRQGVNLHRCPNRKLVFETTLEKMLLERIRPELENYIAEYEVANLPALRTDAKRRSVEGKMQKLKDLYLNDLITMDEFKLDREKLLMQLEKINAEDSRPVKDLSYLKNFLKMDFESVYDSLSIPERRELWRSIVKEIRVDHDKNIHIIFL

SEQ ID NO: 7974 - protein, 463 aa, Unknown
  Description of Unknown: Integrase B7975 sequence
  PTHR30461:SF3,IPR036162,PS51737,IPR011109,PTHR30461, PS00397,PF00239,G3DSA:1.10.10.2600,IPR006119,SSF53041, SM00857,IPR025827,IPR038109,PS51736,cd03768, IPR006118,PF13408,G3DSA:3.40.50.1390,PF07508,Coil
MKHVGLYIRVSTEEQTENYSIPEQRERLENFCKAKDWLVVDEYIDGGYSGAKLDRPAVQKMITDAGTGTIDTVLVWKLDRLSRSQKDMLYLIEDVFIPNSVDFVSLNESLDTGTAFGRAMIGILSAFAQLEREQIKERTMMGRIARAKSGLVMGPTAPYGYRYVDGQLIVDEYEASIVREIYDLYLQGYGMEKVSNMLYEKMQLTSASGYAAVRRILSRPTYAGLVHYSGEVYPGQHEKIIDVDMWKRVQEKREHSRNYQRGKRQKHLLTGMIYCKRCGAKYAYHVHSGNNYYDRYMCYSVCRSRKELIKDPHCDNTKYLAAELEQLIIAQIKELALDESKFNKVIQKRIEAPDPTQAMQKQIKEIDKQINNFMDLYQYGKVPVETINERIEKLTQEKSAIEKSIRELNIKPIPKREDYEPTLSRVDSIFETGSADEQRAAVRNLIDHIDIDGENVVIHWVFE

SEQ ID NO: 7975 - protein, 463 aa, Unknown
  Description of Unknown: Integrase B7976 sequence
  PTHR30461:SF3,SM00857,IPR006118,IPR036162,PS51737, G3DSA:3.40.50.1390,IPR006119,SSF53041,IPR011109,PF00239, PTHR30461,PS00397,PS51736,Coil,cd00338
MTNKIERCAIYIRVSTTEQMMHGKSLEAQKEYLTNYAREHNMAVVGVYADEGKTARKEFKKRKAIHSLLRDVEAGKIDVIIFWRIDRWFRNLSDFYKVQDILDNHNVRWISTSEPGINMETRDGRLQLNVVLSIGQNEVDTTSERIKFVNEASIRSGKLIFGDVNMGYGYKSGIVDGQKRMIKDPDREHVVDAFYKYFFKHQNKCATLRYIQETYDPDFSFGIMRTLLSSEFYKGTYRGFPYCPAYLSEDEWSRLQKIQKRNVKATPSGRIYLFAGLIRCPVCGQLLCGTGCSSIINRKTGAKRTYCYYRCNRAMIDHICSYRHRLSQNLVENYLLDNLEDEYKNYKVKCEKIEKEKEKQKKKQSPEKLRKELDRLNFLFQKGRIEWDYYNEEYSRVESELNDLQNSLPEPAPNYSYLEELLNTDFRTMYDQLSQENRRAFWRSIIQEIHVNEDHAITSVDFL

SEQ ID NO: 7976 - protein, 463 aa, Unknown
  Description of Unknown: Integrase B7977 sequence
  PTHR30461:SF3,SM00857,IPR006118,IPR036162,PF13408, PS51737,IPR025827,G3DSA:3.40.50.1390,PS00397,IPR006119, IPR011109,SSF53041,PTHR30461,Coil, PS51736,cd00338,PF00239
MPSKIERCAIYIRVSTAEQMMHGKSLEAQKQYLTNYAKEHNMTVAGVYADEGKTARKELKKRKAIHSLLEDVKAGKIDVIIFWRIDRWFRNLSDFYKVQEVLDDNNVRWISTSEPGINMETRDGRLQLNVVLSIGQNEVDTTSERIKFVNEASIRQGKLIFGDVNMGYGYKSGIIDGVKRMVKDPDREDTVNAFYRFFFKHHAKGLSMRYIQENYDPDFTWANMRTLLSSEFYKGTYRGIPYCPAYLTESEWNNLQEIQNANVKRAPSGRIYLFSGMINCPICGRRLSARGGSSIINRKTGAKKVYCYYRCNKAFIDHKCSYRHMVSQNLIERYLIDHLEYEYNKFKIKCEKIEKEQEKKKKVQTPEKLQKELERLNLLFQKGRIEWDYYSKEYDRIETELNELLNAAPELEPDYAYLEDLLNTDFRTMYYNLTTENRRAFWHSIIREIHLNPDHTVDSVDFL

SEQ ID NO: 7977 - protein, 463 aa, Unknown
  Description of Unknown: Integrase B7978 sequence
  PTHR30461:SF3,IPR036162,PS51737,IPR011109,PTHR30461, PS00397,PF00239,G3DSA:1.10.10.2600,IPR006119,SSF53041, cd00338,SM00857,IPR025827,IPR038109,PS51736, IPR006118,PF13408,G3DSA:3.40.50.1390,Coil
MRRKNAPRLEKILLRVAIYIRVSTDRQAKEGDSMRDQLATGQRYIENHENMILVDTYIDDGISGQKLKRDDFQRLIDDVRAGRIDLIIFTRLDRWFRNLRHYLNTQDILDRNNVSWTAIEQPYFDTSTPHGRAFVNNSMIWAELEAQNDSDRILGVFDDKVDNGEVLSGSTPLGYSIVDKHLSPDDDAPTAVSIFSHYRKTGNLSDTLRYMESEFGLVRSAASLKNMLTNTKYIGVFRDNNNYCPAIIDRELFEDVQRLLKINIKDGKKHDYIFGGLVVCSDCDHVMSGCQQRSGGRVRADGTRTIYKYSCYRCRQGVNLHRCPNCKIVMESTLEAMLLDRIRPELEKYIADYEVANLPALRTDAKRRSIESKMQKLKDLYLNDLITMDEFKVDREKLLIQLEKISAEETRPVKDLSYLRNFLKMDFESVYDSFSIPEKRELWRSIIREIRVDHEKNIQIIFL

SEQ ID NO: 7978 - protein, 463 aa, Unknown
  Description of Unknown: Integrase B7979 sequence
  PTHR30461:SF3,SM00857,IPR006118,IPR036162,PF13408, IPR025827,PS51737,G3DSA:3.40.50.1390,Coil,IPR006119, IPR011109,SSF53041,PTHR30461,PS00397,PS51736, cd00338,PF00239
MPSKIERCAIYIRVSTAEQMMHGKSLEAQKQYLTNYAKEHNMTIVGVYADEGKTARKELKKRKAIHSLLEDVKAGKIDVIIFWRIDRWFRNLSDFYKVQEALDDNNVRWISTSEPGINMETRDGRLQLNVVLSIGQNEVDTTSERIKFVNEASIRQGKLIFGDVNMGYGYKSGIIDGVKRMVKDPDREDTVNAFYRFFFKHHAKGLSMRYIQENYDPDFTWANMRTLLSSEFYKGTYRGIPYCPAYLTESEWNNLQEIQNANVKRAPSGRIYLFSGMINCPICGRRLSARGGSSIINRKTGAKKVYCYYRCNKAFIDHKCTYKHMVSQNLIEQYLIDHLEYEYNKFKIKCEKIEKEQEKKKKIQTPEKLQKELERLNLLFQKGRIEWDYYSKEYDRIENELNELLNAAPELEPDYSYLEELLNTDFRTMYYNLTQENRRAFWHSIIREIHLNTDHTVDSVDFL

SEQ ID NO: 7979 - protein, 463 aa, Unknown
  Description of Unknown: Integrase B7980 sequence
  PTHR30461:SF3,IPR036162,PS51737,IPR011109,PTHR30461, PS00397,PF00239,G3DSA:1.10.10.2600,IPR006119,SSF53041, SM00857,IPR025827,IPR038109,PS51736,cd03768, IPR006118,PF13408,G3DSA:3.40.50.1390,PF07508,Coil
MNVFCYVRVSTENQLENYSIEEQTKRLQAYCLAKGWNILKVYTDGGFSGGNLNRPALNMMLHDLHHGAAQAVVVYKLDRLSRSQKDTLTLIEDEFEKNQIAFVSISENFDTSTPFGRAMIGMLSVFAQLEKDQIVERFTMGRIGRSKAGYFHGGGNAPHGYRYENGRLVVEEPTAALVQEVYRSFLDGKSIHAIHQNMVRRGVPWSARAVMNMLKNSVYIGKVKFQGKEYPGLHAPIVSGEQYQAVQAILQSSGREQKKNTAQKTPFRAGYLLSSLIFCDRCGARYSANHGYYKCYSRSKSSKKFIKDPACKNDNWEISELDQHVIQAVQNLIHHDDILKQVLQTSPVKEPTMDEEMAERQIAEIDRQLARVIELYQLDTIPMEEVAKRTRELSAKKELLQNQGNRKGAATNRSRAAFLESIRQFDAHFFDAPTERKRLLISSLIESIRINGDQIAIHWRIGS

SEQ ID NO: 7980 - protein, 463 aa, Unknown
  Description of Unknown: Integrase B7981 sequence
  PTHR30461:SF3,SM00857,IPR006118,IPR036162,PF13408, PS51737,G3DSA:3.40.50.1390,IPR025827,PS00397,IPR006119, IPR011109,SSF53041,PTHR30461,Coil,PS51736, cd00338,PF00239
MPSKIERCAIYIRVSTAEQMMHGKSLEAQKQYLTNYAKEHNMTVAGVYADEGKTARKELKKRKAIHSLLEDVKAGKIDVIIFWRIDRWFRNLSDFYKVQEVLDDNNVRWISTSEPGINMETRDGRLQLNVVLSIGQNEVDTTSERIKFVNEASIRQGKLIFGDVNMGYGYKSGIIDGVKRMVKDPDREDTVNAFYRFFFKHHAKGLSMRYIQENYDPDFTWANMRTLLSSEFYKGTYRGIPYCPAYLTESEWNNLQEIQNANVKRAPSGRIYLFSGMINCPICGRRLSARGGSSIINRKTGAKKVYCYYRCNKAFIDHKCTYKHMVSQNLIEQYLIDHLEYEYNKFKIKCEKIEKEQEKKKKVQTPEKLQKELERLNLLFQKGRIEWDYYSKEYDRIENELNELLNTAPELEPDYAYLEELLNTDFRTMYYNLTQENRRAFWHSIIREIHLNTDHTVDSVDFL

SEQ ID NO: 7981 - protein, 463 aa, Unknown
  Description of Unknown: Integrase B7982 sequence
  PTHR30461:SF3,SM00857,IPR006118,IPR036162,PF13408, PS51737,G3DSA:3.40.50.1390,PS00397,IPR025827,IPR006119, IPR011109,SSF53041,PTHR30461,Coil,PS51736, cd00338,PF00239
MPSKIERCAIYIRVSTAEQMMHGKSLEAQKQYLTNYAKEHNMTVAGVYADEGKTARKELKKRKAIHSLLEDVKAGKIDVIIFWRIDRWFRNLSDFYKVQEVLDDNNVHWISTSEPGINMETRDGRLQLNVVLSIGQNEVDTTSERIKFVNEASIRQGKLIFGDVNMGYGYKSGIIDGVKRMVKDPDREDAVNAFYRFFFKHHAKGLSMRYIQENYDPDFTWANMRTLLSSEFYKGTYRGIPYCPAYLTESEWNNLQEIQNANVKRAPSGRIYLFSGMINCPICGRRLSARGGSSIINRKTGAKKVYCYYRCNKAFIDHKCTYKHMASQNLIEQYLIDHLEYEYNKFKIKCEKIEKEQEKKKKVQTPEKLQKELERLNLLFQKGRIEWDYYSKEYDRIENELNELLNTAPELEPDYAYLEELLNTDFRTMYYNLTQENRRAFWHSIIREIHLNTDHTVDSVDFL

SEQ ID NO: 7982 - protein, 463 aa, Unknown
  Description of Unknown: Integrase B7983 sequence
  PTHR30461:SF3,SM00857,IPR006118,IPR036162,PF13408, PS51737,G3DSA:3.40.50.1390,IPR025827,PS00397,IPR006119, IPR011109,SSF53041,PTHR30461,Coil,PS51736, cd00338,PF00239
MPSKIKRCAIYIRVSTAEQMMHGKSLEAQKQYLTNYAKEHNMTVAGVYADEGKTARKELKKRKAIHSLLEDVKAGKIDVIIFWRIDRWFRNLSDFYKVQEVLDDNNVHWISTSEPGINMETRDGRLQLNVVLSIGQNEVDTTSERIKFVNEASIRQGKLIFGDVNMGYGYKSGIIDGVKRMVKDPDREDTVNAFYRFFFKHHAKGLSMRYIQENYDPDFTWANMRTLLSSEFYKGTYRGIPYCPAYLTESEWNNLQEIQNANVKRAPSGRIYLFSGMINCPICGRRLSARGGSSIINRKTGAKKVYCYYRCNKAFIDHKCTYKHMVSQNLIEQYLIDHLEYEYNKFKIKCEKIEKEQEKKKKVQTPEKLQKELERLNLLFQKGRIEWDYYSKEYDRIENKLNELLNVAPELEPDYAYLEELLNTDFRTMYYNLTQENRRAFWHSIIRKIHLNTDHTVDSVDFL

SEQ ID NO: 7983 - protein, 463 aa, Unknown
  Description of Unknown: Integrase B7984 sequence
  PTHR30461:SF3,SM00857,IPR006118,IPR036162,PS51737, PS00397,G3DSA:3.40.50.1390,IPR006119,IPR011109,SSF53041, PTHR30461,Coil,PS51736,cd00338,PF00239
MTTKVERCAIYIRVSTTEQMMHGKSLEAQKEYLTNYAREHNMAIVGVYADEGKTARKELKKRKAIHSLLQDVEAGKIDVIIFWRIDRWFRNLSDFYKVQDILDSHNVRWISTSEPGINMETRDGRLQLNVVLSIGQNEVDTTSERIKFVNESSIRSGKLIFGDANMGYGYKSGIVDGQKRMVKDPDREHVVDAFYKYFFKHQNKCATLRYIQETYDPDFSFGIMRTLLSSEFYKGTYRGFPYCPAYLTEDEWNKLQKIQKRNVKATPSGRIYLFAGMIRCPVCGQLLCGTGCSSIINRKTGAKRTYCYYRCNRAMIDHICSYRHRLSQNIVENYLLDNLENEYKNYKVKCEKIEKEKEKQKKKQSPDKLRKELDRLNFLFQKGRIEWDYYNEEYSRVESELNNLQKVLPEPAPNYSYLEELLNTDFRTMYDQLSQENRRAFWRSIIQEIHINEDSTITSVDFL

SEQ ID NO: 7984 - protein, 463 aa, Unknown
  Description of Unknown: Integrase B7985 sequence
  cd00338,SM00857,G3DSA:1.10.10.2600,IPR036162, PS51737,G3DSA:3.40.50.1390,IPR006119,IPR038109, PF07508,IPR011109,SSF53041,PTHR30461, PS51736,Coil,PF00239
MNNVAIYCRESTEKQNIDTLVSLCEKEAKKLGYSNYKIYKDIKSGYSKDREEYAKLKEDIKDEKINVVILYESSRITRDEIEHHMFYALLKLYDVKVYTLNHGWIDLTNEDDCFLAGLLNLLDAREGRKTAKRVKDRMEEMAKNGFWTGGPAPFGYKLVDKKLIIEPEEAEKVKEIFKLFLEGKTRFSLSALFGFECKRVMRMLVNPVYNGKLKFRQIEFKNKKRIEHKQFDILPGIHKPIIDDYTFKLVQEKVKNIKRETNKESYIFKDLLICTCGEKMYLHKKKYFYKKEIPEITNAYLCKSSDKKIRNCSLSCIHEEELFKNVIESLEELILSFNVNNINTSKNDFEKQLKYYKKELSSLSTKEEVLVRQLMNGKLSEKLYEKFITELSENKEFIENKINSLTKVINSQEAKKNNKIILKKYFNKIKKEKDPEKLNAFFKLIIDSIEFVNDYRFYIHLKF

SEQ ID NO: 7985 - protein, 463 aa, Unknown
  Description of Unknown: Integrase B7986 sequence
  PTHR30461:SF3,IPR036162,PS51737,IPR011109,PTHR30461, PS00397,PF00239,G3DSA:1.10.10.2600,IPR006119,SSF53041, cd00338,SM00857,IPR025827,IPR038109,PS51736, IPR006118,PF13408,G3DSA:3.40.50.1390,Coil
MRRKTTAPVEKILLRVAIYIRVSTDKQVKDGDSMRDQLATGQKYIDSHENMILVDTYIDDGISGQKLKRDDFQRLIDDVRAGRIDLIIFTRLDRWFRNLRHYLNTQDILDKHGVSWTAIEQPYFDTSTPHGRAFVNNSMIWAELEAQNDSDRILGVFDDKVDNGEVLSGSTPLGYAIVNKHLVPDDDAPTAVAIFQYYRKTGNLSMTLRYMESEFGLVRSAASLKNMLTNTKYIGEFRDNKNYCPAIIDRDLFFDVQRLLKINIKSGKKHDYIFSGLVVCDDCDHIMSGCQQRAGGRVRADGTRIVYKYSVYRCRQGVNLHRCPNRKLVFETTLEKMLLERIRPELENYIAEYEVANLPALRTDAKRRSVEGKMQKLKDLYLNDLITMDEFKLDREKLLMQLEKINAEDSRPVKDLSYLKNFLKMDFESVYDSLSIPERRELWRSIVKEIRVDHDKNIHIIFL

SEQ ID NO: 7986 - protein, 463 aa, Unknown
  Description of Unknown: Integrase B7987 sequence
  PTHR30461:SF3,IPR036162,PS51737,IPR011109,PTHR30461, PS00397,PF00239,G3DSA:1.10.10.2600,IPR006119,SSF53041, cd00338,SM00857,IPR025827,IPR038109,PS51736, IPR006118,PF13408,G3DSA:3.40.50.1390,Coil
MRRKTTAANQKILLRAAIYIRVSTDQQAKDGDSLRDQMSTAQKYINDHENMILVDTYIDDGISGQKLKRDDFQRLMDDIRADRIDLVVFTRLDRWFRNLRHYLNTQDILDRHNVSWTAIDQPYFDTSSPHGRAFVNNSMIWAELEAQNDSDRIRSVFADKVKNGEVLSGNTPLGYHIVNKHLEPDENAPIAVDLFHYYQKSGNLVQTLRYMENEHGLLRSLASLKNMLTNTKYIGIFRDNENYCPAIIDPELFYDVQRLLKINIKSGNHHEYIFSGLVICSDCNHIMSGCQKHQTGRPRKDGTKIKYQYSSYRCRQGYSLHRCENRKIMLETTLERYLLKHIRPDLEKHLATYEVSNLPAVRTDTKRKNLENKLQKLKELYLNDLLTLNEYKTDREKIQLQLDQINSEESQPVKDLSFLYKFLNMDFESVYDSFTIPEKRELWRSVIREIRIDHDKNIEIVFL

SEQ ID NO: 7987 - protein, 463 aa, Unknown
  Description of Unknown: Integrase B7988 sequence
  PTHR30461:SF3,cd00338,SM00857,IPR036162,PF13408, IPR025827,PS51737,G3DSA:3.40.50.1390,IPR006119,IPR011109, SSF53041,PTHR30461,PS51736,Coil,PF00239
MSFFTPNPQLFGLRVVKYIRCSHDDQVLHGDTLEAQDLILEDFIKVNRMILVDTFIDEALTARKRFNKRKEFVRLLNGVKAHDFDLIIFTKLDRWFRNIGDYHKIQEILEANGVQWKAVTENYDTTTTNGRLHINIRLSVAQDECDRDSDRIKDVFAYKLKNKTYVSGSLPRGLKLDAEKHVIIDPEWNCFALDMFDRFEATCSKRDTQLFLQEKYNIRVCYDTVARYLKNPLFKGQYRDDPDFCPATISPERFERIQKLAIRNVRIRHTQQFYIFSGLLICSSCNHYMCGTVTYRRMADGSEKMYKNYRCNFKAQSKLCDRGKTYREADLEEYMLAHIRPALSDYIAKYEVTAASTVQKNPVTEIAKIERKMKKLYDLFMDDLIDKEAYRSEYDKFKAQIEELQKCSTAAPMRSLDSVKKLLSEDWEAVYHTFSDLEKNTFWKSFVESVLVYEDGSMDIRFL

SEQ ID NO: 7988 - protein, 463 aa, Unknown
  Description of Unknown: Integrase B7989 sequence
  PTHR30461:SF3,SM00857,IPR006118,IPR036162,PF13408, IPR025827,G3DSA:3.40.50.1390,Coil,PS51737,IPR006119, SSF53041,IPR011109,PTHR30461,PS00397, PS51736,cd00338,PF00239
MSEKIKRCAIYIRVSTSEQMMHGKSIEAQREYLACYAKDHGMIVTGIYADEGKTARKELKKRKAIHALLEDVKAGKIDVILFWRLDRWFRNMSDFYKVQDILDEYGVYWISASEPGINMETRDGRLQLNVVLSIGQNEVDTTSERIKFVNEASIRQGKVIFGENNMPRGYKVGIVDGKKCMVKDPEQEEMVNAFYDYFEKHQAKQQTLRFIQRNYDPAFSYGMLRTMLSSEFYKGTYRGIPYCPAYLSEERWAHIQNISKKSIRHTRSGRVYYFTGLIRCPQCGQILCGTGCKSIVNKKTGEKRDYCYYRCNRAMIDRICTNQHRVSQNLIESYLLDNLENEFKTYKIRVENVKQQKKKAPPVRTEKQIDKELDRLNLLFQKGRIEWDYYSREYDSLEKEKEDLNSVTVDPEPDYSFIETLLQQDFRDIYRSLTPENKRAFWKNTIRQIYLKSDYTIDYVDFI

SEQ ID NO: 7989 - protein, 463 aa, Unknown
  Description of Unknown: Integrase B7990 sequence
  PTHR30461:SF3,cd00338,SM00857,IPR036162,PF13408, IPR025827,PS51737,G3DSA:3.40.50.1390,IPR006119,IPR011109, SSF53041,PTHR30461,PS51736,Coil,PF00239
MSFFTPNPQLFGLRVVKYIRCSHDDQVLHGDTLEAQDLILEDFIKVNRMILVDTFIDEALTARKKFNKRKEFVRLLDGVKAHTFDLIIFTKLDRWFRNIGDYHKIQEILEANGVQWKAVTENYDTTTTNGRLHINIRLSVAQDECDRDSDRIKDVFAYKLKNKTYVSGSLPRGLKLDAEKHVIIDPEWNCFALDMFDRFEATCSKRDTQLFLQEKYNIRVCYDTVARYLKNPLFKGQYRDDPDFCPATISPERFERIQKLAIRNVRIRHTQQFYIFSGLLICSSCNHYMCGTATYRRMADGSEKMYKNYRCNFKAQSKLCDRGKTYREADLEEYMLAHIRPALSDYIAKYEVTAASTVQKNPVTEIAKIERKMKKLYDLFMDDLIDKEAYRSEYDKFKAQIEELQKCSTAAPMRSLDSVKKLLSEDWEAVYHTFSDQEKNTFWKSFVESVLVYEDGSMDIRFL

SEQ ID NO: 7990 - protein, 463 aa, Unknown
  Description of Unknown: Integrase B7991 sequence
  cd00338,SM00857,G3DSA:1.10.10.2600,IPR036162, PS51737,G3DSA:3.40.50.1390,IPR006119,IPR038109, PF07508,IPR011109,SSF53041,PTHR30461, PS51736,Coil,PF00239
MNNVAIYCRESTEKQNIDTLVSLCEKEAKKLGYSDYKVYKDIKSGYSKDREEYTKLKEDIKDEKINVVILYESSRITRDEIEHHMFYALLKLYNVKVYTLNHGWIDLTNEDDCFLAGLLNLLDAREGRKTAKRVKDRMEEMAKNGFWTGGPAPFGYKLVDKKLIIEPEEAEKVREIFKLFLEGKTRFSLSALFGFECKRVMRMLVNPVYNGKLKFRQIEFKNKKRIEHKQFDILPGIHEPIIDDYTFKLVQDKVKNIKRETKKDTYIFKDLLICACGEKMYLYKKKYFYKREIPEITNTYLCKSSNKKIRNCSLSYVREEKLFLNVMESLENLILSFAINDIDTNKDGFEKQLRYYQKELSSLSTKEEILVRQLMNGKLSEKLYEKFMSELSENKEFIENKINSLTKVINSREAKKNNKIILKKYFNKIKKEKDPEKLNAFFKLIIDSIEFINDYRFYIHLKF

SEQ ID NO: 7991 - protein, 463 aa, Unknown
  Description of Unknown: Integrase B7992 sequence
  PTHR30461:SF3,SM00857,IPR006118,IPR036162,PF13408, PS51737,IPR025827,PS00397,G3DSA:3.40.50.1390,IPR006119, IPR011109,SSF53041,PTHR30461,Coil,PS51736, cd00338,PF00239
MPSKIERCAIYIRVSTAEQMMHGKSLEAQKQYLTNYAKEHNMTVVGVYADEGKTARKELKKRKAIHALLEDVKAGKIDVIIFWRIDRWFRNLSDFYKVQEVLDDNNVRWISTSEPGINMETRDGRLQLNVVLSIGQNEVDTTSERIKFVNEASIRQRKLIFGDVNMGYGYKSGIIDGVKRMVKDPDREDAVNAFYRFFFKHHAKGLSMRYIQENYDPDFTWANMRTLLSSEFYKGTYRGIPYCPAYLTESEWNNLQEIQNANVKRAPSGRIYLFSGMINCPICGRRLSARGGSSIINRKTGAKKVYCYYRCNKAFIDHKCSYRHMVSQNLIERYLIDHLEYEYNKFKIKCEKIEKEQEKKKKVQTPEKLQKELERLNLLFQKGRIEWDYYSKEYDRIENELNELLNAAPELEPDYAYLEELLNTDFRTMYYNLTQENRRAFWHSIIREIHLNTDHTVDSVDFL

SEQ ID NO: 7992 - protein, 463 aa, Unknown
  Description of Unknown: Integrase B7993 sequence
  cd03768,PTHR30461:SF3,SM00857,G3DSA:1.10.10.2600,IPR036162, PS51737,G3DSA:3.40.50.1390,IPR006119,IPR038109,PF07508, IPR011109,SSF53041,PTHR30461,PS51736,Coil, PF00239
MKRVALYMRVSTQEQAENGNSLEFQKEKLEAYCKLHEYKIVGEYVDAGVSGAKFNRPALDRLKDDVEKIDVVLIYKLDRLSRSIKDTMLLIEDFFKPNKIDLISLSENFDTTQAIGMATVGMLSTFAQLERDTIKQRMMAGRVQAVKSGKYVCKVPYGYIKVEDKLIKDETTRECVEFIFKKALEGQSLYEIMYSLEKNGYGQYRKWSTSLIHKLLKRPVYRGHTTINNVLMKNTHEPYISEEEFVFMNKLFSDRKCHSSKSRRNKLPAIFRGLIHCPTCYRKLYPFTRTFKSGKCTTFYRCNFCGREKNIHFSFSEQTFEKKLLNYLKFDFSIDIKKAKTTKVDYSKKLSVLEHKKNKLQRAWLNDLLSDNELKNLQKEIDNQIQLINLKQKEYHDSLVNAKKQKNISGIVANFENIYSSLDIDKKTEFLNTIIQDIKTTITIEKRGKVHRSNISITNIIFK

SEQ ID NO: 7993 - protein, 463 aa, Unknown
  Description of Unknown: Integrase B7994 sequence
  PTHR30461:SF3,SM00857,IPR036162,PF13408,PS51737, G3DSA:3.40.50.1390,IPR025827,IPR006119,IPR011109,SSF53041, PF00239,PTHR30461,PS51736,Coil,cd00338
MNTYFHPQPELYGLRVVKYIRCSHEGQVLHGDTLEAQDTLLNEFIETNHMVLVDTFVDEALTARKRYTKRKEFVRLLDGVRTHAFDMILFTKLDRWFRNIGDYHKIQEILDANSVQWKAITESYDTTTTNGRLHINIRLSVAQDECDRDSDRIKDVFSYKLKNKTYISGSLPRGLMLDEEKHVIIDPAWHQFALDMFDHFEATGSKRGTLLYLQEKYDMRLCYDTVVRNLRNPLYKGMYRDDPGFCECTITPERFDRIQLLGRKNVRHRKTNRTYIFTGLLICSSCKHYLVGAATTATLAHGVKKEYRSYRCNQRYQSHSCDRARTYREQDVEDYLLGHVRPALSQYIAQYEVSSSSMQKKDPAADAAKIRRKLEKLYDLFMDDLIDKESYREKYDDLQDQLKKCQAVVPVPRRDLSEVKSLLAQNWEEIYQAFTAAEKNTFWKSFIESILVHEDGSMDISFL

SEQ ID NO: 7994 - protein, 463 aa, Unknown
  Description of Unknown: Integrase B7995 sequence
  PTHR30461:SF3,SM00857,IPR006118,IPR036162,PS51737, G3DSA:3.40.50.1390,IPR006119,IPR011109,SSF53041,PF00239, PTHR30461,PS00397,PS51736,Coil, cd00338
MTTKVERCAIYIRVSTTEQMMHGKSLEAQKEYLTNYAREHNMAVVGIYADEGKTARKELKKRKAIHSLLQDVEAGKIDVIIFWRIDRWFRNLSDFYKVQDILDSHNVRWISTSEPGINMETRDGRLQLNVVLSIGQNEVDTTSERIKFVNEASIRSGKLIFGDVNMGYGYKSGIVDGQKRMIKDPDREHVVDAFYKYFFKHQNKCATLRYIQETYDPDFSFGIMRTLLSSEFYKGTYRGFPYCPAYLTEDEWNKLQKIQKRNVKATPSGRIYLFAGMIRCPVCGQLLCGTGCSSIINRKTGAKRTYCYYRCNRAMIDHICSYRHRLSQNLVENYLLDNLENEYKNYKVKCEKIEKEKEKQKKKQSPEKLRKELDRLNFLFQKGRIDWDYYNEEYGRIESELNDLQSTLPEPVTNYSYLEELLDTDFRTMYDQLSQENRRAFWRSIIQEIHINEDSTITSVDFL

SEQ ID NO: 7995 - protein, 463 aa, Unknown
  Description of Unknown: Integrase B7996 sequence
  PTHR30461:SF3,IPR036162,PS51737,IPR011109,PTHR30461, PS00397,PF00239,G3DSA:1.10.10.2600,IPR006119,SSF53041, cd00338,SM00857,IPR025827,IPR038109,PS51736, IPR006118,PF13408,G3DSA:3.40.50.1390,Coil
MRRKTTAPVEKILLRVAIYIRVSTDKQVKDGDSMRDQLATGQKYIDSHENMILVDTYIDDGISGQKLKRDDFQRLIDDVRAGRIDLIIFTRLDRWFRNLRHYLNTQDILDKHGVSWTAIEQPYFDTSTPHGRAFVNNSMIWAELEAQNDSDRILGVFDDKVDNGEVLSGSTPLGYTIVNKHLVPDDDAPTSVAIFQYYRKTGNLSMTLRYMESEFGLVRSAASLKNMLTNTKYIGEFRDNKNYCPAIIDRDLFFDVQRLLKINIKSGKKHDYIFSGLVVCDDCDHIMSGCQQRAKGRVRADGTRIIYKYSVYRCRQGVNLHRCPNRKLVFEATLEKMLLERIRPELENYIAEYEVANLPALRTDAKRRSVEGKMQKLKDLYLNDLITMDEFKLDREKLLMQLEKINAEDSRPVKDLSYLKNFLKMDFESVYDSLSIPERRELWRSIVKEIRVDHDKNIHIIFL

SEQ ID NO: 7996 - protein, 463 aa, Unknown
  Description of Unknown: Integrase B7997 sequence
  PTHR30461:SF3,cd00338,SM00857,IPR036162,PF13408, IPR025827,PS51737,G3DSA:3.40.50.1390,IPR006119,SSF53041, IPR011109,PTHR30461,PS51736,Coil,PF00239
MNTYFHPQPELYGLRVVKYIRCSHEGQVLHGDTLEAQDALLNEFIEANHMVLVDTFVDEALTARKKFTKRKEFVRLLNGVRAHAFDMILFTKLDRWFRNIGDYHKIQEILDANGVQWKAITESYDTTTTNGRLHINIRLSVAQDECDRDSDRIKDVFSYKLKNKSYISGRLPRGLKLDADKHIIHDPEWKQWALDMFDHFESSGSIYSTFLFLTNKYGPLLRYDGVSRALKNPLYKGMYRDDPEFCEPLISPERFDHLLGLAKKNVRQRKTRRYYIFTGLLVCSSCQHNLVPYTVPHTLADGTHEDYISYRCGYHSSSRLCDRSRTYREEYIEQYLLDHVRPALSRYIAEYDVVSSSASKKDPAAEAAKIRRKLEKLYDLFLDDLIEKDLYRQKYDELQAQLKECLAAPSAPVRDFSAVQELLSKNWEDMYCTFSKTEKNVFWKSFVESITVYEDGSMDINFL

SEQ ID NO: 7997 - protein, 463 aa, Unknown
  Description of Unknown: Integrase B7998 sequence
  PTHR30461:SF3,SM00857,IPR006118,IPR036162,PS51737, G3DSA:3.40.50.1390,IPR006119,IPR011109,SSF53041,PF00239, PTHR30461,PS00397,PS51736,Coil, cd00338
MTTKVERCAIYIRVSTTEQMMHGKSLEAQKEYLTNYAKEHNMAVVGVYADEGKTARKELKKRKAIHSLLQDVEAGKIDVIIFWRIDRWFRNLSDFYKVQDILDSHNVRWISTSEPGINMETRDGRLQLNVVLSIGQNEVDTTSERIKFVNEASIRSGKLIFGDVNMGYGYKSGIVDGQKRMIKDPDQEHVVDAFYKYFFKHQNKCATLRYIQETYDPDFSFGIMRTLLSSEFYKGTYRGFPYCPAYLTEDEWSTLQKIQKRNVKATPSGRIYLFAGLIRCPVCGQLLCGTGCSSIINRKTGAKRTYCYYRCNRAMIDHICSYRHRLSQNLVENYLLDNLEDEYKNYKVKCEKIEKEKEKQKKKQSPEKLRKELDRLNFLFQKGRIEWDYYNEEYSRVESELNNLQKVLPEPAPNYSYLEELLNTDFRTMYDQLSQENRRAFWRSIIQEIHINEDSTITSVDFL

SEQ ID NO: 7998 - protein, 463 aa, Unknown
  Description of Unknown: Integrase B7999 sequence
  PTHR30461:SF3,IPR036162,PS51737,IPR011109,PTHR30461, PS00397,PF00239,G3DSA:1.10.10.2600,IPR006119,SSF53041, cd00338,SM00857,IPR025827,IPR038109,PS51736, IPR006118,PF13408,G3DSA:3.40.50.1390,Coil
MRRKTTAPVEKILLRVAIYIRVSTDKQVKDGDSMRDQLATGQKYIDSHENMILVDTYIDDGISGQKLKRDDFQRLIDDVRAGRIDLIIFTRLDRWFRNLRHYLNTQDILDKHGVSWTAIEQPYFDTSTPHGRAFVNNSMIWAELEAQNDSDRILGVFDDKVDNGEVLSGSTPLGYTIVNKHLVPDDDAPTAVAIFQYYRKTGNLSMTLRYMESEFGLVRSAASLKNMLTNTKYIGEFRDNKNYCPAIIDRDLFFDVQRLLKINIKSGKKHDYIFSGLIVCDDCDHIMSGCQQRAGGRVRADGTRIVYKYSVYRCRQGVNLHRCPNRKLVFETTLEKMLLERIRPELENYIAEYEVANLPALRTDAKRRSVEGKMQKLKDLYLNDLITMDEFKLDREKLLMQLEKINAEDSRPVKDLSYLKNFLKMDFESVYDSLSIPERRELWRSIVKEIRVDHDKNIHIIFL

SEQ ID NO: 7999 - protein, 463 aa, Unknown
  Description of Unknown: Integrase B8000 sequence
  PTHR30461:SF3,IPR036162,PS51737,IPR011109,PTHR30461, PS00397,PF00239,G3DSA:1.10.10.2600,IPR006119,SSF53041, cd00338,SM00857,IPR025827,IPR038109,PS51736, IPR006118,PF13408,G3DSA:3.40.50.1390,Coil
MRRKTTAPVEKILLRVAIYIRVSTDKQVKDGDSMRDQLATGQKYIDSHENMILVDTYIDDGISGQKLKRDDFQRLIDDVRAGRIDLIIFTRLDRWFRNLRHYLNTQDILDKHGVSWTAIEQPYFDTSTPHGRAFVNNSMIWAELEAQNDSDRILGVFDDKVDNGEVLSGSTPLGYAIVNKHLVPDDDAPTAVAIFQYYRKTGNLSMTLRYMESEFGLVRSAASLKNMLTNTKYIGEFRDNKNYCPAIIDRNLFFDVQRLLKINIKSGKKHDYIFSGLVVCDDCDHIMSGCQQRAGGRVRADGTRIVYKYSVYRCRQGVNLHRCPNRKLVFETTLEKMLLERIRPELENYIAEYEVANLPALRTDAKRRSVEGKMQKLKDLYLNDLITMDEFKLDREKLLMQLEKINAEDSRPVKDLSYLKNFLKMDFESVYDSLSIPERRELWRSIVKEIRVDHDKNIHIIFL

SEQ ID NO: 8000 - protein, 463 aa, Unknown
  Description of Unknown: Integrase B8001 sequence
  PTHR30461:SF3,SM00857,IPR006118,IPR036162,PF13408, IPR025827,G3DSA:3.40.50.1390,PS00397,PS51737,IPR006119, SSF53041,IPR011109,PTHR30461,Coil,PS51736, cd00338,PF00239
MPSKIERCAIYIRVSTAEQMMHGKSLEAQKQYLTNYAKEHNMTVVGVYADEGKTARKELKKRKAIHSLLEDVKAGKIDVIIFWRIDRWFRNLSDFYKVQEVLDDNNVRWISTSEPGINMETRDGRLQLNVVLSIGQNEVDTTSERIKFVNEASIRQGKLIFGDVNMGYGYKSGIIDGVKRMVKDPDREDTVNAFYRFFFKHHAKGLSMRYIQENYDPDFTWANMRTLLSSEFYKGTYRGIPYCPAYLTESEWNTLQEIQNANVKRAPSGRIYLFSGMINCPICERRLSARGGSSIINRKTGAKKVYCYYRCNKAFIDHKCTYKHMVSQNLIEQYLIDHLEYEYNKFKIKCEKIEKEQEKKKKVQTPEKLQKELERLNLLFQKGRIEWDYYSKEYDRIENELNELLNVAPELEPDYAYLEELLNTDFRTMYYNLTQENRRAFWHSIIREIHLNTDHTVDSVDFL

SEQ ID NO: 8001 - protein, 463 aa, Unknown
  Description of Unknown: Integrase B8002 sequence
  PTHR30461:SF3,cd00338,SM00857,IPR036162,PF13408, IPR025827,G3DSA:3.40.50.1390,PS51737,IPR006119,SSF53041, IPR011109,PTHR30461,PS51736,Coil,PF00239
MNTYFHPQPELYGLRVVKYIRCSHEGQVLHGDTLEAQDTLLNEFIEANHMVLVDTFVDEALTARKRYTKRKEFVRLLDGVRAHAFDMILFTKLDRWFRNIGDYHKIQEILDANSVQWKAITESYDTTTTNGRLHINIRLSVAQDECDRDSDRIKDVFAYKLKNKSYISGRLPRGLKLDADKHIIHDPEWKQWALDMFDHFESSGSIYSTFLFLTNKYGPLLRYDGVSRALKNPLYKGMYRDDPEFCDPLIDPERFDHLLELAKKNVRQRKTRRYYIFTGLLVCSSCQHNLVPYTIPHTLADGTHKDYVSYRCGYHSSSRLCDRSRTYREEYIEQYLLDHVRPALSRYIAEYDVVSSSTSKKDPAAEAAKIRHKLEKLYDLFLDDLIEKDLYRQKYDDLQAQLNECLEVPSAPVRDFSAVQELLSKNWEDMYCTFSKAEKNVFWKSFVESIIVYEDGSMDINFL

SEQ ID NO: 8002 - protein, 463 aa, Unknown
  Description of Unknown: Integrase B8003 sequence
  PTHR30461:SF3,SM00857,IPR006118,IPR036162,PF13408, PS51737,IPR025827,Coil,G3DSA:3.40.50.1390,IPR006119, IPR011109,SSF53041,PTHR30461,PS00397, PS51736,cd00338,PF00239
MPSKIERCAIYIRVSTAEQMMHGKSLEAQKQYLTNYAKEHNMTVAGVYADEGKTARKELKKRKAIHSLLEDVKAGKIDVIIFWRIDRWFRNLSDFYKVQEVLDDNNVHWISTSEPGINMETRDGRLQLNVVLSIGQNEVDTTSERIKFVNEASIRQGKLIFGDVNMGYGYKSGIIDGVKRMVKDPDREDTVNAFYRFFFKHHAKGLSMRYIQENYDPDFTWANMRTLLSSEFYKGTYRGIPYCPAYLTESEWNNLQEIQNANVKRAPSGRIYLFSGMINCPICGRRLSARGGSSIINRKTGAKKVYCYYRCNKAFIDHKCTYKHMVSQNLIERYLIDHLEYEYNKFKIKCEKIEKEQEKKKKVQTPEKLQKELERLNLLFQKGRIEWDYYSKEYDRIENELNELLNTAPELEPDYAYLEELLNTDFRTMYYNLTQENRRAFWHSIIREIHLNTDHTVDSVDFL

SEQ ID NO: 8003 - protein, 463 aa, Unknown
  Description of Unknown: Integrase B8004 sequence
  PTHR30461:SF3,SM00857,IPR006118,IPR036162,PS51737, G3DSA:3.40.50.1390,Coil,IPR006119,IPR011109,SSF53041, PTHR30461,PS00397,PS51736,cd00338,PF00239
MTTKVERCAIYIRVSTTEQMMHGKSLEAQKEYLTNYAREHNMAVVGVYADEGKTARKELKKRKAIHSLLQDVEAGKIDVIIFWRIDRWFRNLSDFYKVQDILDSHNVRWISTSEPGINMETRDGRLQLNVVLSIGQNEVDTTSERIKFVNESSIRSGKLIFGDVNMGYGYKSGIVDGQKRMIKDPDREHVVDAFYKYFFKHQNKCATLRYIQETYDPDFSFGIMRTLLSSEFYKGTYRGFPYCPAYLTEDEWSTLQKIQKRNVKATPSGRIYLFAGLIRCPVCGQLLCGTGCSSIINRKTGAKRTYCYYRCNRAMIDHICSYRHRLSQNLVENYLLDNLENEYKNYKVKCEKIEKEKEKQKKKQSPDKLRKELDRLNFLFQKGRIDWDYYNEEYGRVESELNDLQSALPEPVTNYSYLEELLDTDFRTMYDQLSQENRRAFWRSIIQEIHINEDSTITSVDFL

SEQ ID NO: 8004 - protein, 463 aa, Unknown
  Description of Unknown: Integrase B8005 sequence
  PTHR30461:SF3,SM00857,IPR006118,IPR036162,PS51737, G3DSA:3.40.50.1390,IPR006119,IPR011109,SSF53041,PF00239, PTHR30461,PS00397,PS51736,Coil, cd00338
MTDKIERCAIYIRVSTTEQMMHGKSLEAQKEYLTNYAREHNMAVVGVYADEGKTARKEFKKRKAIHSLLRDVEAGKIDVIIFWRIDRWFRNLSDFYKVQDILDSHNVRWISTSEPGINMETRDGRLQLNVVLSIGQNEVDTTSERIKFVNESSIRSGKLIFGDANMGYGYKSGIVDGQKRMVKDPDREHVVDAFYKYFFKHQNKCATLRYIQETFDPDFSFGIMRTLLSSEFYKGTYRGFPYCPAYLTEDEWNKLQKIQKRNVKATPSGRIYLFAGMIRCPVCGQLLCGTGCSSIINRKTGAKRTYCYYRCNRAMIDHICSYRHRLSQNLVENYLLDNLENEYKNYKVKCDKIEKEKEKQKKKQSPEKLRKELDRLNFLFQKGRIDWDYYNEEYGRVESELNDLQSALPEPVTNYGYLEELLDTDFRTMYDQLSQENRRAFWRSIIQEIHINEDSTITSVDFL

SEQ ID NO: 8005 - protein, 463 aa, Unknown
  Description of Unknown: Integrase B8006 sequence
  PTHR30461:SF3,SM00857,IPR006118,IPR036162,PF13408, PS51737,G3DSA:3.40.50.1390,IPR025827,PS00397,IPR006119, IPR011109,SSF53041,PTHR30461,Coil,PS51736, cd00338,PF00239
MPSKIERCAIYIRVSTAEQMMRGKSLEAQKQYLTNYAKEHNMTVAGVYADEGKTARKELKKRKAIHSLLEDVKAGKIDVIIFWRIDRWFRNLSDFYKVQEVLDDNNVRWISTSEPGINMETRDGRLQLNVVLSIGQNEVDTTSERIKFVNEASIRQGKLIFGDVNMGYGYKSGIIDGVKRMVKDPDREDTVNAFYRFFFKHHAKGLSMRYIQENYDPDFTWANMRTLLSSEFYKGTYRGIPYCPAYLTESEWNNLQEIQNANVKRAPSGRIYLFSGMINCPICGRRLSARGGSSIINRKTGAKKVYCYYRCNKAFIDHKCSYRHMVSQNLIERYLIDHLEYEYNKFKIKCEKIEKEQEKKKKVQTPEKLQKELERLNLLFQKGRIEWDYYSKEYDRIENELNELLNVAPELEPDYAYLEDLLNTDFRTMYYNLTQENRRAFWHSIIREIHLNTDHTVDSVDFL

SEQ ID NO: 8006 - protein, 463 aa, Unknown
  Description of Unknown: Integrase B8007 sequence
  PTHR30461:SF3,IPR036162,PS51737,IPR011109,PTHR30461, PS00397,PF00239,G3DSA:1.10.10.2600,IPR006119,SSF53041, cd00338,SM00857,IPR025827,IPR038109,PS51736, IPR006118,PF13408,G3DSA:3.40.50.1390,PF07508,Coil
MKRQTAKLNDKLLLRVAIYIRVSTDQQAQDGDSVRDQLATGQKYIENHENMILADTYVDDGISGQKVKRDDFQRLMNDVRAGSIDLIIFTRLDRWFRNLRHYLNTQDVLDKNGVSWTATEQPYFDTSTPHGRAFVNNSMIWAELEAQNDSDRILSVFDDKVDNSEVLSGSTPLGYRIENKHLVPDDDAPTAAAIFEYYRSNGNLAMTLRYMETEFGLIRSSASLKNMLTNTKYIGEFRTNKNYCPAIIDRDLFDDVQRLLKINIKSGKKHDYIFSGLVVCDECEHTMSGCQQRNSARILADGTRVVYKYNSYRCRQGITLHRCPNHKVMLESTLEKILLARIRPELENYIAEYEVANRPAMRTDSKRRNLEHKMQKLKELYLNDLITMDEFKVDREKILQQLDKIKSDDSQPVKDLSYLKNFLKTDFENIYGSLSIPEKRELWRSIIREIRVDHNRNVRIIFL

SEQ ID NO: 8007 - protein, 463 aa, Unknown
  Description of Unknown: Integrase B8008 sequence
  PTHR30461:SF3,SM00857,IPR006118,IPR036162,PS51737, G3DSA:3.40.50.1390,PS00397,IPR006119,IPR011109,SSF53041, PTHR30461,Coil,PS51736,cd00338,PF00239
MTTKVERCAIYIRVSTTEQMMHGKSLEAQKEYLTNYAREHNMAVVGIYADEGKTARKELKKRKAIHSLLQDVEAGKIDVIIFWRIDRWFRNLSDFYKVQDILDSHNVRWISTSEPGINMETRDGRLQLNVVLSIGQNEVDTTSERIKFVNEASIRNGKLIFGDVNMGYGYKSGIVDGQKRMVKDPDREHVVDAFYKYFFKHQNKCATLRYIQETYDPDFSFGIMRTLLSSEFYKGTYRGFPYCPAYLTEDEWNKLQKIQKRNVKATPSGRIYLFAGMIRCPVCGQLLCGTGCSSIINRKTGAKRTYCYYRCNRAMIDHICSYRHRLSQNLVENYLLDNLEDEYKNYKVKCEKIEKEKEKQKKKQSPEKLRKELDRLNFLFQKGRIDWDYYNEEYGRIESELNDLQSALPEPVTNYSYLEELLNTDFRTMYDQLSQENRRAFWRSIIQEIHVNEDHAIISVDFL

SEQ ID NO: 8008 - protein, 463 aa, Unknown
  Description of Unknown: Integrase B8009 sequence
  PTHR30461:SF3,SM00857,IPR006118,IPR036162,PF13408, IPR025827,PS51737,G3DSA:3.40.50.1390,PS00397,IPR006119, IPR011109,SSF53041,PTHR30461,Coil, PS51736,cd00338,PF00239
MPSKIERCAIYIRVSTAEQMMHGKSLEAQKQYLTNYAKEHNMTVAGVYADEGKTARKELKKRKAIHSLLEDVKAGKIDVIIFWRIDRWFRNLSDFYKVQEVLDDNNVHWISTSEPGINMETRDGRLQLNVVLSIGQNEVDTTSERIKFVNEASIRQGKLIFGDVNMGYGYKSGIIGGVKRMVKDPDREDAVNAFYRFFFKHHAKGLSMRYIQENYDPDFTWANMRTLLSSEFYKGTYRGIPYCPAYLTESEWNNLQEIQNANVKRAPSGRIYLFSGMINCPICGRRLSARGGSSIINRKTGAKKVYCYYRCNKTFIDHKCTYKHMVSQNLIEQYLIDHLEYEYNKFKIKCEKIEKEQEKKKKIQTPEKLQKELERLNLLFQKGRIEWDYYSKEYDRIENELNELLNAAPELEPDYAYLEELLNTDFRTMYYNLTQENRRAFWHSIIREIHLNTDHTVDSVDFL

SEQ ID NO: 8009 - protein, 463 aa, Unknown
  Description of Unknown: Integrase B8010 sequence
  PTHR30461:SF3,IPR036162,PS51737,IPR011109,PTHR30461, PS00397,PF00239,G3DSA:1.10.10.2600,IPR006119,SSF53041, cd00338,SM00857,IPR025827,IPR038109,PS51736, IPR006118,PF13408,G3DSA:3.40.50.1390,Coil
MRRKTTAPVEKILLRVAIYIRVSTDKQVKDGDSMRDQLATGQKYIDSHENMILVDTYIDDGISGQKLKRDDFQRLLDDVRAGRIDLIIFTRLDRWFRNLRHYLNTQDILDKHGVSWTAIEQPYFDTSTPHGRAFVNNSMIWAELEAQNDSDRILDVFDDKVDNGEVLSGSTPIGYKIESKHLVPDDDAPTAVSIFQYYRKSGNLSMTLRYMESEFGLVRSAASLKNMLTNTKYIGEFRDNKNYCPAIIDRDLFFDVQRLLDINIKDGKKHDYIFGGLVVCDDCDHIMSGCQQRSAGRIRADGTRTVYKYSVYRCRQGVNLHRCPNRKLVFEKTLESMLLDRVRPELENYIAEYEVANLPALRTDAKRRSVESKMQKLKDLYLNDLITMDEFKLDREKLLMQLEKINAEDSRPIKDLSYLKSFLKMDFESVYDSLSIPERRELWRSIVKEIRVDHDKNIHIIFL

SEQ ID NO: 8010 - protein, 463 aa, Unknown
  Description of Unknown: Integrase B8011 sequence
  PTHR30461:SF3,SM00857,IPR006118,IPR036162,PF13408, PS51737,G3DSA:3.40.50.1390,Coil,IPR025827,IPR006119, IPR011109,SSF53041,PTHR30461,PS00397,PS51736, cd00338,PF00239
MPSKIERCAIYIRVSTAEQMMHGKSLEAQKQYLTNYAKEHNMTVAGVYADEGKTARKELKKRKAIHSLLEDVKAGKIDVIIFWRIDRWFRNLSDFYKVQEVLDDNNVRWISTSEPGINMETRDGRLQLNVVLSIGQNEVDTTSERIKFVNEASIRQGKLIFGDVNMGYGYKSGIIDGIKRMVKDPDREDTVNAFYRFFFKHHAKGLSMRYIQENYDPDFTWANMRTLLSSEFYKGTYRGIPYCPAYLTESEWNNLQEIQNANVKRAPSGRIYLFSGMINCPICGRRLSARGGSSIINRKTGAKKVYCYYRCNKAFIDHKCTYKHMVSQNLIEQYLIDHLEYEYNKFKIKCEKIEKEQEKKKKVQTPEKLQKELERLNLLFQKGRIEWDYYSKEYDRIENELNELLNAAPELEPDYAYLEELLNTDFRTMYYNLTQENRRAFWHSIIREIHLNTDHTVDSVDFL

SEQ ID NO: 8011 - protein, 463 aa, Unknown
  Description of Unknown: Integrase B8012 sequence
  PTHR30461:SF3,SM00857,IPR006118,IPR036162,PF13408, PS51737,IPR025827,Coil,G3DSA:3.40.50.1390,IPR006119, IPR011109,SSF53041,PTHR30461,PS00397,PS51736, cd00338,PF00239
MPSKIERCAIYIRVSTAEQMMHGKSLEAQKQYLTNYAKEHNMTVAGVYADEGKTARKELKKRKAIHSLLEDVKAGKIDVIIFWRIDRWFRNLSDFYKVQEVLDDNNVRWISTSEPGINMETRDGRLQLNVVLSIGQNEVDTTSERIKFVNEASIRQGKLIFGDVNMGYGYKSGIIDGVKRMVKDPDREDTVNAFYRFFFKHHAKGLSMRYIQENYDPDFTWANMRTLLSSEFYKGTYRGIPYCPAYLTESEWNNLQEIQNANVKRAPSGRIYLFSGMINCPICGRRLSARGGSSIINRKTGAKKVYCYYRCNKAFIDHKCSYRHMVSQNLIERYLIDHLEYEYNKFKIKCEKIEKEQEKKKKIQTPEKLQKELERLNLLFQKGRIEWDYYSKEYDRIENELNELLNAAPELEPDYAYLEELLNTDFRTMYYNLTQENRRAFWHSIIREIHLNTDHTIDSVDFL

SEQ ID NO: 8012 - protein, 463 aa, Unknown
  Description of Unknown: Integrase B8013 sequence
  cd00338,SM00857,G3DSA:1.10.10.2600,IPR036162,PS51737, G3DSA:3.40.50.1390,IPR006119,IPR038109,PF07508,SSF53041, IPR011109,PTHR30461,PS51736,Coil,PF00239
MNNVAIYCRESTEKQNIDTLVSLCEKEAKKLGYSNYKIYKDIKSGYSKDREEYTKLKEDIKEEKINILILYESSRITRDEIEHHMFYALLKLYNVRVYTLNHGWIDLTNEDDCFLAGLLNLLDAREGRKTAKRVKDRMEEMAKNGFWTGGPAPFGYKLVDKKLIINPEEAEKVKEIFRLFLEGKTRFYLSALFGFECKRVMRMLVNPVYNGKLKFRQIEFKNKKRIEHKQFDVLPGIHEPIIDDYTFKLVQDKVKSIKRETNKGSYIFKDLLICTCGEKMYLHKKKYFYKRDTPTITNVYICNSKDRKIRNCSLSIIHENELFINVIESLEELILSFNVDDIDTNKNDFEKQLKYYKKELSSLSAKEEVLARQLMNGKLSENLYEKFIVELSENKEFIENKINSLTKVINSQEAKKNNKTILKKYFNKIKKEKDPEKLNAFFKLIIDSIEFINDYRFYIHLKF

SEQ ID NO: 8013 - protein, 463 aa, Unknown
  Description of Unknown: Integrase B8014 sequence
  PTHR30461:SF3,SM00857,IPR006118,IPR036162,PF13408, IPR025827,G3DSA:3.40.50.1390,PS51737,PS00397,IPR006119, IPR011109,SSF53041,PTHR30461,Coil, PS51736,cd00338,PF00239
MPSKIERCAIYIRVSTAEQMMHGKSLEAQKQYLTNYAKEHNMTVAGVYADEGKTARKELKKRKAIHSLLEDVKAGKIDVIIFWRIDRWFRNLSDFYKVQEVLDDNNVHWISTSEPGINMETRDGRLQLNVVLSIGQNEVDTTSERIKFVNEASIRQGKLIFGDVNMGYGYKSGIIDGVKRMVKDPDREDTVNAFYRFFFKHHAKGLSMRYIQENYDPDFTWANMRTLLSSEFYKGTYRGIPYCPAYLTESEWNNLQEIQNVNVKRAPSGRIYLFSGMINCPICGRRLSARGGSSIINRKTGAKKVYCYYRCNKAFIDHKCSYRHMVSQNLIERYLIDHLEYEYNKFKIKCEKIEKEQEKKKKVQTPEKLQKELERLNLLFQKGRIEWDYYSKEYDRIENELNELLNVAPELEPDYAYLEELLNTDFRTMYYNLTQENRRAFWHSIIREIHLNTDHTVDSVDFL

SEQ ID NO: 8014 - protein, 463 aa, Unknown
  Description of Unknown: Integrase B8015 sequence
  PTHR30461:SF3,cd00338,SM00857,IPR036162,PF13408, PS51737,G3DSA:3.40.50.1390,IPR025827,IPR006119,SSF53041, IPR011109,PTHR30461,PS51736,Coil,PF00239
MSFFTPNPQLFGLRVVKYIRCSHDDQVLHGDTLEAQDLILEDFIKVNRMILVDTFIDEALTARKKFNKRKEFVRLLSGVKAHAFDLIIFTKLDRWFRNIGDYHKIQEILEANGVQWKAVTENYDTTTTNGRLHINIRLSVAQDECDRDSDRIKDVFAYKLKNKTYVSGSLPRGLKLDAEKHVIIDPEWNCFALDMFDRFEATCSKRDTQLFLQDKYNIRVCYDTVARYLKNPLFKGQYRDDPDFCPATISPERFERIQKLAIRNVRIRHTQQFYIFSGLLICSSCNHYMCGTVTYRRMADGSEKMYKNYRCNFKAQSKLCDRSKTYREADLEEYMLAHIRPALSDYIAKYEVTAASTVQKNPVTEIAKIERKMKKLYDLFMDDLIDKEAYRSEYDKFKAQIEELQKCSTAVPVRSLDSVKKLLSEDWEAVYHTFSDQEKNTFWKSFVESVLVYEGGSMDIRFL

SEQ ID NO: 8015 - protein, 463 aa, Unknown
  Description of Unknown: Integrase B8016 sequence
  cd03768,PTHR30461:SF3,SM00857,G3DSA:1.10.10.2600, IPR036162,PS51737,G3DSA:3.40.50.1390,IPR006119, IPR038109,PF07508,IPR011109,SSF53041, PTHR30461,PS51736,Coil,PF00239
MKVAIYTRVSTAEQNLNGFSIHEQRKKLISFCEINEWKEYEVFTDGGFSGGSTKRPALQDLFNRLTQFDLVLVYKLDRLTRNVRDLLEMLERFEKYNVSFKSATEVFDTTTAIGKLFITIVGAMAEWERETIRERSLFGSRAAVESGKYIREQPFVYDNIEGKLVPNENTKYIEYIVKKFKEGNSANEIARLLNSKKKPSKIKNWNRQTIIRLIKNPVLRGHTKFGDIFMENTHEPVLSDDDYHKVINAIENKTHKSKSKHNAIFRGVLKCPQCNGNLHLYAGTIRPKNGRSYNVRRYTCDKCHRDKYSRNISFNESEIENKFIEELEKMDLTRFEIHKPKKVEINIESDKKRIKEQRTKLLRAYTMGYVEEEEFKIIMNETQRQLEDIKREENKETVQEIDEKQIKSIGNFIIEGWKTLTIEEKEKLILSSVDKIDIEFIPREKNNNSNTNTVNIKKVHFIF

SEQ ID NO: 8016 - protein, 463 aa, Unknown
  Description of Unknown: Integrase B8017 sequence
  PTHR30461:SF3,SM00857,IPR006118,IPR036162,PF13408, PS51737,G3DSA:3.40.50.1390,Coil,IPR025827,IPR006119, IPR011109,SSF53041,PTHR30461,PS00397,PS51736, cd00338,PF00239
MPSKIERCAIYIRVSTAEQMMHGKSLEAQKQYLTNYAKEHNMTVAGVYADEGKTARKELKKRKAIHSLLEDVKAGKIDVIIFWRIDRWFRNLSDFYKVQEVLDNNNVRWISTSEPGINMETRDGRLQLNVVLSIGQNEVDTTSERIKFVNEASIRQGKLIFGDVNMGYGYKSGIIDGVKRMVKDPDREDTVNAFYRFFFKHHAKGLSMRYIQENYDPDFTWANMRTLLSSEFYKGTYRGIPYCPAYLTESEWNNLQEIQNANVKRAPSGRIYLFSGMINCPICGRRLSARGGSSIINRKTGAKKVYCYYRCNKTFIDHKCTYKHMVSQNLIEQYLIEHLEYEYNKFKIKCEKIEKEQEKKKKIQTPEKLQKELERLNLLFQKGRIEWDYYSKEYDRIENELNELLNAAPELEPDYAYLEELLNTDFRTMYYNLTQENRRAFWHSIIREIHLNTDHTVDSVDFL

SEQ ID NO: 8017 - protein, 463 aa, Unknown
  Description of Unknown: Integrase B8018 sequence
  PTHR30461:SF3,cd00338,SM00857,IPR036162,PF13408, IPR025827,PS51737,G3DSA:3.40.50.1390,IPR006119,IPR011109, SSF53041,PTHR30461,PS51736,Coil,PF00239
MSFFTPNPQLFGLRVVKYIRCSHDDQVLHGDTLEAQDLILEDFIKVNRMILVDTFIDEALTARKKFNKRKEFVRLLDGVKAHSFDLIIFTKLDRWFRNIGDYHKIQEILEANGVQWKAVTENYDTTTTNGRLHINIRLSVAQDECDRDSDRIKDVFAYKLKNKTYVSGSLPRGLKLDAEKHVIIDPEWNCFALDMFDRFEATCSKRDTQLFLQEKYNIRVCYDTVARYLKNPLFKGQYRDDPDFCPATISPERFERIQKLAIRNVRIRHTQQFYIFSGLLICSSCNHYMCGTVTYRRMADGSEKMYKNYRCNFKAQSKLCDRGKTYREADLEEYMLAHIRPALSDYIVKYEVTAASTVQKNPVTEIAKIERKMKKLYDLFMDDLIDKEAYRSEYDKFKAQIEELQKCSTAAPMRSLDSVKKLLSEDWEAVYHTFSDQEKNTFWKSFVESVLVYEDGSMDIRFL

SEQ ID NO: 8018 - protein, 463 aa, Unknown
  Description of Unknown: Integrase B8019 sequence
  PTHR30461:SF3,cd00338,SM00857,G3DSA:1.10.10.2600,IPR036162, PF13408,PS51737,G3DSA:3.40.50.1390,IPR025827,IPR006119, IPR038109,PF07508,IPR011109,SSF53041, PTHR30461,PS51736,Coil,PF00239
MFAGVYTDEGISGLNTRHREGFNRMIADALAGNIDLIVTKSVSRFARNTVDSLTTIRDLKSHGVEVYFEKENIWTFDGKGELLILIMSSLAQEESRSISDNVTWGQRKHFADGKVNMPYGQFLGYRKGPDGLPEIDPEEAETVRFIYRLFMGGKTVNAIAKILTEAGVPTPRKKARWQDKTVESILTNEKYSGDAVLQKSFTVDFLSKKMKKNEGEVPQYIVTDSHPGIIDKAEWELVQAEMAKRKAKGRSQNSLSPFSMKICCGECGSWYGSKIWHSTNKYRRVVWRCNGKYERQTGCKTPHLSEAQIKALFMQVLSKLHEQRETLIADCEALKGMLSDTSEIDGERARIAAEQSETETLAAALIQQNAMTAMNQSEFNRRYEEYVKKHDALSERLDKLDGKLEKRKQEIVVLNGFISDLTAMKELPVEFSGELWNAFVEKLTIHPDGGAEFLFRNGAVITE

SEQ ID NO: 8019 - protein, 463 aa, Unknown
  Description of Unknown: Integrase B8020 sequence
  PTHR30461:SF3,SM00857,IPR006118,IPR036162,PF13408, PS51737,G3DSA:3.40.50.1390,Coil,IPR025827,IPR006119, IPR011109,SSF53041,PTHR30461,PS00397,PS51736, cd00338,PF00239
MPSKIERCAIYIRVSTAEQMMHGKSLEAQKQYLTNYAKEHNMTVAGVYADEGKTARKELKKRKAIHSLLEDVKAGKIDVIIFWRIDRWFRNLSDFYKVQEVLDDNNVHWISTSEPGINMETRDGRLQLNVVLSIGQNEVDTTSERIKFVNEASIRQGKLIFGDVNMGYGYKSGIIDGVKRMVKDPDREDTVNAFYRFFFKHHAKGLSMRYIQENYDPDFTWANMRTLLSSEFYKGTYRGIPYCPAYLTESEWNNLQEIQNANVKRAPSGRIYLFSGMINCPICRRRLSARGGSSIINRKTGAKKVYCYYRCNKAFIDHKCTYKHMVSQNLIEQYLIDHLEYEYNKFKIKCEKIEKEQEKKKKIQTPEKLQKELERLNLLFQKGRIEWDYYSKEYDRIENELNELLNAAPELEPDYAYLEELLNTDFRTMYYNLTQENRRAFWHSIIREIHLNTDHTVDSVDFL

SEQ ID NO: 8020 - protein, 463 aa, Unknown
  Description of Unknown: Integrase B8021 sequence
  PTHR30461:SF3,SM00857,IPR036162,PF13408,PS51737, G3DSA:3.40.50.1390,IPR025827,IPR006119,IPR011109,SSF53041, PF00239,PTHR30461,PS51736,Coil,cd00338
MNTYFHPQPELYGLRVVKYIRCSHEGQVLHGDTLEAQDTLLNEFIETNHMVLVDTFVDEALTARKKFTKRKEFVRLLDGVRAHAFDMILFTKLDRWFRNIGDYHKIQEILDANSVQWKAITESYDTTTTNGRLHINIRLSVAQDECDRDSDRIKDVFAYKLKNKTYISGSLPRGLKLDAEKHVVIDPEWHQFAIDMFDHFESTCSKRGTQLFLQEKYGIRVCYDTVVRYLRNPLFMGQYRDDPDFCEKTISRERFERIQNLAIRNVRIRHTQQFYIFSGLLICSSCNHYMTGTVTYRTLADGREKTYKSYRCNFKAQSKLCDRSKHYREEYVEEYMLQHIRPALSSYVADFEVTAAAAAKKDPAVEIAKVERKMKKLYDLFMDDLIDKASYRNEYEKFQSQIDKLRSCPAAPVRNLDSIKKMLSDDWETVYHTFSDQEKNVFWKSFVQSITVHENGEMDIVFL

SEQ ID NO: 8021 - protein, 463 aa, Unknown
  Description of Unknown: Integrase B8022 sequence
  SM00857,G3DSA:1.10.10.2600,IPR036162,PF13408, PS51737,G3DSA:3.40.50.1390,IPR025827,IPR006119, IPR038109,SSF53041,IPR011109,PF00239, PTHR30461,Coil,cd00338
MSYIENESLCGLRVVKYIRCSHEGQVLHGDTLEAQHAILDDYIARNHLVLVDTFVDEALTARKKFTKRKEFVRLLDGVKRHDFDLILFTKLDRWFRNIADYHRIQEILDANNVQWKAVTESYDTTTTNGRLHINIRLSVAQDECDRDSDRIKDVFAFKLKNKTYLSGSLPRGLKLDAEKHVIIDDDWKEYALDMFQHYESTCSIRATLLYLRKKYNVTYGYCTVKNALKNPIYKGEYRDIQDFCPALIEPERFDHIQQLLYHNAHLHDGPYRSYIFSGLLICPFCHNHLYGANTSKVLASGVKKDYHYYKCYNTYKIPPCECRQHFLEPRIEEQMLSQVRAALSDYVTSYEVDSNQSSIEKSHAAEVAKIQKRLKKLYELYIDDLIDKEAYRTEYLELQDALSKIEAAPKPPQKDFSKLKELLSQDYESVYQTFSPSEKNVFWKSFIQSVVVYDSYRLDITFL

SEQ ID NO: 8022 - protein, 463 aa, Unknown
  Description of Unknown: Integrase B8023 sequence
  PTHR30461:SF3,cd00338,SM00857,IPR036162,PF13408, IPR025827,G3DSA:3.40.50.1390,PS51737,IPR006119,IPR011109, SSF53041,PTHR30461,PS51736,Coil,PF00239
MSFFTPNPQLFGLRVVKYIRCSHDDQVLHGDTLEAQDLILEDFIKVNRMILVDTFIDEALTARKRFNKRKEFVRLLNGVKAHDFDLIIFTKLDRWFRNIGDYHKIQEILEANGVQWKAVTENYDTTTTNGRLHINIRLSVAQDECDRDSDRIKDVFAYKLKNKTYVSGSLPRGLKLDAEKHVIIDPEWNCFALDMFDRFEATCSKRDTQLFLQEKYNIRVCYDTVARYLKNPLFKGQYRDDPDFCPATISPERFERIQKLAIRNVRIRHTQQFYIFSGLLICSSCNHYMCGTVTYRRMADGSEKMYKNYRCNFKAQSKLCDRGKTYREADLEEYMLAHIRPALSDYISKYEVTAASTVQKNPVTEIAKIERKMKKLYDLFMDDLIDKEAYRSEYDKFKAQIEELQKCSTAAPMRSLDSVKKLLSEDWEAVYHTFSDREKNTFWKSFVESVLVYEDGSMDIRFL

SEQ ID NO: 8023 - protein, 463 aa, Unknown
  Description of Unknown: Integrase B8024 sequence
  PTHR30461:SF3,SM00857,IPR006118,IPR036162,PS51737, PS00397,G3DSA:3.40.50.1390,IPR006119,IPR011109,SSF53041, PTHR30461,Coil,PS51736,cd00338, PF00239
MTTKIERCAIYIRVSTTEQMMHGKSLEAQKEYLTNYAREHNMAVVGIYADEGKTARKELKKRKAIHSLLQDVEAGKIDVIIFWRIDRWFRNLSDFYKVQDILDSHNVRWISTSEPGINMETRDGRLQLNVVLSIGQNEVDTTSERIKFVNESSIRSGKLIFGDANMGYGYKSGIVDGQKRMVKDPDREHVVDAFYKYFFKHQNKCATLRYIQETYDPDFSFGIMRTLLSSEFYKGTYRGFPYCPAYLTEDEWNKLQKIQKRNVKATPSGRIYLFAGLIRCPVCGQLLCGTGCSSIINRKTGAKRTYCYYRCNRAMIDHICSYRHRLSQNLVENYLLDNLEDEYKNYKVKCEKIEKEKEKQKKKQSPEKLRKELDRLNFLFQKGRIEWDYYNEEYSRVESELNDLQNSLPEPAPNYSYLEELLNTDFRTMYDQLSQENRRAFWRSIIQEIHVNEDHAITSVDFL

SEQ ID NO: 8024 - protein, 463 aa, Unknown
  Description of Unknown: Integrase B8025 sequence
  PTHR30461:SF3,IPR036162,PS51737,IPR011109,PTHR30461, PS00397,PF00239,G3DSA:1.10.10.2600,IPR006119,SSF53041, cd00338,SM00857,IPR025827,IPR038109,PS51736, IPR006118,PF13408,G3DSA:3.40.50.1390,Coil
MRRKTTAPVEKILLRVAIYIRVSTDKQVKDGDSMRDQLATGQKYIDSHENMILVDTYIDDGISGQKLKRDDFQRLIDDVRAGRIDLIIFTRLDRWFRNLRHYLNTQDILDKHGVSWTAIEQPYFDTSTPHGRAFVNNSMIWAELEAQNDSDRILGVFDDKVDNGEVLSGSTPLGYKIVNKHLVPDDDAPTAVAIFQYYRKTGNLSMTLRYMESEFGLVRSAASLKNMLTNTKYIGEFRDNKNYCPAIIDRDLFFDVQRLLKINIKSGKKHDYIFSGLVVCDDCDHIMSGCQQRAGGRVRADGTRIVYKYSVYRCRQGVNLHRCPNRKLVFETTLEKMLLERIRPELENYIAEYEVANLPALRTDAKRRSVEGKMQKLKDLYLNDLITMDEFKLDREKLLMQLEKINAEDSRPVKDLSYLKNFLKMDFESVYDSLSIPERRELWRSIVKEIRVDHGKNIHIIFL

SEQ ID NO: 8025 - protein, 463 aa, Unknown
  Description of Unknown: Integrase B8026 sequence
  PTHR30461:SF3,SM00857,IPR006118,IPR036162,PF13408, PS51737,PS00397,G3DSA:3.40.50.1390,IPR025827,IPR006119, IPR011109,SSF53041,PTHR30461,Coil,PS51736, cd00338,PF00239
MPSKIERCAIYIRVSTAEQMMHGKSLEAQKQYLTNYAKEHNMTVAGVYADEGKTARKELKKRKAIHSLLEDVKAGKIDVIIFWRIDRWFRNLSDFYKVQEVLDDNNVHWISTSEPGINMETRDGRLQLNVVLSIGQNEVDTTSERIKFVNEASIRQGKLIFGDVNMGYGYKSGIIDGVKRMVKDPDREDTVNAFYRFFFKHHAKGLSMRYIQENYDPDFTWANMRTLLSSEFYKGTYRGIPYCPAYLTESEWNNLQEIQNANVKRAPSGRIYLFSGMINCPICGRRLSARGGSSIINRKTGAKKVYCYYRCNKAFIDHKCSYRHMVSQNLIEQYLIDHLEYEYNKFKIKCEKIEKEQEKKKKVQTPEKLQKELERLNLLFQKGRIEWDYYSKEYDRIENELNELLNTAPELEPDYAYLEELLNTDFRTMYYNLTQENRRAFWHSIIREIHLNTDHTVDSVDFL

SEQ ID NO: 8026 - protein, 463 aa, Unknown
  Description of Unknown: Integrase B8027 sequence
  PTHR30461:SF3,cd00338,SM00857,IPR036162,PF13408, IPR025827,PS51737,G3DSA:3.40.50.1390,IPR006119,IPR011109, SSF53041,PTHR30461,PS51736,Coil,PF00239
MSFFTPNPQLFGLRVVKYIRCSHDDQVLHGDTLEAQDLILEDFIKVNRMILVDTFIDEALTARKKFNKRKEFVRLLDGVKAHAFDLIIFTKLDRWFRNIGDYHKIQEILEANGVQWKAVTENYDTTTTNGRLHINIRLSVAQDECDRDSDRIKDVFAYKLKNKTYVSGSLPRGLKLDAEKHVIIDPEWNCFALDMFDRFEATCSKRDTQLFLQEKYNIRVCYDTVARYLKNPLFKGQYRDDPDFCPATISPERFERIQKLAIRNVRIRHTQQFYIFSGLLICSSCNHYMCGTVTYRRMADGSEKMYKNYRCNFKAQSKLCDRGKTYREADLEEYMLAHIRPALSDYIAKYEVTAASTVQKNPVTEIAKIERKMKKLYDLFMDDLIDKEAYRSEYDKFKAQIEELQKCSTAAPMRSLDSVKKLLSEDWEAVYHTFSDQEKNTFWKSFVESVLVYEDGSMDVRFL

SEQ ID NO: 8027 - protein, 463 aa, Unknown
  Description of Unknown: Integrase B8028 sequence
  PTHR30461:SF3,IPR036162,PS51737,IPR011109,PTHR30461, PS00397,PF00239,G3DSA:1.10.10.2600,IPR006119,SSF53041, cd00338,SM00857,IPR025827,IPR038109, PS51736,IPR006118,PF13408,G3DSA:3.40.50.1390,Coil
MRRKTTAPVEKILLRVAIYIRVSTDKQVKDGDSMRDQLATGQKYIDSHENMILVDTYIDDGISGQKLKRDDFQRLIDDVRAGRIDLIIFTRLDRWFRNLRHYLNTQDILDKHGVSWTAIEQPYFDTSTPHGRAFVNNSMIWAELEAQNDSDRILGVFDDKVDNGEVLSGSTPLGYTIVNKHLVPDDDAPTAVAIFQYYRKTGNLSMTLRYMESEFGLVRSAASLKNMLTNTKYIGEFRDNKNYCPAIIDRDLFFDVQRLLKINIKSGKKHDYIFSGLVVCDDCDHIMSGCQQRAGGRVRSDGTRIVYKYSVYRCRQGVNLHRCPNRKLVFETTLEKMLLERIRPELENYIAEYEVANLPALRTDAKRRSVEGKMQKLKDLYLNDLITMDEFKLDREKLLMQLEKINAEDSRPVKDLSYLKNFLKMDFESVYDSLSIPERRELWRSIVKEIRVDHDKNIHIIFL

SEQ ID NO: 8028 - protein, 462 aa, Unknown
  Description of Unknown: Integrase B8029 sequence
  PTHR30461:SF3,SM00857,IPR006118,IPR036162,PF13408, IPR025827,G3DSA:3.40.50.1390,PS51737,Coil,IPR006119, SSF53041,IPR011109,PTHR30461,PS00397,PS51736, cd00338,PF00239
MMKLQRCAIYIRVSTTEQMMHGKSLESQKEYLINYAKEHNMAVVGVYADEGKTARKELKKRKAIHSLLEDVKAGKIDVIIFWRLDRWFRNLSDFYKVQDVLDSHNVRWISTSEPGINMGTRDGRLQLNVVLSIGQNEVDTTSERIKFVNESSIRSGKLIFGDANMGYGYKSGIVDGQKRMVKDPDREHVVDAFYKYFFKHQNKCATLRYIQETYDPDFSFGIMRTLLSSEFYKGTYRGFPYCPAYLTEDEWNKLQKIQKRNVKATPSGRIYLFAGMIRCPVCGQLLCGTGCSSIINRKTGAKRTYCYYRCNRATIDHICSYRHRLSQNLIENYLLDNLEDEYKNYKVNCEKIEKEKEKQKKKQSPEKLRKELDRLNFLFQKGRIDWDYYNEEYGRVESELNDLQSALPEPVTNYGYLEELLDTDFRTMYDQLSQENRRAFWRSIIKEIHVNEDHAITSVDFL

SEQ ID NO: 8029 - protein, 462 aa, Unknown
  Description of Unknown: Integrase B8030 sequence
  PTHR30461:SF3,cd00338,SM00857,IPR036162,PF13408, PS51737,IPR025827,G3DSA:3.40.50.1390,IPR006119,SSF53041, IPR011109,PTHR30461,PS51736,Coil,PF00239
MSYFNFNPDLVGVRVVKYIRCSHEGQVLHGDTLEAQNLILDEFIAANKMVLVDTFIDEAMTARKKYTKRKEFVRLLDGVRSHNFDLIIFTKLDRWFRNIGDYHKIQEILDANGVQWKAVTENYDTTTTNGRLHINIRLSVAQDECDRDSDRIKDVFAYKLKNKTFISGALPRGLMLDAEKHVVHDPEWKQWALDMFDHFESCCSKRDTLLFLMDKYNMYLCYDTIVRSLKNPLYKGFYRGDPDFCEPLIDPARFDRIQNLAIRNVRVRRSRQTYVFCGLLVCASCEHYMTGVATYHTLSGGKEKMYKRYRCNMHTSSHSCPHSKMYSEEMLEQYMISNVCSAFSCYIAEYAVAAASAKKKNTAAEIAKIERKLKKLYDLFMDDLIDKEAYKSEYDSFNKQLNELKSIPFAPANDYKKVQELLSGDWSAVYTSFNNNEKNAFWKSFIDKIVIHEDGKIDIIFL

SEQ ID NO: 8030 - protein, 462 aa, Unknown
  Description of Unknown: Integrase B8031 sequence
  PTHR30461:SF3,cd00338,SM00857,IPR036162,PF13408, PS51737,IPR025827,G3DSA:3.40.50.1390,IPR006119,IPR011109, SSF53041,PTHR30461,PS51736,Coil, PF00239
MSFFTPNPQLFGLRVVKYIRCSHDDQVLHGDTLEAQDLILEDFIKVNRMILVDTFIDEALTARKRFNKRKEFVRLLNGVKAHDFDLIIFTKLDRWFRNIGDYHKIQEILEANGVQWKAVTENYDTTTTNGRLHINIRLSVAQDECDRDSDRIKDVFAYKLKNKTYLSGSLPRGLKLDAEKHVIIDPEWNCFALDMFDHFEATCSKRDTQLFLQDKYSIRVCYDTIARYLKNPIFKGQYRDDPDFCPATISPERFDRIQKLAIRNVRIRHTQQFYIFSGLLICSSCNHIMTGTVTYRKMADGTEKAYKSYRCNFKAQSKLCDRGKTYREEYVEEYMLNHIRPALSDYVAKYEVTAASAVQKNPVEEMSKIERKIKKLYDLFMDDLIDKDAYRSEYDKFKKQIKELQKCPAAPVRNLDSVRKLLNDDWEAVYNTFSNQEKNVFWKSFVESVLVHEDGSMDIHFL

SEQ ID NO: 8031 - protein, 462 aa, Unknown
  Description of Unknown: Integrase B8032 sequence
  PTHR30461:SF3,cd00338,SM00857,IPR036162,PF13408, IPR025827,G3DSA:3.40.50.1390,IPR006119,SSF53041,PTHR30461, PS51736,Coil,PF00239
MSFFTPNPQLFGLRVVKYIRCSHDDQVLHGDTLEAQDLILEDFIKVNRMILVDTFIDEALTARKKFNKRKEFVRLLSGVKAHAFDLIIFTKLDRWFRNIGDYHKIQEILEANGVQWKAVTENYDTTTTNGRLHINIRLSVAQDECDRDSDRIKDVFAYKLKNKTYLSGSLPRGLKLDAEKHVIIDPEWNCFALDMFDHFEATCSKRDTQLFLQDKYNIRVCYDTVARYLKNPIFKGQYRNDPDFCPATISPERFDRIQNLAIRNVRIRHTQQFYIFSGLLICSSCNHIMTGTVTYRKMADGTEKAYKSYRCNFRAQSKLCDRGRSYREEYVEEYMLNHIRSALSDYVAKYEVTAASAVRKNPVEEISKIERKIKKLYDLFMDDLIDKNAYRSEYDKFKKQIEELQRCPAAPVRNLDSVRKLLNENWEAVYGTFSNQEKNVFWKSFVESVLVYEDGSMDIHFL

SEQ ID NO: 8032 - protein, 462 aa, Unknown
  Description of Unknown: Integrase B8033 sequence
  PTHR30461:SF3,cd00338,SM00857,IPR036162,PF13408,PS51737, G3DSA:3.40.50.1390,IPR025827,IPR006119,IPR011109,SSF53041 ,PTHR30461,PS51736,Coil,PF00239
MLYSQSIPELYGMRVCKYIRCSHEGQVADGETLEAQNAILDDFILKNHLVLVDTFVDEALTARKKYTKRKEFVRLLDGVQRHDFDLIIFTKLDRWFRNIADYHRIQEILEANGVQWKAVTESYDTTTTNGRLHINIRLSVAQDECDRDSDRIKDVFAYKLQKKTYLSGSLPRGLKLDPEKHVIIDEEWKQFALDMFDHFEATNSKRGTLMYLKEKYGLPRLCHDTIVRNLRNPLYKGEYRGIKDFCPALIDPERFDRIQLLAKRDVRNSRTRTYIFNGLLVCSECGHNLTCQTTVRKLADGSRSEYRAYRCNQHYSMACCSRNKSYREEYVEEYMLANVRSALEGYVAEYEISNTAPAAKNPQAEVQRIKSKLKKLYDLFMDDLVDKEMYKTEYAVLQAQLQEATAAAAAPHRSMDDLKEILASGWEELYQTFNYQEKAAFWKSFVDKIIVYEDGSMDILFL

SEQ ID NO: 8033 - protein, 462 aa, Unknown
  Description of Unknown: Integrase B8034 sequence
  PTHR30461:SF3,SM00857,IPR006118,IPR036162,PS51737, G3DSA:3.40.50.1390,Coil,IPR006119,SSF53041,IPR011109, PTHR30461,PS00397,PS51736,cd00338,PF00239
MMKLQRCAIYIRVSTTEQMMHGKSLESQKEYLINYAKEHNMAVVGVYADEGKTARKELKKRKAIHSLLEDVKAGKIDVIIFWRIDRWFRNLSDFYKVQDVLDSHNVRWISTSEPGINMETRDGRLQLNVVLSIGQNEVDTTSERIKFVNESSIRSGKLIFGDANMGYGYKSGIVDGQKRMVKDPDREHVVDAFYKYFFKHQNKCATLRYIQETYDPDFSFGIMRTLLSSEFYKGTYRGFPYCPAYLTEDEWSKLQKIQKRNVKATPSGRIYLFAGMIRCPVCGQLLCGTGCSSIINRKTGAKRTYCYYRCNRAMIDHICSYRHRLSQNLVENYLLDNLENEYKNYKVKCEKIEKEKEKQKKKQSPEKLRKELDRLNFLFQKGRIDWDYYNEEYGRVESELNDLQSTLPEPVTNYGYLEELLDTDFRTMYDQLSQENRRTFWRSIIQEIHVDEDHAIASVDFL

SEQ ID NO: 8034 - protein, 462 aa, Unknown
  Description of Unknown: Integrase B8035 sequence
  PTHR30461:SF3,cd00338,SM00857,IPR036162,PF13408, IPR025827,G3DSA:3.40.50.1390,PS51737,IPR006119,SSF53041, IPR011109,PTHR30461,PS51736,Coil, PF00239
MSFFTPNPQLFGLRVVKYIRCSHDDQVLHGDTLEAQDLILEDFIKVNRMILVDTFIDEALTARKKFNKRKEFVRLLSGVKAHAFDLIIFTKLDRWFRNIGDYHKIQEILEANGVQWKAVTENYDTTTTNGRLHINIRLSVAQDECDRDSDRIKDVFAYKLKNKTYVSGSLPRGLKLDAEKHVIIDPEWNCFALDMFDRFEATCSKRDTQLFLQDKYNIRVCYDTVARYLKNPLFKGQYRDDPDFCPATISPERFERIQKLAIRNVRIRHTQQFYIFSGLLICSSCNHIMTGTVTYRRMADGAEKAYKSYRCNFKAQSKLCDRGKTYREEYVEEYMLNHIRPALSDYVAKYEVTAASAVQKNPVEEMSKIERKIKKLYDLFMDDLIDKDTYRSEYDKFKKQIEELQKCPAAPVRNLDSVRKLLNDDWEAVYNTFSNQEKNVFWKSFVESVLVHEDGSMDIHFL

SEQ ID NO: 8035 - protein, 462 aa, Unknown
  Description of Unknown: Integrase B8036 sequence
  PTHR30461:SF3,SM00857,IPR006118,IPR036162,PF13408, IPR025827,G3DSA:3.40.50.1390,PS51737,Coil,IPR006119, SSF53041,IPR011109,PTHR30461,PS00397,PS51736, cd00338,PF00239
MMKFQRCAIYIRVSTTEQMMHGKSLESQKEYLINYAKEHNMAVVGVYADEGKTARKELKKRKAIHSLLEDVKAGKIDVIIFWRIDRWFRNLSDFYKVQDILDSHNVRWISTSEPGINMETRDGRLQLNVVLSIGQNEVDTTSERIKFVNEASIRNGKLIFGDVNMGYGYKSGVVDGQKRMIKDPDREHVVDAFYKYFFKHQNKCATLRYIQETYDPDFSFGIMRTLLSSEFYKGTYRGFPYCPAYLTEDEWSTLQKIQKRNVKATPSGRIYLFAGLIRCPVCGQKLCGTGCSSIINRKTGAKRTYCYYRCNRAMIDHICSYRHKLSQNLVENYLLDNLENEYKNYKVKCEKIEKEKEKQKKKQSPEKLRKELDRLNFLFQKGRIDWDYYNEEYGRVESELNDLQSTLPEPVTNYGYLEELLDTDFRTMYDQLSQENRRAFWRSIIQEIHVNEDHAIASVDFL

SEQ ID NO: 8036 - protein, 462 aa, Unknown
  Description of Unknown: Integrase B8037 sequence
  PTHR30461:SF3,IPR036162,PS51737,IPR011109,PTHR30461, PS00397,PF00239,G3DSA:1.10.10.2600,IPR006119,SSF53041, cd00338,SM00857,IPR025827,IPR038109,PS51736, IPR006118,PF13408,G3DSA:3.40.50.1390,Coil
MKRQTAKLNDKLLLRVAIYIRVSTDQQAQDGDSVRDQLATGQKYIENHENMILADTYVDDGISGQKVKRDDFQRLLNDVRAGSIDLIIFTRLDRWFRNLRHYLNTQDVLDKNGVSWTATEQPYFDTSTPHGRAFVNNSMIWAELEAQNDSDRILSVFDDKVDNSEVLSGSTPLGYRIENKHLVPDDDAPTAAAIFEHYRANGNLSMTLRYMENEFGLVRSAASLKNMLTNSKYIGEFRTNKNYCPAIIDRDVFEDVQRLLKINIKSGKKHDYIFSGLVVCDECEHVMSGGQQRSSRVLSNGTHIVYKYNSYRCRQGVNLHRCPNRKVILESTLEKLLLSRIRPELEHYIAEYEVANRPAIRTDAKRRNIEQKMQKLKELYLNDLITMDEFKVDREKLMLQLDKVKTDESHPVKDLSYLKDFLKTDFENIYGSLSVPEKRELWRSIIREIRVDQDKNVRIIFL

SEQ ID NO: 8037 - protein, 462 aa, Unknown
  Description of Unknown: Integrase B8038 sequence
  PTHR30461:SF3,IPR036162,PS51737,IPR011109,PTHR30461, PS00397,PF00239,G3DSA:1.10.10.2600,IPR006119,SSF53041, cd00338,SM00857,IPR025827,IPR038109,PS51736, IPR006118,PF13408,G3DSA:3.40.50.1390,PF07508,Coil
MKRQTAKLNDKLLLRVAIYIRVSTDQQAQDGDSVRDQLATGQKYIENHENMILADTYVDDGISGQKVKRDDFQRLMNDVRAGSIDLIIFTRLDRWFRNLRHYLNTQDVLDKNGVSWTATEQPYFDTSTPHGRAFVNNSMIWAELEAQNDSDRILSVFDDKVDNSEVLSGSTPLGYRIENKHLVPDNDAPTAAAIFEYYRSNGNLAMTLRYMETEFGLIRSSASLKNMLTNTKYIGEFRTNKNYCPAIIDRDLFDDVQRLLKINIKSGKTHDYIFSGLVVCEECEHTMSGCQQRNSRILADGTRVVYKYNSYRCRQGITLHRCPNHKVMLESTLEKILLARIRPELENYIAEYEVANRPAMRTDSKRRNLEHKMQKLKELYLNDLITMDEFKVDREKLMQQLDKIKSDDSQPMKDLSYLKNFLKTDFENIYVSLSIPEKRELWRSIIREIRVDHERNVRIIFL

SEQ ID NO: 8038 - protein, 462 aa, Unknown
  Description of Unknown: Integrase B8039 sequence
  PTHR30461:SF3,cd00338,SM00857,IPR036162,PF13408, IPR025827,PS51737,G3DSA:3.40.50.1390,IPR006119,IPR011109, SSF53041,PTHR30461,PS51736,Coil,PF00239
MSFFTPNPQLFGLRVVKYIRCSHDDQVLHGDTLEAQDLILEDFIKVNRMILVDTFIDEALTARKKFNKRKEFVRLLDGVKAHSFDLIIFTKLDRWFRNIGDYHKIQEILEANGVQWKAVTENYDTTTTNGRLHINIRLSVAQDECDRDSDRIKDVFAYKLKNKTYVSGSLPRGLKLDAEKHVIIDPEWNCFALDMFDRFEATCSKRDTQLFLQDKYNIRVCYDTVARYLKNPLFKGQYRDDPDFCPATISPERFERIQKLAIRNVRIRHTQQFYIFSGLLICSSCNHIMTGTVTYRRMADGTEKAYKSYRCNFKAQSKLCDRGKTYREEYVEEYMLNHIRPALSDYVAKYEVTAASAVQKNPVEEMSKIERKIKKLYDLFMDDLIDKDAYRSEYDKFKKQIEELQKCPAAPVRNLDSVRKLLNDDWEAVYNTFSNQEKNVFWKSFVESVLVHEDGSMDIHFL

SEQ ID NO: 8039 - protein, 462 aa, Unknown
  Description of Unknown: Integrase B8040 sequence
  PTHR30461:SF3,SM00857,IPR006118,IPR036162,PF13408, IPR025827,G3DSA:3.40.50.1390,IPR006119,SSF53041,PTHR30461, PS00397,PS51736,cd00338,PF00239
MKAEIDRIIRVALYIRVSTEEQALHGYSLQAQEDELLHFAKEKKYKVVGTYRDEGFSARKPALKRKVMQELLDDVRAGKIDRILFIKLDRWFRNVWEYHQVQAVLDENNVTWQATMEDYNTATADGRLKVNIMLSVAENEADRTSERIKFVFNSKVNRGEYPYGRVPIGYKAEIVDGLRKLVKDPELEAAITAFWEYALKYNSVRRAGFLVNAEYGTTRAAKEWLRTGKLEIYCGTFEGIPDFCPAYVSRENWKKIQDRKNLIKKAQAWNVYLFSGLITCPSCGHTLKATYKSYPNDRSIKYNAYRCNHGRDNTGCTYRSSVSEKKTEKYLLEHIREMIEEYISETEVGASSKKKKRIIKFDVAKAKEQLRRLNVAYFAGNMPDDEYTAMAAKLKEDIAKALESEYEAEKAPDIGKLRAFLDTDFEAIYRTLEKDDQRRLWRSIIKEIRVEDNHVVGVTFNV

SEQ ID NO: 8040 - protein, 462 aa, Unknown
  Description of Unknown: Integrase B8041 sequence
  PTHR30461:SF3,cd00338,SM00857,IPR036162,PF13408, IPR025827,G3DSA:3.40.50.1390,PS51737,IPR006119,IPR011109, SSF53041,PTHR30461,PS51736,Coil,PF00239
MSFFTPNPQLFGLRVVKYIRCSHDDQVLHGDTLEAQDLILEDFIKVNRMILVDTFIDEALTARKKFNKRKEFVRLLDGVKAHTFDLIIFTKLDRWFRNIGDYHKIQEILEANGVQWKAVTENYDTTTTNGRLHINIRLSVAQDECDRDSDRIKDVFAYKLKNKTYVSGSLPRGLKLDAEKHVIIDPEWNCFALDMFDRFEATCSKRDTQLFLQDKYNIRVCYDTVARYLKNPLFKGQYRDDPDFCPATISPERFERIQKLAIRNVRIRHTQQFYIFSGLLICSSCNHIMTGTVTYRKMADGTEKAYKSYRCNFRAQSKLCDRGRSYREEYVEEYMLNHIRPALSDYVAKYEVTAASAVRKNPVEEISKIERKIKKLYDLFMDDLIDKNAYRSEYDKFKKQIEELQKCPAAPVRNLDSVRKLLNENWEAVYGTFSNQEKNVFWKSFVESVLVYEDGSMDIHFL

SEQ ID NO: 8041 - protein, 462 aa, Unknown
  Description of Unknown: Integrase B8042 sequence
  PTHR30461:SF3,SM00857,G3DSA:1.10.10.2600,IPR036162,PF13408, PS51737,IPR025827,G3DSA:3.40.50.1390,IPR006119,IPR038109, PF07508,IPR011109,SSF53041,PF00239, PTHR30461,PS51736,Coil,cd00338
MIKKELSSAGPLRVALYIRVSGEEQKIKGLSLEAQQERLEEYARNQGWIVVGTYIDAAKTARKDMRKRSEFQKMINSVKRDEIDLLLFCRLDRWFRSVADYYKIMEILQAHHCDWKTTDEEYDTSTANGRLYINVKLSIAQNEADICSERISVVFDSKVQHGTVVSGNCPFGYIVNGEKRLAIDPDAAAIVRDAFNYYESSVSQRGTIRHIRETYGVNWCDATFRRMLSERLYTGVYDSNKRFNENFCDPIIDAAQFDRVQKLLKKNARFSPAGNIYIFTSILKCAECLHNLSGCRTRSSNRYYYYYRCNQHLQRGRCPHNNSVREDYIESWLFEHLQEELERCKLEWEIRSAERKKKNRLNDKAVLKRKLTKLKELYMDDLINIEEYKKDYQIYTAALQQIPEEMPEETPPDFSAVERMLQADFRNIYDSLTREEKRTLWRSVISEIRVDRDNNVTGIIFG

SEQ ID NO: 8042 - protein, 462 aa, Unknown
  Description of Unknown: Integrase B8043 sequence
  PTHR30461:SF3,SM00857,IPR006118,IPR036162,PS51737, G3DSA:3.40.50.1390,Coil,IPR006119,IPR011109,SSF53041, PTHR30461,PS00397,PS51736,cd00338,PF00239
MMKLQRCAIYIRVSTTEQMMHGKSLESQKEYLINYAKEHNMAVVGVYADEGKTARKELKKRKAIHSLLEDVKAGKIDVIIFWRLDRWFRNLSDFYRVQDILDSHNVRWISTSEPGINMETRDGRLQLNVVLSIGQNEVDTTSERIKFVNEASIRSGKLIFGDVNMGYGYKSGIVDGQKRMVKDPDREHVVDAFYKYFFKHQNKCATLRYIQETYDPDFSFGIMRTLLSSEFYKGTYRGFPYCPAYLTEDEWNKLQKIQKRNVKATPSGRIYLFAGMIRCPVCGQLLCGTGCSSIINRKTGAKRTYCYYRCNRAMIDHICSYRHRLSQNLVETYLLDNLENEYKNYKVKCEKIEKEKEKQKKKQSPEKLRKELDRLNFLFQKGRIDWDYYNEEYGRVESELNDLQSALPEPVTNYGYLEELLDTDFRTMYDQLSQENRRAFWRSIIQEIHVNEDHAITSVDFL

SEQ ID NO: 8043 - protein, 462 aa, Unknown
  Description of Unknown: Integrase B8044 sequence
  cd00338,SM00857,G3DSA:1.10.10.2600,IPR036162, PF13408,PS51737,G3DSA:3.40.50.1390,IPR025827, IPR006119,IPR038109,IPR011109,SSF53041, PTHR30461,PS51736,Coil,PF00239
MSYSRFNSHLVGMRVAKYIRCSHPGQVKEGETLEAQNQILDDFIATNKMTLVDTFVDEAMTARKKYTKRKEFMRLLDGVKAHKFDMIIFTKLDRWFRNIGDYHKIQEILEENHVNWKAVTEEYDTTTTNGRLYINIRLSVAQDESDRVSDRIKDVFSYKLKNKTYLTGNLPRGLKLDEKKHVVVDEKWRQYVDDMFDFFEACGSKRATLLYLNEKYDLNICYDTIYHNLQNPIYKGLYHDDPEFCEAIIEPARFDRLQKLARHNIKVYPRRQYYIFAGLLMCPLCNHYLRGNSTYRKLASGEKKVYKAYRCRQYSASYRCEYKSGHREDRVETYLLNHLDDALKDYIASYDIASTAALEISSTEKIAKVEKKLKKLYELFLDDLIDKDSYRAEYNKFQDEIAELKKMPVAPVVDLTEFKKLLRGDWREVYDTFTEQEKNAFFKSFIDYIYIYEDGSMDIHFL

SEQ ID NO: 8044 - protein, 462 aa, Unknown
  Description of Unknown: Integrase B8045 sequence
  PTHR30461:SF3,IPR036162,PS51737,IPR011109,PTHR30461, PS00397,PF00239,G3DSA:1.10.10.2600,IPR006119,SSF53041, SM00857,IPR025827,IPR038109,PS51736,cd03768, IPR006118,PF13408,G3DSA:3.40.50.1390,PF07508,Coil
MKKVACYVRVSTENQIENYSIDEQTERLEAYCKAKDYAIYKIYTDGGYSGGNMNRPALNAILADIEHKLFDTIIVYKLDRLSRSQKDTLMLIEDYFLANNIDFVSVSENFDTSTPFGRAMIGILSVFAQLEKDQITERFTMGRIGRSKSGLFHGGGNAPKGYNYINGHLEINTVEAEQVKEIFSLFLSGKSVNAIGKIMTKKYNDNLWKNAAQITNCIRNSIYIGKVKFKGVEYDGEHQPIISEEDFRRANELLESNDRIKFPAQKTPFRAGFLLSSLIYCKNCGARYSACHGYYKCYSRSKSTAKFVKDPSCKNKNWKIDELDALVTSEIHKIAIDDAYKKLFKKEEKANDTKSIKTEISKINAQINRLLDLYQISDIPIDTIKSKITALTDKKDKLNELLSENSRTDNYEAFQAALNKFEALDDTSGIEERRLLISTLIERITIDEESVNITWRIESKIV

SEQ ID NO: 8045 - protein, 462 aa, Unknown
  Description of Unknown: Integrase B8046 sequence
  PTHR30461:SF3,SM00857,IPR006118,IPR036162,PF13408, IPR025827,G3DSA:3.40.50.1390,IPR006119,SSF53041,PF00239, PTHR30461,PS00397,PS51736,Coil,cd00338
MPDMKGKRILLYVRVSTEEQARYGESIADQRQALSEWAKKHGCVVVHEFVDEGFSARKPYKSRPALCALLNAVENREADAVVFTKLDRWFRNIRDYNKVQEVLERCGVFWMATLEDYETKTSAGRFKVNLMLSLAEHEADQTSERIKFTFRQKRSRGEIVSGNMPKGYRLVDGRPQKDEATERGVSAFWAEYLSSGKMYAAIEKAAENGVQLAVSTGSFMLRNAAHYAGQIQGCRCDPYITEEERDMVLSTRRAAPRKSGRTYLFSGMIYCAECGGRMGAHRHFYKRKGDKRGEQVYYNCTRHYATRPAVCPSRVNIYERDVEQYVLERLEDALEQCAIAAEVKARTANQEDAKKTLEKIKRLEQKKGRCLDAYLDGLMEKDELKKRIEAIELDLTELRKVRAVKPQKTPEAIRATLPKGWETVYGGLDLDRRRRFWCSILDRVEITASREIRFYLCMKYTT

SEQ ID NO: 8046 - protein, 462 aa, Unknown
  Description of Unknown: Integrase B8047 sequence
  PTHR30461:SF3,cd00338,SM00857,IPR036162,PF13408, IPR025827,G3DSA:3.40.50.1390,PS51737,IPR006119,SSF53041, IPR011109,PTHR30461,PS51736,Coil, PF00239
MSFFTPNPQLFGLRVVKYIRCSHDDQVLHGDTLEAQDLILEDFIKVNRMILVDTFIDEALTARKKFNKRKEFVRLLSGVKAHAFDLIIFTKLDRWFRNIGDYHKIQEILEANGVQWKAVTENYDTTTTNGRLHINIRLSVAQDECDRDSDRIKDVFAYKLKNKTYVSGSLPRGLKLDAEKHVIIDPEWNCFALDMFDRFEATCSKRDTQLFLQNKYNIRVCYDTVARYLKNPLFKGQYRDDPDFCPATISPERFERIQKLAIRNVRIRHTQQFYIFSGLLICSSCNHIMTGTVTYRKMADGTEKAYKSYRCNFRAQSKLCDRGRSYREEYVEEYMLNHIRPALSDYVAKYEVTAASAVRKNPVEEISKIERKIKKLYDLFMDDLIDKNAYRSEYDKFKKQIEELQKCPAAPVRNLDSVRKLLNENWEAVYGTFSNQEKNVFWKSFVESVLVYEDGSMDIHFL

SEQ ID NO: 8047 - protein, 462 aa, Unknown
  Description of Unknown: Integrase B8048 sequence
  PTHR30461:SF3,IPR036162,PS51737,IPR011109,PTHR30461, PS00397,PF00239,G3DSA:1.10.10.2600,IPR006119,SSF53041, cd00338,SM00857,IPR025827,IPR038109,PS51736, IPR006118,PF13408,G3DSA:3.40.50.1390,PF07508,Coil
MKRQTAKLNDKLLLRVAIYIRVSTDQQAQDGDSVRDQLATGQKYIENHENMILADTYVDDGISGQKVKRDDFQRLMNDVRAGSIDLIIFTRLDRWFRNLRHYLNTQDVLDKNGVSWTATEQPYFDTSTPHGRAFVNNSMIWAELEAQNDSDRILSVFDDKVENSEVLSGSTPLGYRIENKHLVPDNDAPTAAAIFEYYRSNGNLAMTLRYMETEFGLIRSSASLKNMLTNTKYIGEFRTNKNYCPAIIDRDLFDDVQRLLKINIKSGKNHDYIFSGLVVCEECEHTMSGCQQRNSRILADGTRVVYKYNSYRCRQGITLHRCPNHKVMLESTLEKILLARIRPELENYIAEYEVANRPAMRTDSKRRNLEHKMQKLKELYLNDLITMDEFKVDREKLMQQLDKIKSDDSQPMKDLSYLKNFLKTDFENIYVSLSIPEKRELWRSIIREIRVDHERNVRIIFL

SEQ ID NO: 8048 - protein, 462 aa, Unknown
  Description of Unknown: Integrase B8049 sequence
  PTHR30461:SF3,cd00338,SM00857,IPR036162,PF13408, PS51737,G3DSA:3.40.50.1390,IPR025827,IPR006119,SSF53041, IPR011109,PTHR30461,PS51736,Coil,PF00239
MSYFNFNPDLVGVRVVKYIRCSHEGQVLHGDTLEAQNLILDEFIAANKMVLVDTFVDEAMTARKKYTKRKEFVRLLDGVRSHNFDLIIFTKLDRWFRNIGDYHKIQEILDANHVQWKAVTENYDTTTTNGRLHINIRLSVAQDECDRDSDRIKDVFAYKLKNKTFISGALPRGLMLDAEKHVVHDPEWKQWALDMFDHFESCCSKRDTLLFLMDKYNMYLCYDTIVRSLKNPLYKGFYRDDPDFCEPLIDPARFDRIQNLAIRNVRVRRSRQTYVFCGLLVCASCEHYMTGVATYHTLSGGKEKMYKRYRCNMHASSHSCPHSKMYSEEMLEQYMISNVCSAFSCYIAEYAVAAASAKKKNTAAEIAKIERKLKKLYDLFMDDLIDKEAYKSEYDSFNKQLNELKSIPFAPANDYKKVQELLSGDWSAVYTSFNNNEKNAFWKSFIDKIVIHEDGKIDIIFL

SEQ ID NO: 8049 - protein, 462 aa, Unknown
  Description of Unknown: Integrase B8050 sequence
  PTHR30461:SF3,SM00857,G3DSA:1.10.10.2600,IPR036162,PF13408, IPR025827,G3DSA:3.40.50.1390,PS51737,IPR006119,IPR038109, PF07508,IPR011109,SSF53041,PF00239, PTHR30461,PS51736,Coil,cd00338
MIKKELSSAGPLRVALYIRVSGEEQKIKGLSLEAQQERLEEYARNQGWIVVGTYIDAAKTARKDMRKRSEFQKMINSVKRDEIDLLLFCRLDRWFRSVADYYKIMEILQVHHCDWKTTDEEYDTSTANGRLYINVKLSIAQNEADICSERISVVFDSKVQHGTVVSGNCPFGYIVNGEKRLAIDPDAAAIVRDAFNYYESSVSQRGTIRHIRETYGVNWCDATFRRMLSERLYTGVYDSNKRFNENFCEPIIDAAQFDRVQKLLKKNARFSPAGNIYIFTSILKCAECLHNLSGCRTRSGNRYYYYYRCNQHLQRGRCPHNNSVREDYIESWLFEHLQEELERCKLEWEIRSAERKKKNRLNDKAVLKRKLTKLKELYMNDLINIEEYKKDYQLYTAALQQIPDEAPEETPPDFSAVERMLQADFRNIYDSLTREEKRTLWRSVISEIRVDRDNNITGIIFG

SEQ ID NO: 8050 - protein, 462 aa, Unknown
  Description of Unknown: Integrase B8051 sequence
  PTHR30461:SF3,SM00857,IPR006118,IPR036162,PF13408, PS51737,G3DSA:3.40.50.1390,Coil,IPR025827,IPR006119, SSF53041,IPR011109,PTHR30461,PS00397,PS51736, cd00338,PF00239
MMKLQRCAIYIRVSTTEQMMHGKSLESQKEYLINYAKEHNMAVVGVYADEGKTARKELKKRKAIHSLLEDVKAGKIDVIIFWRIDRWFRNLSDFYKVQDILDSHNVRWISTSEPGINMETRDGRLQLNVVLSIGQNEVDTTSERIKFVNEASIRNGKLIFGDVNMGYGYKSGVVDGQKRMIKDPDREHVVDAFYKYFFKHQNKCATLRYIQETYDPDFSFGIMRTLLSSEFYKGTYRGFPYCPAYLTEDEWSTLQKIQKRNVKATPSGRIYLFAGLIRCPVCGQKLCGTGCSSIINRKTGAKRTYCYYRCNRAMIDHICSYRHRLSQNLVENYLLDNLENEYKNYKVKCEKIEKEKEKQKKKQSPEKLRKELDRLNFLFQKGRIEWDYYNEEYSRVESELNDLQNSLPEPAPNYSYLEELLDTDFRTMYDQLSQENRRAFWRSIIQEIHVNEDHAIASVDFL

SEQ ID NO: 8051 - protein, 462 aa, Unknown
  Description of Unknown: Integrase B8052 sequence
  PTHR30461:SF3,IPR036162,PS51737,IPR011109,PTHR30461, PS00397,PF00239,G3DSA:1.10.10.2600,IPR006119,SSF53041, cd00338,SM00857,IPR025827,IPR038109,PS51736, IPR006118,PF13408,G3DSA:3.40.50.1390,Coil
MKRQTAKLNDKLLLRVAIYIRVSTDQQAQDGDSVRDQLATGQKYIENHENMILADTYVDDGISGQKVKRDDFQRLMNDVRAGSIDLIIFTRLDRWFRNLRHYLNTQDVLDKNGVSWTATEQPYFDTSTPHGRAFVNNSMIWAELEAQNDSDRILSVFDDKVDNSEVLSGSTPLGYRIENKHLVPDNDAPTAAAIFEYYRSNGNLVMTLRYMETEFGLIRSSASLKNMLTNTKYIGEFRTNKNYCPAIIDRDLFDDVQRLLKINIKSGKNHDYIFSGLVVCEECEHTMSGCQQRNSRILADGTRVVYKYNSYRCRQGITLHRCPNHKVMLESTLEKILLARIRPELENYIAEYEVANRPAMRTDSKRRNLEHKMQKLKELYLNDLITMDEFKVDREKLMQQLDKIKSDDSQPMKDLSYLKNFLKTDFENIYVSLSIPEKRELWRSIIREIRVDHERNVRIIFL

SEQ ID NO: 8052 - protein, 462 aa, Unknown
  Description of Unknown: Integrase B8053 sequence
  PTHR30461:SF3,cd00338,SM00857,IPR036162,PF13408, IPR025827,G3DSA:3.40.50.1390,IPR006119,SSF53041,PTHR30461, PS51736,Coil,PF00239
MSFFTPNPQLFGLRVAKYIRCSHDDQVLHGDTLDAQNELLDDFVKVNKMVLVDTFIDEALTARKKFTKRKEFVRLLDGVKAHDFDLIIFTKLDRWFRNIGDYHKIQEILEANGVQWKAVTENYDTTTTNGRLHINIRLSVAQDECDRDSDRIKDVFAYKLKNKTYLSGSLPRGLKLDAEKHVIIDPEWNCFALDMFDHFEATCSKRDTQLFLQDKYNIRVCYDTVARYLKNPIFKGQYRNDPDFCPATISPERFDRIQNLAIRNVRIRHTQQFYIFSGLLICSSCNHIMTGTVTYRKMADGTEKAYKSYRCNFRAQSKLCDRGRSYREEYVEEYMLNHIRPALSDYVAKYEVTAASAVRKNPVEEISKIERKIKKLYDLFMDDLIDKNAYRSEYDKFKKQIEELQKCPAAPVRNLDSVRKLLNENWEAVYGTFSNQEKNVFWKSFVESVLVYEDGSMDIHFL

SEQ ID NO: 8053 - protein, 462 aa, Unknown
  Description of Unknown: Integrase B8054 sequence
  PTHR30461:SF3,cd00338,SM00857,IPR036162, PF13408,PS51737,IPR025827,G3DSA:3.40.50.1390, IPR006119,IPR011109,SSF53041,PTHR30461, PS51736,Coil,PF00239
MSFFTPNPQLFGLRVVKYIRCSHDDQVLHGDTLEAQDLILEDFIKVNRMILVDTFIDEALTARKKFNKRKEFVRLLDGVKAHSFDLIIFTKLDRWFRNIGDYHKIQEILEANGVQWKAVTENYDTTTTNGRLHINIRLSVAQDECDRDSDRIKDVFAYKLKNKTYVSGSLPRGLKLDAEKHVIIDPEWNCFALDMFDRFEATCSKRDTQLFLQDKYNIRVCYDTVARYLKNPLFKGQYRDDPDFCPATISPERFERIQKLAIRNVRIRHTQQFYIFSGLLICSSCNHIMTGTVTYRKMADGTEKAYKSYRCNFKAQSKLCDRGKTYREEYVEEYMLNHIRPALSDYVAKYEVTAASAVQKNPVEEMSKIERKIKKLYDLFMDDLIDKDAYRSEYDKFKKQIEELQKCPAAPVRNLDSVRKLLNDDWEAVYNTFSNQEKNVFWKSFVESVLVHEDGSMDIHFL

SEQ ID NO: 8054 - protein, 462 aa, Unknown
  Description of Unknown: Integrase B8055 sequence
  PTHR30461:SF3,SM00857,IPR036162,PF13408,PS51737, IPR025827,G3DSA:3.40.50.1390,IPR006119,SSF53041,IPR011109, PF00239,PTHR30461,PS51736,Coil,cd00338
MSFFTPNPQLFGLRVAKYIRCSHDDQVLHGDTLDAQNELLDDFVKVNKMVLVDTFIDEALTARKKFTKRKEFVRLLDGVKAHDFDLIIFTKLDRWFRNIGDYHKIQEILEANGVQWKAVTENYDTTTTNGRLHINIRLSVAQDECDRDSDRIKDVFAYKLKNKTYLSGSLPRGLKLDAEKHVIIDPEWNCFALDMFDRFEATCSKRDTQLFLQDKYNIRVCYDTVARYLKNPLFKGQYRDDPDFCPATISPERFERIQKLAIRNVRIRHTQQFYIFSGLLICSSCNHIMTGTVTYRRMADGTEKAYKSYRCNFKAQSKLCDRGKTYREEYVEEYMLNHIRPALSDYVAKYEVTAASAVQKNPVEEMSKIERKIKKLYDLFMDDLIDKDAYRSEYDKFKKQIEELQKCPAAPVRNLDSVRKLLNDDWEAVYNTFSNQEKNVFWKSFVESVLVHEDGSMDIHFL

SEQ ID NO: 8055 - protein, 462 aa, Unknown
  Description of Unknown: Integrase B8056 sequence
  PTHR30461:SF3,SM00857,IPR006118,IPR036162,PF13408, IPR025827,G3DSA:3.40.50.1390,PS51737,Coil,IPR006119, SSF53041,IPR011109,PTHR30461,PS00397, PS51736,cd00338,PF00239
MMKFQRCAIYIRVSTTEQMMHGKSLESQKEYLINYAKEHNMAVVGVYADEGKTARKELKKRKAIHSLLEDVKAGKIDVIIFWRIDRWFRNLSDFYKVQDILDSHNVRWISTSEPGINMETRDGRLQLNVVLSIGQNEVDTTSERIKFVNEASIRNGKLIFGDVNMGYGYKSGIVDGQKRMVKDPDREHVVDAFYKYFFKHQNKCATLRYIQETYDPDFSFGIMRTLLSSEFYKGTYRGFPYCPAYLTEDEWNKLQKIQKRNVKATPSGRIYLFAGLIRCPVCGQKLCGTGCSSIINRKTGAKRTYCYYRCNRAMIDHICSYRHRLSQNLVENYLLDNLENEYKNYKVKCEKIEKEKEKQKKKQSPEKLRKELDRLNFLFQKGRIEWDYYNEEYSRVESELNDLQNSLPEPAPNYSYLEELLDTDFRTMYDQLSQENRRAFWRSIIQEIHVNEDHAIASVDFL

SEQ ID NO: 8056 - protein, 462 aa, Unknown
  Description of Unknown: Integrase B8057 sequence
  PTHR30461:SF3,cd00338,SM00857,IPR036162,PF13408, PS51737,G3DSA:3.40.50.1390,IPR025827,IPR006119,IPR011109, SSF53041,PTHR30461,PS51736,Coil,PF00239
MSFFTPNPQLFGLRVVKYIRCSHDDQVLHGDTLEAQDLILEDFIKVNRMILVDTFIDEALTARKKFNKRKEFVRLLDGVKAHSFDLIIFTKLDRWFRNIGDYHKIQEILEANGVQWKAVTENYDTTTTNGRLHINIRLSVAQDECDRDSDRIKDVFAYKLKNKTYVSGSLPRGLKLDAEKHVIIDPEWNCFALDMFDRFEATCSKRDTQLFLQDKYNIRVCYDTVVRYLKNPLFKGQYRDDPDFCPATISPERFERIQKLAIRNVRIRHTQQFYIFSGLLICSSCNHIMTGTVTYRKMADGTEKAYKSYRCNFRAQSKLCDRGRSYREEYIEEYMLNHIRPALSDYVAKYEVTAANTVQKNPVEEISKIERKIKKLYDLFMDDLIDKETYRSEYDKFKKQIEELQKCPAAPVRNLDSVRKLLNEDWEAVYNTFSNQEKNVFWKSFVESVLVHEDGSMDIHFL

SEQ ID NO: 8057 - protein, 462 aa, Unknown
  Description of Unknown: Integrase B8058 sequence
  PTHR30461:SF3,cd00338,SM00857,IPR036162,PF13408, PS51737,IPR025827,G3DSA:3.40.50.1390,IPR006119,SSF53041, IPR011109,PTHR30461,PS51736,Coil, PF00239
MFYTQSCPELNGMRVAKYIRCSHDDQVAHGDTLEAQNEILDDFILKNHLILVDTFVDEALTARKKYTKRKEFVRLLDGVKRHDFDLIIFTKLDRWFRNIGDYHRIQEILEANGVQWKAVTESYDTTTTNGRLHINIRLSVAQDECDRDSDRIKDVFEYKLKNKTYLSGSLPHGLKLDPEKHVIIDPEWKQFALDLFDHFEATNSKRGTLMYLKEKYQLPRLCHDTIVRSLRNTLYKGEYRGIKDFCPALIDPERFDRIQVLAKRDVRNSRTRTYIFNGLLICSDCGHNMTCQTTVRKRADGKKYEYRAYRCNQHYSMHCCDRNKSYREELIEENMLSNIRPALADYIAEYEIDGECPQTKDPAAEANRIRAKLKKLYELFLDDLIDKDMYKKEYEQLHAQLQEANTAAAAPHKDVNALKVFLSQEWEDVYKTFSYEEKAAFWKSFVQSITLHEDGKMDIVFL

SEQ ID NO: 8058 - protein, 462 aa, Unknown
  Description of Unknown: Integrase B8059 sequence
  PTHR30461:SF3,cd00338,SM00857,IPR036162,PF13408, PS51737,G3DSA:3.40.50.1390,IPR025827,IPR006119,IPR011109, SSF53041,PTHR30461,PS51736,Coil,PF00239
MSYFNFNPDLVGVRVVKYIRCSHEGQVLHGDTLEAQNLILDEFIATNKMVLVDTFIDEAMTARKKYTKRKEFVRLLDGVRSHNFDLIIFTKLDRWFRNIGDYHKIQEILDANHVQWKAVTENYDTTTTNGRLHINIRLSVAQDECDRDSDRIKDVFAYKLKNKTFISGALPRGLMLDAEKHVVHDPEWKQWALDMFDHFESCCSKRDTLLFLMDKYNMYLCYDTIVRSLRNPLYKGFYRGDPDFCEPLIDPARFDRIQNLAIRNVRVRRSRQTYVFCGLLVCASCEHYMTGVATYHTLSGGKEKMYKRYRCNMHASSHSCPHSKMYSEEMLEQYMISNVCSAFSCYIAEYAVAAASAKKKNTAAEIAKIERKLKKLYDLFMDDLIDKEAYKSEYDSFNKQLNELKSIPFAPANDYKKVQELLSGDWSAVYTSFNNNEKNAFWKSFIDKIVIHEDGKIDIIFL

SEQ ID NO: 8059 - protein, 462 aa, Unknown
  Description of Unknown: Integrase B8060 sequence
  PTHR30461:SF3,IPR036162,PS51737,IPR011109,PTHR30461, PS00397,PF00239,G3DSA:1.10.10.2600,IPR006119,SSF53041, cd00338,SM00857,IPR025827,IPR038109, PS51736,IPR006118,PF13408,G3DSA:3.40.50.1390,PF07508,Coil
MKRQTAKLNDKLLLRVAIYIRVSTDQQAQDGDSVRDQLATGQKYIENHENMILADTYVDDGISGQKVKRDDFQRLMNDVRAGSIDLIIFTRLDRWFRNLRHYLNTQDVLDKNGVSWTATEQPYFDTSTPHGRAFVNNSMIWAELEAQNDSDRILSVFDDKVDNSEVLSGSTPLGYRIENKHLVPDNDAPTAAAIFEYYRSNGNLAMTLRYMETEFGLIRSSASLKNMLTNTKYIGEFRTNKNYCPAIIDRDLFDDVQRLLKINIKSGKKHDYIFSGLVVCEECEHTMSGCQQRNSRILADGTRMVYKYNSYRCRQGITLHRCPNHKVMLESTLEKILLARIRPELENYIAEYEVANRPAMRTDSKRRNLEHKMQKLKELYLNDLITMDEFKVDREKLMQQLDKIKSDDSQPMKDLSYLKNFLKTDFENIYVSLSIPEKRELWRSIIREIRVDHERNVRIIFL

SEQ ID NO: 8060 - protein, 462 aa, Unknown
  Description of Unknown: Integrase B8061 sequence
  PTHR30461:SF3,cd00338,SM00857,IPR036162,PF13408, PS51737,G3DSA:3.40.50.1390,IPR025827,IPR006119,IPR011109, SSF53041,PTHR30461,PS51736,Coil,PF00239
MSFFTPNPQLFGLRVAKYIRCSHDDQVLHGDTLDAQNELLDDFVKVNKMVLVDTFIDEALTARKKFTKRKEFVRLLDGVKAHDFDLIIFTKLDRWFRNIGDYHKIQEILEANGVQWNAVTENYDTTTTNGRLHINIRLSVAQDECDRDSDRIKDVFAYKLKNKTYLSGSLPRGLKLDAEKHVIIDPEWNCFALDMFDRFEATCSKRDTQLFLQDKYNIRVCYDTVARYLKNPLFKGQYRDDPDFCPATISPERFERIQKLAIRNVRIRHTQQFYIFSGLLICSSCNHIMTGTVTYRRMADGTEKAYKSYRCNFKAQSKLCDRGKTYREEYVEEYMLNHIRPALSDYVAKYEVTAASAVQKNPVEEMSKIERKIKKLYDLFMDDLIDKDAYRSEYDKFKKQIEELQKCPAAPVRNLDSVRKLLNDDWEAVYNTFSNQEKNVFWKSFVESVLVHEDGSMDIHFL

SEQ ID NO: 8061 - protein, 462 aa, Unknown
  Description of Unknown: Integrase B8062 sequence
  PTHR30461:SF3,cd00338,SM00857,IPR036162,PF13408, PS51737,G3DSA:3.40.50.1390,IPR025827,IPR006119,IPR011109, SSF53041,PTHR30461,PS51736,Coil, PF00239
MSFFTPNPQLFGLRVVKYIRCSHDDQVLHGDTLEAQDLILEDFIKVNRMILVDTFIDEALTARKKFNKRKEFVRLLDGVKAHSFDLIIFTKLDRWFRNIGDYHKIQEILEANGVQWKAVTENYDTTTTNGRLHINIRLSVAQDECDRDSDRIKDVFAYKLKNKTYVSGSLPRGLKLDAEKHVIIDPEWNCFALDMFDRFEATCSKRDTQLFLQDKYNIRVCYDTVARYLKNPLFKGQYRDDPDFCPATISPERFERIQKLAIRNVRIRHTQQFYIFSGLLICSSCNHIMTGTVTYRRMADGTEKAYKSYRCNFRAQSKLCDRGRSYREEYIEEYMLNHIRPALSDYVAKYEVTAASAVQKNPVEEMSKIERKIKKLYDLFMDDLIDKDAYRSEYDKFKKQIEELQKCPAAPVRNLDSVRKLLNEDWEAVYNTFSNQEKNVFWKSFVESVLVYEDGSMDICFL

SEQ ID NO: 8062 - protein, 462 aa, Unknown
  Description of Unknown: Integrase B8063 sequence
  PTHR30461:SF3,IPR036162,PS51737,IPR011109,PTHR30461, PS00397,PF00239,G3DSA:1.10.10.2600,IPR006119,SSF53041, cd00338,SM00857,IPR025827,IPR038109,PS51736, IPR006118,PF13408,G3DSA:3.40.50.1390,PF07508,Coil
MENKTNVEEVALYVRVSTDEQAINGDSLRTQRDELTKYALENGFHVFGIYEDDGFSATNLDRPALQRLLKDVEQNKINRILITKLDRLSRGVRNYYKVLDVLDEHGVFWQTIFEKYDSSTANGRLHINIMLSVAENESAQTSERIKSVFKTKLKNKEIIAGKIPIGLKKKDKKLIIDEEKKQVVLDVFDEYKKTTSAYQTFQNIDLKYPELNLNYMKVYRMLNNKLYTGIKVTERGNIEDFCPAIIDSETFFNTQKMLEKNARKPSSENSGGYIFQGMLKCAECGYTLGGKFYSKNPESSRYYYICKKHLLSHICNCSTNFNEQKIEQKLLQELKIQLKNYILSYEYKQNSIKKIDKSKEISSLENKLTKLKDLYIRDLIRIEDYEKDYKQCVSQLESLYQEQNKIETNPIDNNLEALKSFLKQDFSSIYNKISRLEKRKIWLSIIDYITLDKDYNMKIFFI

SEQ ID NO: 8063 - protein, 462 aa, Unknown
  Description of Unknown: Integrase B8064 sequence
  PTHR30461:SF3,cd00338,SM00857,IPR036162,PF13408, IPR025827,G3DSA:3.40.50.1390,PS51737,IPR006119,IPR011109, SSF53041,PTHR30461,PS51736,Coil,PF00239
MSFFTPNPQLFGLRVVKYIRCSHDDQVLHGDTLEAQDLILEDFIKVNRMILVDTFIDEALTARKKFNKRKEFVRLLDGVKAHSFDLIIFTKLDRWFRNIGDYHKIQEILEANGVQWKAVTENYDTTTTNGRLHINIRLSVAQDECDRDSDRIKDVFAYKLKNKTYVSGSLPRGLKLDAEKHVIIDPEWNCFALDMFDRFEATCSKRDTQLFLQDKYNIRVCYDTVARYLKNPLFKGQYRDDPDFCPATISPERFERIQKLAIRNVRIRHTQQFYVFSGLLICSSCNHIMTGTVTYRRMADGTEKAYKSYRCNFKAQSKLCDRGKTYREEYVEEYMLNHIRPALSDYVAKYEVTAASAVQKNPVEEISKIERKIKKLYDLFMDDLIDKEAYRSEYDKFKKQIEELQKCPAAPVRNLDSVRKLLNEDWEAVYNTFSNQEKNVFWKSFVESVLVYEDGSMDIHFL

SEQ ID NO: 8064 - protein, 462 aa, Unknown
  Description of Unknown: Integrase B8065 sequence
  PTHR30461:SF3,cd00338,SM00857,IPR036162,PF13408, IPR025827,PS51737,G3DSA:3.40.50.1390,IPR006119,IPR011109, SSF53041,PTHR30461,PS51736,Coil, PF00239
MSFFTPNPQLFGLRVVKYIRCSHDDQVLHGDTLEAQDLILEDFVKVNRMILVDTFIDEALTARKKFNKRKEFVRLLDGVKAHSFDLIIFTKLDRWFRNIGDYHKIQEILEANGVQWKAVTENYDTTTTNGRLHINIRLSVAQDECDRDSDRIKDVFAYKLKNKTYVSGSLPRGLKLDAEKHVIIDPEWSCFALDMFDRFEATCSKRDTQLFLQDKYNIRVCYDTVARYLKNPLFKGQYRDDPDFCPATISPERFERIQKLAIRNVRIRHTQQFYIFSGLLICSSCNHIMTGTVTYRRMADGTEKAYKSYRCNFKAQSKLCDRGKTYREEYVEEYMLNHIRPALSDYVAKYEVTAASAVQKNPVEEMSKIERKIKKLYDLFMDDLIDKDAYRSEYDKFKKQIEELQKCPAAPVRNLDSVRKLLNDDWEAVYNTFSNQEKNVFWKSFVESVLVHEDGSMDIHFL

SEQ ID NO: 8065 - protein, 462 aa, Unknown
  Description of Unknown: Integrase B8066 sequence
  PTHR30461:SF3,SM00857,IPR006118,G3DSA:1.10.10.2600,IPR036162, PF13408,IPR025827,G3DSA:3.40.50.1390,IPR006119,IPR038109, SSF53041,PTHR30461,PS00397,PS51736,cd00338, PF00239
MSNTPKTITRAALYIRVSTEEQALHGYSLEAQEAALKQYAIDHDYKVVHIYHDEGFSARKPVMRRKVMQELLADVQAGKIDLILFTKLDRWFRNVHDYHQVQAVLDKYGVAWKTILEDYQTTTADGRLKVNIMLSVAENEADRTSERIKFVFDNKVRNGEYCFGGPMAPYGYKAEVINGVRKLVKDPETESATAAFWDKMIKYHNTRRAARETNLEYGISRDHQSWRKVVRNKIYTGELRGIKDFCPAYISAADWQDIQYPERRIKSTQGDRHYLFVGLLRCPVCGCTLKATFKTYPSDRSKEYYGYRCSAKSLGRCTYSRQLSERNLEKYLVAHLRESLESYIAKLQLSAAAPKKKRKKADTTKLRDQLRRLNVIYLGGNISDDDYNAQATILRDAIIKAEQEEKQLAQVIDFTALRQLLDSNFELSYKSMDREEKQRFWHSIIAEIQLDDNQVKEIIFKS

SEQ ID NO: 8066 - protein, 462 aa, Unknown
  Description of Unknown: Integrase B8067 sequence
  PTHR30461:SF3,SM00857,IPR006118,G3DSA:1.10.10.2600,IPR036162, PF13408,IPR025827,G3DSA:3.40.50.1390,IPR006119,IPR038109, SSF53041,PTHR30461,PS00397,PS51736,cd00338, PF00239
MSNTPETITRAALYIRVSTEEQALHGYSLEAQEAALKQYAIDHDYKVVHIYHDEGFSARKPVMRRKVMQELLADVQAGKIDLILFTKLDRWFRNVHDYHQVQNILDKHGVAWKTILEDYQTTTADGRLKVNIMLSVAENEADRTSERIKFVFDNKVRNGEYCFGGPMAPYGYKAEVINGVRKLVKDPETESATAAFWDKMIKYHNTRRAARETNLEYGISRDHQSWRKVVRNKIYTGELRGIKDFCPAYISAADWQDIQCLEHRIKSTQGDRHYLFVGLLRCPVCGRTLKATFKTYPNDRSKEYYGYRCTAKPLGCCTYSRQLSERKLEKYLVAHLRESLESYIAKLQLSASAPKKKRKKADTTKLRDQLRRLNVIYLAGNISDDDYNAQANILRDAIIKAEQEEKQLAQVIDFTALRQLLDSNFELSYKAMSREEKQRFWHSIIAEIQLDDNQVKEIIFKS

SEQ ID NO: 8067 - protein, 462 aa, Unknown
  Description of Unknown: Integrase B8068 sequence
  PTHR30461:SF3,cd00338,SM00857,IPR036162,PF13408, IPR025827,G3DSA:3.40.50.1390,PS51737,IPR006119,SSF53041, IPR011109,PTHR30461,PS51736,Coil,PF00239
MSFFTPNPQLFGLRVVKYIRCSHDDQVLHGDTLEAQDLILEDFIKVNRMILVDAFVDEALTARKKFNKRKEFVRLLDGVKAHAFDLIIFTKLDRWFRNIGDYHKIQEILEANGVQWKAVTENYDTTTTNGRLHINIRLSVAQDECDRDSDRIKDVFAYKLKNKTYVSGSLPRGLKLDAEKHVIIDPEWNCFALDMFDHFEATCSKRDTQLFLQGKYNIRVCYDTVARYLKNPLFKGQYRNDPDFCPATISPERFDRIQKLAIRNVRIRHTQQFYVFSGLLICSSCNHIMTGTVTYRKMADGTEKAYKSYRCNFRAQSKLCDRGRSYREEYIEEYMLNHIRPALSDYVAKYEVTAASAVQKNPVEEISKIERKIKKLYDLFMDDLIDKEAYRSEYDKFKKQIEELQKCPAAPVYNLDSVRKLLNEDWEAVYNTFSNQEKNVFWKSFVESVLVYEDGSMDIRFL

SEQ ID NO: 8068 - protein, 462 aa, Unknown
  Description of Unknown: Integrase B8069 sequence
  IPR036162,PS51737,IPR011109,PTHR30461, PS00397,PF00239,G3DSA:1.10.10.2600,IPR006119, SSF53041,cd00338,SM00857,IPR025827,IPR038109,PS51736 ,IPR006118,PF13408,G3DSA:3.40.50.1390,PF07508,Coil
MAKKVTVIKAAKEQKHTQEERRLKVCGYARVSTGSQAQATSYTAQVEYYTEKIESNPLWEFAGVYADEGISGTNVKHRDEFQMMISDCEDGNIDLILTKSITRFARNTVECIQTIRKLKEIGVGIYFEKENINTLSEKSELFITILASVAQGESENISSNNRWAIQKRFQDGTYIISTPAYGYGKDEDGNLVIIESEAETVRWIYESYLNGMGVYVIAKALNQKGIPTIRGAEKWQDGVIQDILKNPIYEGDMLQQRTYTETRFPFVRRVNNGQRNQYLIKDSHPPIVTHEEAEAVRNLMAYRVDVLHMNKSDYTKRYLFSGRIICGECGKTFRRQKIYIGKPYEKIIWTCSGHVEDKENCCMKAIREDVLHRAFTDMWNKLYTNQGTILEPLLKELTELVAARQDSEEIRQLDKEIKDISEQSQILNQVMRKGYMDSALFMESSNKLGWCEFPYKSRVIPT

SEQ ID NO: 8069 - protein, 462 aa, Unknown
  Description of Unknown: Integrase B8070 sequence
  PTHR30461:SF3,IPR036162,PS51737,IPR011109,PTHR30461, PS00397,PF00239,G3DSA:1.10.10.2600,IPR006119,SSF53041, cd00338,SM00857,IPR025827,IPR038109,PS51736, IPR006118,PF13408,G3DSA:3.40.50.1390,PF07508,Coil
MKRQTAKLNDKLLLRVAIYIRVSTDQQAQDGDSVRDQLATGQKYIENHENMILADTYVDDGISGQKVKRDDFQRLMNDVRAGSIDLIIFTRLDRWFRNLRHYLNTQDVLDKNGVSWTATEQPYFDTSTPHGRAFVNNSMIWAELEAQNDSDRILSVFDDKVDNSEVLSGSTPLGYRIENKHLVPDDDAPTAAAIFEYYRSNGNLAMTLRYMETEFGLIRSSASLKNMLTNTKYIGEFRTNKNYCPAIIDRDLFDDVQRLLKINIKSGKNHDYIFSGLVVCEECEHTMSGCQQRNSRILADGTRMVYKYNSYRCRQGITLHRCPNHKVMLESTLEKILLARIRPELENYIAEYEVANRPAMRTDSKRRNLEHKMQKLKELYLNDLITMDEFKVDREKLMQQLDKIKLDDSQPMKDLSYLKNFLKTDFENIYVSLSIPEKRELWRSIIREIRVDHERNVRIIFL

SEQ ID NO: 8070 - protein, 462 aa, Unknown
  Description of Unknown: Integrase B8071 sequence
  PTHR30461:SF3,cd00338,SM00857,IPR036162,PF13408, IPR025827,G3DSA:3.40.50.1390,PS51737,IPR006119,SSF53041, IPR011109,PTHR30461,PS51736,Coil,PF00239
MSFFTPNPQLFGLRVVKYIRCSHDDQVLHGDTLEAQDLILEDFIKMNRMILVDTFIDEALTARKKFNKRKEFVRLLDGVKAHSFDLIIFTKLDRWFRNIGDYHKIQEILEANGVQWKAVTENYDTTTTNGRLHINIRLSVAQDECDRDSDRIKDVFAYKLKNKTYVSGSLPRGLKLDAEKHVIIDPEWNCFALDMFDHFEATCSKRDTQLFLQDKYNIRVCYDTVARYLKNPLFKGQYRDDPDFCPATISPERFERIQKLAIRNVRIRHTQQFYIFSGLLICSSCNHIMTGTVTYRRMADGTEKAYKSYRCNFKAQSKLCDRGRSYREEYIEEYMLNHIRPALSDYVAKYEVTAANAVQKNPVEEISKIERKIKKLYDLFMDDLIDKEAYRNEYDKFKKQIEELQKCPAAPVRNLDSVRKLLNEDWEAVYNTFSNQEKNVFWKSFVESVLVYEDGSMDIHFL

SEQ ID NO: 8071 - protein, 462 aa, Unknown
  Description of Unknown: Integrase B8072 sequence
  PTHR30461:SF3,IPR036162,PS51737,IPR011109,PTHR30461, PS00397,PF00239,G3DSA:1.10.10.2600,IPR006119,SSF53041, cd00338,SM00857,IPR025827,IPR038109, PS51736,IPR006118,PF13408,G3DSA:3.40.50.1390,PF07508,Coil
MKRQTAKLNDKLLLRVAIYIRVSTDQQAQDGDSVRDQLATGQKYIENHENMILADTYVDDGISGQKVKRDDFQRLMNDVRAGSIDLIIFTRLDRWFRNLRHYLNTQDVLDKNGVSWTATEQPYFDTSTPHGRAFVNNSMIWAELEAQNDSDRILSVFDDKVENSEVLSGSTPLGYRIENKHLVPDNDAPTAAAIFEYYRSNGNLAMTLRYMETEFGLIRSSASLKNMLTNTKYIGEFRTNKNYCPAIIDRDLFDDVQRLLKINIKSGKNHDYIFSGLVVCEECEHTMSGCQQRNSRILADGTRVVYKYNSYRCRQGITLHRCPNHKVMLESTLEKILLARIRPELENYIAEYEVANRPAMRTDSKRRNLEHKMQKLKELYLNDLITMDEFKVDREKLMQQLDKIISDDSQPMKDLSYLKNFLKTDFENIYVSLSIPEKRELWRSIIREIRVDHERNVRIIFL

SEQ ID NO: 8072 - protein, 462 aa, Unknown
  Description of Unknown: Integrase B8073 sequence
  SM00857,IPR036162,PF13408,IPR025827,G3DSA:3.40.50.1390, IPR006119,SSF53041,PTHR30461,PS51736,cd00338, PF00239
MGDDMKEKIPRCAIYDRVSTDLQVKEGLSLEAQRQALTDYAISHGYKIVGYYADEGITARKKMQNRKDLVRLLNDVKSDKIDLILVTKLDRWFRNVKDYHNTQAILEAHGCNWKTIFEEYDTSTSNGRFAINIMLSVNENECDRDSDRIKSVFEYKKSRKEHLNGRPGYGYIADENKKLIKDPATQHIVEDTFKHYFSTYSKNATIEYILDKYSGDPNAPTMYQVNRILTCETYAGRKYGIDNYCEPYITLKKHEQIISVCDAKIIPHQNEPFLFSSMIKCPICGRNMSGFTKKHTLKNGEISKYKRYRCEAKFTEFHNGACITESVIESYLLNNIMGELNKELLQIKTREKENKKKPASNPVKIQEEINRLNVMYQKGRIDDEYYDKQYSKLKQKLSDAQHPQKVTSLEAYKPIIQTLNDGWMEMYHTLDIKHKKAFWKGLIEAIYIDKESRKLCGFKFLL

SEQ ID NO: 8073 - protein, 462 aa, Unknown
  Description of Unknown: Integrase B8074 sequence
  PTHR30461:SF3,IPR036162,PS51737,IPR011109, PTHR30461,PS00397,PF00239,G3DSA:1.10.10.2600, IPR006119,SSF53041,SM00857,IPR025827,IPR038109,PS51736 ,cd03768,IPR006118,PF13408,G3DSA:3.40.50.1390,PF07508,Coil
MKKVACYVRVSTENQIENYSIDEQTERLEAYCKAKDYAIYKIYTDGGYSGGNMNRPALNAMLADIEHKLFDTIIVYKLDRLSRSQKDTLMLIEDYFLANNIDFVSVSENFDTSTPFGRAMIGILSVFAQLEKDQITERFTMGRIGRSKSGLFHGGGNAPKGYNYINGHLEINTVEAEQVKEIFSLFLSGKSVNAISKIMTKKYNDNLWKNALQITNCIRNSIYIGKVKFKGVEYDGEHQPIISEDDFRRANELLKSDDRIKFPAQKTPFRAGFLLSSLVYCKNCGARYSACHGYYKCYSRSKSTAKFVKDPSCKNKNWKIDELDALVISEIHKIAIDDEYKKLFKKEEKTDDTKSIKAEISKIDFQINRLLDLYQISDIPIDTIKSKITVLTNKKDELNELLNKNRRADNYKAFQAALNRFEALDDTSGIDERRLLISTLIERITIDEESVNITWRIESKIV

SEQ ID NO: 8074 - protein, 462 aa, Unknown
  Description of Unknown: Integrase B8075 sequence
  PTHR30461:SF3,IPR036162,PS51737,IPR011109,PTHR30461, PS00397,PF00239,G3DSA:1.10.10.2600,IPR006119,SSF53041, cd00338,SM00857,IPR025827,IPR038109,PS51736, IPR006118,PF13408,G3DSA:3.40.50.1390,PF07508,Coil
MKRQTAKLNDKLLLRVAIYIRVSTDQQAQDGDSVRDQLATGQKYIENHENMILADTYVDDGISGQKVKRDDFQRLMNDVRAGSIDLIIFTRLDRWFRNLRHYLNTQDVLDKNGVSWTATEQPYFDTSTPHGRAFVNNSMIWAELEAQNDSDRILSVFDDKVENSEVLSGSTPLGYRIENKHLVPDDDAPTAAAIFEYYRSNGNLAMTLRYMETEFGLIRSSASLKNMLTNTKYIGEFRTNKNYCPAIIDRDLFDDVQRLLKINIKSGKNHDYIFSGLVVCEECEHTMSGCQQRNSRILADGTRVVYKYNSYRCRQGITLHRCPNHKVMLESTMEKILLARIRPELENYIAEYEVANRPAMRTDSKRRNLEHKMQKLKELYLNDLITMDEFKVDREKLMQQLDKIKSDDSQPMKDLSYLKNFLKTDFENIYVSLSIPEKRELWRSIIREIRVDHERNVRIIFL

SEQ ID NO: 8075 - protein, 462 aa, Unknown
  Description of Unknown: Integrase B8076 sequence
  PTHR30461:SF3,cd00338,SM00857,IPR036162,PF13408, IPR025827,PS51737,G3DSA:3.40.50.1390,IPR006119,IPR011109, SSF53041,PTHR30461,PS51736,Coil,PF00239
MSFFTPNPALFGLRVVKYIRCSHDDQVLHGDTLEAQDLILDDFIKTNRLILVDTFVDEALTARKKFNKRKEFVRLLDGVKAHDFDLIIFTKLDRWFRNIGDYHKIQEILEANGVQWKAVTENYDTTTTNGRLHINIRLSVAQDECDRDSDRIKDVFAYKLQNKTYVSGSLPRGLRLDEEKHIIIDPEWNCFALDMFDHFEATCSKRDTQLFLQDKYGIRVCYDTVVRYLKNPLFKGQYRNDPDFCPKTISAERFDRIQKLADKNIRKKRSPRQFIFSGLLVCSSCDHYFVGASTYYKLANGTQVCRKSYRCGYHTESKLCDRSKTYREEYVEEYMLNHIRPALSDYITDFGVATAGTINKNPAGEIAKIERKMKKLYDLFMDDLIDKESYRIEYESFKNQLEELQRCPAPPVRDVSTVKKLLNEDWESVYRTFSDQEKNVFWKSFVDRVRIYEDGSMDIIFL

SEQ ID NO: 8076 - protein, 462 aa, Unknown
  Description of Unknown: Integrase B8077 sequence
  PTHR30461:SF3,SM00857,G3DSA:1.10.10.2600,IPR036162,PF13408, IPR025827,G3DSA:3.40.50.1390,PS51737,IPR006119,IPR038109, PF07508,SSF53041,IPR011109,PTHR30461, Coil,cd00338,PF00239
MFQRLGSDSSKHAFEYVLVWKLDRFSRDRYDSAIYKKKLRANGVRVLSVTEGIDESSESVLLEAILEAMAEEYSRQLAQNVKRGMRQNAEKALSLGGMPPLGYDVVSKRYTINESEAQIVRFIHERYAAGAAQKLIVDECLQRGYCAKRGNELTIGAINRILRNPKYAGTYVCDDLVLEDAIPAIVSKPLKQQVRDRLAASAKAPGHAKAKVEYLLHGKLFCGECGAPMIGECGRGKNGTTHYYYTCAARKKSRSCKKRNERKFELEKYIVEYISMYVLTDEWINAAADRVVAEYARSYAASGIKPLERQIREADKELDALVDTLIKTASATAIAKINDRIEAAEAKKRTLEADLATLRIASRVEIRKEDIVAWLDQFRVGSSSGPEYCKKIIELFVNAVYIYDDRIKMFFNVRDSAQITYPEMLALDGLECSDFDLSGVPNDSLSEQILFINGIIGMLVRR

SEQ ID NO: 8077 - protein, 462 aa, Unknown
  Description of Unknown: Integrase B8078 sequence
  PTHR30461:SF3,cd00338,SM00857,IPR036162,PF13408, IPR025827,G3DSA:3.40.50.1390,IPR006119,SSF53041,PTHR30461, PS51736,Coil,PF00239
MSFFTPNPALFGLRVVKYIRCSHDDQVLHGDTLEAQDLILDDFIKTNRLILVDTFVDEALTARKKFNKRKEFVRLLDGVKAHNFDLIIFTKLDRWFRNIGDYHKIQEILEANGVQWKAVTENYDTTTTNGRLHINIRLSVAQDECDRDSDRIKDVFAYKLQNKTYVSGSLPRGLKLDEGKHIIIDPEWNCFALDMFDHFEATCSKRDTQLFLQDKYGIRVCYDTVVRYLKNPLFKGQYRNDPDFCPKTISVERFDRIQNLADKNIRKKRSPRQFIFSGLLVCSSCDHYFVGASTYYKLANGTQVCRKSYRCGYHTESKLCDRSKTYREEYVEEYMLNHIRPALSDYITDFGVGTAGTINKNPAGEIAKIERKMKKLYDLFMDDLIDKESYRIEYESFKNQLEELQRRPTPPVRDVSAVKKLLNEDWESVYRTFSDHEKNVFWKSFVDRVRIYEDGSMDIIFL

SEQ ID NO: 8078 - protein, 462 aa, Unknown
  Description of Unknown: Integrase B8079 sequence
  PTHR30461:SF3,cd00338,SM00857,IPR036162, PF13408,IPR025827,G3DSA:3.40.50.1390,PS51737, IPR006119,SSF53041,IPR011109,PTHR30461, PS51736,Coil,PF00239
MSFFTPNPQLFGLRVVKYIRCSHDDQVLHGDTLEAQDLILEDFIKVNRMILVDTFIDEALTARKKFNKRKEFVRLLDGVKAHSFDLIIFTKLDRWFRNIGDYHKIQEILEANGVQWKAVTENYDTTTTNGRLHINIRLSVAQDECDRDSDRIKDVFAYKLKNKTYVSGSLPRGLKLDAEKHVIIDPEWNCFALDMFDHFEATCSKRDTQLFLQDKYNIRVCYDTVARYLKNPLFKGQYRDDPDFCPATISPERFERIQKLAIRNVRIRHTQQFYIFSGLLICSSCNHIMTGTVTYRRMADGTEKAYKSYRCNFKAQSKLCDRGRSYREEYIEEYMLNHIRPALSDYVAKYEVTAANAVQKNPVEEISKIERKIKKLYDLFMDDLIDKEAYRNEYDKFKKQIEELQKCPAAPVRNLDSVRKLLNEDWEAVYNTFSNQEKNVFWKSFVESVLVYEDGSMDIHFL

SEQ ID NO: 8079 - protein, 461 aa, Unknown
  Description of Unknown: Integrase B8080 sequence
  PTHR30461:SF3,IPR036162,PS51737,IPR011109,PTHR30461, PS00397,PF00239,G3DSA:1.10.10.2600,IPR006119,SSF53041, SM00857,IPR025827,IPR038109,PS51736,cd03768, IPR006118,PF13408,G3DSA:3.40.50.1390,PF07508,Coil
MRKDVKRVAIYIRVSTYEQAQEGYSIDEQKERLVQYCKAMGWVVSEIYIDPGFSGSNLERPGLQKLIAEIKAYDSVLVYKLDRISRSQKDTMYLIEDVFLKNDVDFVSMSESFDTSTPFGRAAVGLLATFAQLERENIKERMTMGMKGRARKGYWKGTSRPPIGYDYKDGNLEVNDYEAMQIRELFTIAANGIPNMPYNVKNMARYLSQKYSNKYGNWTDSTGITYTIQNKVYIGMVKYKDEYFPGNHMPLIDNELFEIANSRLNAYLSSFSEHSTYTKYMLSGLTVCGICGRPYYRRNSQTKIGGIKKEYGYYSCQGRKADIPVKCQSKIYRQEELEQEVINQIESLKYRDFSTGNGKNDTASLLQEMKQIDSRQERLIDLYSLGSVSREQIDDKIRELNQQREKVKVLLSAQNTLKSEEIIKMSTCIRNVDYATQCDIAGMLIEKVVVEGENIRVYWNF

SEQ ID NO: 8080 - protein, 461 aa, Unknown
  Description of Unknown: Integrase B8081 sequence
  PTHR30461:SF3,IPR036162,PS51737,IPR011109,PTHR30461, PS00397,PF00239,G3DSA:1.10.10.2600,IPR006119,SSF53041, cd00338,SM00857,IPR025827,IPR038109,PS51736, IPR006118,PF13408,G3DSA:3.40.50.1390,Coil
MNKILRAASYIRVSTSEQALHGYSLQAQKEYLESYALSHGMRIVACFADEGQTARKELKKRKAIRELLQIVEQEKIDVILFWKMDRWFRNVSDFYKVQDVLDAHNVRWIAVAEPNINLDTREGRLNLNIMLSIGQNEVDTTSERIRFTVDNMIKNGRLVWGDKNLPLGYHIEDKKIVKTEEEAPIVEEFFRYIKVHRAKRQTMLHIQEMFHIPFSYYQIRTMLNSDFYAGKYRDNYNYCPAYLSYDELLEIRAALKCNIKAAPSGRIYLFSGLLRCPLCGTKLAARGALMISNRKTGAKKHYNYYGCNKALLSNTCTYTHRVSQILLEKYLLDNLAAEYAAFQIRCSSVSENKKAAAKKQRSPKKIESEMERLNQIFQLGRIEFDEYDQKYTNLEKELKEATKIEPVKVKKQYPNIEKVLSQDFRGIYDSLTLENRRAFWHSIIKEVCLDENNQVSEVIFL

SEQ ID NO: 8081 - protein, 461 aa, Unknown
  Description of Unknown: Integrase B8082 sequence
  PTHR30461:SF3,SM00857,IPR006118,IPR036162,PF13408, IPR025827,G3DSA:3.40.50.1390,PS51737,IPR006119,SSF53041, IPR011109,PTHR30461,PS00397,PS51736,cd00338, PF00239
MKLERCAIYIRVSTAEQMMHGKSLEAQREYLEVYAREHNMVIAGVYADEGKTARKELKKRKAIHALLEDVKAGKIDVILFWRLDRWFRNLSDFYKVQDILDEYHVRWISTSEPGINMETRDGRLQLNVVLSIGQNEVDTTSERIKFVNEASIRQGKLIFGDANMGYGYKSGTVDGVKCMIKDPEREEAVNAFYQYFFKHQSKTGALKYIQENYDPDFSYSSMRTLLSSEFYKGTYRGAPYCPAYLSPEDWDRLQKISDKNIKVNRSNRVYLFSGLIYCPNCGNLLSGCGCSSIINRKTGAKRTYCYYRCNKAYMDNHCNYRHRLSQNLVESYLLEHLEDEYQKYHVRSGQIREKQKKEKKIKTPEKLRSELERLNLLFQKGRVEWEYYNKEYSRIEYELKEALAMQPEIERDVSYVNEIIQSDFRSMYAKLSLENRRAFWRSIVSDIHVAKDSTVKEVNFL

SEQ ID NO: 8082 - protein, 461 aa, Unknown
  Description of Unknown: Integrase B8083 sequence
  PTHR30461:SF3,SM00857,PS51736,IPR036162,PS51737, G3DSA:3.40.50.1390,PF13408,IPR025827,IPR006119,PF07508, IPR011109,SSF53041,PTHR30461,mobidb-lite,cd00338, PF00239
MERIVRKLDKKILAFAQRKRVAAYARVSSGKDAMLHSLSAQVSYYSKKIQNNPQWEYIGVYADEAVTGTKGSRPEFQRMLMDCKTGKIDLILTKSVSRFARNTVTMLEIVRELKSIGIDVYFEKENVHSMSGDGELMLTILSSFAQEESLSVSENCKWRIRDKFKQGIPTNNAILGYKIVDGTFEIIPDEAKVVKMIFEDYLSGMGRNAIMKKLIRLNIPTKMDKRFNLNGSYDLNAGADLGHNELLSREAQNQAPCWQECMIYTILRNEKYTGDLLLQKSYIMDHITKKKLINKGQLPQFYIGNNHEAIIDKETFKKVQIEIEKREKNKGNPKETYPFTGKIICGQCGKHYRRKISNAGTKYAKPVWICSTFNSYGKSACASKQIPEDVLQQLIPSNFEEIRVTERNKVVIVLQDGSKIEKTWQYKSRSESWTGEMRKKASERRQKREYSKNCDGDSCNA

SEQ ID NO: 8083 - protein, 461 aa, Unknown
  Description of Unknown: Integrase B8084 sequence
  SM00857,G3DSA:1.10.10.2600,IPR036162,PF13408,PS51737, G3DSA:3.40.50.1390,IPR025827,IPR006119,IPR038109,PF07508, IPR011109,SSF53041,PTHR30461,PS51736,cd00338, PF00239
MIKKELSTGPLRVALYIRVSGEEQKIKGLSLEAQQERLEEYARQQGWVVVGIYIDAAKTARKDMRKRSEFQKMISSVKRDEIDLLLFCRLDRWFRSVADYYKIMEILQTHHCDWKTTDEEYDTSTANGRLYINVKLSIAQNEADICSERISVVFDSKVQHGTVVSGNCPFGYVVNEEKRLSIDPDAAAIVRDAFNYYESSVSQRGTIRHIRETYGVNWCDATFRRMLAERLYTGVYDSNKRFNENFCDPIIDAAQFDRVQKLLKKNARFSPAGNIYIFTSILKCAECLHNLSGCRTRSGNHYYYYYRCNQHLQRGRCSHNKSVRESYVEEWLFEHLGEELERCKLEWDVQAAERKKKTRSTDKAVLKRKLTKLKELYMDDLITIEEYKKDYQIYTAALQQIPDEVPEETPPDFSAVERMLQADFKSIYDSLTREEKRTLWRSVISEIRVDRDNNITGIIFG

SEQ ID NO: 8084 - protein, 461 aa, Unknown
  Description of Unknown: Integrase B8085 sequence
  cd00338,SM00857,G3DSA:1.10.10.2600,IPR036162,PS51737, G3DSA:3.40.50.1390,IPR006119,IPR038109,PF07508,IPR011109, SSF53041,PTHR30461,PS51736,Coil,PF00239
MSKLKAIAYYRVSTEMQEEKESLSTQVQGGEIFCRDNDIELVKIFSDVMSGGNRRRPGFLEAKKYMEENKGEIDMFIAYDVSRIARDAFTFLELFNYLNMIGVKLKLINNPTLDSDSAMGKLILTILAAIFDFFRFDNSSRVRDNMVVKVKEGKRVSGAPYGYKIMDKKMVIVEEEAEIIRYVFDAYLEGKGLRTIAKEINRDHSTISNWLNNKVYAGYNIFGKTKINKTTFKLVRNKDKNSIVEALGDWKPIISLETFERVQLIRDKNKELRIKPNNKSKFLLSGILFHQECNDKFRGSTVLKNSYYRCFSCGKLFKSPEIESVVLDELINGSALDSLNKKIKNENKKYNEKVILEKTRSQLEAKKKRLKDFLIDGTLDKEDYNTRLLEVEQKLLEVKEKEKNIDVETVKKIDTDIIKVFKKIVKNINIEDRGDTKKILRKIIKKINIDDEKNIEIYLNI

SEQ ID NO: 8085 - protein, 461 aa, Unknown
  Description of Unknown: Integrase B8086 sequence
  PTHR30461:SF3,cd00338,SM00857,IPR006118,IPR036162, PS51737,G3DSA:3.40.50.1390,IPR006119,IPR011109,SSF53041, PTHR30461,PS00397,PS51736,Coil, PF00239
MKLERCAIYIRVSTAEQMMHGKSLEAQREYLETYAREHNMVVAGVYADEGKTARKELKKRKAIHALLEDVKAGKIDVIIFWRLDRWFRNLSDFYKVQDVLDSHNVRWISTSEPGINMETRDGRLQLNVVLSIGQNEVDTTSERIKFVNESSIRSGKLIFGDANMGYGYKSGIVDGQKRMVKDPDREHVVDAFYKYFFKHQNKCATLRYIQETYDPDFSFGIMRTLLSSEFYKGTYRGFPYCPAYLTEDEWSKLQKIQKRNVKATPSGRIYLFAGMIRCPVCGQLLCGTGCSSIINRKTGAKRTYCYYRCNRAMIDHICSYRHRLSQNLVENYLLDNLENEYKNYKVKCEKIEKEKEKQKKKQSPEKLRKELDRLNFLFQKGRIDWDYYNEEYGRVESELNDLQSTLPEPVTNYGYLEELLDTDFRTMYDQLSQENRRAFWRSIIQEIHVNEDHAIASVDFL

SEQ ID NO: 8086 - protein, 461 aa, Unknown
  Description of Unknown: Integrase B8087 sequence
  SM00857,G3DSA:1.10.10.2600,IPR036162,PS51737,G3DSA:3.40.50.1390, IPR006119,IPR038109,PF07508,IPR011109,SSF53041, PTHR30461,Coil,PS51736,cd00338,PF00239
MSKLKAIAYYRVSTEMQEEKESLSTQIQGGEIFCRDNDIELIKVFSDVMSGGNRRRPGFLAAKKFMEENKGNIDMFIAYDVSRIARDAFTFLELFNYLNMIGVKLKLINNPTLDSDSAMGKLILTILAAIFDFFRFDNSSRVRDNMVIRVKEGKRMNSAPYGYKIVDKKMVIVEEEAEIIRYVFNAYLEGKGFRTIAKEINRDHSTISNWLNNKVYAGYNIFGKTKMNKSTFKLVRNKDKSSIIEALGDWEPIISLEIFEKVKAIRDKNKELRIKPNHNSKFLLSGLLFHSECDDKFRGNTVLNNYYYRCFSCSKHFKSAEIENMVIDELINGDALKALNKKIKNENKKYNEKSILEKTKNNLEAKKKRLKDFLIDGTLEKEEYNTRLLEVEQKLLEVKEKEKNIEVEAIRKIDTDIIKVFKKIIENINIEDREDTKKILRKIIKRINIDNEKNIEIYLNI

SEQ ID NO: 8087 - protein, 461 aa, Unknown
  Description of Unknown: Integrase B8088 sequence
  PTHR30461:SF3,SM00857,IPR006118,IPR036162,PF13408, IPR025827,PS51737,G3DSA:3.40.50.1390,IPR006119,SSF53041, IPR011109,PTHR30461,PS00397,PS51736, cd00338,PF00239
MKLERCAIYIRVSTAEQMMHGKSLEAQREYLEAYAREHNMVVAGVYADEGKTARKELKKRKAIHALLEDVKAGKIDVIIFWRLDRWFRNLSDFYKVQDILDEYHVRWISTSEPGINMETRDGRLQLNVVLSIGQNEVDTTSERIKFVNEASIRQGKLIFGDANMGYGYKSGTVDGVKCMIKDPEREEAVNAFYQYFFKHQSKTGALKYIQENYDPDFSYSSMRTLLSSEFYKGTYRGAPYCPAYLSTEDWDRLQKISDKNIKVNRSNRVYLFSGLIYCPNCNNLLSGCGCSSIINRKTGAKRTYCYYRCNKAYMDNHCNYRHRLSQNLVESYLLEHLEDEYQKYHIRSGQIHEKQKKEKKRKTPEKLRSELERLNLLFQKGRVEWEYYNKEYSRIEYELKEALAIQPEIERDVSYVNEIIQSDFRSMYAKLSLENRRAFWRSIISDIHVTKDSTVKEVNFL

SEQ ID NO: 8088 - protein, 461 aa, Unknown
  Description of Unknown: Integrase B8089 sequence
  PTHR30461:SF3,SM00857,IPR006118,IPR036162,PF13408, IPR025827,G3DSA:3.40.50.1390,PS51737,IPR006119,SSF53041, IPR011109,PTHR30461,PS00397,PS51736,cd00338, PF00239
MKLERCAIYIRVSTAEQMMHGKSLEAQREYLEAYASEHNMVVAGVYADEGKTARKELKKRKAIHALLEDVKAGKIDVILFWRLDRWFRNLSDFYKVQDILDEYHVRWISTSEPGINMETRDGRLQLNVVLSIGQNEVDTTSERIKFVNEASIRQGKLIFGDANMGYGYKSGTVNGVKCMIKDPEREEAVNAFYQYFFKHQSKTGALKYIQENYDPDFSYSSMRTLLSSEFYKGTYRGAPYCPAYLSTEDWDRLQKISDKNIKVNRSNRVYLFSGLIYCPNCDNLLSGCGCSSIINRKTGAKRTYCYYRCNKAYMDNHCNYRHRLSQNLVESYLLEHLEDEYQRYHVRSGQIREKQKKEKKIKTPEKLRSELERLNLLFQKGRVEWEYYNKEYSRIEYELKETLAIQPEIERDVSYVNEIIQSDFRSMYAKLSLENRRAFWRSIVSDIHVAKDSTVKEVNFL

SEQ ID NO: 8089 - protein, 461 aa, Unknown
  Description of Unknown: Integrase B8090 sequence
  PTHR30461:SF3,IPR036162,PS51737,IPR011109,PTHR30461, PS00397,PF00239,G3DSA:1.10.10.2600,IPR006119,SSF53041, SM00857,IPR025827,IPR038109,PS51736,cd03768, IPR006118,PF13408,G3DSA:3.40.50.1390,PF07508,Coil
MRKDVKRVAIYIRVSTYEQAQEGYSIDEQKERLVQYCKAMGWVVSELYIDPGFSGSNLERPGLQKLISEIKAYDSVLVYKLDRISRSQKDTMYLIEDVFLKNDVDFVSMSESFDTSTPFGRAAVGLLATFAQLERENIKERMTMGMKGRARKGYWKGTSRPPIGYDYKEGNLEVNDYEAMQIRELFTIAANGIPNMPYNVKNMARYLSQKYSNKYGNWSDSTGITYTIQNKVYIGMVKYKDEYFPGNHMPLIDNELFEKANNRLNTYLSTFGEHTTYTKYMLSGLTVCGTCGLPYYRRNSQTKIGGIKKEYGYYSCQGRKIDMPNRCQSKIYRQEALEDKVITQIESLKYKDYSTGNGKNDTASLLQELKQIDSRQERLIDLYSLGSVSREQIDDKIRELNQQREKVKVLLSAQNTLKSEEIIKMSTCIRNVDYATQCDIAGMLIEKVVVEGENIRVYWNF

SEQ ID NO: 8090 - protein, 461 aa, Unknown
  Description of Unknown: Integrase B8091 sequence
  PTHR30461:SF3,IPR036162,PS51737,IPR011109,PTHR30461, PS00397,PF00239,G3DSA:1.10.10.2600,IPR006119,SSF53041, cd00338,SM00857,IPR025827,IPR038109,PS51736, IPR006118,PF13408,G3DSA:3.40.50.1390,Coil
MKKAALYIRVSTDEQAKHGFSLGEQQHDLERYAAKHNYAVVDIYADDGNTARKSLGKRKELQRLLDDVRAGHIDIILMKCLDRWFRNIADYYKVQEILDAYGVEWECTQEEYNTTTTNGRLMLNLKLSIAQNESDQTSDRIKYINEGKKRRREECTGKHPYGYEVINKKLIVVEKDRPIVEFIFQQILAGSSTHSIASKVWDRFNFGIDAKRVWRILRNPTYKGERYGIADYCPAIIPPHDFDAVQAILGRNKPPSKTGISYLFNGKIICPSCGNILVVNCGKSKKTGEYTRPVYICGKKFTTGKPVAAGGCQFGGGVSESVIEKWLIKNLFPLLEAYQADLQSKQGQRINYDTKIKNINGKLSRLKDLYLDALIDKDTYKSDYQRLQKELTDLAIASKRQIALPPVMNEILQDEDFAKTYWELPREQQRELWQMLIKRITILRRPEEKGKPYKYFRVEFN

SEQ ID NO: 8091 - protein, 461 aa, Unknown
  Description of Unknown: Integrase B8092 sequence
  PTHR30461:SF3,SM00857,G3DSA:1.10.10.2600,IPR036162,PF13408, PS51737,IPR025827,G3DSA:3.40.50.1390,IPR006119,IPR038109, PF07508,IPR011109,SSF53041,PTHR30461,PS51736, cd00338,PF00239
MKKIESSNSPLRVALYIRVSGEEQKMKGLSLEAQQERLEEYARERGWIIVGTYIDAAKTARKEMRKRTEFQKMIASVKRDEVDLLLFCRLDRWFRSVADYYKIMEILQAHHCDWKTTDEEYDTSTANGRLYINVKLSIAQNEADICGERIDVVFDSKIQHGTVVSGACPYGYRVNADKKLEIDPDAAAIVQDAFNNYETVVSQRGTIRYIREKYGVNWCDATFHRMLTEPLYIGLYDRGGRYNKNFCEPIISEEQFHRVQDLLSRNVRKTPAGRVYIFTSIVTCAECNHIMVGTFSTRGNYSAYYYRCNQHYQRDLCSHNKTIREDYIEDWLFTHLQEEIDKCMVGWEVKAAERKKQASRSADKAALKRKLTKLKELYVDDLISIEDYKKDYKIYTEALQNIPDVIQEMPPNLSAVRRVLDDDFKAIYDSLSREEKRTLWRSIISEIKVDRDNNITDIIFS

SEQ ID NO: 8092 - protein, 461 aa, Unknown
  Description of Unknown: Integrase B8093 sequence
  SM00857,G3DSA:1.10.10.2600,IPR036162,PF13408,IPR025827, G3DSA:3.40.50.1390,PS51737,IPR006119,IPR038109,PF07508, IPR011109,SSF53041,PTHR30461,PS51736,cd00338, PF00239
MIKKELSTGPLRVALYIRVSGEEQKIKGLSLEAQQERLEEYARQQGWVVVGIYIDAAKTARKDMRKRSEFQKMISSVKRDEIDLLLFCRLDRWFRSVADYYKIMEILQTHHCDWKTTDEEYDTSTANGRLYINVKLSIAQNEADICSERISVVFDSKVQHGTVVSGSCPFGYVVNEEKRLAIDPDAAAIVRDAFNYYESSISQRGTIRHIRETYGVNWCDATFRRMLAERLYTGVYDSNKRFNENFCDPIIDAAQFDRVQKLLKKNARFSPAGNIYIFTSILKCAECLHNLSGCRTRSGNHYYYYYRCNQHLQRGRCSHNKSVRESYVEEWLFEHLGEELERCKLEWDVQAAERKKKTRSTDKAVLKRKLTKLKELYMDDLITIEEYKKDYQIYTAALQQIPDEAPEETPPDFSAVERMLQADFKSIYDSLTREEKRTLWRSVISEIRVDRDNNITGIIFG

SEQ ID NO: 8093 - protein, 461 aa, Unknown
  Description of Unknown: Integrase B8094 sequence
  PTHR30461:SF3,SM00857,G3DSA:1.10.10.2600,IPR036162,PF13408, PS51737,G3DSA:3.40.50.1390,IPR025827,IPR006119,IPR038109, SSF53041,IPR011109,PF00239,PTHR30461,PS51736, Coil,cd00338
MKYVACYCRVSHEEQVKYGYSINAQKDALIKYCKENGYKYEFYIDEGISASSMKKRKALLDMLSKLNVFDMILFTKLDRLSRNVLDANTINKMLIENNCTMKAIDEDDVDTTTADGTFIFNLKVSLAQREIGKTSERINFVFKNKRENGQVTSGSKKYGYNIVDKRYVINKDESENIINLYKYFISVNGNIQKTYKYFIEHFPGKGQDALYNYLRETAYIGKYKLYRKEIFLENYIPRIMEDNLFYNVQNLLKKKEKIVGYNKSFSIFSGLIYCNICQKRMSKKQDNRTKNKLMRYVCDNAYRLSSGSLDHKCSNNRLIRESVIEQYLLYNLCDVVAREKTAYNLKVQVESASNTSVDNSQKIKNIENKINKLKDLYLDDLIDKETYRKDYTELNKELNALKNTIVSEIPQKDFSAIEKILNSDYKKIYNKLTTENKRKFWLSIIDKIYVENGEIKEITFL

SEQ ID NO: 8094 - protein, 461 aa, Unknown
  Description of Unknown: Integrase B8095 sequence
  PTHR30461:SF3,IPR036162,PS51737,IPR011109,PTHR30461, PS00397,PF00239,G3DSA:1.10.10.2600,IPR006119,SSF53041, SM00857,IPR025827,IPR038109,PS51736,cd03768, IPR006118,PF13408,G3DSA:3.40.50.1390,PF07508,Coil
MDKKKMRCAIYIRVSTTEQAMEGYSIGEQKERLEQYSSAMQWTIMGEYIDPGYSGSNMNRPELNRLISEVKNYDVILVYKLDRLSRSQKDTMFLIEDVFLKNDIAFVSMNESFDTGTPFGRAAIGLLATFAQLERENIKERMSMGMKGRARKGYWKGTSRPPIGYDYSDGNLIINDYEAMQIRELFSITANGIPGMTYNVRNIGRYLSGKYSNKYGGWTDSSGITYTIQNKVYIGMVKFNDEYFPGQHQPIIDDLLFEKANDRLNTYLSTFGAHATYNKYMLSGITYCKLCGRPYYRRNSQVKKHGSKKEYGYYSCQGRKADVEIKCPSKIFRQDELEQAVIEQIESLKSTNWTAQEKHEDTAALLQQLKQIDSRQERLIDLYSFGSIQKNQIDDKVRELNLEREKVKALLSSRNTLDTDEIINMASKIHDSDYVVKCDIVSILIKKVEVDGENIRVYWNF

SEQ ID NO: 8095 - protein, 461 aa, Unknown
  Description of Unknown: Integrase B8096 sequence
  PTHR30461:SF3,SM00857,G3DSA:1.10.10.2600,IPR036162,PF13408, PS51737,G3DSA:3.40.50.1390,IPR025827,IPR006119,IPR038109, PF07508,IPR011109,SSF53041,PTHR30461,PS51736, cd00338,PF00239
MKKIESSNSPLRVALYIRVSGEEQKMKGLSLEAQQERLEEYARERGWIIVGTYIDAAKTARKEMRKRTEFQKMIASVKRDEVDLLLFCRLDRWFRSVADYYKIMEILQAHHCDWKTTDEEYDTSTANGRLYINVKLSIAQNEADICGERIDVVFDSKIQHGTVVSGACPYGYRVNADKKLEIDPDAAAIVQDAFNNYETVVSQRGTIRYIREKYGVNWCDATFHRMLMEPLYIGLYDRGGRYNKNFCEPIISEEQFHRVQDLLSRNVRKTPAGRVYLFTSIVTCAECNHNMVGTFSTKGNYSAYYYRCNQHYQRDLCSHNKAIREAYIEDWLFAHLQEEIDKCMVGWEVKAAERKKQASRSADKAALKRKLTKLKELYVDDLISIEDYKKDYKIYTEALQNIPDVIQEMPPNLSAVRRVLDDDFKAIYDSLSREEKRTLWRSIISEIKVDRDNNITDIIFS

SEQ ID NO: 8096 - protein, 461 aa, Unknown
  Description of Unknown: Integrase B8097 sequence
  PTHR30461:SF3,IPR036162,PS51737,IPR011109,PTHR30461, PS00397,PF00239,G3DSA:1.10.10.2600,IPR006119,SSF53041, cd00338,SM00857,IPR025827,IPR038109,PS51736, IPR006118,PF13408,G3DSA:3.40.50.1390,Coil
MSKILRAASYIRVSTAEQALHGYSLQAQKEYLESYAFTHGMRIVASFADEGQTARKELKKRKAIRELLQSVEREEIDVILFWKMDRWFRNVSDFYKVQDVLDAHDVRWIAVAEPNMNLDTREGRLNLNIMLSIGQNEVDTTSERIRFTVDSMIKNGRLVWGDKNLPLGYHIEDKKIVKTEEEAPIVEEFFRYIKTHRAKRQTMLHIQEMFHIPFSYSQLRTMLSSDFYAGKYRDNYNYCPAYLSYDELLEIREALSHNIKTAPSGRVYLFSGLLRCPRCGTKMASRGNQMISNRKTGAKKTYNYYGCNKALLSNTCTYTHQISQILLEKYLLGNLAAEYAAFQVRCSSVSENKKTAAKKQRSPEKIKSEMERLNQIFQLGRIEFDDYNQKYVKLEKELEEVAEAEPVKINKQYPKVEKVLSENFRAMYDSLTLENRRAFWHSIIKEICIDENNQVSEVIFL

SEQ ID NO: 8097 - protein, 461 aa, Unknown
  Description of Unknown: Integrase B8098 sequence
  PTHR30461:SF3,IPR036162,PS51737,IPR011109,PTHR30461, PS00397,PF00239,G3DSA:1.10.10.2600,IPR006119,SSF53041, SM00857,IPR025827,IPR038109,PS51736,cd03768, IPR006118,PF13408,G3DSA:3.40.50.1390,PF07508,Coil
MNVAIYCRVSTLEQKEHGYSIEEQERKLKSFCEINDWNVADVFVDAGFSGAKRDRPELQRLMNDIKRFDLVLVYKLDRLTRNVRDLLDLLEIFEQNNVAFRSATEVYDTSTAMGRLFVTLVGAMAEWERETIRERTQMGKLAALKKGIMLTTPPFYYDRVDNKFVPNKYKDVVLFAYEEALKGKSAKSIARKLNNSDIPPPNNRKWEDRSITRALRSPFTRGHFEWGGVYLENNHEPIITEEMYEKVKDRLEERTNTKKIKHVSIFRSKLVCPTCHNKLTMNTHKVTLKDRVYYNKHYYCNNCKETPNAKPVYIRAEEVERVFYEYLQRKDLTQYEIVEDTEEKEVTIDINKVMQQRKRYHKLYANGLMNEDELAELIEETDAAIEEYKKQNENKEVKQYSNEDITQYRSLLLEMWDISSDEEKAEFIQMAIKNIFIEYVLGKNDNKKKRRSLKIKDIEFY

SEQ ID NO: 8098 - protein, 461 aa, Unknown
  Description of Unknown: Integrase B8099 sequence
  PTHR30461:SF3,cd00338,SM00857,G3DSA:1.10.10.2600,IPR036162, PF13408,PS51737,G3DSA:3.40.50.1390,IPR025827,IPR006119, IPR038109,SSF53041,IPR011109,PTHR30461,PS51736, Coil,PF00239
MINNENELKPKLIRVALYIRVSGEEQKIKGLSLESQRERLEAYAREQGWVIVGIYIDAAKTARKKLHKRSEFQRMLDAVRHDEVDMLLFTRLDRWFRSVPDYYKVMEVLEAHNCEWKTIDDGEGYDTTTASGRLYINIKLSIAQNEADLDGERIDVVFDSKVQHGTVLSGKCPFWLRVNEEKRLELVPEKTAILQDAFDYYEQSTSQRATIKYIRETYGVNWCDATFRRMLHDKLAIGVYDRNGRYNPTFCPAAISPEQFERVQELTKRNSRSNPTGKVYIFTGILVCDECRHNMVGYKSRGIYYYRCNQHFQRGRCEHNHSAREDRVEAWLFEHLSDEIEKYEVSWDVQAAGRKKTAAGVERATLKRKLTKLKELYVNDLIDIEEYKKDYETYSAALLKLDEAQIEEKKVDLSGVRQIVSKGFLEIYDTLTREEKRTLWKSVLKEIRIDNDQNITGISFF

SEQ ID NO: 8099 - protein, 461 aa, Unknown
  Description of Unknown: Integrase B8100 sequence
  PTHR30461:SF3,cd00338,SM00857,IPR006118,IPR036162, PS51737,G3DSA:3.40.50.1390,IPR006119,IPR011109,SSF53041, PTHR30461,PS00397,PS51736,Coil,PF00239
MKLERCAIYIRVSTAEQMMHGKSLEAQREYLETYAREHNMVVAGVYADEGKTARKELKKRKAIHALLEDVKAGKIDVIIFWRLDRWFRNLSDFYKVQDVLDSHNVRWISTSEPGINMETRDGRLQLNVVLSIGQNEVDTTSERIKFVNEASVRNGKLIFGDANMGYGYKSGIVDGQKRMVKDPDREHVVNAFYEYFFKHQNKCATLRYIQETYDPDFSFGIMRTLLSSEFYKGTYRGFPYCPAYLTEDEWNKLQKIQKRNVKATPSGRIYLFAGMIRCPVCGQLLCGTGCSSIINRKTGAKKTYCYYRCNRAMIDHVCSYRHRLSQNLVENYLLDNLENEYKNYKVKCKKIEKEKEKQKKKQSPEKLRKELDRLNFLFQKGRIDWDYYNEEYGRVESELNDLQSALPEPVTNYGYLEELLDTDFRTMYDQLSQENRRAFWRSIIQEIHVNEDHAITSVDFL

SEQ ID NO: 8100 - protein, 461 aa, Unknown
  Description of Unknown: Integrase B8101 sequence
  PTHR30461:SF3,SM00857,G3DSA:1.10.10.2600,IPR036162,PF13408, PS51737,IPR025827,G3DSA:3.40.50.1390,IPR006119,IPR038109, PF07508,IPR011109,SSF53041,PTHR30461, PS51736,cd00338,PF00239
MKKIESSNSPLRVALYIRVSGEEQKMKGLSLEAQQERLEEYARERGWIIVGTYIDAAKTARKEMRKRTEFQKMIASVKRDEVDLLLFCRLDRWFRSVADYYKIMEILQAHHCDWKTTDEEYDTSTANGRLYINVKLSIAQNEADICGERIDVVFDSKIQHGTVVSGACPYGYRVNADKKLEIDPDAAAIVQDAFNNYETVVSQRGTIRYIREKYGVNWCDATFHRMLTEPLYIGLYDRGGRYNKNFCEPIISEEQFHRVQDLLSRNVRKTPAGRVYIFTSIVTCAECNHIMVGTFSTRGNYSAYYYRCNQHYQRDLCSHNKTIREDYIEDWLFTHLQEEIDKCMVGWEIKAAERKKQASRSADKAALKRKLTKLKELYVDDLISIEDYKKDYKIYTEALQNIPDVIQEMPPNLSAVRRVLDDDFKAIYDSLSREEKRTLWRSIISEIKVDRDNNITDIIFS

SEQ ID NO: 8101 - protein, 461 aa, Unknown
  Description of Unknown: Integrase B8102 sequence
  PTHR30461:SF3,cd00338,SM00857,G3DSA:1.10.10.2600,IPR036162, PF13408,PS51737,G3DSA:3.40.50.1390,IPR025827,IPR006119, IPR038109,PF07508,SSF53041,IPR011109,PTHR30461, Coil,PF00239
MKNGFTIINEYCDRAISGKTDNRPSFQRLIKDSEKGQFEAVIMYTLDRFARNRYDSAIYKAKLKKNGVRVFYAKQPMPDTPEGIILESVLEGYAEYYSENLSRNIKRGMKENALQCIATGGAGLALGYTVGEDRKYQIDPVGAKIVQEIFQMYADGMSATQIINYCNEKGYKTSRGNAFNKNSLRTLLKNEKYIGTYKFMDVVVPNGMPAIVDKALFEKVQAMLSHNAKARARTKAHEDYLLTTKLFCGHCGSAMVGESGTSKSGKVHHYYKCIDRKRKHQCNKKVEKKDWIEELVVRFTVQHVLTDENIEKIATRAMEVFEKESADTTYLTGLQDQLKEVKKKIKNLMTAIEQGIITSTTKERLEELESEKNHIEGQIAKEEMKKPLLTKERIMFWLLSFKSGDVNDLEYQRRVVDTLVNSVYVYDDGDKGRRIVFTFNISGQNTATISCSDIACSAPPF

SEQ ID NO: 8102 - protein, 461 aa, Unknown
  Description of Unknown: Integrase B8103 sequence
  PTHR30461:SF3,SM00857,IPR006118,IPR036162,PF13408, IPR025827,G3DSA:3.40.50.1390,PS51737,IPR006119,IPR011109, SSF53041,PTHR30461,PS00397,PS51736,cd00338, PF00239
MKLERCAIYIRVSTAEQMMHGKSLEAQREYLEAYASEHNMVVAGVYADEGKTARKELKKRKAIHALLEDVKAGKIDVIIFWRLDRWFRNLSDFYKVQDILDEYHVRWISTSEPGINMETRDGRLQLNVVLSIGQNEVDTTSERIKFVNEASIRQGKLIFGDANMGYGYKSGTVDGVKCMIKDPEREEAVNAFYQYFFKHQSKTGALKYIQENYDPDFSYSSMRTLLSSEFYKGTYRGAPYCPAYLSTEDWDRLQKISDKNIKVNRSNRVYLFSGLIYCPNCNNLLSGCGCSSIINRKTGAKRTYCYYRCNKAYMDNHCNYRHRLSQNLVESYLLEHLEDEYQRYHVRSGQIREKQKKEKKIKTPEKLRSELERLNLLFQKGRVEWEYYNKEYSRIEYELKEALAIQPEIERDVSYVNEIIQSDFRSMYAKLSLENRRAFWRSIVSDIHVAKDSTVKEVNFL

SEQ ID NO: 8103 - protein, 460 aa, Unknown
  Description of Unknown: Integrase B8104 sequence
  cd03768,SM00857,G3DSA:1.10.10.2600,IPR036162,PF13408, PS51737,G3DSA:3.40.50.1390,IPR025827,IPR006119,IPR038109, PF07508,IPR011109,SSF53041,PTHR30461,PS51736, PF00239
MKNQIVQKKIRCAIYTRKSVAEGLEKEFNTLDAQREAGESYIQSQKHEGWIVVDKHYDDGGFSGGNMERPALRELFDDIENGKIDIVVVYKVDRLSRSLMDFAKIIELFEKHNVSFVSVTQLFNTKDSMGRLTLNILLSFAQFERELISERMRDKMSAARRKGKWVGGIPLLGYDIVPEGGAIEVNHSEAQTVRKIFSYYTENRSLLQTLSYLNENDIRTKQWKTRKGVIRGGNKFSLTTLNHLLKNMAYIGKINSGGKIYDAEFEAILSEDVFVEVQKIMAYNAVEKGPQVRNKYNALLAGKVYCANCKTAMVHTYTKKTGTKVYRYYICSNATKRGWKNCPHPSLSAPELESYIVSELERISGDAKLRDEVIDSFYEKANAELAETVKNENSVKRTLTEIRKKYRRGRIRWSCAKRNRIFRERCRKSASRGKSWKTAYAAGKTDLVKFLPISGFSGGI

SEQ ID NO: 8104 - protein, 460 aa, Unknown
  Description of Unknown: Integrase B8105 sequence
  PTHR30461:SF3,IPR036162,PS51737,IPR011109,PTHR30461, PS00397,PF00239,G3DSA:1.10.10.2600,IPR006119,SSF53041, cd00338,SM00857,IPR025827,IPR038109,PS51736, IPR006118,PF13408,G3DSA:3.40.50.1390,Coil
MIERCAIYIRVSTAEQSMKGHSLQAQREYLESYAASHDMRVVGIYADEGQTARKELKKRKAIHALLKDVEADKIDVILFWRMDRWFRNVADFYKVQDILDAHGVRWVSASESNINMETRDGRLCLNLILTIGQNEVDTTSERIKFTVNNMIQNGRMVWGATNLPFGYMIVEENGCKRMAKDPETACMVEEFYRFFRQTHKKRATVMHMRDTFGINFSYTMLRTMLSSEFYIGKYRSNNNYCPAYLTLDEWKEIQAISENNIKRPRTGRVYFFSGLVHCPVCGTKMAACAGRSIINRKTGEKREYYYYRCNKAILNKQCSYTSRISQNLIEEYLLNNLDTEYRKYQVRCNKVKEAQAHKKKKRSADSVRSEMERLNILFQKGRIEFDYYEEQYGKLEDELKSFDEVIIREKDHSNVVGMLDSDFKEMYSSLSLENRQAFWQQIIKAIYVTKDRNVDYVDFL

SEQ ID NO: 8105 - protein, 460 aa, Unknown
  Description of Unknown: Integrase B8106 sequence
  PTHR30461:SF3,IPR036162,PS51737,IPR011109,PTHR30461, PS00397,PF00239,G3DSA:1.10.10.2600,IPR006119,SSF53041, cd00338,SM00857,IPR025827,IPR038109,PS51736, IPR006118,PF13408,G3DSA:3.40.50.1390,PF07508,Coil
MKRKLNNDKTILRVAIYVRVSTEQQAEDGDSIRDQLNSCETYIKAHENMILAGEYIDGGISGQKTKREDFQKLLSDVRANLIDLIIFTRLDRWFRSLRHYLNTQEVLDKHNVSWTAIRQPFFDTSTAQGRTFVNTSMAFAELEAQNASERIKGVFKDKVSHSEAISGRTPIGYSIVDKHLVPNEDAPIVVSIFKHYQAHGSMGETLRYMQDAFGIVRSRSSLKRMLQNKKYIGIFRDNENYCEPIITKELFYDVQRLLKSNIKTCKNRHDYIFSGLIRCVDCGYVMSAASNHNHYVRKSGEEVDHFYPVYRCHANRLHRCVNNKVFFESSIEKELLKRVRPELEQYICDYKLETAPVVQNKARIHKLQTKLSKLKELYLNELITLEEFRTDKADFEHQIEELQKEEQKPVKDLSSLEEFLKLDFENIYSSFTAPERRRVWRSIIKEIQVDHHKNINIVFL

SEQ ID NO: 8106 - protein, 460 aa, Unknown
  Description of Unknown: Integrase B8107 sequence
  cd03768,PTHR30461:SF3,SM00857,G3DSA:1.10.10.2600,IPR036162, PS51737,G3DSA:3.40.50.1390,IPR006119,IPR038109,PF07508, IPR011109,SSF53041,PTHR30461,PS51736,Coil, PF00239
MKVAIYTRVSSAEQANEGYSIHEQKKKLISYCEIHDWNEYKVFTDAGISGGSMKRPALQNLMKQLSYFDLVLVYKLDRLTRNVRDLLDMLEEFEQYNVSFKSATEVFDTTSAIGKLFITMVGAMAEWERETIRERSLFGSRAAVREGNYIREAPFCYDNIEGKLHPNEHAKVIDLIVSMFKKGISANEIARRLNSSKVHVPNKKSWNRNSLIRLMRSPVLRGHTKYGDMLIENTHEPVLSEHDYNAINDAISSKTHKSKVKHHAIFRGALVCPQCNRRLHLYAGTVKDRKGYKYDVRRYKCETCSKNKDVKNVSFNESEVENKFINLLKSYELNKFHIRKVEPVKKIEYDIDKINKQKINYTRSWSLGYIEDDEYFELMEEINATKKMIEEQTTENKQSVSKEQIQSINNFILKGWEELTIKDKEELILSTVDKIEFNFIPKDKKHKTNTLDINSIHFKF

SEQ ID NO: 8107 - protein, 460 aa, Unknown
  Description of Unknown: Integrase B8108 sequence
  PTHR30461:SF3,G3DSA:1.10.10.2600,IPR036162,PF13408,PS51737, IPR025827,G3DSA:3.40.50.1390,IPR006119,IPR038109,PF07508, IPR011109,SSF53041,PTHR30461,PS51736,cd00338, PF00239
MMADAMENKFDVIIFHKIDRNSRNELNYFIFKDKLEKLGIRYEYTAQPIDAATAEGQMMETVMVGMAAYYSRNLAKETKKGMNENAYKAIFNGGYAPLGYKIVDKHYVIDEKEAEAVRLIFNLYLDGKGYGEICLALAARGYTTRSGKNFPKNSLHDILRNERYMGTYTFNRVPKTKRRNSHSYARPNDFISIPDAIPAIVSKETFLAAQEKMLLNKKRKGGAYTAKRDYLLSGKFFCGYCGSAMQGYSCCTRGNMYYYYSCARKDRVPADRCKQKMIRAEVIEHWIMSTLEREIFSDSGIQRVADSMSTAFGNANKEAKNATTVLLQRKAAAERKLNNLYQVIEDGDADEFDMQRLKKTKEELHNINNEICETTVKSAPDIDTSKIISLLKNMREEIFTKKNSHYAKQAIELLVKRVTIIDKTITLSLTTEGCLSLLVPRTRNYIDRNIVINRLYSLAS

SEQ ID NO: 8108 - protein, 460 aa, Unknown
  Description of Unknown: Integrase B8109 sequence
  PTHR30461:SF3,IPR036162,PS51737,IPR011109,PTHR30461, PS00397,PF00239,G3DSA:1.10.10.2600,IPR006119,SSF53041, cd00338,SM00857,IPR025827,IPR038109,PS51736, IPR006118,PF13408,G3DSA:3.40.50.1390,PF07508,Coil
MDNIKRAALYIRVSTDEQAREGYSLQAQKENLIKYAKENNYAIVDIYADEGISARKSYKNRKEFMRMLEDVKANKIDIILFIKLDRYFRNIGDYYKTQEILDQFKVGWKATLENYDTTTANGRFYVNIRLSMAQDEADRTSERIKFVFDNKVKKGEVISGSVPYGYKIKDKHLIIDEDKAEVVRYIFQRYSQIRSKRSTVVDARNKFQNGITYKVLDTMIRNEIYIGKYRDNFNYCEPIISTELFEEVQELLKQGHLRYGKKTNNNFEYNYIFSGLVHCPKCKKIMASNKTLGFTRKNGEEVYYFYYRCMNKMMQKSCDYCKMVNEQKLEKYLLDTLFQKLKKYKIDYQLKESKKIAPNLEQKKTIQNKIKRLQDLYVNELIEIEDYKKQYSKLQEELSKFKDLSSTKKKDFSQIDSILNSDYKEIYNKLNNVNKRIFWHSIIKEIYPIPDTENFKIIFK

SEQ ID NO: 8109 - protein, 460 aa, Unknown
  Description of Unknown: Integrase B8110 sequence
  SM00857,IPR006118,IPR036162,PF13408,PS51737, IPR025827,G3DSA:3.40.50.1390,IPR006119,IPR011109,SSF53041, PTHR30461,PS00397,PS51736,cd00338,PF00239
MKQSTFPSIPLRAGIYIRVSTEEQHLNGLSLPAQRLALEDYANKNGYIIAGVYADEGISARKSMSRRKGLMRLLEDVRQDKIDMILVTKLDRWFRNIKDYNITEEILREHHCYWKTIFENYDSSTANGQMVINIMLSVNQAECDRTSERIKAVFDYKRSKGMCVTGMCAPYGYIIENGYIKKDPATRSVVEDAIQHYFSCFSIRHTTRYIADKYGENAPSYYKVDKIFHNPKYAGIDKNGAPYCEPYMTMEQYHMLLKSRQAKSWSPSGYVYIFSSLITCPICGCKFSGRQRKAIRKNGAVYCDTRYNCMGKFQYHSGASLRESAIEAYLLEHIDSIIESAQVNLYMDAGNASPKPARSAQSVQEELNRLNTMYQKGRLSEEYYDREYERLTALLSASDDRQLEEKRKRLKCVERQFSGDWKVLYKRLDNSHKRAFWKQTIEEILVDPDTRKIKDVKLLI

SEQ ID NO: 8110 - protein, 460 aa, Unknown
  Description of Unknown: Integrase B8111 sequence
  SM00857,G3DSA:1.10.10.2600,IPR036162,PS51737, G3DSA:3.40.50.1390,IPR006119,IPR038109,PF07508, IPR011109,SSF53041,PTHR30461,PS51736, cd00338,PF00239
MDKVAIYCRESTERQDISTLISMCEKAAHDLGFNIYKIYKDIKSGYSKDREEYSKLKNDIQAGEINVLILYESSRLTRDEIEHHLFFALLRIKEVRLYTLNHGWIDLNNEDDTFMSSLLNLLDAREGRKGAKRTKDRMEEIARNGRWTGGPAPFGYRLVNKELVVDPAEAEIVKQIFQLFLEGKKRQTLSTLFGFEGKRVRRMLINPVYVGKLKFHQIEYKNKKRITHKEWEVLDGIHEAIIDEPTFNLVQNRLKLEKREVKRDTYIFKDLLKCVCGAKLYRYTSVYTYNGQHKESLVYKCNSKDTYHRFNSILESELLEQVLETLEEVILSLNVNDINAESDNSLIEQLNYYKKEAAALPGKEKLLARQLMNNLLTEETFKELMLEFKEQKEFFKNKIDSYSKLIKSKEAKKNNQEILKKYFTKIKKEKDPEKLNIFFKMIIDSIEFVNDYRFYIHLKF

SEQ ID NO: 8111 - protein, 460 aa, Unknown
  Description of Unknown: Integrase B8112 sequence
  cd03768,PTHR30461:SF3,SM00857,G3DSA:1.10.10.2600,IPR036162, PF13408,PS51737,G3DSA:3.40.50.1390,IPR025827,IPR006119, IPR038109,PF07508,IPR011109,SSF53041,PTHR30461, PS51736,Coil,PF00239
MKVAIYTRVSTLEQREKGHSIDEQERKLRSFCDINDWTVKDVYVDAGFSGAKRDRPELTRLLDDISEFDLVLVYKLDRLTRSVRDLLDLLEVFENNNVAFRSATEVYDTTTAIGRLFVTLVGAMAEWERETIRERSLMGKRAAIKKGMILTAPPFYYDRVNNTYIPNQYKDVVLDVYNKVKKGYSIAHIARLYNNSDVKPPNGNEEWTTRMLMHALRNPVTRGHYQWGEIYIEDSHEPIITDEMYNTIIDRLDKHTNTKVVAHTSVFRGKLICPNCGYALTLNSQKRKRKNDTIVYKTYYCNNCKITKGMKPHHITETETLRVFKDHLSKIDLKQYETQEKEKQSHVTIDLSKVMEQRKRYHKLYASGMMQENELFELIKETDEMIEEYEKQRKQVDVKEFDIGKIKEIKNVLLKSWDIFTLEDKADFIQMSIKAINIEYTKLKRGKASNSMKIKDIEFY

SEQ ID NO: 8112 - protein, 460 aa, Unknown
  Description of Unknown: Integrase B8113 sequence
  PTHR30461:SF3,IPR036162,PS51737,IPR011109,PTHR30461, PS00397,PF00239,G3DSA:1.10.10.2600,IPR006119,SSF53041, cd00338,SM00857,IPR025827,IPR038109,PS51736, IPR006118,PF13408,G3DSA:3.40.50.1390,PF07508,Coil
MKRKLNNDKTILRVAIYVRVSTEQQAEDGDSIRDQLNSCETYIKAHENMILAGEYIDGGISGQKTKREDFQKLLSDVRANLIDLIIFTRLDRWFRSLRHYLNTQEVLDKHNVSWTAIRQPFFDTSTAQGRTFVNTSMAFAELEAQNASERIKGVFKDKVSHSEAISGRTPIGYSIVDKHLVPDKDAPIVVAIFEHYQAHSSMGETLRYMQDAFGIVRSRSSLKRMLQNKKYIGIFRDNESYCEPIIEKDLFYDVQRLLKLNIKTCKNRHDYIFSGLIRCVDCGYVMSAASNHNHYVRKSGEEVDHFYSVYRCHANRLHRCVNNKVFFESSIEKELLKRVRPELEQYICDYKLETAPVVQNKARIHKLQTKLSKLKELYLNELITLEEFRTDKADFEHQIEELQKEEQKPVKDLSSLEEFLKLDFENIYSSFTAPEKRRVWRSIIKEIQVDHHKNINIVFL

SEQ ID NO: 8113 - protein, 460 aa, Unknown
  Description of Unknown: Integrase B8114 sequence
  PTHR30461:SF3,IPR036162,PS51737,IPR011109,PTHR30461, PS00397,PF00239,G3DSA:1.10.10.2600,IPR006119,SSF53041, cd00338,SM00857,IPR025827,IPR038109,PS51736, IPR006118,PF13408,G3DSA:3.40.50.1390,PF07508,Coil
MKRKLNNDKTILRVAIYVRVSTEQQAEDGDSIRDQLNSCETYIKAHENMILAGEYIDGGISGQKTKREDFQKLLSDVRANLIDLIIFTRLDRWFRSLRHYLNTQEVLDKHNVSWTAIRQPFFDTSTAQGRTFVNTSMAFAELEAQNASERIKGVFKDKVSHSEAISGRTPIGYSIVDKHLVPNEDAPIVVSIFKHYQAHGSMGETLRYMQDAFGIVRSRSSLKRMLQNKKYIGIFRDNENYCEPIITKELFYDVQRLLKLNIKTCKNRHDYIFSGLIRCVDCGYVMSAASNHNHYVRKSGEEVDHFYPVYRCHANRLHRCVNNKVFFESSIEKELLKRVRPELEQYICDYKLETAPVVQNKARIHKLQTKLSKLKELYLNELITLEEFRTDKADFEHQIEELQKEEQKPVKDLSSLEEFLKLDFENIYSSFTAPERRRVWRSIIKEIQVDHHKNINIVFL

SEQ ID NO: 8114 - protein, 460 aa, Unknown
  Description of Unknown: Integrase B8115 sequence
  SM00857,IPR006118,IPR036162,PF13408,PS51737, G3DSA:3.40.50.1390,IPR025827,IPR006119,IPR011109,SSF53041, PTHR30461,PS00397,PS51736,cd00338,PF00239
MKQSTFPSIPLRAGIYIRVSTEEQHLNGLSLPAQRLALEDYANKNGYVIAGVYADEGISARKSMSRRKGLMRLLEDVRQDKIDMILVTKLDRWFRNIKDYNITEEILREHHCYWKTIFENYDSSTANGQMVINIMLSVNQAECDRTSERIKAVFDYKRSKGMCVTGMCAPYGYIIENGYIKKDPATRSVVEDAIQHYFSCFSIRHTTRYIADKYGENAPSYYKVDKIFHNPKYAGIDKDGAPYCEPYMTMEQYHMLLKSRQAKSWSPSGYVYIFSSLITCPICGCKFSGRQRKAIRKNGAVYCDTRYNCMGKFQYHSGASLRESAIEAYLFEHIDSIIESAQVNLYMDAGNASPKPARSAQSVQEELNRLNTMYQKGRLSEEYYDREYEHLTALLSTSDDRQLEEKRKRLKCVERQFSGDWKVLYKRLDNSHKRAFWKQTIEEILVDPDTRKIKDVKLLI

SEQ ID NO: 8115 - protein, 460 aa, Unknown
  Description of Unknown: Integrase B8116 sequence
  PTHR30461:SF3,SM00857,IPR006118,IPR036162,PF13408, IPR025827,G3DSA:3.40.50.1390,IPR006119,SSF53041,PTHR30461, PS00397,PS51736,cd00338,PF00239
MTKISTDVQRVALYIRVSTEEQAQHGYSLEAQESALVEFANAHNYKIVNIYRDEGFSARKSVIKRKVMQQLLQDVQQNKIDLILFTKLDRWFRNVRDYHAVQAILDRYHVSWQAVLEDYSTTTADGRLKVNIMLSVAENEADRTSERIRFVFDNKIKSGDFCFARPPYGYKVEVIDGMRKLVKDPDTEQIVSTFWEKCLKYRSVLRSIRETNIEFHLARPQKAWTRLFKNPVYAGIFHGIKDYCPAYISFSDWQELQRPEKRIKATQNNRVYLFAGLLRCPICGCTLKSTYSHCSTNKSIEYRHYRCNEKAQGRCTYNRAINEKTLEKYLIDNIRDEMEKFAVEYQAELSEKKKRYPKTDISKLKEQLRRLNTIYMSGNISDNDYLSQAQVIKAAIQKSESEQQELASAADLDSLRHFLQHDFDKIYIDMTDDEKQRLWRSLISEIHFKDNRVSEIIFNV

SEQ ID NO: 8116 - protein, 460 aa, Unknown
  Description of Unknown: Integrase B8117 sequence
  PTHR30461:SF3,SM00857,G3DSA:1.10.10.2600,IPR036162,PF13408, IPR025827,G3DSA:3.40.50.1390,IPR006119,IPR038109,SSF53041, PTHR30461,Coil,PS51736,cd00338,PF00239
MAKQLIRVALYTRVSSDEQVEKGDSIRDQQERGKKYIDSHDNMILQDIYTDDGISGQKLKRDEFQRLIQNAKDNLVDLIIFTKLDRWFRNLRHYLNTQATLEKHNVSWTAIDQPYFDTSTPYGCAFVNQSMIWAELEAKNGGQRVRDVFKTKVTHGEVITGKVLRGYRIEDKHLVLSQEAPIIYDCISYFLKTQSLGRTIKYMRTTHGIIMTLQNFKNSYLRNEKLTGRYRGNEGYCPRLISDEMFADIQRILDHNSNVRVTQKYPYIFSGLLICAECGYKMSGCHINVISKKVSGKVYRYKYPAYECKQYRAYLKCSNGGEIRETTIEQYLLDNIAKEVDQYIAKYATVQKDVIDNRATKNKLRKKLERLKELYLNEIISIEEYKIDRIALENQIESIPDIVEPKQNIMELKRLLASNFETIYSTLSNEEKRKFWRSFIAEIRVHKSVRRSRKYDIDFL

SEQ ID NO: 8117 - protein, 460 aa, Unknown
  Description of Unknown: Integrase B8118 sequence
  PTHR30461:SF3,IPR036162,PS51737,IPR011109,PTHR30461, PS00397,PF00239,G3DSA:1.10.10.2600,IPR006119,SSF53041, cd00338,SM00857,IPR025827,IPR038109, PS51736,IPR006118,PF13408,G3DSA:3.40.50.1390,PF07508,Coil
MKRKLNNDKTILRVAIYVRVSTEQQAEDGDSIRDQLNSCETYIKAHENMILAGEYIDGGISGQKTKREDFQKLLSDVRANLIDLIIFTRLDRWFRSLRHYLNTQEVLDKHNVSWTAIRQPFFDTSTAQGRTFVNTSMAFAELEAQNASERIKGVFKDKVSHSEAISGRTPIGYSIVDKHLVPDKDAPIVVAIFEHYQAHSSMGETLRYMQDAFGIVRSRSSLKRMLQNKKYIGSFRDNENYCEPIITKELFYDVQRLLKLNIKTCKNRHDYIFSGLIRCVDCGYVMSAASNHNHYVRKSGEEVDHFYSVYRCHANRLHRCVNNKVFFESSIEKELLKRVRPELEQYICDYKLETAPVVQNKARIHKLQTKLSKLKELYLNELITLEEFRTDKADFEHQIEELQKEEQKPVKDLSSLEEFLKLDFENIYSSFTAPEKRRVWRSIIKEIQVDHHKNINIVFL

SEQ ID NO: 8118 - protein, 460 aa, Unknown
  Description of Unknown: Integrase B8119 sequence
  SM00857,IPR006118,IPR036162,PF13408,PS51737, G3DSA:3.40.50.1390,IPR025827,IPR006119,IPR011109,SSF53041, PTHR30461,PS00397,PS51736,cd00338,PF00239
MKQSTFPSIPLRAGIYIRVSTEEQHLNGLSLPAQRLALEDYANKNGYVIAGVYADEGISARKSMSRRKGLMRLLEDVRQDKIDMILVTKLDRWFRNIKDYNITEEILREHHCYWKTIFENYDSSTANGQMVINIMLSVNQAECDRTSERIKAVFDYKRSKGMCVTGMCAPYGYIIENGYIKKDPATRSVVEDAIQHYFSCFSIRHTTRYIADKYGENAPSYYKVDKIFHNPKYAGIDKDGAPYCEPYMTMEQYHMLLKSRQAKSWSPSGYVYIFSSLITCPICGCKFSGRQRKAIRKNGAVYCDTRYNCMGKFQYHSGASLRESAIEAYLLEHIDSVIESAQVNLYMDAGNASPKPARSAQSVQEELNRLNTMYQKGRLSEEYYDREYERLTALLSTSDDRQLEEKRKRLKCVERQFSGDWKVLYKRLDNSHKRAFWKQTIEEILVDPDTRKIKDVKLLI

SEQ ID NO: 8119 - protein, 460 aa, Unknown
  Description of Unknown: Integrase B8120 sequence
  PTHR30461:SF3,IPR036162,PS51737,IPR011109,PTHR30461, PS00397,PF00239,G3DSA:1.10.10.2600,IPR006119,SSF53041, cd00338,SM00857,IPR025827,IPR038109, PS51736,IPR006118,PF13408,G3DSA:3.40.50.1390,Coil
MIERCAIYIRVSTAEQSMKGHSLQAQREYLESYAASHDMRVVGIYADEGQTARKELKKRKAIHALLKDVEADKIDVILFWRMDRWFRNVADFYKVQDVLDAHGVRWVSTSESNINMETRDGRLCLNLILTIGQNEVDTTSERIKFTVNNMIQNGRMVWGATNLPFGYTIVEENGCKRMAKDPETACMVEEFYRFFRQTHKKRATVMHMQDTFGINFSYTMLRTMLSSEFYIGKYRSNDNYCPAYLTLDEWKEIQAISENNIKRPRTGRVYFFSGLVHCPVCGTKMAACAGRSIINRKTGEKREYYYYRCNKAILNKQCSYTSRISQNLIEDYLLNNLDVEYRKYQVRCNKVKEAQAHKKKKRSADSVRSEIERLNILFQKGRIEFDYYEEQYGKLEDELKSFDEVIIREKDHSNVVGMLDSDFKEMYSSLSLENRQAFWQQIIKAIYVTKDRNVDYVDFL

SEQ ID NO: 8120 - protein, 460 aa, Unknown
  Description of Unknown: Integrase B8121 sequence
  cd03768,PTHR30461:SF3,SM00857,G3DSA:1.10.10.2600,IPR036162, PS51737,G3DSA:3.40.50.1390,IPR006119,IPR038109,PF07508, IPR011109,SSF53041,PTHR30461,PS51736,Coil, PF00239
MKVAIYTRVSSAEQANEGYSIHEQKKKLISYCEIHDWNEYKVFTDAGISGGSMKRPALQNLMKQLSYFDLVLVYKLDRLTRNVRDLLDMLEEFEQYNVSFKSATEVFDTTSAIGKLFITMVGAMAEWERETIRERSLFGSRAAVREGNYIREAPFCYDNIEGKLHPNEHAKVIDLIVSMFKKGISANEIARRLNSSKVYVPKKKSWNRNSLIRLMRSPVLRGHTKYGDMLIENTHEPVLSKHDYNAINDAISSKTHKSKVKHHAIFRGALVCPQCNRRLHLYAGTVKDRKGYKYDVRRYKCETCSKNKDVKNVSFNESEVENKFINLLKSYELNKFHIRKVEPVKKIEYDIDKINKQKINYTRSWSLGYIEDDEYFELMEEINATKKMIEEQTTENKQSVSKEQIQSINNFILKGWEELTIKDKEELILSTVDKIEFNFIPKDKKHKTNTLDINSIHFKF

SEQ ID NO: 8121 - protein, 460 aa, Unknown
  Description of Unknown: Integrase B8122 sequence
  cd03768,PTHR30461:SF3,SM00857,G3DSA:1.10.10.2600,IPR036162, PS51737,G3DSA:3.40.50.1390,IPR006119,IPR038109,PF07508, IPR011109,SSF53041,PTHR30461,PS51736,Coil, PF00239
MKVAIYTRVSSAEQANEGYSIHEQKKKLISYCEIHDWNEYKVFTDAGISGGSMKRPALQNLMKQLSYFDLVLVYKLDRLTRNVRDLLDMLEEFEQYNVSFKSATEVFDTTSAIGKLFITMVGAMAEWERETIRERSLFGSRAAVREGNYIREAPFCYDNIEGKLHPNEHAKVIDLIVSMFKKGISANEIARRLNSSKVYVPKKKSWNRNSLIRLMRSPVLRGHTKYGDMLIENTHEPVLSKHDYNAINDAISSKTHKSKVKHHAIFRGALVCPQCNRRLHLYAGTVKDRKGYKYDVRRYKCETCSKNKDVKNVSFNESEVENKFINLLKSYELNKFHIQKVEPVKKIEYDIDKINKQKINYTRSWSLGYIEDDEYFELMEEINATKKMIEEQTTENKQSVSKEQIQSINNFILKGWEELTIKDKEELILSTVDKIEFNFIPKDKKHKTNTLDINNIHFKF

SEQ ID NO: 8122 - protein, 460 aa, Unknown
  Description of Unknown: Integrase B8123 sequence
  PTHR30461:SF3,IPR036162,PS51737,IPR011109,PTHR30461, PS00397,PF00239,G3DSA:1.10.10.2600,IPR006119,SSF53041, cd00338,SM00857,IPR025827,IPR038109,PS51736, IPR006118,PF13408,G3DSA:3.40.50.1390,PF07508,Coil
MKRKLNNDKTILRVAIYVRVSTEQQAEDGDSIRDQLNSCETYIKAHENMILAGEYIDGGISGQKTKREDFQKLLSDVRANLIDLIIFTRLDRWFRSLRHYLNTQEVLDKHNVSWTAIRQPFFDTSTAQGRTFVNTSMAFAELEAQNASERIKGVFKDKVSHSEAISGRTPIGYSIVDKHLVPNEDAPIVVSIFKHYQAHGSMGETLRYMQDAFGIVRSRSSLKRMLQNKKYIGIFRDNENYCEPIITKELFYDVQRLLKLNIKTCKNRHDYIFSGLIRCVDCGYVMSAASNHNHYVRKSGEEVDHFYSVYRCHANRLHRCVNNKVFFESSIEKELLKRVRPELEQYICDYKLETAPVVQNKARIHKLQTKLSKLKELYLNELITLEEFRTDKADFEHQIEELQKEEQKPVKDLSSLEEFLKLDFENIYSSFTAPEKRRVWRSIIKEIQVDHHKNINIVFL

SEQ ID NO: 8123 - protein, 460 aa, Unknown
  Description of Unknown: Integrase B8124 sequence
  PTHR30461:SF3,IPR036162,PS51737,IPR011109,PTHR30461, PS00397,PF00239,G3DSA:1.10.10.2600,IPR006119,SSF53041, SM00857,IPR025827,IPR038109,PS51736,cd03768, IPR006118,PF13408,G3DSA:3.40.50.1390,PF07508,Coil
MEKNKHINKIAAIYIRVSTDAQAEDGYSIDAQKEQLAAYCVSKGIKNYEFYIDGGWSGSNINRPEIQRLIKNAQDGKISHCIVYKLDRLSRSQKDTLYLIEDVFIPNEVSFVSLNETLDTSTPMGKLMIGILSAFAQLERENIRLRTRMGMKERVKDGYWMGGGRIPFGYDYDKNQGILVPNNDADKVRKIYSLYIDGKSPQAIADILDLKYDKLVMQILTRKSNYGVIEYNGEEYKGRHEAIISKEIYDKAIKCMNERSINKVAFSKHLLTGLVYCGHCGAKMRYQKWGKNGCKLVCYSQQTSKKYLIKDENCVQERVWAHEVEEAVLNYLFSLKEDENGDIIDTSNIEETDIIKELQENYDLCQKKIKRLYNLYAESENDLLLETIQEQREKLKEIEDKIKEEQIKRKNLDQKINTAELVTNLRETWKYMSIEEQQTTLRMLINRITINDNNINIDLK

SEQ ID NO: 8124 - protein, 460 aa, Unknown
  Description of Unknown: Integrase B8125 sequence
  PTHR30461:SF3,IPR036162,PS51737,IPR011109,PTHR30461, PS00397,PF00239,G3DSA:1.10.10.2600,IPR006119,SSF53041, cd00338,SM00857,IPR025827,IPR038109,PS51736, IPR006118,PF13408,G3DSA:3.40.50.1390,PF07508,Coil
MKRKLNNDKTILRVAIYVRVSTEQQAEDGDSIRDQLNSCETYIKAHENMILAGEYIDGGISGQKTKREDFQKLLSDVRANLIDLIIFTRLDRWFRSLRHYLNTQEVLDKHNVSWTAIRQPFFDTSTAQGRTFVNTSMAFAELEAQNASERIKGVFKDKVSHSEAISGRTPIGYSIVDKHLVPDKDAPIVVAIFEHYQAHSSMGETLRYMQDAFGIVRSRSSLKRMLQNKKYIGIFRDNESYCEPIITKELFYDVQRLLKLNIKTCKNRHDYIFSGLIRCVDCGYVMSAASNHNHYVRKSGEEVDHFYSVYRCHANRLHRCVNNKVFFESSIEKELLKRVRPELEQYICDYKLETAPVVQNKARIHKLQTKLSKLKELYLNELITLEEFRTDKADFEYQIEELQKEEQKPVKDLSSLEEFLKLDFENIYSSFTAPEKRRVWRSIIKEIQVNHHKNINIVFL

SEQ ID NO: 8125 - protein, 460 aa, Unknown
  Description of Unknown: Integrase B8126 sequence
  PTHR30461:SF3,IPR036162,PS51737,IPR011109,PTHR30461, PS00397,PF00239,G3DSA:1.10.10.2600,IPR006119,SSF53041, cd00338,SM00857,IPR025827,IPR038109,PS51736, IPR006118,PF13408,G3DSA:3.40.50.1390,PF07508,Coil
MKRKLNNDKTILRVAIYVRVSTEQQAEDGDSIRDQLNSCEAYIEAHENMILAGEYIDGGISGQKTKREDFQKLLSDVRANLIDLIIFTRLDRWFRSLRHYLNTQEVLDKHNVSWTAIRQPFFDTSTAQGRTFVNTSMAFAELEAQNASERIKGVFKDKVSHSEAISGRTPIGYSIVDKHLVPDKDAPIVVSIFKHYQAHGSMGETLRYMQDAFGIVRSRSSLKRMLQNKKYIGIFRDNESYCEPIITKELFYDVQSLLKLNIKTCKNRHDYIFSGLIRCVDCGYVMSAASNHNHYVRKSGEEVDHFYPVYRCHANRLHRCVNNKVFFESSIEKELLKRVRPELEQYICDYKLETAPVVQNKARIHKLQTKLSKLKELYLNELITLEEFRTDKADFEHQIEELQKEEQKPVKDLSSLEEFLKLDFENIYSSFTAPEKRRVWRSIIKEIQVDHHKNINIVFL

SEQ ID NO: 8126 - protein, 460 aa, Unknown
  Description of Unknown: Integrase B8127 sequence
  SM00857,G3DSA:1.10.10.2600,IPR036162,PS51737,G3DSA:3.40.50.1390, IPR006119,IPR038109,PF07508,IPR011109,SSF53041, PTHR30461,PS51736,cd00338,PF00239
MDKVAIYCRESTERQDISTLISMCEKAAHDLGFDTYKIYKDIKSGYSKDREEYSQLKNDIQAGEINVLILYESSRLTRDEIEHHLFFALLRIKEVRLYTLNHGWIDLNNEDDTFMSSLLNLLDAREGRKGAKRTKDRMEEIARNGRWTGGPAPFGYRLVNKELVVDPTEAEIVKQIFQLFLEGKKRQTLSTLSGFECKRVRRMLINPVYTGKLKFHQIEYKNKKRITHKEWEVLDGIHEAIIDETTFNLVQNRLKLEKREVKRDTYIFKDLLKCVCGAKLYRYTSVYTYNGQHKESLVYKCNSKDTYHRFNSILESELLEQVLETLEEVILSLNVNDINAESDNSLIEQLNYYKKEAAALPGKEKLLARQLMNNLLTEETFKELMLEFKEQKEFFKNKIDSYSKLIKSKEAKKNNQEILKKYFTKIKKEKDPEKLNIFFKMIIDSIEFVNDYRFYIHLKF

SEQ ID NO: 8127 - protein, 460 aa, Unknown
  Description of Unknown: Integrase B8128 sequence
  PTHR30461:SF3,IPR036162,PS51737,IPR011109, PTHR30461,PS00397,PF00239,G3DSA:1.10.10.2600, IPR006119,SSF53041,cd00338,SM00857,IPR025827,IPR038109 ,PS51736,IPR006118,PF13408,G3DSA:3.40.50.1390,PF07508,Coil
MKRKLNNDKTILRVAIYVRVSTEQQAEDGDSIRDQLNSCETYIKAHENMILAGEYIDGGISGQKTKREDFQKLLSDVRANLIDLIIFTRLDRWFRSLRHYLNTQEVLDKHNVSWTAIRQPFFDTSTAQGRTFVNTSMAFAELEAQNASERIKGVFKDKVSHSEAISGRTPIGYSIVDKHLVPDKDAPIVVAIFEHYQAHSSMGETLRYMQDAFGIVRSRSSLKRMLQNKKYIGIFRDNESYCEPIITKELFYDVQRLLKLNIKTCKNRHDYIFSGLIRCVDCGYVMSAASNHNHYVRKSGEEVDHFYSVYRCHANRLHRCVNNKVFFESSIEKELLKRVRPELEQYICDYKLETAPVVQNKARIHKLQTKLSKLKELYLNELITLEEFRTDKADFEHQIEELQKEEQKPVKDLSSLEEFLKLDFENIYSSFTAPEKRRVWRSIIKEIQVDHHKNINIVFL

SEQ ID NO: 8128 - protein, 460 aa, Unknown
  Description of Unknown: Integrase B8129 sequence
  SM00857,IPR006118,IPR036162,PF13408,IPR025827, G3DSA:3.40.50.1390,PS51737,IPR006119,SSF53041,IPR011109, PTHR30461,PS00397,PS51736,cd00338,PF00239
MNKSDLSSDASLRAAIYIRVSTEEQHLNGLSLPAQQQALEEYAQKNNYHIIGVYADEGISARKSMSHRKGLLRLLDDVKKNKVDMILVTKLDRWFRNIKDYNITEEILQAHHCYWKTIFENYDSSTANGQMVINIMLSVNQAECDRTSERIKAVFDYKRSQGMCVTGMCAPYGYLIENSYIKKDPAVQHIVEDAIEYYFTCFSIRHTVHYITDKYGDEAPSFYKIDKIFHNPKYAGIDVNGNPYCEPYMTMEQYKILLKSRQAKSWSSSGYTYIFSSLITCPICGCKFSGRQRKRTRQDGSVYCDIRYNCVGKFKYHPGASLRESSIEEYLLKHIDASVESALIEYDLAAAEKSKPVKTAQAYMDERDRLNTLFQKGRISEEYYEAEYQRLSDAILATDEKASIERRKKLINLSQKFNGDWKSIYLQLDNAHKRAFWKQIIENINVDPKTRRISGIKLLI

SEQ ID NO: 8129 - protein, 460 aa, Unknown
  Description of Unknown: Integrase B8130 sequence
  cd00338,SM00857,IPR006118,G3DSA:1.10.10.2600, IPR036162,PF13408,PS51737,G3DSA:3.40.50.1390, IPR025827,IPR006119,IPR038109,SSF53041, IPR011109,PTHR30461,PS00397,PS51736,Coil,PF00239
MIERCAIYIRVSTAEQSMKGHSLQAQREYLESYAASHDMRVVGIYADEGQTARKELKKRKAIHALLKDVEADKIDVILFWRMDRWFRNVADFYKVQDVLDAHGVRWVSTSESNINMETRDGRLCLNLILTIGQNEVDTTSERIKFTVNNMIQNGRMVWGATNLPFGYTIVEENGCKRMAKDPETACMVEEFYRFFRQTHKKRATVMHMQDTFGINFSYTMLRTMLSSEFYIGKYRSNDNYCPAYLTLDEWKEIQAISENNIKRPRTGRVYFFSGLVHCPVCGTKMAACAGRSIINRKTREKREYYYYRCNKAILNKQCSYTSRISQNLIEEYLLNNLDAEYRKYQVRCDKVKEAQTRKKKKRSADSVRSEIERLNILFQKGRIEFDYYEEQYGKLEEELKSFDEVIIREKDHSNVVGMLGSDFKEMYSSLSLENRQAFWQQIIKAIYVTKDRNVDYIDFL

SEQ ID NO: 8130 - protein, 460 aa, Unknown
  Description of Unknown: Integrase B8131 sequence
  PTHR30461:SF3,IPR036162,PS51737,IPR011109,PTHR30461, PS00397,PF00239,G3DSA:1.10.10.2600,IPR006119,SSF53041, cd00338,SM00857,IPR025827,IPR038109,PS51736, IPR006118,PF13408,G3DSA:3.40.50.1390,Coil
MIERCAIYIRVSTAEQSMKGHSLQAQREYLESYAASHDMRVVGIYADEGQTARKELKKRKAIHALLKDVEADKIDVILFWRMDRWFRNVADFYKVQDVLDAHGVRWVSTSESNINMETRDGRLCLNLILTIGQNEVDTTSERIKFTVNNMIQNGRMVWGATNLPFGYTIVEENGCKRMAKDPETACMVEEFYRFFRQTHKKRATVMHMRDTFGINFSYTMLRTMLSSEFYIGKYRSNDNYCPAYLTLDEWKEIQAISENNIKRPRTGRVYFFSGLVHCPVCGTKMAACAGRSIINRKTGEKREYYYYRCNKAILNKQCSYTSRISQNLIEEYLLNNLDTEYRKYQVRCNKVKEAQAHKKKKRSADSVRSEIERLNILFQKGRIEFDYYEEQYGKLEDELKSFDEVIIREKDHSNVVGMLDSDFKEMYSSLSLENRQAFWQQIIKAIYVTKDRNVDYVDFL

SEQ ID NO: 8131 - protein, 459 aa, Unknown
  Description of Unknown: Integrase B8132 sequence
  cd03768,SM00857,G3DSA:1.10.10.2600,IPR036162,PS51737, G3DSA:3.40.50.1390,IPR006119,IPR038109,PF07508,IPR011109, SSF53041,PTHR30461,PS51736,PF00239
MSEIASTKARKRCAVYCRVSSDERLDQEFNSIDAQKEAGHAYVASQRSEGWIPVADDYDDPGFSGGNTERPGLKRLMADIERGQIDIVVVYKIDRLTRSLADFSKMVEVFERHGVSFVSVTQQFNTTTSMGRLMLNVLLSFAQFEREVTGERIRDKIAAAKRKGMWMGGVPPLGYDVDNRLLIINEAEATVVRRIFEEMLTIGSPTQIAVNLTADGITTKAWTTQEGQTRSGTRIDKKYLHKLLRNRIYLGELSHKGNWYPGAHPPIIELELWDKVHAVLARDGHARSVETKIRSRTDALLRGLLYAPSGERMYPTYSRKNGRKYHYYVSKSESRFGAPGKSYERLPAPEIEAAVVAQIRTVLTSPESIASVVRHIQRNGGQVDEATTVMAMGRLNDVWDQLFPVERHRIANLMIERIDLVHIGEVQGIKVKWRELGWDALIGEFAPRGIGAELVEVEA

SEQ ID NO: 8132 - protein, 459 aa, Unknown
  Description of Unknown: Integrase B8133 sequence
  SM00857,G3DSA:1.10.10.2600,IPR036162,PF13408, IPR025827,PS51737,G3DSA:3.40.50.1390,IPR006119, IPR038109,SSF53041,IPR011109,PTHR30461, Coil,PS51736,cd00338,PF00239
MSTTHFYSHYPTIEYKTCALYVRCSKEEQAKFGDTIEAQIEDLKAFAKLHHLKIYAIYVDEGHTARKKYNKRKEFMRMLQDVELHKFEYIIFTKLDRWFRNIADFYKIQEILDNNGVTWLTALERYEMETTNGKLNVNIRLSVAQDEADRDSDRIKDVFRLKVKKGEAITGSLPIGLMVGENGKVDIDPDTVQIAYDMFDYFEAHNSKRGTLLYLIDKYNRYFCYETIARALRNPLYKGEYRGNPDYCPKIIDPARFDRIQVLGKRNVKVRKNNRYYVFSGLAQCKECGHALVANTTVQKRYNREYTQYRCNYYSNSHLCTHSHGTNEKVIEKYLLDNIKPELEKYVTTYEVKQNAPTKKADPSKIKTKMQRLKELYVNELIDLDDYRIEYEQYKQELDKLTSTATPEVKDLSAIRSFLALDLQSIYDSLTPQERRTLWSSIIDKIIISDGGDIEIVFL

SEQ ID NO: 8133 - protein, 459 aa, Unknown
  Description of Unknown: Integrase B8134 sequence
  SM00857,IPR036162,PF13408,PS51737,IPR025827, G3DSA:3.40.50.1390,IPR006119,IPR011109,SSF53041,PTHR30461, Coil,PS51736,cd00338,PF00239
MSTTHFYSHYPTIEYKTCALYVRCSKEEQAKFGDTIEAQIEDLKAFAKLHHLKIYAIYVDEGHTARKKYNKRKEFMRMLQDVELHKFEYIIFTKLDRWFRNIAVFYKIQEILDNNGVTWLTAMERYEMETTNGKLNVNIRLSVAQDEADRDSDRIKDVFRLKVKKGEAITGSLPIGLMVGENGKVDIDPDTVQIAYDMFDYFEVHNSKRGTLLYLIDKYNRYFCYETIARALRNPLYKGEYRGNPDYCPKIIDPARFDRIQVLGKRNVKVRKNNRYYVFSGLAQCKECGHALVANTTVQKRYNREYTQYRCNYYSNSHLCTHSHGMNEKVIEKYLLDNIKPELEKYVTAYDVKQNAPTKKADPSKIKTKMQRLKELYVNELIDLDDYRIEYEQYKQELDKLTSTAAPEVKDLSAIRSFLALDLQSIYDSLTPQEKRTLWSSIIDKIIISDGGDIEIVFL

SEQ ID NO: 8134 - protein, 459 aa, Unknown
  Description of Unknown: Integrase B8135 sequence
  PTHR30461:SF3,SM00857,IPR006118,G3DSA:1.10.10.2600, IPR036162,PF13408,PS51737,G3DSA:3.40.50.1390, IPR025827,IPR006119,IPR038109,IPR011109, SSF53041,PTHR30461,PS00397,PS51736,cd00338,PF00239
MNNLARNLETMPLRVALYIRVSTDEQAIKGLSLEAQQEDLMQHVKEQGWTVAGIYVDAAKTARKRIYKRAEFLRMLEDVKEGKIDRILCTRLDRWFRNVGDYYKVMEILEKNHCDWSCTQEQYDTSTAGGRLYINMKLSIAQNEADQTGERINVVFDSKIQNGTVVSGSVPFWLRINEEKRLEIIPEKAAILKDAFDHYEATVTKRGTITYIRNKYGLNWCEATFSRMLKDKLAIGVYDKNGRYNPSFCPAAISEEQFNHVQELMKRNGKTAPSGHVYIFTSLLVCAECKHNLVGYRNGQNYYYYRCNHHFRRKLCPHNRSLSERKIESWLLNNLASEIEKCKIAYSVNAAAKERSSRQAEKAALKNKLTKLKELYVNDLIDLEDYKKDYEIYSTALANIPDEQQEKAPDFSLVEHMMQNGFKEIYEGLSREEKRTFWRSIIKKIEINNDGEITGIFFG

SEQ ID NO: 8135 - protein, 459 aa, Unknown
  Description of Unknown: Integrase B8136 sequence
  PTHR30461:SF3,SM00857,IPR036162,PF13408,PS51737, IPR025827,G3DSA:3.40.50.1390,IPR006119,IPR011109,SSF53041, PTHR30461,Coil,PS51736,cd00338,PF00239
MSTTHFYSHYPTIEYKTCALYVRCSKEEQAKFGDTIEAQIEDLKAFAKLHHLKIYAIYVDEGHTARKKYNKRKEFMRMLQDVELHKFEYIIFTKLDRWFRNIADFYKIQEILDNNGVTWLTALERYEMETTNGKLNVNIRLSVAQDEADRDSDRIKDVFRLKVKKGEAITGSLPIGLMVGENGKVDIDPDTVQIAYDMFDYFEVHNSKRGTLLYLIDKYNRYFCYETIARALRNPLYKGEYRGNPDYCPKIIDPARFDRIQVLGKRNVKVRKNNRYYVFSGLAQCKECGHALVANTTVQKRYNREYTQYRCNYYSNSHLCTHSHGINEKVIEKYLLDNIKPELEKYVTAYDVKQNAPTKKADPSKIKTKMQRLKELYVNELIDLDDYRIEYEQYKQELDKLTSTAAPEVKDLSAIRSFLALDLQSIYDSLTPQEKRTLWSSIIDKIIISDGGDIEIVFL

SEQ ID NO: 8136 - protein, 459 aa, Unknown
  Description of Unknown: Integrase B8137 sequence
  PTHR30461:SF3,SM00857,IPR006118,IPR036162,PF13408, IPR025827,G3DSA:3.40.50.1390,IPR006119,SSF53041,PTHR30461, PS00397,PS51736,cd00338,PF00239
MKNNLLRVALYIRVSSEEQANSGDSIRDQKERCEKYIANHENMALQDTYIDDGISGQKLKRDDFQRLLQSVKDRKVDLIIFTKLDRWFRNLRHYLNTQAVLDKNDVSWTAIDQPYFDTSTPYGRAFVAQSMTWAELEAQNGGQRVKDVFKTKVQHGEVITGKVLRGYCIQDKHLVLSDEAPAMYDSIAYFLRTQSMGKTIKYMQQTHGITMTLQNFRNSYLRNEKLTGRYRGVENYCPRLISDEMFAQAQKLLDEKRNVRVSQKYPYIFTGLLVCSECGYKMSGCHINVVVKKKGEVYRYRYPAYECKQYGAYHRCNNGGEIRESRIEEYLLEHIGEEIDRYMADYDASGQAVIDNRAKKNKIRRKLDRLKELFLNELVTLDEYKLDREALEAQLEQIPDIEEPKKNLIELKHLLDNDFNILYKDFSNEEKRLFWRSIIKEIQVPKSVNRHRKYKIIPL

SEQ ID NO: 8137 - protein, 459 aa, Unknown
  Description of Unknown: Integrase B8138 sequence
  PTHR30461:SF3,SM00857,IPR036162,PF13408,IPR025827, G3DSA:3.40.50.1390,PS51737,IPR006119,SSF53041,IPR011109, PTHR30461,Coil,PS51736,cd00338,PF00239
MSTTHFYSHYPTIEYKTCALYVRCSKEEQAKFGDTIEAQIEDLKAFAKLHHLKIYAIYVDEGHTARKKYNKRKEFMRMLQDVELHKFEYIIFTKLDRWFRNIADFYKIQEILDNNGVTWLTALERYEMETTNGKLNVNIRLSVAQDEADRDSDRIKDVFRLKVKKGEAITGSLPIGLMVGENGKVDTDPDTVQIAYDMFDYFEAHNSKRGTLLYLIDKYNRYFCYETIARALRNPLYKGEYRGNPDYCPKIIDPARFDRIQVLGKRNVKVRKNNRYYVFSGLAQCKECGHALVANTTVQKRYNREYTQYRCNYYSNSHLCTHSHGTNEKVIEKYLLDNIKPELEKYVTAYEVKQNAPTKKADPSKIKTKMQRLKELYVNELIDLDDYRIEYEQYKQELDKLTSTAAPEAKDLSAIRSFLALDLQSIYDSLTPQEKRTLWSSIIDKIIISDGGDIEIVFL

SEQ ID NO: 8138 - protein, 459 aa, Unknown
  Description of Unknown: Integrase B8139 sequence
  PTHR30461:SF3,SM00857,G3DSA:1.10.10.2600,IPR036162,PF13408, IPR025827,PS51737,G3DSA:3.40.50.1390,IPR006119,IPR038109, SSF53041,IPR011109,PTHR30461,Coil, PS51736,cd00338,PF00239
MSTTHFYSHYPTIEYKTCALYVRCSKEEQAKFGDTIEAQIEDLKAFAKLHHLKIYAIYVDEGHTARKKYNKRKEFMRMLQDVKLHKFEYIIFTKLDRWFRNIADFYKIQEILDNNGVTWLTALERYEMETTNGKLNVNIRLSVAQDEADRDSDRIKDVFRLKVKKGEAITGSLPIGLMVGENGKVDIDPDTVQIAYDMFDYFEAHNSKRGTLLYLIDKYNRYFCYETIARALRNPLYKGEYRGNPDYCPKIIDPTRFDRIQVLGKRNVKVRKNNRYYVFSGLAQCKECGHALVANTTVQKRYNREYTQYRCNYYSNSHLCTHSHGTNEKVIEKYLLDNIKPELEKYVTAYEVKQNAPTKKADPSKIKTKMQRLKELYVNELIDLDDYRIEYEQYKQELDRLTSTAAPEVKDLSAIRSFLTLDLQSIYDSLTPQEKRTLWSSIIDKIIISDGGDIEIVFL

SEQ ID NO: 8139 - protein, 459 aa, Unknown
  Description of Unknown: Integrase B8140 sequence
  PTHR30461:SF3,SM00857,G3DSA:1.10.10.2600,IPR036162,PF13408, PS51737,IPR025827,G3DSA:3.40.50.1390,IPR006119,IPR038109, SSF53041,IPR011109,PTHR30461,Coil,PS51736, cd00338,PF00239
MSTTHFYSHYPTIEYKTCALYVRCSKEEQAKFGDTIEAQIEDLKAFAKLHHLKIYAIYVDEGHTARKKYNKRKEFMRMLQDVELHKFEYIIFTKLDRWFRNIADFYKIQEILDNNGVTWLTALERYEMETTNGKLNVNIRLSVAQDEADRDSDRIKDVFRLKVKKGEAITGSLPIGLMVGEDGKVAIDPDTVQIAYDMFDYFEAHNSKRGTLLYLIDKYNRYFCYETIARALRNPLYKGEYRGNPDYCPKIIDPARFDRIQVLGKRNVKVRKNNRYYVFSGLAQCKECGHALVANTTVQKRYNREYTQYRCNYYSNSHLCTHSHGMNEKAIEKYLLDNIKPELEKYVTAYEVKQNAPTKKADPSKIKTKMQRLKELYVNELIDLDDYRIEYEQYKQELDKLTSTAAPEAKDLSAIRSFLDLDLQSIYDSLTPQEKRTLWSSIIDKIIISDSGDIEIVFL

SEQ ID NO: 8140 - protein, 459 aa, Unknown
  Description of Unknown: Integrase B8141 sequence
  PTHR30461:SF3,SM00857,G3DSA:1.10.10.2600,IPR036162,PF13408, PS51737,IPR025827,G3DSA:3.40.50.1390,IPR006119,IPR038109, IPR011109,SSF53041,PF00239,PTHR30461,PS51736, Coil,cd00338
MINNELKPKLIRVALYIRVSGEEQKIKGLSLESQRERLEAYAREQGWVIVGIYIDAAKTARKKLHKRSEFQWMLDAVRHDEVDMLLFTRLDRWFRSVPDYYKVMEVLEAHNCEWKTIDDGEGYDTTTASGRLYINIKLSIAQNEADLDGERIDVVFDSKVQHGTVLSGKCPFWLRVNEEKRLELVPEKTAILQDAFDYYEQSTSQRATIKYIRETYGVNWCDATFRRMLHDKLAIGVYDRNGRYNPTFCPAAISSEQFERVQELTKRNSRSNPTGKVYIFTGILVCDECRHNMVGYKSRGIYYYRCNQHFQRGRCEHNHSAREDRVEAWLFEHLSDEIEKYEVSWDVQAAGRKKTAAGVERATLKRKLTKLKELYVNDLIDMEEYKKDYETYSAALLKLDEAQIEEKKVDLSGVRQIVSKGFQEIYGTLTREEKRTLWKSVLKEIRIDNDQNITGISFF

SEQ ID NO: 8141 - protein, 459 aa, Unknown
  Description of Unknown: Integrase B8142 sequence
  cd03768,SM00857,G3DSA:1.10.10.2600,IPR036162,PF13408, PS51737,G3DSA:3.40.50.1390,IPR025827,IPR006119,IPR038109, IPR011109,SSF53041,PTHR30461,PS51736,Coil, PF00239
MEQVTAGYSLEAQQEKLNGYAAYQKYTLLPPYADEGFSGASLSRPALQKLIGDVKDGKIDIVLIYKLDRLSRRVRDVIDLVELFAEHNVTLYSLTENLDVSSPFGRAALKMSATFSELERETIRDRMMMGKDQRVKQGKALPTRVAPFGYRYDIQKKRFEIVPEEAEIVQKLFELYISGSYNFRQLHDYARAHWNHPYFGERNPLSCKPIIHRIMYAGYIIYKGELYKGTNFDPIIEYQTYLQAQEVVKRHLTQRQSPNSPYLLTGLLVCARCGNRYVGKLYDRNVLQKNGTKTTKYKYRAYGCAARVKRDKNYHPVKCDNDIFPAEELDEIIEKRLKRLKFTQFVAGGQNLVDPLLEENVELKRRAEKLLDLYLDNGLTKEEYLSRRDKLEKKIVQNEKLIQEETSRPSRPNTTIDNLKERIAAYDTLDRVEKQNLLNSLISQISIDGERIVVKWRVK

SEQ ID NO: 8142 - protein, 459 aa, Unknown
  Description of Unknown: Integrase B8143 sequence
  SM00857,G3DSA:1.10.10.2600,IPR036162,PF13408,IPR025827, PS51737,G3DSA:3.40.50.1390,IPR006119,IPR038109,SSF53041, IPR011109,PTHR30461,Coil,PS51736,cd00338, PF00239
MSTTHFYSHYPTIEYKTCALYVRCSKEEQAKFGDTIEAQIEDLKAFAKLHHLKIYAIYVDEGHTARKKYNKRKEFMRMLQDVELHKFEYIIFTKLDRWFRNIADFYKIQEILDNNGVTWLTALERYEMETTNGKLNVNIRLSVAQDEADRDSDRIKDVFRLKVKKGEAITGSLPIGLTVGENGKVDIDPDTVQIAYDMFDYFEAHNSKRGTLLYLIDKYNRYFCYETIARALRNPLYKGEYRGNPDYCPKIIDPARFDRIQVLGKRNVKVRKNNRYYVFSGLAQCKECGHALVANTTVQKRYNREYTQYRCNYYSNSHLCTHSHGMNEKVIEKYLLDNIKPELEKYVTAYDVKQNAPTKKADPSKIKTKMQRLKELYVNELIDLDDYRIEYEQYKQELDKLTSTAAPEVKDLSAIRSFLALDLQSIYDSLTPQERRTLWSSIIDKIIISDGGDIEIVFL

SEQ ID NO: 8143 - protein, 459 aa, Unknown
  Description of Unknown: Integrase B8144 sequence
  PTHR30461:SF3,SM00857,IPR006118,IPR036162,PF13408, IPR025827,G3DSA:3.40.50.1390,PS00397,IPR006119,SSF53041, PTHR30461,Coil,PS51736,cd00338,PF00239
MKNNLLRVALYIRVSSEEQANSGDSIRDQKERCEKYIADHENMALQDTYIDDGISGQKLKRDDFQRLLQSVNDHKVDLIIFTKLDRWFRNLRHYLNTQAVLDKNDVSWTAIDQPYFDTSTPYGRAFVAQSMTWAELEAQNGGQRVKDVFKTKVQHGEVITGKVLRGYCIQDKHLVLSDEAPAMYDSIAFFLRTQSMGKTIKYMQQTHGITMTLQNFRNSYLRNEKLTGRYRGVENYCPRLISDEMFAQAQKLLDEKRNVRVSQKYPYIFTGLLVCSECGYKMSGCHINVVVKKKGEVYRYRYPAYECKQYGAYHRCNNGGEIRESRIEEYLLEHIGEEIDKYMADYDASGQAIIDNRAKKNKIRRKLDRLKELFLNELITLDEYKLDREALEAQLEQIPDTEEPKKNLIELKHLLDNDFNILYKDFSNEEKRLFWRSIIKEIQVPKSVNRHRKYKIMPL

SEQ ID NO: 8144 - protein, 459 aa, Unknown
  Description of Unknown: Integrase B8145 sequence
  SM00857,IPR036162,PF13408,IPR025827, PS51737,G3DSA:3.40.50.1390,IPR006119,IPR011109, SSF53041,PTHR30461,Coil,PS51736, cd00338,PF00239
MSTTHFYSHYPTIEYKTCALYVRCSKEEQAKFGDTIEAQIEDLKAFAKLHHLKIYAIYVDEGHTARKKYNKRKEFMRMLQDVELHKFEYIIFTKLDRWFRNIADFYKIQEILDNNGVTWLTALERYEMETTNGKLNVNIRLSVAQDEADRDSDRIKDVFRLKVKKGEAITGSLPIGLMVGENGKVDIDPDTVQIAYDMFDYFEVHNSKRGTLLYLIDKYNRYFCYETIARALRNPLYKGEYRGNPDYCPKIIDPARFDRIQVLGKRNVKVRKNNRYYVFSGLAQCKECGHALVANTTVQKRYNREYTQYRCNYYSNSHLCTHSHGTNEKVIEKYLLDNIKPELEKYVTAYEVKQNAPTKKADPSKIKTKMQRLKELYVNELIDLDDYRIEYEQYKQELDRLTSTAAPEVKDLSAIRSFLALDLQSIYDSLTPQEKRTLWSSIIDKIIISDSGDIEIVFL

SEQ ID NO: 8145 - protein, 459 aa, Unknown
  Description of Unknown: Integrase B8146 sequence
  PTHR30461:SF3,SM00857,G3DSA:1.10.10.2600,IPR036162,PF13408, PS51737,IPR025827,G3DSA:3.40.50.1390,IPR006119,IPR038109, PF07508,IPR011109,SSF53041,PF00239,PTHR30461, PS51736,Coil,cd00338
MDEYIDRAISGKTDNRPNFQRLIKDSEKGHFDAVIMYTLDRFARNRYDSAIYKAKLKKNGVRVFYAKQPMPDTPEGIILESVLEGYAEYYSENLARSIKRGLKENALHGIAMGNPGLGYKIGEDRRYVIDPVEAQAVREIFTLYAEGKSKTQIVEHLNEKGYKTSRGNPFNKNSLERILRNDRYIGVYRYDDVVLEDTVPPIIDKTLFAKVQALLQHNFASRARNKAKEDYLLSTKLFCGHCGSPMIGESGTSKTGKLYHYYKCGKRKRGGNCDKKIEKKDWLEELVVRYTVQYVLTDENIDLIATKAMELIEKDLQDTSVLIGLQGMLKDTNKKIKNLMSAIEQGIITATTKERLEELEQERLNIEGQIAREEMKKPLLSKERIVYWLTSFKSGDINDVEYQRRIIDTLVNAVFVYDDGDKGRRIVLTFNTSGNNTLTISGSDIEGFTPLKKQVELFV

SEQ ID NO: 8146 - protein, 459 aa, Unknown
  Description of Unknown: Integrase B8147 sequence
  SM00857,G3DSA:1.10.10.2600,IPR036162,PF13408,IPR025827, PS51737,G3DSA:3.40.50.1390,IPR006119,IPR038109,SSF53041, IPR011109,PTHR30461,Coil,PS51736,cd00338, PF00239
MSTTHFYSHYPTIEYKTCALYVRCSKEEQAKFGDTIEAQIEDLKAFAKLHHLKIYAIYVDEGHTARKKYNKRKEFMRMLQDVELHKFEYIIFTKLDRWFRNIADFYKIQEILDNNGVTWLTALERYEMETTNGKLNVNIRLSVAQDEADRDSDRIKDVFRLKVKKGEAITGSLPIGLMVGENGKVDIDPDTVQIAYDMFDYFEAHNSKRGTLLYLIDKYNRYFCYETIARALRNPLYKGEYRGNPDYCPKIIDPARFDRIQVLGKRNVKVRKNNRYYVFSGLAQCKECGHALVANTTVQKRYNREYTQYRCNYYSNSHLCTHSHGMNEKAIEKYLLDNIKPELEKYVTAYEIKQNAPTKKADPSKIKTKMQRLKELYVNELIDLDDYRIEYEQYKQELDKLTSTAAPEVKDLSAIRSFLALDLQSIYDSLTPQEKRTLWSSIIDKIIISDGGDIEIVFL

SEQ ID NO: 8147 - protein, 459 aa, Unknown
  Description of Unknown: Integrase B8148 sequence
  PTHR30461:SF3,SM00857,G3DSA:1.10.10.2600,IPR036162,PF13408, IPR025827,PS51737,G3DSA:3.40.50.1390,IPR006119,IPR038109, SSF53041,IPR011109,PTHR30461,Coil,PS51736, cd00338,PF00239
MSTTHFYSHYPTIEYKTCALYVRCSKEEQAKFGDTIEAQIEDLKAFAKLHHLKIYAIYVDEGHTARKKYNKRKEFMRMLQDVELHKFEYIIFTKLDRWFRNIADFYKIQEILDNNGVTWLTALERYEMETTNGKLNVNIRLSVAQDEADRDSDRIKDVFRLKVKKGEAITGSLPIGLMVGENGKVDIDPDTVQIAYDMFDYFETHNSKRGTLLYLIDKYNRYFCYETIARALRNPLYKGEYRGNPDYCPKIIDPARFDRIQVLGKRNVKVRKNNRYYVFSGLAQCKECGHALVANTTVQKRYNREYTQYRCNYYSNSHLCTHSHGTNEKVIEKYLLDNIKPELEKYVTAYEVKQNAPTKKADPSKIKTKMQRLKELYVNELIDLDDYRIEYEQYKQELDKLTSTAAPEVKDLSAIRSFLALDLQSIYDSLTPQEKRTLWSSIIDKIIISDGGDIEIVFL

SEQ ID NO: 8148 - protein, 459 aa, Unknown
  Description of Unknown: Integrase B8149 sequence
  PTHR30461:SF3,SM00857,G3DSA:1.10.10.2600,IPR036162,PF13408, PS51737,IPR025827,G3DSA:3.40.50.1390,IPR006119,IPR038109, SSF53041,IPR011109,PTHR30461,Coil,PS51736, cd00338,PF00239
MSTTHFYSHYPTIEYKTCALYVRCSKEEQAKFGDTIEAQIEDLKAFAKLHHLKIYAIYVDEGHTARKKYNKRKEFMRMLQDVELHKFEYIIFTKLDRWFRNIADFYKIQEILDNNGVTWLTALERYEMETTNGKLNVNIRLSVAQDEADRDSDRIKDVFRLKVKKGEAITGSLPIGLTVGENGKVDIDPDTVQIAYDMFDYFETHNSKRGTLLYLIDKYDRYFCYETIARALRNPLYKGEYRGNPDYCPKIIDPARFDRIQVLGKRNVKVRKNNRYYVFSGLAQCKECGHALVANTTVQKRYNREYTQYRCNYYSNSHLCTHSHGMNEKAIEKYLLDNIKPELEKYVTAYEVKQNTPTKKADPSKIKAKMQRLKELYVNELIDLDDYRIEYEQYKQELDRLTSTAAPEVKDLSAIRSFLALDLQSIYDSLTPQEKRTLWSSIIDKIIISDSGDIEIVFL

SEQ ID NO: 8149 - protein, 459 aa, Unknown
  Description of Unknown: Integrase B8150 sequence
  PTHR30461:SF3,SM00857,G3DSA:1.10.10.2600,IPR036162,PS51737, G3DSA:3.40.50.1390,IPR006119,IPR038109,PF07508,SSF53041, IPR011109,PTHR30461,PS51736,cd00338,PF00239
MGNKKVTKIDATIKIASFDGGIVKKRRVAAYARVSTAAEEQETSLAAQRDYYEQYIKENKEWEFVGIYYDDGISGLSFRNRDGFNRMIKDALDGKIDLILTKSLSRFARNTVDTLTTIRKLKAANIEVYFEKENIFTLDSKGEFLITIMSSIAQEESRSISENVTWGTRKRFSDGKYHVPYDSFLGYEKGTDGSLQIVEKEAAIVRLIYLLYLAGKSPHTICELFNALEIPTTKQQGPWNKTPVVSILTNEKYKGDALLQKTITIDFLTGKRKINEGEVTQYYVSNAHDPIVSAEVFEMVQNALKYRRGTSLRFSGFYPLGGRVFCSSCGSFFGHKILQRRRNGRLTRKEIWRCNSYYDGNAHPHSIKDGQMVDGLAAALQTAIESNMDVVDLCWETMKAIHPRLQRPKYEKIIRSIYEDANRTRKNILFLHFLIDKVSVSDGLHLTFCLKDGTQIEYN

SEQ ID NO: 8150 - protein, 459 aa, Unknown
  Description of Unknown: Integrase B8151 sequence
  PTHR30461:SF3,SM00857,IPR036162,PF13408,IPR025827, G3DSA:3.40.50.1390,PS51737,IPR006119,IPR011109,SSF53041, PF00239,PTHR30461,PS51736,Coil, cd00338
MSTTHFYSHYPTIEYKTCALYVRCSKEEQAKFGDTIEAQIEDLKAFAKLHHLKIYAIYVDEGHTARKKYNKRKEFMRMLQDVELHKFKYIIFTKLDRWFRNIADFYKIQEILDNNGVTWLTALERYEMETTNGKLNVNIRLSVAQDEADRDSDRIKDVFRLKVKKGEAITGSLPIGLTVGENGKVDIDPDTVQIAYDMFDYFETHNSKRGTLLYLIDKYDRYFCYETIARALMNPLYKGEYRGNPDYCPKIIDPARFDRIQVLGKRNVKVRKNNRYYVFSGLAQCKECGHALVANTTVQKRYSREYTRYRCNYYSNSHLCTHSHGISEKVIETYLLDNIKPELEKYITDYEIKQNVPTKKADPSKIKTKMQRLKELYVNELIDLDDYRIEYEQYKQELDKLTSTAAPEVKDLSAIRSFLALDLQSIYDSLTPQEKRTLWSSIIDKIIISDSGDIEIVFL

SEQ ID NO: 8151 - protein, 459 aa, Unknown
  Description of Unknown: Integrase B8152 sequence
  PTHR30461:SF3,G3DSA:1.10.10.2600,IPR036162,PF13408,PS51737, G3DSA:3.40.50.1390,IPR025827,IPR006119,IPR038109,PF07508, IPR011109,SSF53041,PTHR30461,Coil,cd00338, PF00239
MIEDSAKRQFQAVIVYRLDRFTRNRYDSAIYKARLKKNGVKVLSAMENLNGSPESIIMESLLEGMAEYYSVELSQKITRGMRENALKGKALGGQRVLGYKVNSDCYFEIDETTAPVVVDIFKLYSSGKTVKEICDILNARGVKTARGGAFNKNSLHTILTNKKYIGIYKTKYGEIVGGIPAIIDKELFEMVALRMEQNKKAPARAKAEINYLLSTKLFCGKCRSAMVGESGTSKTCKKYYYYACVKKKREKACDKSNVKKDWIEDLVIQRTVTDILKDDVIEKIADRLVELQKAEAAQSGTMLYLENSLAEIQVSIKNIMTAIEKGIITESTKTRLTELEDEKRNVEIEIAKESIARRIISREQIIYWISSFKDGDITSEKYRQQLIDTFVHAVFVYDDKIVITYNYSGENNTATISDLDLSSPPKINHPQGWIYFCRGPAGVEVYPPLRGKSLQVHQK

SEQ ID NO: 8152 - protein, 459 aa, Unknown
  Description of Unknown: Integrase B8153 sequence
  SM00857,G3DSA:1.10.10.2600,IPR036162,PF13408,IPR025827, PS51737,G3DSA:3.40.50.1390,IPR006119,IPR038109,SSF53041, IPR011109,PTHR30461,Coil,PS51736,cd00338, PF00239
MSTTHFYSHYPTIEYKTCALYVRCSKEEQAKFGDTIEAQIEDLKAFAKLHHLKIYAIYVDEGHTARKKYNKRKEFMRMLQDVELHKFEYIIFTKLDRWFRNIADFYKIQEILDNNGVTWLTALERYEMETTNGKLNVNIRLSVAQDEADRDSDRIKDVFRLKVKKGEAITGSLPIGLMVGENGKVDIDPDTVQIAYDMFDYFEAHNSKRGTLLYLIDKYNRYFCYETIARALRNPLYKGEYRGNPDYCPKIIDPARFDRIQVLGKRNVKVRKNNRYYVFSGLAQCKECGHALVANTTVQKRYNREYTQYRCNYYSNSHLCTHSHGTNEKVIEKYLLDNIKPELEKYVTAYEVKQNAPTKKADPSKIKTKMQRLKELYINELIDLDDYRIEYEQYKQELDRLTSTAAPEVKDLSAIRSFLALDLQSIYDSLTPQEKRTLWSSIIDKIIISDSGDIEIVFL

SEQ ID NO: 8153 - protein, 459 aa, Unknown
  Description of Unknown: Integrase B8154 sequence
  SM00857,G3DSA:1.10.10.2600,IPR036162,PF13408,IPR025827, G3DSA:3.40.50.1390,PS51737,IPR006119,IPR038109,SSF53041, IPR011109,PTHR30461,Coil,PS51736,cd00338, PF00239
MSTTHFYSHYPTIEYKTCALYVRCSKEEQAKFGDTIEAQIEDLKAFAKLHHLKIYAIYVDEGHTARKKYNKRKEFMRMLQDVELHKFEYIIFTKLDRWFRNIADFYKIQEILDNNGVTWLTALERYEMETTNGKLNVNIRLSVAQDEADRDSDRIKDVFRLKVKKGEAITGSLPIGLMVGENGKVDIDPDTVQIAYDMFDYFEAHNSKRGTLLYLIDKYNRYFCYETIAHALRNPLYKGEYRGNPDYCPKIIDPARFDRIQVLGKRNVKVRKNNRYYVFSGLAQCKECGHALVANTTVQKRYNREYTQYRCNYYSNSHLCTHSHGTNEKVIEKYLLDNIKPELEKYVTTYEVKQNAPTKKADPSKIKTKMQRLKELYVNELIDLDDYRIEYEQYKQELDRLTSTAAPEVKDLSAIRSFLALDLQSIYDSLTPQEKRTLWSSIIDKIIISDGGDIEIVFL

SEQ ID NO: 8154 - protein, 459 aa, Unknown
  Description of Unknown: Integrase B8155 sequence
  PTHR30461:SF3,SM00857,G3DSA:1.10.10.2600,IPR036162,PF13408, IPR025827,PS51737,G3DSA:3.40.50.1390,IPR006119,IPR038109, SSF53041,IPR011109,PTHR30461,Coil,PS51736, cd00338,PF00239
MSTTHFYSHYPTIEYKTCALYVRCSKEEQAKFGDTIEAQIEDLKAFAKLHHLKIYAIYVDEGHTARKKYNKRKEFMRMLQDVELHKFEYIIFTKLDRWFRNIADFYKIQEILDNNGVTWLTALERYEMETTNGKLNVNIRLSVAQDEADRDSDRIKDVFRLKVKKGEAITGSLPIGLTVGENGKVDIDPDTVQIAYDMFDYFETHNSKRGTLLYLIDKYDRYFCYETIARALRNPLYKGEYRGNPDYCPKIIDPARFDRIQVLGKRNVKVRKNNRYYVFSGLAQCKECGHALVANTTVQKRYNREYTQYRCNYYSNSHLCTHSHGMNEKVIEKYLLDNIKPELEKYVTAYEVKQNAPTKKADPSKIKTKMQRLKELYVNELIDLDDYRIEYEQYKQELDKLTSTAAPEAKDLSAIRSFLALDLQSIYDSLTPQEKRTLWSSIIDKIIISDGGDIEIVFL

SEQ ID NO: 8155 - protein, 459 aa, Unknown
  Description of Unknown: Integrase B8156 sequence
  SM00857,G3DSA:1.10.10.2600,IPR036162,PF13408,IPR025827, G3DSA:3.40.50.1390,PS51737,IPR006119,IPR038109,SSF53041, IPR011109,PTHR30461,Coil,PS51736,cd00338, PF00239
MSTTHFYSHYPTIEYKTCALYVRCSKEEQAKFGDTIEAQIEDLKAFAKLHHLKIYAIYVDEGHTARKKYNKRKEFMRMLQDVELHKFEYIIFTKLDRWFRNIADFYKIQEILDNNGVTWLTALERYEMETTNGKLNVNIRLSVAQDEADRDSDRIKDVFRLKVKKGEAITGSLPIGLTVGENGKVDIDPDTVQIAYDMFDYFETHNSKRSTLLYLIDKYNRYFCYETIARALRNPLYKGEYRGNPDYCPKIIDPARFDRIQVLGKRNVKVRKNNRYYVFSGLAQCKECGHALVANTTVQKRYNREYTQYRCNYYSNSHLCTHSHGMNEKAIEKYLLDNIKPELEKYVTAYEVKQNVPTKKADPSKIKTKMQRLKELYVNELIDLDDYRIEYEQYKQELDRLTSTAAPEVKDLSAIRSFLALDLQSIYDSLTPQEKRTLWSSIIDKIIISDSGDIEIVFL

SEQ ID NO: 8156 - protein, 459 aa, Unknown
  Description of Unknown: Integrase B8157 sequence
  PTHR30461:SF3,SM00857,IPR036162,PF13408,PS51737, IPR025827,G3DSA:3.40.50.1390,IPR006119,IPR011109,SSF53041, PTHR30461,Coil,PS51736,cd00338,PF00239
MSTTHFYSHYPTIEYKTCALYVRCSKEEQAKFGDTIEAQIEDLKAFAKLHHLKIYAIYVDEGHTARKKYNKRKEFMRMLQDVELHKFEYIIFTKLDRWFRNIADFYKIQEILDNNGVTWLTALERYEMETTNGKLNVNIRLSVAQDEADRDSDRIKDVFRLKVKKGEAITGSLPIGLMVGENGKVDIDPDTVQIAYDMFDYFEVHNSKRGTLLYLIDKYNRYFCYETIARALRNPLYKGEYRGNPDYCPKIIDPARFDRIQVLGKRNVKVRKNNRYYVFSGLAQCKECGHALVANTTVQKRYNREYTQYRCNYYSNSHLCTHSHGMNEKVIEKYLLDNIKPELEKYVTAYDVKQNAPTKKADPSKIKTKMQRLKELYVNELIDLDDYRIEYEQYKQELDKLTSTAAPEVKDLSAIRSFLALDLQSIYDSLTPQEKRTLWSSIIDKIIISDGGDIEIVFL

SEQ ID NO: 8157 - protein, 459 aa, Unknown
  Description of Unknown: Integrase B8158 sequence
  PTHR30461:SF3,SM00857,G3DSA:1.10.10.2600,IPR036162,PF13408, IPR025827,PS51737,G3DSA:3.40.50.1390,IPR006119,IPR038109, SSF53041,IPR011109,PTHR30461,Coil, PS51736,cd00338,PF00239
MSTTHFYSHYPTIEYKTCALYVRCSKEEQAKFGDTIEAQIEDLKAFAKLHHLKIYAIYVDEGHTARKKYNKRKEFMRMLQDVELHKFEYIIFTKLDRWFRNIADFYKIQEILDNNGVTWLTALERYEMETTNGKLNVNIRLSVAQDEADRDSDRIKDVFRLKVKKGEAITGSLPIGLTVGENGKVDIDPDTVQIAYDMFDYFEAHNSKRGTLLYLIDKYNRYFCYETIARALRNPLYKGEYRGNLDYCPKIIDPARFDRIQVLGKRNVKVRKNNRYYVFSGLAQCKECGHALVANTTVQKRYNREYTQYRCNYYSNSHLCTHSHGMNEKVIEKYLLDNIKPELEKYVTAYDVKQNAPTKKADPSKIKTKMQRLKELYVNELIDLDDYRIEYEQYKQELDKLTSTAAPEVKDLSAIRSFLALDLQSIYDSLTPQEKRTLWSSIIDKIIISDGGDIEIVFL

SEQ ID NO: 8158 - protein, 459 aa, Unknown
  Description of Unknown: Integrase B8159 sequence
  SM00857,G3DSA:1.10.10.2600,IPR036162,PF13408,IPR025827, PS51737,G3DSA:3.40.50.1390,IPR006119,IPR038109,SSF53041, IPR011109,PTHR30461,Coil,PS51736,cd00338, PF00239
MSTTHFYSHYPTIEYKTCALYVRCSKEEQAKFGDTIEAQIEDLKAFAKLHHLKIYAIYVDEGHTARKKYNKRKEFMRMLQDVELHKFEYIIFTKLDRWFRNIADFYKIQEILDNNGVTWLTALERYEMETTNGKLNVNIRLSVAQDEADRDSDRIKDVFRLKVKKGEAITGSLPIGLTVGENGKVDIDPDTVQIAYDMFDYFETHNSKRGTLLYLIDKYNRYFCYETIARALRNPLYKGEYRGNPDYCPKIIDPARFDRIQVLGKRNVKVRKNNRYYVFSGLAQCKECGHALVANTTVQKRYNREYTQYRCNYYSNSHLCTHSHGMNEKAIEKYLLDNIKPELEKYVTAYEVKQNAPTKKADPSKIKTKMQRLKELYVNELIDLDDYRIEYEQYKQELDRLTSTAAPKVKDLSAIRSFLALDLQSIYDSLTPQEKRTLWSSIIDKIIISDSGDIEIVFL

SEQ ID NO: 8159 - protein, 459 aa, Unknown
  Description of Unknown: Integrase B8160 sequence
  SM00857,G3DSA:1.10.10.2600,IPR036162,PF13408,IPR025827, PS51737,G3DSA:3.40.50.1390,IPR006119,IPR038109,SSF53041, IPR011109,PF00239,PTHR30461,PS51736,Coil, cd00338
MSTTHFYSHYPTIEYKTCALYVRCSKEEQAKFGDTIEAQIEDLKAFAKLHHLKIYAIYVDEGHTARKKYNKRKEFMRMLQDVELHKFEYIIFTKLDRWFRNIADFYKIQEILDNNGVTWLTALERYEMETTNGKLNVNIRLSVAQDEADRDSDRIKDVFRLKVKKGEAITGSLPIGLTVGENGKVDIDPDTVQIAYDMFDYFETHNSKRGTLLYLIDKYNRYFCYETISRALRNPLYKGEYRGNPDYCPKIIDPARFDRIQVLGKRNVKVRKNNRYYVFSGLAQCKECGHALVANTTVQKRYNREYTQYRCNYYSNSHLCTHSHGMNEKAIEKYLLDNIKPELEKYVTAYEVKQNAPTKKADPSKIKAKMQRLKELYVNELIDLDDYRIEYEQYKQELDRLTSTAAPEVKDLSAIRSFLALDLQSIYDSLTPQEKRTLWSSIIDKIIISDSGDIEIVFL

SEQ ID NO: 8160 - protein, 459 aa, Unknown
  Description of Unknown: Integrase B8161 sequence
  PTHR30461:SF3,SM00857,IPR036162,PF13408,PS51737, IPR025827,G3DSA:3.40.50.1390,IPR006119,IPR011109,SSF53041, PTHR30461,Coil,PS51736,cd00338,PF00239
MSTTHFYSHYPTIEYKTCALYVRCSKEEQAKFGDTIEAQIEDLKAFAKLHHLKIYAIYVDEGHTARKKYNKRKEFMRMLQDVELHKFEYIIFTKLDRWFRNIADFYKIQEILDNNGVTWLTALERYEMETTNGKLNVNIRLSVAQDEADRDSDRIKDVFRLKVKKGEAITGSLPIGLMVGENGKVDIDPDTVQIAYDMFDYFEVHNSKRGTLLYLIDKYNRYFCYETIARALRNPLYKGEYRGNPDYCPKIIDPARFDRIQVLGKRNVKVRKNNRYYVFSGLAQCKECGHALVANTTVQKRYNREYTQYRCNYYSNSHLCTHSHGMNEKVIEKYLLDNIKPELEKYVTAYDVKQNAPTKKADPNKIKTKMQRLKELYVNELIDLDDYRIEYEQYKQELDKLTSTAAPEVKDLSAIRSFLALDLQSIYDSLTPQEKRTLWSSIIDKIIISDGGDIEIVFL

SEQ ID NO: 8161 - protein, 459 aa, Unknown
  Description of Unknown: Integrase B8162 sequence
  SM00857,G3DSA:1.10.10.2600,IPR036162,PF13408, IPR025827,PS51737,G3DSA:3.40.50.1390,IPR006119, IPR038109,SSF53041,IPR011109,PTHR30461, Coil,PS51736,cd00338,PF00239
MSTTHFYSHYPTIEYKTCALYVRCSKEEQAKFGDTIEAQIEDLKAFAKLHHLKIYAIYVDEGHTARKKYNKRKEFMRMLQDVELHKFEYIIFTKLDRWFRNIADFYKIQEILDNNGVTWLTALERYEMETTNGKLNVNIRLSVAQDEADRDSDRIKDVFRLKVKKGEAITGSLPIGLMVGENGKVDIDPDTVQIAYDMFDYFETHNSKRGTLLYLIDKYNRYFCYETIARALRNPLYKGEYRGNPDYCPKIIDPARFDRIQVLGKRNVKVRKNNRYYVFSGLAQCKECGHALVANTTVQKRYNREYTQYRCNYYSNSHLCTHSHGMNEKVIEKYLLDNIKPELEKYVTAYDVKQNVPTKKADPSKIKTKMQRLKELYVNELIDLDDYRIEYEQYKQELDKLTSTAAPEVKDLSAILSFLALDLQSIYDSLTPQEKRTLWSSIIDKIIISDGGDIEIVFL

SEQ ID NO: 8162 - protein, 459 aa, Unknown
  Description of Unknown: Integrase B8163 sequence
  PTHR30461:SF3,cd00338,SM00857,G3DSA:1.10.10.2600,IPR036162, PF13408,PS51737,IPR025827,G3DSA:3.40.50.1390,IPR006119, IPR038109,IPR011109,SSF53041,PTHR30461,PS51736, Coil,PF00239
MINNELKPKLIRVALYIRVSGEEQKIKGLSLESQRERLEAYAREQGWVIVGIYIDAAKTARKKLHKRSEFQRMLDAVRHDEVDMLLFTRLDRWFRSVPDYYKVMEVLEAHNCEWKTIDDGEGYDTTTASGRLYINIKLSIAQNEADLDGERIDVVFDSKVQHGTVLSGKCPFWLRVNEEKRLELVPEKTAILQDAFDYYEQSTSQRATIKYIRETYGVNWCDATFRRMLHDKLAIGVYDRNGRYNPTFCPAAISPEQFERVQELTKRNSRSNPTGKVYIFTGILVCDECRHNMVGYKSRGIYYYRCNQHFQRGRCEHNHSAREDRVEAWLFEHLSDEIEKYEVSWDVQAAGRKKTAAGVERATLKRKLTKLKELYMNDLIDMEEYKKDYETYSAALLKLDKAQIEEKKVDLSGVRQIVSKGFLEIYDTLTREEKRTLWKSVLKEIRIDNDQNITGISFF

SEQ ID NO: 8163 - protein, 459 aa, Unknown
  Description of Unknown: Integrase B8164 sequence
  SM00857,IPR036162,PF13408,PS51737,IPR025827, G3DSA:3.40.50.1390,IPR006119,IPR011109,SSF53041,PTHR30461, Coil,PS51736,cd00338,PF00239
MSTTHFYSHYPTIEYKTCALYVRCSKEEQAKFGDTIEAQIEDLKAFAKLHHLKIYAIYVDEGHTARKKYNKRKEFMRMLQDVELHKFEYIIFTKLDRWFRNIADFYKIQEILDNNGVTWLTALERYEMETTNGKLNVNIRLSVAQDEADRDSDRIKDVFRLKVKKGEAITGSLPIGLMVGENGKVDIDPDTVQIAYDMFDYFEVHNSKRGTLLYLIDKYNRYFCYETIARALRNPLYKGEYRGNPDYCPKIIDPARFDRIQVLGKRNVKVRKNNRYYVFSGLAQCKECGHALVANTTVQKRYNREYTQYRCNYYSNSHLCTHSHGMNEKVIEKYLLDNIKPELEKYVTAYEVKQNAPTKKADPSKIKTKMQRLKDLYVNELIDLDDYRIEYEQYKQELDRLTSTASPEAKDLSAIRSFLALDLQSIYDSLTPQEKRTLWSSIIDKIIISDGGDIEIVFL

SEQ ID NO: 8164 - protein, 459 aa, Unknown
  Description of Unknown: Integrase B8165 sequence
  SM00857,G3DSA:1.10.10.2600,IPR036162,PF13408, IPR025827,PS51737,G3DSA:3.40.50.1390,IPR006119, IPR038109,SSF53041,IPR011109,PTHR30461, Coil,PS51736,cd00338,PF00239
MSTTHFYSHYPTIEYKTCALYVRCSKEEQAKFGDTIEAQIEDLKAFAKLHHLKIYAIYVDEGHTARKKYNKRKEFMRMLQDVELHKFEYIIFTKLDRWFRNIADFYKIQEILDNNGVTWLTALERYEMETTNGKLNVNIRLSVAQDEADRDSDRIKDVFRLKVKKGEAITGSLPIGLMVGENGKVDIDPDTVQIAYDMFDYFEAHNSKRGTLLYLIDKYNRYFCYETIARALRNPLYKGEYRGNPDYCPKIIDPARFDRIQVLGKRNVKVRKNNRYYVFSGLAQCKECGHALVANTTVQKRYNREYTQYRCNYYSNSHLCTHSHGTNEKVIEKYLLDNIKPELEKYVTAYEVKQNAPTKKADPSKIKTKMQRLKELYVNELIDLDDYRIEYEQYKQELDRLTSTAAPEIKDLSAIRSFLALDLQSIYDSLTPQEKRTLWSSIIDKIIISDGGDIEIVFL

SEQ ID NO: 8165 - protein, 459 aa, Unknown
  Description of Unknown: Integrase B8166 sequence
  PTHR30461:SF3,IPR036162,PS51737,IPR011109,PTHR30461, PS00397,PF00239,G3DSA:1.10.10.2600,IPR006119,SSF53041, SM00857,IPR025827,IPR038109,PS51736,cd03768, IPR006118,PF13408,G3DSA:3.40.50.1390,PF07508,Coil
MSKKKLKTAAIYVRVSTDAQAEEGYSVEAQKEQLAAYCISKEIKNYEFYIDGGWSGSSINRPEIQRLIRDAKAHKLSHCIVYKLDRLSRSQKDTLYLIEDVFIPNDVSFVSLNETIDTASPTGKMMIGILSAFAQLERENIRLRTRMGMKERVKDGYWMGGGRTPFGYDYDRNQGILVPNKDADKVKKIYNMYIEGKSQQAIADILDLKYDRLVTQILKRKSNYGVIEYNGEEYRGRHEPIITKEIYDKAMLCMKERSERRVPTSKHLLTGLLVCGHCGAKIRYQKWGESGCKLICYSHQKTKKYLIKDENCPQEKLWAHEVENTILNYLFSLKEDDNGDDLDESTLIIETNVLKELEEGRELLQKKIKRLYNLYAESDDDILLDTINEQKKKLADTEKKIEVEKLKVEDSSRKMKTAKLVTNLSETWDYMDIEEQQKTLRMIINKITITDNNINVDFK

SEQ ID NO: 8166 - protein, 459 aa, Unknown
  Description of Unknown: Integrase B8167 sequence
  PTHR30461:SF3,SM00857,IPR006118,G3DSA:1.10.10.2600,IPR036162, PF13408,IPR025827,G3DSA:3.40.50.1390,PS51737,IPR006119, IPR038109,SSF53041,IPR011109,PTHR30461,PS00397, PS51736,cd00338,PF00239
MYNNTPNKIIRVATYLRVSSDKQAKSGDSLRDQAETLTEYINKNENMILFDTYMDDGVSGQKIDRDDFSRLLDDIRADKIDLIIFTRLDRWFRSVKHYLNTQTILDKHNVSWTAVSQPFFDTSTAHGRAFVQQSMVWAELEANMDSERINAVFQNKVANGEVITGNPPVGYMVENKHLVFDPVKAPMVIKMFDTFIKTSNLSAVYRMLLDDYGIMRNPSTIRKMFKKRIYTGEYRGNKNYCPALIDKNKFDHVQNLLSKNIKCSQKHEYIFSAMVKCECCGNAMSAHQISTRGRTRKDGTFARYQHSGYRCKRRYDLKDCCNKKIIYESVLERWMLEHLHENIETYITEYDIASRPAMDNTAKIKSIEKKLSKLKELFLNDLISLDEYKLDKSNLENQLSLLPSCIAPVKDLKHINNVLNTDIDSIYTTFTIDEKQRFWRSFIDCIYVDDKRNFRVKFL

SEQ ID NO: 8167 - protein, 459 aa, Unknown
  Description of Unknown: Integrase B8168 sequence
  SM00857,G3DSA:1.10.10.2600,IPR036162,PF13408,IPR025827, G3DSA:3.40.50.1390,PS51737,IPR006119,IPR038109,SSF53041, IPR011109,PTHR30461,Coil,PS51736,cd00338, PF00239
MSTTHFYSHYPTIEYKTCALYVRCSKEEQAKFGDTIEAQIEDLKAFAKLHHLKIYAIYVDEGHTARKKYNKRKEFMRMLQDVELHKFEYIIFTKLDRWFRNIADFYKIQEILDNNGVTWLTALERYEMETTNGKLNVNIRLSVAQDEADRDSDRIKDVFRLKVKKGEAITGSLPIGLTVGENGKVDIDPDTVQIAYDMFDYFETHNSKRSTLLYLIDKYNRYFCYETIARALRNPLYKGEYRGNPDYCPKIIDPARFDRIQVLGKRNVKVRKNNRYYVFSGLAQCKECGHALVANTTVQKRYNREYTQYRCNYYSNSHLCTHSHGMNEKAIEKYLLDNIKPELEKYVTTYEVKQNAPTKKVDPSKIKTKMQRLKELYVNELIDLDDYRIEYEQYKQELDRLTSTAAPEVKDLSAIRSFLALDLQSIYDSLTPQEKRTLWSSIIDKIIISDSGDIEIEFL

SEQ ID NO: 8168 - protein, 459 aa, Unknown
  Description of Unknown: Integrase B8169 sequence
  PTHR30461:SF3,SM00857,G3DSA:1.10.10.2600,IPR036162,PF13408, IPR025827,PS51737,G3DSA:3.40.50.1390,IPR006119,IPR038109, SSF53041,IPR011109,PTHR30461,Coil,PS51736, cd00338,PF00239
MSTTHFYSHYPTIEYKTCALYVRCSKEEQAKFGDTIEAQIEDLKAFAKLHHLKIYAIYVDEGHTARKKYNKRKEFMRMLQDVELHKFEYIIFTKLDRWFRNIADFYKIQEILDNNGVTWLTALERYEMETTNGKLNVNIRLSVAQDEADRDSDRIKDVFRLKVKKGEAITGSLPIGLMVGENGKVDIDPDTVQIAYDMFDYFEAHNSKRGTLLYLIDKYNRYFCYETIARALRNPLYKGEYRGNPDYCPKIIDPARFDRIQVLGKRNVKVRKNNRYYVFSGLAQCKECGHALVANTTVQKRYNREYTQYRCNYYSNSHLCTHSHGTNEKVIEKYLLDNIKPELEKYVTAYEVKQNAPTKKADPSKIKTKMQRLKELYVNELIDLDDYRIEYEQYKQELDRLTSTAAPEVKDLSAIRSFLALDLQSIYDSLAPQEKRTLWSSIIDKIIISDSGDIEIVFL

SEQ ID NO: 8169 - protein, 459 aa, Unknown
  Description of Unknown: Integrase B8170 sequence
  PTHR30461:SF3,SM00857,IPR036162,PF13408,PS51737, IPR025827,G3DSA:3.40.50.1390,IPR006119,IPR011109,SSF53041, PTHR30461,Coil,PS51736,cd00338,PF00239
MSTTHFYSHYPTIEYKTCALYVRCSKEEQAKFGDTIEAQIEDLKAFAKLHHLKIYAIYVDEGHTARKKYNKRKEFMRMLQDVELHKFEYIIFTKLDRWFRNIADFYKIQEILDNNGVTWLTALERYEMETTNGKLNVNIRLSVAQDEADRDSDRIKDVFRLKVKKGEAITGSLPIGLMVGENGKVDIDPDTVQIAYDMFDYFEVHNSKRGTLLYLIDKYNRYFCYETIARALRNPLYKGEYRGNPDYCPKIIDPARFDRIQVLGKRNVKVRKNNRYYVFSGLAQCKECGHALVANTTVQKKYNREYTQYRCNYYSNSHLCTHSHGMNEKVIEKYLLDNIKPELEKYVTAYDVKQNAPTKKADPSKIKTKMQRLKELYVNELIDLDDYRIEYEQYKQELDKLTSTAAPEVKDLSAIRSFLALDLQSIYDSLTPQEKRTLWSSIIDKIIISDGGDIEIVFL

SEQ ID NO: 8170 - protein, 459 aa, Unknown
  Description of Unknown: Integrase B8171 sequence
  PTHR30461:SF3,SM00857,G3DSA:1.10.10.2600,IPR036162,PF13408, IPR025827,G3DSA:3.40.50.1390,PS51737,IPR006119,IPR038109, IPR011109,SSF53041,PF00239,PTHR30461, PS51736,Coil,cd00338
MSTTHFYSHYPTIEYKACALYVRCSKEEQAKFGDTIEAQIEDLKAFARLHHLKIYAIYADEGHTARKKYNKRKEFMRMLQDVELHKFEYIIFTKLDRWFRNIADFYKIQEILDNNGVTWLTALERYEMETTNGKLNVNIRLSVAQDEADRDSDRIKDVFRLKVKKGEAITGSLPIGLMVGENGKVDIDPDTVQIAYDMFDYFETHNSKRGTLLYLIDKYNRYFCYETIARALRNPLYKGEYRGNPDYCPKIIDPARFDRIQVLGKRNVKVRKNNRYYVFSGLAQCKECGHALVANTTVQKKYNREYTQYRCNYYSNSHLCTHSHGMNEKVIEKYLLDNIKPELEKYVTAYDVKQNAPTKKADPSKIKTKMQRLKELYVNELIDLDDYRIEYEQYKQELDKLTSTAAPEVKDLSAIRSFLALDLQSIYDSLTPQEKRTLWSSIIDKIIISDGGDIEIVFL

SEQ ID NO: 8171 - protein, 459 aa, Unknown
  Description of Unknown: Integrase B8172 sequence
  PTHR30461:SF3,SM00857,G3DSA:1.10.10.2600,IPR036162,PF13408, IPR025827,PS51737,G3DSA:3.40.50.1390,IPR006119,IPR038109, SSF53041,IPR011109,PTHR30461,Coil,PS51736, cd00338,PF00239
MSTTHFYSHYPTIEYKTCALYVRCSKEEQAKFGDTIEAQIEDLKAFAKLHHLKIYAIYVDEGHTARKKYNKRKEFMRMLQDVELHKFEYIIFTKLDRWFRNIADFYKIQEILDNNGVTWLTALERYEMETTNGKLNVNIRLSVAQDEADRDSDRIKDVFRLKVKKGEAITGSLPIGLMVGENGKVDIDPDTVQIAYDMFDYFETHNSKRGTLLYLIDKYNRYFCYETIARALRNPLYKGEYRGNPDYCPKIIDPARFDRIQVLGKRNVKVRKNNRYYVFSGLAQCKECGHALVANTTVQKKYNREYTQYRCNYYSNSHLCTHSHGMNEKVIEKYLLDNIKPELEKYVTAYDVKQNAPTKKADPNKIKTKMQRLKELYINELIDLDDYRIEYEQYKQELDKLTSTAAPEVKDLSAIRSFLALDLQSIYDSLTPQERRTLWSSIIDKIIISDGGDIEIVFL

SEQ ID NO: 8172 - protein, 459 aa, Unknown
  Description of Unknown: Integrase B8173 sequence
  PTHR30461:SF3,SM00857,IPR036162,PF13408,IPR025827, G3DSA:3.40.50.1390,PS51737,IPR006119,SSF53041,IPR011109, PF00239,PTHR30461,PS51736,Coil,cd00338
MSTTHFYSHYPTIEYKTCALYVRCSKEEQAKFGDTIEAQIEDLKAFAKLHHLKIYAIYVDEGHTARKKYNKRKEFMRMLQDVELHKFEYIIFTKLDRWFRNIADFYKIQEILDNNGVTWLTALERYEMETTNGKLNVNIRLSVAQDEADRDSDRIKDVFRLKVKKGEAITGSLPIGLTVGENGKVDIDPDTVQIAYDMFDYFETHNSKRGTLLYLIDKYDRYFCYETIARALMNPLYKGEYRGNPDYCPKIIDPARFDRIQVLGKRNVKVRKNNRYYVFSGLAQCKECGHALVANTTVQKRYSREYTRYRCNYYSNSHLCTHSHGISEKVIETYLLDNIKPELEKYITAYEVKQNAPTKKADPSKIKTKMQRLKELYVNELIDLDDYRIEYEQYKQELDKLTSTAAPEVKDLSAIRSFLALDLQSIYDSLTPQEKRTLWSSIIDKIIISDSGDIDIVFL

SEQ ID NO: 8173 - protein, 459 aa, Unknown
  Description of Unknown: Integrase B8174 sequence
  PTHR30461:SF3,SM00857,G3DSA:1.10.10.2600,IPR036162,PF13408, IPR025827,PS51737,G3DSA:3.40.50.1390,IPR006119,IPR038109, IPR011109,SSF53041,PTHR30461,Coil, PS51736,cd00338,PF00239
MSTTHFYSHYPTIEYKTCALYVRCSKEEQAKFGDTIEAQIEDLKAFAKLHHLKIYAIYVDEGHTARKKYNKRKEFMRMLQDVELHKFEYIIFTKLDRWFRNIADFYKIQEILDNNGITWLTALERYEMETTNGKLNVNIRLSVAQDEADRDSDRIKDVFRLKVKKGEAITGSLPIGLTVGENGKVDIDPDTVQIAYDMFDYFEAHNSKRGTLLYLIDKYNRYFCYETIARALRNPLYKGEYRGNPDYCPKIIDPARFDRIQVLGKRNVKVRKNNRYYVFSGLAQCKECGHALVANTTVQKRYNREYTQYRCNYYSNSHLCTHSHGMNEKVIEKYLLDNIKPELEKYVTAYDVKQNAPTKKADPSKIKTKMQRLKELYVNELIDLDDYRIEYEQYKQELDKLTSTAAPEVKDLSAIRSFLALDLQSIYDSLTPQEKRTLWSSIIDKIIISDGGDIEIVFL

SEQ ID NO: 8174 - protein, 459 aa, Unknown
  Description of Unknown: Integrase B8175 sequence
  PTHR30461:SF3,SM00857,IPR006118,G3DSA:1.10.10.2600,IPR036162, PF13408,PS51737,G3DSA:3.40.50.1390,IPR025827,IPR006119, IPR038109,IPR011109,SSF53041,PTHR30461,PS00397, PS51736,cd00338,PF00239
MNNLARNLESMPFRVALYIRVSTDEQAIKGLSLEAQQEDLMQHVREQGWTVAGIYVDAAKTARKRIYKRVEFLRMLEDVKEGKIDRILCTRLDRWFRNVGDYYKVMEVLEKNHCDWSCTQEQYDTSTAGGRLYINMKLSIAQNEADQTGERINVVFDSKIQNGTVVSGSVPFWLKVNKEKRLEIIPEKAAILKDAFDHYEATITKRGTITYIRNKYGLNWCEATFSRMLKDKLAIGVYDKNGRYNPSFCPAAISEEQFNHVQELMKRNGKTAPSGRIYLFTSLLVCAECKHNLVGYRNGQDYYYYRCNHHFRRKLCHHNRSLSERKIESWLLGNLASEIEKCKIAYSVNAAAKERNSRQAEKAVLKNKLTKLKELYVNDLIDLEDYKKDYEIYSTALANIPDEQQEKAPDFSLVERMMQNGFKEIYDGLSREEKRTFWRSIIKKIEINNDGEITGIFFG

SEQ ID NO: 8175 - protein, 459 aa, Unknown
  Description of Unknown: Integrase B8176 sequence
  PTHR30461:SF3,SM00857,G3DSA:1.10.10.2600,IPR036162,PF13408, IPR025827,PS51737,G3DSA:3.40.50.1390,IPR006119,IPR038109, SSF53041,IPR011109,PTHR30461,Coil,PS51736, cd00338,PF00239
MSTTHFYSHYPTIEYKTCALYVRCSKEEQAKFGDTIEAQIEDLKAFAKLHHLKIYAIYVDEGHTARKKYNKRKEFMRMLQDVELHKFEYIIFTKLDRWFRNIADFYKIQEILDNNGVTWLTALERYEMETTNGKLNVNIRLSVAQDEADRDSDRIKDVFRLKVKKGEAITGSLPIGLMVGENGKVDIDPDAVQIAYDMFDYFEAHNSKRGTLLYLIDKYNRYFCYETIARALRNPLYKGEYRGNPDYCPKIIDPARFDRIQVLGKRNVKVRKNNRYYVFSGLAQCKECGHALVANTTVQKRYNREYTQYRCNYYSNSHLCTHSHGTNEKVIEKYLLDNIKPELEKYVTTYEVKQNAPTKKADPSKIKTKMQRLKELYVNELIDLDDYRIEYEQYKQELDKLTSTAAPEAKDLSAIRSFLALDLQSIYDSLTPQEKRTLWSSIIDKIIISDGGDIEIVFL

SEQ ID NO: 8176 - protein, 459 aa, Unknown
  Description of Unknown: Integrase B8177 sequence
  PTHR30461:SF3,SM00857,IPR006118,IPR036162,PF13408, IPR025827,G3DSA:3.40.50.1390,IPR006119,SSF53041,PTHR30461, PS00397,PS51736,cd00338,PF00239
MKNNLLRVALYIRVSSEEQANSGDSIRDQKERCEKYIADHEDMALQDTYIDDGISGQKLKRDDFQRLLQSVKDRKVDLIIFTKLDRWFRNLRHYLNTQAVLDKNDVSWPAIDQPYFDTSTPYGRAFVAQSMTWAELEAQNGGQRVKDVFKTKVQHGEVITGKVLRGYCIQDKHLVLSDEAPAMYDSIAYFLRTQSMGKTIKYMQQTHGITMTLQNFRNSYLRNEKLTGRYRGVENYCPRLISDEMFAQAQNLLDEKRNVRVSQKYPYVFTGLLVCSECGYKMSGCHINVVVKKKGEVYRYRYPAYECKQYGAYHRCNNGGEIRESRIEEYLLEHIGEEIDRYMADYDASGQAVIDNRAKKNKIRRKLDRLKELFLNELVTLDEYKLDREALEAQLEQIPDIEEPKKNLIELKHLLDNDFNILYKDFSNEEKRLFWRSIIKEIQVPKSVNRHRKYKIIPL

SEQ ID NO: 8177 - protein, 459 aa, Unknown
  Description of Unknown: Integrase B8178 sequence
  PTHR30461:SF3,cd00338,SM00857,G3DSA:1.10.10.2600, IPR036162,PF13408,PS51737,IPR025827, G3DSA:3.40.50.1390,IPR006119,IPR038109,PF07508, IPR011109,SSF53041,PTHR30461,PS51736,Coil,PF00239
MAKKSFSIIDGASCRVALYIRVSGEEQKIKGLSLEAQQERLEAFAREKGWSIVGIYIDAAKTARKNIHKRTEFLRMLEAVKRDEVDLLLFCRLDRWFRSVADYYKVIEILEKHNCGWKTIDEDYDTSTANGRLYINVKLSIAQNEADICGERIAVVFDSKIAHGSAISGSYPYGYRLNSEKKLEIDPDAAAVVRDAFNRYENTVTMRGTTRYIRETYGVNWCCTTFRRILSQPLYTGSYNRHGRQNDNFCPAIISKDQFERVQTLLSKNVKYYPTGKIYLFSSLLVCDECGHRLSGFKSKAYHYYRCQLHHQYDTCSNNSAPREDIIEAWLFDHLQEEIERCKLEWKLKNAEQQRRLGTNEKAALKNKLTKLKELYVNDLIDLEDYKKDYEIYTAALNQLTDPVQETAPDFSAAERLLQSDFKALYDKLSQEDKRTLWRSVIKEIRINKTKEIVGIFFA

SEQ ID NO: 8178 - protein, 459 aa, Unknown
  Description of Unknown: Integrase B8179 sequence
  PTHR30461:SF3,SM00857,G3DSA:1.10.10.2600,IPR036162,PF13408, IPR025827,G3DSA:3.40.50.1390,PS51737,IPR006119,IPR038109, SSF53041,IPR011109,PTHR30461,Coil,PS51736, cd00338,PF00239
MSTTHFYSHYPTIEYKTCALYVRCSKEEQAKFGDTIEAQIEDLKAFAKLHHLKIYAIYVDEGHTARKKYNKRKEFMRMLQDVELHKFEYIIFTKLDRWFRNIADFYKIQEILDNNGVTWLTALERYEMETTNGKLNVNIRLSVAQDEADRDSDRIKDVFRLKVKKGEAITGSLPIGLMVGGNGKVDIDPDNVQIAYDMFDYFEAHNSKRGTLLYLIDKYNRYFCYETIARALRNPLYKGEYRGNPDYCPKIIDPARFDRIQVLGKRNVKVRKNNRYYVFSGLAQCKECGHALVANTTVQKRYNREYTQYRCNYYSNSHLCTHSHGTNEKVIEKYLLDNIKPELEKYVTAYEVKQNAPTKKADPSKIKTKMQRLKELYVNELIDLDDYRIEYEQYKQELDRLTSTAALEVKDLSAIRSFLALDLQSIYDSLTPQEKRTLWSSIIDKIIISDSGDIEIVFL

SEQ ID NO: 8179 - protein, 459 aa, Unknown
  Description of Unknown: Integrase B8180 sequence
  PTHR30461:SF3,SM00857,IPR006118,IPR036162,PF13408, IPR025827,G3DSA:3.40.50.1390,Coil,IPR006119,SSF53041, PTHR30461,PS00397,PS51736,cd00338,PF00239
MKNNLLRVALYIRVSSEEQANSGDSIRDQKERCEKYIADHENMALQDTYIDDGISGQKLKRDDFQRLLQSVKDHKVDLIIFTKLDRWFRNLRHYLNTQAVLDKNDVSWTAIDQPYFDTSTPYGRAFVAQSMTWAELEAQNGGQRVKDVFKTKVQHGEVITGKVLRGYCIQDKHLVLSDEAPAMYDSIAFFLRTQSMGKTIKYMQQTHGITMTLQNFRNSYLRNEKLTGRYRGVENYCPRLISDEMFAQAQKLLDEKRNVRVSQKYPYIFTGLLVCSECGYKMSGCHINVVVKKKGEVYRYRYPAYECKQYGAYHRCNNGGEIRESRIEEYLLEHIGEEIDKYIADYDASGQAIIDNRAKKNKIRRKLDRLKELFLNELITLDEYKLDREALEAQLEQIPDIEEPKKNLIELKHLLDNDFNILYKDFSNEEKRLFWRSIIKEIQVPKSVNRHRKYKIMPL

SEQ ID NO: 8180 - protein, 459 aa, Unknown
  Description of Unknown: Integrase B8181 sequence
  cd00338,SM00857,IPR036162,PF13408, IPR025827,G3DSA:3.40.50.1390,PS51737,IPR006119, IPR011109,SSF53041,PTHR30461,PS51736, Coil,PF00239
MSTTHFYSHYPTIEYKTCALYVRCSKEEQAKFGDTIEAQIEDLKAFAKLHHLKIHAIYVDEGHTARKKYNKRKEFMRMLQDVELHKFEYIIFTKLDRWFRNIADFYKIQEILDNNGVTWLTALERYEMETTNGKLNVNIRLSVAQDEADRDSDRIKDVFRLKVKKGEAITGSLPIGLTVGENGNVDIDPDTVQIAYDMFDYFETHNSKRGTLLYLIDKYDRYFCYETIARALRNPLYKGEYRGNPDYCPKIIDPARFDRIQVLGKRNVKVRKNNRYYVFSGLAQCKECGHALVANTTVQKRYNREYTQYRCNYYSNSHLCTHSHGMNEKAIEKYLLDNIKPELEKYVTAYEVKQNAPTKKADPSKIKTKMQRLKELYVNELIDLDDYRIEYEQYKQELDKLTSTAAPEVKDLSAIRSFLALDLQSIYDSLTPQEKRTLWSSIIDKIIISDGGDIEIVFL

SEQ ID NO: 8181 - protein, 459 aa, Unknown
  Description of Unknown: Integrase B8182 sequence
  PTHR30461:SF3,SM00857,G3DSA:1.10.10.2600,IPR036162,PF13408, IPR025827,PS51737,G3DSA:3.40.50.1390,IPR006119,IPR038109, PF07508,IPR011109,SSF53041,PTHR30461,Coil, PS51736,cd00338,PF00239
MTIIGEYCDKAISGKTDNRPSFQRLIKDSEKGQFEAVIMYTLDRFARNRYDSAIYKAKLKKNGVRVYYAKQPMPDTPEGIILESVLEGYAEYYSENLSRNIKRGMKENALQCIANGGAGMPLGYTVGEDRRYKIDPVGARIVQEIFQMYADGMSATQIINECNKRGYKTARGNAFNKNSLRTMLKNDRYIGVYRFADVVVEGGVPPIISRELFDKVQATLKHNYSARARNKAKDDYLLTAKLFCGHCGSSMVGESGTSKSGKLHHYYKCIERKRKHKCNKAVEKKDWMEELVVRFTVQKVLTDENIERIAVKAMEIIEKESADTTYIDGLRNELKEVKKKIKNLMTAIEQGIITPSTKERMDELELEKNEIEGRIASEEMKKPLLTKERIMYWLYSFKSGNIDDVEYKRRVIDTLVNSVYVYDEGDKGRRIVFTFNISGQNTATLSCSDIACFENTIDI

SEQ ID NO: 8182 - protein, 459 aa, Unknown
  Description of Unknown: Integrase B8183 sequence
  PTHR30461:SF3,SM00857,G3DSA:1.10.10.2600,IPR036162,PF13408, PS51737,G3DSA:3.40.50.1390,IPR025827,IPR006119,IPR038109, PF07508,SSF53041,IPR011109,PTHR30461,Coil, cd00338,PF00239
MTGRNDNRDEFQQMLSDCAKKQFQVVIVWKVDRIGRNREEITFNKYRMKRHGVRVEYVAENIPDSPEAVILESVLEGMAEYYSLQLSQNIRRGYRENAKKCKYAGGRVPLGYKLAEDKSFEIDPATAPVVKDIFNRYAAGQTITEIITDLNAQGLRTATGSEFTKNSLRALLKNEKYIGIFDFKNGEIRIEDGVPAITDKSTFDKVQKLLVTNQRAPAHKWSKAEYLLTDKLFCGSCGGLMVGESGTSKTGAKYSYYLCTNHKRKRGCAQKAIRADWLEKYVLDMAKSIILDDKTIEFIADGTWEYYQQHERRREKVEALKGQLAEVDKALTNIMRAIESGLPFTETTKARVEELDGQKTALTSAIAEAELAYDSGLTRDHILFFLKQFQEFDYSQPQYQKRLIDTFINSIYVYPDEMTFNFNFGNESKTIKFEEMEAAKGGEVFVRCAPCSTKMFGIF

SEQ ID NO: 8183 - protein, 458 aa, Unknown
  Description of Unknown: Integrase B8184 sequence
  cd03768,PTHR30461:SF3,SM00857,G3DSA:1.10.10.2600,IPR036162, PS51737,G3DSA:3.40.50.1390,IPR006119,IPR038109,PF07508, IPR011109,SSF53041,PTHR30461,PS51736,Coil, PF00239
MNYERSYLRSCQVSTLEQKEHGYSIEEQERKLKSFCEINDWSVSDVFIDAGFSGAKRERPELQRMMKDIKRFDLVLVYKLDRLTRNVRDLLDLLEIFEKHNVAFRSATEVYDTSTAMGRLFVTLVGAMAEWERETIRERVMMGKRAAIKQGMILTPPPFYYDRVDNTYIPNDYKKVVLWAYDEVMKGNSSKAIARKLNDSDIPPPNGKRWEDRTITRALRSPITRGHYTWGDVFIENSHEPIITEEMYQQIKERLEERINTKIVSHVSVFRGKFICPRCGGTLTLNTTTRKRKKGYVTYKTYYCNTCKGKKKSFGFAENEALRVFHDYLSKLDLEKYEVKTKQKDDVVTIDIDKIMEQRKRYHKLYAKGLMQEEELFELIKETDEIIAEYEKQKELVPSKTLDVDKIKNFKNVLLESWEIFSLEDKADFIKMAIKSIDIEYVKLKNRHSIKINDIEFY

SEQ ID NO: 8184 - protein, 458 aa, Unknown
  Description of Unknown: Integrase B8185 sequence
  cd03768,PTHR30461:SF3,SM00857,G3DSA:1.10.10.2600,IPR036162, PS51737,G3DSA:3.40.50.1390,IPR006119,IPR038109,PF07508, SSF53041,IPR011109,PTHR30461,PS51736,Coil, PF00239
MNYERSYLRSCQVSTLEQKEHGYSIEEQERKLKSFCEINDWSVSDVFIDAGFSGAKRDRPELQRMMNDIKRFDLVLVYKLDRLTRNVRDLLDLLEVFEQNNVAFRSATEVYDTSTAMGRLFVTLVGAMAEWERETIRERVMMGKRAAIKQGMILTPPPFYYDRVDNTYIPNDYKKVVLWAYDEVLKGVSSKGIARKLNDSDIPPPNGKRWEDRTITRALRSPITRGHYTWGDVFIENSHEPIITEEMYQQIKERLEERINTKIVSHVSVFRGKFICPRCGGTLTLNTVTRKRKKGYVTYKTYYCNTCKAKKESFGFSENEALRVFRDYLSELDLDKYKVKTKQNDDVVTIDIDKIMEQRKRYHKLYAKGLMQEEELFELIKETDETIAEYEKQKELVPRKSLDIDKIKKFKNALLESWKIFSLEDKADFIKMAIKSIDIDYVKLKNRHSIEIKDIEFY

SEQ ID NO: 8185 - protein, 458 aa, Unknown
  Description of Unknown: Integrase B8186 sequence
  PTHR30461:SF3,SM00857,IPR006118,IPR036162,PF13408, PS51737,IPR025827,G3DSA:3.40.50.1390,Coil,IPR006119, IPR011109,SSF53041,PTHR30461,PS00397,PS51736, cd00338,PF00239
MSELQGKRILTYLRVSTEEQARNGESIADQRQALRKWAEQNGCVIVHEFADEGFSARKPYRSRPALCALLNAVERQEADAVVFTKLDRWFRNVRDYAKVQEVLERCGVFWMATLEDYETRTSAGRFKVNLMLSLAEHEADQTSERIKFTFQQKRARGEIISGNMPKGYLLQDGKPVKDPATAPGVAAFWAEYLASGRLSVAMDQARAAGLPMAVSTGSFMLRNAAHYAGQIQGCPCEPYITPADCDRILVTRKPTPRRSGRPYLFSGMIFCAECSGRMGAHQHFYKRKTGMDGAQVYYNCSTHYRTRPPVCPSKVNIYERDVEGYILERLEDTLERCAVEAELRQQAAKVVDEQAIAQQITRLEQKKARCLDAYLDGFLEKEAFQQRQAAIDDQLTQLRQQIAPKRQKKPEEIRAILPAQWRTTYDGLDLAGRRRFWFSVLDRVTVSAARDIRFTLAL

SEQ ID NO: 8186 - protein, 458 aa, Unknown
  Description of Unknown: Integrase B8187 sequence
  PTHR30461:SF3,SM00857,IPR036162,PF13408,IPR025827, G3DSA:3.40.50.1390,PS51737,IPR006119,IPR011109,SSF53041, PF00239,PTHR30461,PS51736,Coil,cd00338
MKKDTPVGESLPLRAALYPRVSTEEQAKYGLSIHDQQGDLEEYARAHGMRIVGVFADAGYSARKKVEYRPAMLALLEAVKRDEVDIVLVTKLDRWFRNIGEYYKVQEILEAHNVSWRTIYEDYDTSTAAGRLKINIMLAVAQDEADRTSERIKKVFDGKRARLEPLTGDKPFGYTIEGKRYVKDPETEAAVSAFFRKYMACGSVSATQDYIKSEYGIFIPYQGADKLLRSTAYYGRYFGADGMCPAYITKAQYDAIQLMRKRVMRRPAQNRVYLFSGLIFCPVCGGRMGGRKNQNVVSSHYNCSNHFCRRIPCTNNRSISEAKLERYLLSALDAKFAEYKRQTSRLSGARRKDYSSEIAALKGKLSRLKELYLNELIFLDEYKRDRAGFMAKLDELEAKQAALAAPAPSGEKIDGLLQGDWKGMYADLPKDKQQEFWRIVIKEIRLYPDRHIEFDLNL

SEQ ID NO: 8187 - protein, 458 aa, Unknown
  Description of Unknown: Integrase B8188 sequence
  PTHR30461:SF3,SM00857,IPR006118,IPR036162,PF13408, IPR025827,G3DSA:3.40.50.1390,PS51737,IPR006119,SSF53041, IPR011109,PF00239,PTHR30461,PS00397, PS51736,Coil,cd00338
MKRILRAALYIRVSTEEQAKEGESLPAQESALVEYANEHGYRIVDIYKDAGVSGTRKVEKRPEMMRLLDDVKQDKIDIVLFIKINRWFRSVSEYWRVQRILDDYGVMWNAITEDFKNETAMDKAMINFALTFSEYFAGVQGEHIRFTLERMAKNGEPISGNQPYGYMIIQGPKHKMIAKDLSTGDYIPDMYQKYIECHNIAETTRYLNAKYPDQKFAETYTTRRRICTRAYTGYHWARPDYYPPYVTQETFDEANAILKARAERQAHSKHTPPKLFSGLIICPCCGRRLATTYKKPTKGYPNGFRKYRCSMAWNRTGKCSYRHELYQWVIEKYCVEHAMSELKSFTLKAKTIDTEALKTEQEREKLEAQLERLNDMYLYGKMDFEYYKRHMDEVTDKLDRIKRGVKPADRSVDELEALHIDNFESAYAALNEENRAMFWHKLLKGITVEKTHVTGLIF
